(19) United States
(12) Patent Application Publication
(10) Pub. No.: US 2009/0215178 A1
(43) Pub. Date: Aug. 27, 2009

(54) Methods to enhance the stability and homogeneity of transgene expression in clonal cell lines

(76) Inventor: Zequn Tang, San Ramon, CA (US)

Correspondence Address: Zequn Tang, 3067 Sorrelwood Dr, San Ramon, CA, 94582, US

(21) Appl. No.: 12/035,437

(22) Filed: Feb. 22, 2008

(51) Int. Cl. C12N 15/85

(52) U.S. Cl. 435/455

(57) ABSTRACT

Strategies for increasing the productivity of recombinant protein expression in isogenic cell-lines. Development of a novel selection system for the improved stability and homogeneity of transgene expression in isogenic cells without the dependence on continuous selective drugs.

### TECHNICAL FIELD

[0001] The present invention relates generally to recombination DNA technology. In particular, the invention relates to the development of a novel selection system for the improved stability and homogeneity of transgene expression in isogenic cells.

### BACKGROUND OF THE INVENTION

[0002] Genetically engineered cell lines play a pivotal role in the production of bioactive molecules, such as antibodies, cytokines, hormones, recombinant coagulation factors, enzymes and other bioactive recombinant proteins, as well as viral like particles, etc.

[0003] Currently, the genetically engineered cell lines are usually produced by integrating transgene expression vectors into the cell genome through either chemical transfection or electroporation methods, the cells harboring the transgene expression vectors were selected by various antibiotics marker carried on the expression vector, such as neomycin, hygromycin, zeocin, puromycin, etc. The desired phenotypes were selected from multiple clones, based on the expression level, stability and growth characters, etc. The phenotypic characters of the integrated transgene expression vector usually showed remarkable variations between isogenic cell lines, ranging from homogenous high expression level to mosaic to complete silencing. More importantly, as long as cell clones with homogenous high expression level were kept under selective pressure, their expression level, growth characters could be maintained over a long period. However, these desirable phenotypes were progressively lost upon withdrawal from selective conditions. Most of the lost of the transgene expression events were attributed to epigenetic events, such as DNA methylation, histone protein modification (acetylation, phosphorylation, ubiquitination) etc. Other factors affecting the expression level of transgene might include process variables such as metabolic state of cell, change of chemical components in the culture medium, temperature, and PH, etc.

[0004] Several methods have been developed to improve the stability of transgene expression. One of the methods involved in flanking the transgene vector with insulator sequences or anti-repressor sequences, to prevent the spread of heterochromatin, allowing the expression of the transgenes in all cells. Alternatively, homologous recombination-mediated chromosome engineering methods were used to generate stably transfected isogenic cell lines, using this approach, the transgene expression vector fragments can be targeted at predetermined chromosomal loci in the genome for optimal expression and genetic stability. Some chemical substances such as HDAC inhibitors (Sodium Butyrate, trichostatin A, etc.) have also been explored to counteract the silencing effects. However, none of these approaches can ensure either the long-term stability of the expression of the introduced transgenes or the phenotypic homogeneity of the isogenic clones. Other methods include using dihydroforate reductase (DHFR) deficient cell as the cell substrate for genetic engineering transgene expression cell line, the transfected cell pools were then treated with step-wise increasing of methotrexate concentration to facilitate the DHFR-mediated gene amplification. Other methods including metabolic engineering of cell lines with desired growth characters. However, in all the methods, the expression levels of stable integrated transgenes and homogeneity of the cell clones is critically affected by withdrawal of the selective pressure. These results demonstrated the critical importance for new methods development to generate stable transgene cell clones with sustained, uniform gene expression over long generation of passages in the absence of selective marker drugs.

### DESCRIPTION OF THE FIGURES

[0005] FIG. 1 Schematic representation of Essential genes knock-down cassette. The promoter, shRNA sequences including the dsDNA and hairpin loop region, the terminator sequences (“TM”) in the cassette are shown.

[0006] FIG. 2 Schematic illustration of Supplementary expression cassette. The enhancer, promoter, 5′UTR, essential gene ORF, 3′ UTR and polyadenation signal region are shown.

[0007] FIG. 3 schematic representation of inactivation of endogenous gene by essential gene knock-down cassette, and trans complementation of essential gene from supplementary expression cassette. All three expression cassette are in a single DNA molecules.

[0008] FIG. 4 Similar to FIG. 3, schematic representation of inactivation of endogenous gene by essential gene knock-down cassette, and trans complementation of essential gene from supplementary expression cassette. The supplementary expression cassette is physically on same DNA molecules as recombinant protein expression cassettes (for bio-production), while the essential gene knock-down cassette is encoded by separate DNA molecules with distinct selection marker.

### DETAILED DESCRIPTION OF INVENTION

[0009] The present invention provides the method for generating genetically engineered cell lines with sustained homogeneity and stable transgenes expression in the presence or absence of selective marker drugs. The mechanism of selective pressure was built in the bioactive protein expression vector systems, and the selective pressure will continuously act on the cell lines without the presence of selection drugs.

[0010] The invention provides strategies that can be used to inactivate cell endogenous essential genes for cell substrate growth or survive, meanwhile provide the complimentary protein product in trans from a separate transcript unit. It composed mainly of three cassettes: Essential genes knock-down cassettes which inactivate the endogenous essential gene, Supplementary expression cassettes provide the same essential protein product in trans, and Recombinant protein expression cassette express the gene of interest (bioactive protein) product, the recombinant protein expression cassette can be, but not restricted to, physical located on the same DNA molecules as that of supplementary expression cassette, such that selective pressure will be in favor of cells with high expression form the integrated cassettes. This invention provides a novel approach and detailed method to generating stable, homogenous expression clone for recombinant protein expression.

### Essential Gene Knock-Down Cassettes

[0011] The essential gene knock-down cassettes are comprised of transcription unit/units that capable of inactivating cellular genes essential for cell substrate growth or survive. Such transcription unit usually includes a promoter, RNA transcript coding region containing the sequences capable of knock-down the expression of essential genes for the cell substrate, and might also includes a termination elements or polyadenylation signal element depending on the types of promoters used (FIG. 1).

[0012] The examples of essential genes for cell lines survive/proliferation include but not limited to: transforming genes or viruses sequences used to immortalize the cell substrate, such as adenovirus E1a/1b, SV40 large T antigen, Papillomaviruses E6 and E7, Epstein-Barr (EBNA1) virus, human telomerase reverse transcriptase (hTERT). Genes key for cell cycle regulation, such as CCNE1, CDC2, PCNA, MYC, E2F, etc. Genes responsible for dNTP synthesis and chromatin assembly, such as RRM1 RRM2 and SLBP, CHAF1A, etc; Other endogenous cellular essential genes (take human cell as example) include but not limit to: Homo sapiens AD024 (AF225416), Homo sapiens adaptor-related protein complex 1, sigma 1 (NM001283); Homo sapiens ATPase, H+ transporting, lysosomal 34 kDa, V1 subunit D (NM015994); Homo sapiens CASP8 associated protein 2 (NM012115); Homo sapiens cell division cycle 16 homologue (NM003903); Homo sapiens cell division cycle 27 homolog (NM001256); Homo sapiens cDNA FLJ77048 (AK290362); Homo sapiens chemokine-like factor super family 4 isoform 1 (AF521889); Homo sapiens claudin 1 (NM006580); Homo sapiens DEAD (Asp-Glu-Ala-Asp) box polypeptide 5 (NM004396); Homo sapiens DEAD (Asp-Glu-Ala-Asp) box polypeptide 48 (CR456750); Homo sapiens DEAH (Asp-Glu-Ala-His) box polypeptide 8 (NM004941); Homo sapiens mRNA; cDNA DKFZp564MO82 (AL080071); Homo sapiens eukaryotic translation initiation factor 3, subunit 3(CR456906); Homo sapiens EIF3S10 gene for eukaryotic translation initiation factor 3 (AL35598); Homo sapiens cDNA FLJ10290 fis (AK001152); Homo sapiens cDNA FLJ20311 fi (AK000318); Homo sapiens hypothetical LOC653140 (FLJ30851)(NM 001040710); Homo sapiens dynactin 5 (p25) (BC004191); Homo sapiens UDP-N-acetyl-alpha-D-galactosamine: polypeptide N-acetylgalactosaminyltransferase 5 (014568); Homo sapiens heme-regulated eukaryotic initiation factor 2 alpha (AF255050); Homo sapiens inositol 1,4,5-trisphosphate receptor type 1 (L38019); Homo sapiens KIAA0056 (D29954); Homo sapiens kinesin family member 11 (NM004523); Homo sapiens karyopherin (importin) beta 1 (BC036703); Homo sapiens LSM6 homolog (NM007080); Homo sapiens microfibrillar-associated protein 1 (NM005926); Homo sapiens chromosome 1 open reading frame 135 (BC000209); Homo sapiens dynactin 5 (p25) (BC004191); Homo sapiens pleckstrin homology (NM004227); Homo sapiens ribonucleotide reductase M2 polypeptide (NM001034); Homo sapiens squamous cell carcinoma antigen recognized by T cells (NM005146); Homo sapiens small nuclear ribonucleoprotein polypeptide A′ (NM003090); Homo sapiens small nuclear ribonucleoprotein polypeptides B (NM198216); Homo sapiens SNW domain containing 1 (SNW1) (NM012245); Homo sapiens valosin-containing protein (VCP) (NM007126); Homo sapiens zinc finger, DHHC-type containing 5 (NM015457); Other potential target includes nuclear pore protein (NuMA); Nuclear envelop protein (Lamin A/B/C, Nup153);

Cytoskeletal cytoplasmic proteins (actin, vinculin, etc.); Mitotic proteins (Eg5, CENP-E, cdk-1, cytoplasmic dynein); Genes crucial for cell metabolism, such as dihydrofolate reductase, glutamine synthetase, though crucial for animal development, their essential role for survival in cell culture is not certain. It is possible that depends on the cell origin and cell culture environments, different targets might be chosen for maximum efficiency.
Alternatively, combination of nonessential genes, or homologous gene families can be targeted for knocking down to achieve selective advantage for the cell clones harboring supplementary expression cassettes.

[0013] The promoters used in the cassette could be of polIII promoters' origin, such U6, H1, 7SK, EBV-encoded small RNAs (EBERs) and adenovirus VAI promoters, etc. The advantages of PolIII promoters include high activity in all cell types, small size of the entire gene knock-down cassette, lack of post-transcriptional modification (such as capping and polyA addition) and confirmed high efficacy in shRNA or dsRNA based gene knock-down. PolII promoter could also be used to driven the expression of knock-down cassette, such as CMV promoter, RSV promoter, retroviral LTR elements, etc. Poll promoter has also been successfully applied to driven the expression of shRNA transcripts.

[0014] The RNA transcript region usually contains a shRNA with various hairpin length (such as 19-29 nt) and loop structure. Alternatively, it could also be dsRNA or ribozyme RNA transcripts. The target of the shRNA could be but not limited to either 5′ or 3′ untranslated region of the essential genes as listed, providing that different 5′ and 3′ UTR sequences were used in the supplementary expression cassette. Alternatively targets of shRNAs could also be in the coding region of the endogenous essential genes, if such shRNA target sequences are abolished in the supplementary expression cassette through codon optimization, deletion or insertion in nonessential region of the coding sequences (Examples). Another potential shRNA targets are the promoter regions of endogenous essential genes, since it has been show that that shRNA could potentially induce the heterochromatinization in the target gene promoters.

[0015] Multiple essential gene knockdown cassettes could be used for the inactivation procedure, the cassettes could be tandem arranged in the same DNA plasmid (molecule) or on different DNA plasmids with different selective marker. The cassettes could target at various different regions of targeted essential gene, or alternatively it could target at different essential genes.

### Supplementary Expression Cassettes

[0016] The supplementary expression cassette usually contains a recombinant DNA molecule comprising of (1) a DNA dependent RNA polymerase promoter, (such as Rous sarcoma virus, MPSV, CMV, EF1-α, VISNA, SV40, etc.) (2) An open reading frame coding for a functional essential gene product as the targeted endogenous essential gene product. (3) The open reading frame of the supplementary essential gene contains different 5′ or 3′ UTR sequences from that of cellular endogenous counter part. Or the coding region has been optimized through mutation, deletion or insertion to abolish the target sequence for the product from essential gene knock-down cassettes (FIG. 2).

[0017] For the maximum efficiency of this system, the supplementary expression cassettes are preferably, but not limited to, physically located at the same DNA molecules (vectors) with that of recombinant protein expression cassette (gene of interest). The two ORFs could be expressed from two separate transcript units, or they could be expressed from a polycistronic transcript, such as through IRES, intron vector, split gene strategy, or expressed from a bidirectional promoter (FIG. 3). The essential gene knock-down cassettes could be physically linked to the other two cassettes or could be expressed from independent DNA molecules (FIG. 4).

### Recombinant Protein Expression Cassette

[0018] The current method provides a built in selection mechanism, independent of selection drug, for cell clones harboring recombinant protein expression cassettes. Thus, it could be applied to most of the recombinant expression systems in use today. The recombinant protein expression cassettes consist of, not limited to, polII enhancer/promoter (Rous sarcoma virus, MPSV, CMV, EF1-α, VISNA, SV40, PGK, etc.), an ORF coding for recombinant protein of various applications (antibodies, cytokines, hormones, recombinant coagulation factors, enzymes, viral proteins and other bioactive recombinant proteins, etc.), and the sequences that helps to stabilize the transcripts or enhance the translation of the transcripts.

### Method for Cell Clone Selection

[0019] The cassettes embodied by current invention can be introduced into host cells. Host cells can be of any eukaryotic cell suitable for recombinant protein production. These include, but not limit to, insect cells, vertebrate and mammalian cells.

[0020] The cassettes embodied by current invention can be introduced into host cells using methods well known in the art, including, but not limited to, microinjection, liposome-mediated transfection, electroporation, and calcium phosphate precipitation. These cassettes can be incorporated into a polynucleotide delivery vehicle, such as plasmid or a viral-based vector.

[0021] For cell substrates (such as PerC.6, HEK293, Namalwa cells, etc.) transformed by viral genes such as adenovirus E1a/1b, SV40 large T antigen, Papillomaviruses E6 and E7, Epstein-Barr (EBNA1) virus, etc. The most convenient way of generating stable clone is to use essential gene knock-down cassettes targeting at corresponding viral protein coding sequences. For continuous cell lines derived from stem like cells or obtained by in vitro transformation in cell culture (such as EB-x, MDCK, BHK21, CHO, vero, MRC, etc.), or continuous cell lines derived from tumor cells (such as Hela, Bowes Melanoma, Murine Hybridoma, nonsecreting myeloma cell, etc.), genes crucial for cell survive or cell proliferation as listed above, provide more feasible approach. These targets could be used for all types of cell substrates.

[0022] There are several potential ways to select the desired cell clones. In the simplest situation, all three cassettes are located on single DNA molecule (Vector) with proper selection marker, and the complementary gene knocking down cassette and supplementary cassette were located on separate DNA molecules. Two or more DNA molecules needed to be introduced into single cells. DNA was introduced by either electroporation or chemical transfection, the cell clones harboring the vector were selected by proper antibiotics carried on the vector. Cell clones were then selected based on the desired phenotypes.

[0023] Alternatively, DNA molecules carrying with supplementary expression cassettes and recombinant protein expression cassettes were introduced first, and selected with proper antibiotics, the clones with desired phenotypes were selected based on the expression level, stability and growth characters, etc. The resulting clones were used to introduce DNA molecules carrying essential gene knock-down cassettes with a different selective marker, and then subjective to further selection.

[0024] The efficacy of essential gene knock down cassettes have been pre-examined in various cell lines, based on mRNA, protein level analysis, cell growth characters, etc. For real-time analysis of shRNA efficacy against target sequences, report vectors have been constructed. Basically, a shRNA target sequences was inserted into the 5′UTR of reporter gene (GFP, dsRed, b-Gal, etc.), the level of reporter gene was compared with the similar vector without shRNA target sequences. The reporter constructs were transiently introduced into the selected cell clones and level of expression were examined.

### EXAMPLES

[0025] The following examples are provide with the current invention, and should not be interpreted as limiting thereof.

### Example 1

[0026] Essential gene knock-down cassette and supplementary expression cassette for AURKB gene. The gene knock-down cassette was targeted at 3′UTR of endogenous AURKB, while supplementary AURKB expression cassette use 3′UTR from SV40 PolyA

Endogenous AURKB 3′UTR: sequences:

(SEQ ID NO: 1)

tggt ccctgtcatt cactcgggtg cgtgtgtttg
tatgtctgtgtatgtatagg ggaaagaagg gatccctaac
tgttccctta tctgttttct acctcctcctttgtttaata
aaggctgaag ctttttgtac tcatgaaaaa aaaaaaaaaa aaa
shRNA sequence 1 targeting endogenous AURKB 3′UTR:
Top strand:

(SEQ ID NO: 2)

CACCG*TGTCATTCACTCGGGTGCGTGTGTTCGAAAACACACGCACCCGA
GTGAATGACA
Buttom strand:

(SEQ ID NO: 3)

AAAATGTCATTCACTCGGGTGCGTGTGTTTTCGAACACACGCACCCGAGT
GAATGACAC*
shRNA sequence 2: targeting endogenous AURKB
3′UTR:
Top strand:

(SEQ ID NO: 4)

CACCG*TCATTCACTCGGGTGCGTGTGTTTGCGAACAAACACACGCACCC
GAGTGAATGA
Buttom strand:

(SEQ ID NO: 5)

AAAATCATTCACTCGGGTGCGTGTGTTTGTTCGCAAACACACGCACCCGA
GTGAATGAC
shRNA sequence 3 targeting endogenous AURKB 3′UTR:
Top strand:

(SEQ ID NO: 6)

CACCGAAGGGATCCCTAACTGTTCCCTTACGAATAAGGGAACAGTTAGGG
ATCCCTTC-
Bottom strand:

(SEQ ID NO: 7)

AAAAGAAGGGATCCCTAACTGTTCCCTTATTCGTAAGGGAACAGTTAGGG
ATCCCTTC-
AURKB supplementary expression cassette 3′UTR
(SV40 PolyA):

(SEQ ID NO: 8)

Aacttgtttattgcagcttataatggttacaaataaagcaatagcatcac
aaatttcacaaataaagcatttttttcactgcattctagttgtggtttgt
ccaaactcatcaatgtatcttatcatgtctg

### Example 2

[0027] Essential gene knock-down cassette and supplementary expression cassette for AURKB gene. The gene knock-down cassette was targeted at ORF of endogenous AURKB, while supplementary AURKB expression cassette use codon optimized ORF to get rid of the shRNA target sequences

Endogenous AURKB shRNA targeeted sequences 1:

(SEQ ID NO: 9)

AatAGCAGTGGGACACCCGACATCTTAAcgcg
shRNA sequence 1 targeting endogenous AURKB ORF:
Top strand:

(SEQ ID NO: 10)

CACCAGCAGTGGGACACCCGACATCTTAACGAATTAAGATGTCGGGTGTC
CCACTGC-
Bottom strand:

(SEQ ID NO: 11)

AAAAGCAGTGGGACACCCGACATCTTAATTCGTTAAGATGTCGGGTGTCC
CACTGCT-
AURKB supplementary expression cassette modified
ORF:

(SEQ ID NO: 12)

AacTCCTCCGGAACGCCAGATATTCTCAcacg
Endogenous AURKB shRNA targeeted sequences 2:

(SEQ ID NO: 13)

TcccAACATCCTGCGTCTCTACAACTATTttta
shRNA sequence 2 targeting endogenous AURKB ORF:
Top strand:

(SEQ ID NO: 14)

CACCAACATCCTGCGTCTCTACAACTATTCGAAAATAGTTGTAGAGACGC
AGGATG
Bottom strand:

(SEQ ID NO: 15)

AAAACATCCTGCGTCTCTACAACTATTTTCGAATAGTTGTAGAGACGCAG
GATGTT
AURKB supplementary expression cassette modified
ORF:

(SEQ ID NO: 16)

TcctAAtATTCTAAGATTATACAATTACTtcta
shRNA targeeted Endogenous AURKB sequences:

(SEQ ID NO: 17)

GatcGCCGCCGCATTTATCTCATACTGGAatat
shRNA sequence 3 targeting endogenous AURKB ORF:
Top strand:

(SEQ ID NO: 18)

CACCGGAGGAGGATCTACTTGATTCTAGACGAATCTAGAATCAAGTAGAT
CCTCCTCC
Bottom strand:

(SEQ ID NO: 19)

AAAAGGAGGAGGATCTACTTGATTCTAGATTCGTCTAGAATCAAGTAGAT
CCTCCTCC
AURKB supplementary expression cassette modified
ORF:

(SEQ ID NO: 20)

GaccGGAGGAGGATCTACTTGATTCTAGAgtat

### Example 3

[0028] Essential gene knock-down cassette and supplementary expression cassette for Yes1 gene. The gene knock-down cassette was targeted at 3′UTR of endogenous Yes1, while supplementary expression cassette use BGH PolyA

Endogenous Yes1 shRNA targeted sequences 1:

(SEQ ID NO: 21)

CAGCCTACATTCACTTCTAAAGTCT
shRNA sequence 1 targeting endogenous Yes1 3′UTR:
Top strand:

(SEQ ID NO: 22)

CACCG*CAGCCTACATTCACTTCTAAAGTCTCGAAAGACTTTAGAAGTGA
ATGTAGGCTG
Bottom strand:

(SEQ ID NO: 23)

AAAACAGCCTACATTCACTTCTAAAGTCTTTCGAGACTTTAGAAGTGAAT
GTAGGCTGC
Endogenous Yes1 shRNA targeted sequences 2:

(SEQ ID NO: 24)

AGCCTACATTCACTTCTAAAGTCTA
shRNA sequence 1 targeting endogenous Yes1 3′UTR:
Top strand:

(SEQ ID NO: 25)

CACCAGCCTACATTCACTTCTAAAGTCTACGAATAGACTTTAGAAGTGAA
TGTAGGC
Bottom strand:

(SEQ ID NO: 26)

AAAAGCCTACATTCACTTCTAAAGTCTATTCGTAGACTTTAGAAGTGAAT
GTAGGCT
Endogenous Yes1 shRNA targeted sequences 3:

(SEQ ID NO: 27)

GCAGCATTAGTGGTTTGAGTGTCTA
shRNA sequence 1 targeting endogenous Yes1 3′UTR:
Top strand:

(SEQ ID NO: 28)

CACCGCAGCATTAGTGGTTTGAGTGTCTACGAATAGACACTCAAACCACT
AATGCTGC
Bottom strand:

(SEQ ID NO: 29)

AAAAGCAGCATTAGTGGTTTGAGTGTCTATTCGTAGACACTCAAACCACT
AATGCTGC
Yes1 supplementary expression cassette BGH PolyA:

(SEQ ID NO: 30)

Ctgtgccttctagttgccagccatctgttgtttgcccctcccccgtgcc
ttccttgaccctggaaggtgccactcccactgtcctttcctaataaaat
gaggaaattgcatcgcattgtctgagtaggtgtcattctattctggggg
gtggggtggggcaggacagcaagggggaggattgggaagacaatagcag
gcatgctggggatgcggtgggctctatgg

### Example 4

[0029] Essential gene knock-down cassette and supplementary expression cassette for Yes1 gene. The gene knock-down cassette was targeted at ORF of endogenous Yes1, while supplementary Yes1 expression cassette use codon optimized ORF to get rid of the shRNA target sequences

Endogenous yes1 shRNA targeted sequences 1:

(SEQ ID NO: 31)

CAGTTAATTTCAGCAGTCTTTCCAT
shRNA sequence 1 targeting endogenous Yes1 ORF:
Top strand:

(SEQ ID NO: 32)

CACCG*CAGTTAATTTCAGCAGTCTTTCCATCGAAATGGAAAGACTGCTG
AAATTAACTG
Bottom strand:

(SEQ ID NO: 33)

AAAACAGTTAATTTCAGCAGTCTTTCCATTTCGATGGAAAGACTGCTGAA
ATTAACTGC
Yes1 supplementary expression cassette modified
ORE:

(SEQ ID NO: 34)

CTGTAAACTTTTCCTCCTTAAGCAT
Endogenous Yes1 shRNA targeted sequences 2:
shRNA sequence 2 targeting endogenous Yes ORF:

(SEQ ID NO: 35)

GCCAAGTTCATATCCTGCTGGTTTA
Top strand:

(SEQ ID NO: 36)

CACCGCCAAGTTCATATCCTGCTGGTTTACGAATAAACCAGCAGGATATG
AACTTGGC
Bottom strand:

(SEQ ID NO: 37)

AAAAGCCAAGTTCATATCCTGCTGGTTTATTCGTAAACCAGCAGGATATG
AACTTGGC
Yes1 supplementary expression cassette modified
ORF:

(SEQ ID NO: 38)

ACCTAGCAGCTACCCAGCAGGACTT
Endogenous Yes1 shRNA targeted sequences 3:
shRNA sequence 3 targeting endogenous yes1 ORF:

(SEQ ID NO: 39)

GCTGATGGTTTATGCCACAAGTTGA
Top strand:

(SEQ ID NO: 40)

CACCGCTGATGGTTTATGCCACAAGTTGACGAATCAACTTGTGGCATAAA
CCATCAGC
Bottom strand:

(SEQ ID NO: 41)

AAAAGCTGATGGTTTATGCCACAAGTTGATTCGTCAACTTGTGGCATAAA
CCATCAGC
Yes1 supplementary expression cassette modified
ORF:

(SEQ ID NO: 42)

GCAGACGGACTGTGTCATAAACTTA

### Example 5

[0030] Essential gene knock-down cassette and supplementary expression cassette for WDR12 gene. The gene knock-down cassette was targeted at 3′UTR of endogenous WDR12, while supplementary expression cassette use BGH PolyA

Endogenous WDR12 shRNA targeted sequences 1:

(SEQ ID NO: 43)

AATGAAATTGGTAGAGAACCATGAA
shRNA sequence 1 targeting endogenous WDR12
3′UTR:
Top strand:

(SEQ ID NO: 44)

CACCAATGAAATTGGTAGAGAACCATGAACGAATTCATGGTTCTCTACCA
ATTTCA
Bottom strand:

(SEQ ID NO: 45)

AAAATGAAATTGGTAGAGAACCATGAATTCGTTCATGGTTCTCTACCAAT
TTCATT
Endogenous WDR12 shRNA targeted sequences 2:
shRNA sequence 1 targeting endogenous WDR12 3′UTR:

(SEQ ID NO: 46)

TGAAATTGGTAGAGAACCATGAAAT
Top strand:

(SEQ ID NO: 47)

CACCG*TGAAATTGGTAGAGAACCATGAAATCGAAATTTCATGGTTCTCT
ACCAATTTCA
Bottom strand:

(SEQ ID NO: 48)

AAAATGAAATTGGTAGAGAACCATGAAATTTCGATTTCATGGTTCTCTAC
CAATTTCAC
Endogenous WDR12 shRNA targeted sequences 3:
shRNA sequence 1 targeting endogenous DR12 UTR:

(SEQ ID NO: 49)

GAAATTGGTAGAGAACCATGAAATT
Top strand:

(SEQ ID NO: 50)

CACCGAAATTGGTAGAGAACCATGAAATTCGAAAATTTCATGGTTCTCTA
CCAATTTC
Bottom strand:

(SEQ ID NO: 51)

AAAAGAAATTGGTAGAGAACCATGAAATTTTCGAATTTCATGGTTCTCTA
CCAATTTC
WDR12 supplementary expression cassette BGH PolyA:

(SEQ ID NO: 52)

Ctgtgccttctagttgccagccatctgttgtttgcccctcccccgtgcct
tccttgaccctggaaggtgccactcccactgtcctttcctaataaaatga
ggaaattgcatcgcattgtctgagtaggtgtcattctattctggggggtg
gggtggggcaggacagcaagggggaggattgggaagacaatagcaggcat
gctggggatgcggtgggctctatgg

I claim:

1. A method to generate cell clones with stable transgene (Gene Of Interest) expression. The method are composed of
(a.) Inactivation of endogenous essential genes of cell substrate through Gene Inactivation Cassettes (GIC)
(b.) Trans-complementation of essential genes products through Gene Supplementary Cassettes (GSC), alternatively, the cassette codes for Gene product that capable of inactivating GIC function
(c.) The GOI expression cassettes are preferably, not necessary, physically linked to GSC to take advantage of favorable selective pressure.
(d.) Gene Inactivation Cassettes could be preferably, not necessary, physically linked to Gene Supplementary Cassettes and GOI expression cassettes

2. The composition of claim 1 (a), the endogenous essential genes of cell substrate refer to gene or combinations of genes that are essential for cell survive and/or cell proliferation.

3. The composition of claim 1 (a), the first recombinant DNA molecules (GIC) comprising a vector, said vector comprising of a promoter operably linked to RNAi (shRNA)/dsRNA/ribozyme molecule, or tandem repeats of such transcripts units, targeted to cell endogenous essential mRNA.

4. The composition of claim 3, where said promoter comprise
A. PolIII promoters include but not limited to, U6, H1, 7SK, EBV-encoded small RNAs (EBERs) and adenovirus VAI promoters, etc.
B. PolII promoter, include but not limited to, CMV promoter, RSV promoter, retroviral LTR elements, etc.
C. Poll promoter

5. The composition of claim 3, where in said shRNA/siRNA/dsRNA/ribozyme comprising nucleotide sequences sufficiently complementary to targeted cell endogenous essential mRNAs to mediate degradation of said targets.

6. The composition of claim 2, where in said targeted cell endogenous essential gene mRNA encodes various strains of viral transforming proteins or their combinations, include but not limited to, adenovirus E1a/1b, SV40 large T antigen, Papillomaviruses E6 and E7, Epstein-Barr (EBNA1) virus, etc.

7. The composition of claim 2, where in said target mRNAs encode endogenous cell essential gene or genes of various cell types from various organisms, include but not limited to, genes crucial for cell cycles/metabolism, include but not limit to FGFs, CDC2, MYC, E2F, CDC45L, PCNA, RRM1, RRM2, CHAF1A, SLBP and NPAT, etc.

8. The composition of claim 2, where in said target mRNAs encode endogenous cell essential gene or genes, include, but not limited to, sequences selected from SEQ ID NO: 1-2509 and their homologous sequences from various organisms.

9. The composition of claim 1 (b), a second recombinant DNA vector, said vector comprising of a promoter operable linked to the supplementary mRNA coding for functional essential gene products similar to inactivated endogenous counter part and elements necessary for transcript stability and translation enhancement.

10. The composition of claim 1 (b), the GSC is physically linked to, or separates from, GOI expression cassette. The supplementary essential genes and gene of interests (recombinant bioactive proteins) are expressed from two separate transcript units.

11. The composition of claim 1 (b), the GSC is physically linked to, or separates from, GOI expression cassette. The supplementary essential genes and gene of interests (recombinant bioactive proteins) are expressed from a polycistronic transcript, such as through IRES, intron vector, split gene strategy, or expressed from a bi-directional promoter.

12. The composition of claim 1(b), where said supplementary mRNA contains different 5′ or 3′ UTR sequences from that of endogenous counter part.

13. The composition of claim 1(b), where said supplementary mRNA coding region has been optimized through mutation, deletion or insertion to abolish the target sequences for GIC in claim 2.

14. The composition of claim 1(b), the said vector (GSC) is physically linked to, or separates from, GIC vector. The GSC and GIC may be transcribed from a bi-directional promoter, or GIC and GSC may be derived from a single transcription unit, or GIC may be embedded in the intron of GSC.

15. The GIC might target essential genel and GSC supplement with gene 2. The GSC is, preferably but not absolutely necessary, codes for a different (gene 2) as that of inactivated by GIC (gene 1) on the same DNA molecules (plasmid, etc.).

16. The composition of claim 1(b), the said vector (GSC) transcripts and selective marker protein are expressed from a polycistronic transcript, such as through IRES, intron vector, split gene strategy, or expressed from a bi-directional promoter.

17. The composition of claim 1(c), the said vector (GSC) said comprising of a promoter operably linked to RNAi (shRNA)/dsRNA/ribozyme molecule, or tandem repeats of such transcripts units, targeted to GIC transcripts.

18. The composition of claim 1(d), The GOI includes, but not limited to, antibodies, cytokines, hormones, recombinant coagulation factors, enzymes viral proteins and other bioactive recombinant proteins, etc.

19. The composition of claim 1, the Gene inactivation cassettes are physically linked to, or separate from, supplementary cassettes and GOI expression cassette.

20. The composition of claim 1, the Gene inactivation cassettes can target the homologous region of gene family or families.

21. The composition of claim 1, one or multiple sets of the said vectors (Gene inactivation cassette, supplementary cassette and GOI expression cassette) are introduced into same single cell substrate

The application's sequence listing, which the Patent Office published only in electronic form, follows.

SEQUENCE LISTING (2505 sequences)

SEQ ID NO: 1 - DNA, 10897 bp, Homo sapiens
agatatactgagtgagccctgagaagcagtctcagatcctgacggtgcagcagcccgcagcctcagccagggagtcccagccgctttcaatggaggagaagcccggccagccacagcctcagcaccatcacagccaccaccatccgcaccatcaccctcagcagcagcagcagcagccgcaccaccaccaccattattatttctacaaccacagccacaaccaccaccaccaccatcatcaccagcagcctcaccaatacctgcagcatggagccgagggcagccccaaggcccagccaaagccgctgaaacatgagcagaaacacaccctccagcagcaccaggaaacgccgaagaagaaaacaggctatggtgaactaaacggtaatgctggagaaagagaaatatctttaaagaacctgagttctgatgaagccaccaaccctatttccagggtcctcaatggcaaccagcaagttgtagacactagcctgaagcagactgtaaaggccaacacctttgggaaagcaggaattaaaaccaagaatttcattcagaaaaacagtatggacaaaaagaatgggaagtcttatgaaaataaatctggagagaatcagtctgtagataagtctgatactataccaattccaaatggtgtggtaacaaataattctggttatattactaatggttatatgggtaaaggagcagataatgatggtagtggatctgagagcggatatacaactcctaaaaaaaggaaagctaggcgcaatagtgccaagggttgtgaaaaccttaatatagtgcaggacaaaataatgcaacaagagaccagtgtcccaaccttaaaacagggacttgaaactttcaagcctgactatagtgaacaaaagggaaatcgagtagatggttcgaagcccatttggaagtatgaaactgggcctggaggaacaagtcgaggaaaacctgctgtgggtgatatgcttcggaaaagctcagatagtaaacctggtgtgagcagcaaaaagtttgatgatcggcccaaaggaaagcatgcttcagctgttgcctccaaagaggactcgtggaccctatttaaaccacccccagtttttccagtggacaatagcagtgctaaaatagttcctaaaataagttatgcaagcaaagttaaggaaaacctcaacaaaactatacagaactcttctgtgtcaccaacttcatcttcatcatcttcatcatctaccggggaaactcagacccaatcatcaagtcgcttatcccaggtccctatgtcagcgctgaaatctgttacttctgccaacttttctaatgggcctgttttagcagggactgatggaaatgtttatcctccagggggtcagccactgctaactactgctgctaatactctaacacccatctcttctgggacagattcagttctccaggacatgagtctaacttcagcagctgttgaacaaattaagactagcctttttatctatccttcaaatatgcaaactatgctgttgagcacagcacaagtggatctgccctctcagacagatcagcaaaacctgggggatatcttccagaatcagtggggtttatcatttataaatgagcccagtgctggccctgagactgttactgggaagtcatcagagcataaagtgatggaggtgacatttcaaggagaatatcctgctactttggtttcacagggtgctgaaataattccctcaggaactgagcatcctgtgtttcccaaggcttacgagctggagaaacggactagtcctcaagttctgggtagcattctaaaatctgggactactagtgagagtggagccttatccttggaacccagtcatataggtgacctgcagaaagcagacaccagtagtcaaggtgctttagtgtttctctcaaaggactacgagatagaaagtcaaaatcctctggcctctcctacgaacactttgttaggctctgccaaagaacagagataccagagaggcctagaaaggaatgatagctggggttcttttgacctgagggctgctattgtatatcacactaaagaaatggaatctatttggaatttgcagaagcaagatcccaaaaggataatcacttacaatgaagccatggatagtccagatcaatgaaggaccagactgcctattcgtaacctttctgcagcattagagccatcgttcatgggggacacaaggcttttatgctcctagatcttcaacgcagcagaggaaccataagtagaatcacaggataatatatacaaatatatatatatacatatatatatatatagttatttaaaaaaggcaactgaaagtaattagacttcttaaggaatcaaatttatttcaagagactacacatggttatttaatctccggtactgaataggttttttttcttctgttagtttttgtttttaagtgtgaatgcaagtgattaatgaatacagacttaacaagtgtggttctaaagttcctgctgtcatcaacttgggcaacaaatgacccactggaaaggcaaatccacttaaaagatctctgtatcttgttctgtgactgaagtgatacactaatcacggggaacccagaatgattcaacattttccccccactcctcccttgatctttttggttttactttaattaagccctgcgagaatgctggataaatgccttgaagttagcagggtgtatttttttagcgaatatgatttgcatgtcttgccaggagttaagcggcctctggggtgttggggaaatactttatttctttccatttattttttgtggggcggggataggggagggcattgaagttctacaattctggaatagttagttgatggtacatagttaacttggcttcggttacatattggactttaacaactgaagaatctatgcgtgtcatttaaagaaaagttgcagaacaagcaattggcttagatatacaatctggaaaaatattcctgtgcccatattttaatgtaattgtataactgggagcaaaaatatattctgcttttcaactgtaggtgctccagacttgctctccgtcactaacactaaatgtgctgttttccttgtttttcatcaaacatttaagacaaacttagacctttctgtaaattatcttttaatttctcagcaaaatctaaaaggggaagaaaaaagtccatgaaaactaaaacttttcatgtttttagccagtgagaagataataaaccctgactgtagaaggtgtgttttcatgcaaactatacttctgagcttgttagcttctaattatatcttaataaatatattttattactagagcaagatgggtttttaaggaaaataatgtgaaattctggaaattttctttggggcagagaagagcattagccctgtcttatcattacattgccatcctgttgcactgcagcttgtgtatagcatgctaaaataaatttttgtgtgtgtgtgcagaaattaagggtccaattgagattgggtgatgttagtaacataataacaagttgtctggcctgacacagcatcacatcacacacacagaaattagtatatccatgtatgtcaaatacaggttaaaatatcagggcatttatataaagagttgtagtcttctgataaaagtagactggatcccctggggtatttggggagaaagtaactactttggctctacccctagaaatgtccagttttgagtgactgtagtatggatgggttttcttgttttgttgattatttgaggcttttaaaacaagtagttcatgaaagaagctgttggactcaacatagagtagagtaactatctttttagtctggatttctgccctgcttagattttaaaagtataagcatggattgccaattccacttgatgtaaacaaaacttttttttatacataatatatatatatatatataaaataacttattgtatcagtccaggttcagaaacttgtggtaggccagttccagatagtttcatttcacctgtaaactgtatcactttgactgatattgtaattttcaaatgtataatatgtttacagatgtgccctgcatttagtctgccttgttcctattttgatttttgttgagtctcctgcctgcttgccaaaagctaggatgcttcaggcccatgtacaattgaaagcagaggcatccttgagctttaaagcattgaacaaactggaaaatgcaacataccacataactgaagtgaaaaaagtctgtgtttttgtgtttttttaaataaaaattttcaaaaagttaaaaaaaaagacatataaggttgattaaagggaaaaaaggctccagtttgttttacaggttttaaagttctgctgtgtgttcaattgccttgtgtaaccacttgtcgccttagggccagattcccctctctagtccccttttttaaatgtccattttgcttgcctggaattttaaagttcttccgtctcacaactcacaagaaactttctgggtttgtgacatacagaggttgaattgagtatatatttgaaaaggaaaaaacaaaaaacaaacccagaccccacctgaattgggctttttaacttagaagcaacacttgattaaacatctttagaaagctattgcttttctaatttccttccatatccctcaggcctcagtgttcagagaagccaaaaagaatgtatcacttctctgtctgtccaaaggtttttgagagtctcacttctaaatgaaacaatgcaacatttcactttgatttctccactgaaatttccttgattatatggttagaggtatgtagttaggaatgtctgttaactttctgagaaccctagtgccccatcatattaactgtcagtattttgggggcattaggttaatagacttaattgcctaggtacaagcaggactttgggacaaatctctttgtgctgtttggtaacacttaactctatttgttgcaatctttctccttaggtcctcacacaattccttacagagcacttattaaaaaaaaatcttaagagttgatctgttttctgattattttgtgtaagcttctaaacaaacttcagctgtgattaatttagcacatttaaataacgtgttattgtttggtataaagaattttccttcaactcagagtattagtactgtagcataaaccaaatacagtctagaggggatttttaacatccctccattataaagactgaaaaaggggtgtgtgtgtgtgtgtgtgtttatgtatgtatgtatgtgtgtgtgaggaaaagatggagatattaaaaattagtaaatgaatgtgtataagacattagtattcagagaatgaacttgtatttattttgtgccatttgttttcattacacagaaaaaagtcaggtggtttaaatccttaaaagggtagtattgaaaaatggcactaagaatgaaattatgacctatttttttaatagctatgaagatactaattatgggtgaagatttctttttaaatctgttttgattattgtaggcttctgtgtcacataccactcttgtaggtgtcctcaataatccccttttcccacaaaatacacagggtgtattatctttctctttattcacccccactttgctgaactgaagttaattacatagcctttcttctaacctccttagtaatgaaccttcacataaagtgtatttacagcgtctgtggtagccagcccttcctcctctactttctaggaggggatagccaataactaggaatttaatgacagatttttttttctttgaaataaatggccagagtttctccattttagaattttgttgtcctccttaatcatctgcttacctagtcattactcaatctgcagaaacttcataaaggaaaagtgctgcattgtttttacaaataacagtttgtagggaaaatatgacaaacctcaactatgggagttgtccacaatacaaaattttgaaaaaacattacatagtgataatatcatacttggttgttaggcttgttgcttccccacatcagaggcatctaatgatttatcttttgtaattgctgtgaacttttttaaataagccatttagtgtgaaattgtcatgtatcaaatggctattggaaatggactttactcaattttaattccactgtaaataaggacggagtcattcctacaaggctctcttcagagaaatagattaaaagtccaatttccaggtattattagtatagttatgccgctgggccacatcctcaacaacagctgatccctcttgtataaatatgttaactgtgcagaacagttatgttatgggacaaatataatggtcattatggtcagattggttgatgccacaccagtcaaggtagagtctgatagggcagtatcttaataaccctacccatgacttaactgttggatttgaaaggaaaacgtaggatttgctcttgtccccttacccgccacaaaattttgataatttgtttaaaagggagaggcagaggaaaagactagaagcataaatagctgctttaggtttgccagaggcacatagcttaacattagttcttaatatcgatgttatttttactaatgtaattaatcaacagagcaccaagattctttcatggtgaaaagggtgggcttctgttttggtatcttaaaatgtttcttttaaaatatacatcacctgtgtgagaaccaggaccacctgggagagtgatgaatcattggctccactcaaaagcattgctttactgagttttaaatttcacactgttttgccgctcaagaaaggtcttaaagtagttaaaggatgccagcaatagtgcgaatagaattttcggttgtctgcataataaaaacacccattgcagcatgattggtatgttgctcttgcattattgggaatggtaaatcagttatgggctagaaactatggaatggccgtcctcatatgtgatgggattgctgattcagacttccctattttccatacaattttgttatgtgcagagttctaaagccattttataatactgcagtatcccccccccccccacctttttttttttgagacggactgtctgttgcccaggctggagtacagtggcgcaatcttggctcactgcaacctccacctccctggttcaagcaattcccctgcctcagcctcccatgtagctgggattacgggcgcacaccaccacacctggctaatttgtattcttagtagagacggggtttcaccatgttgaccagactggtctcgaactcctgacctcaggcaatctgcccgcctcagcctcccaaagtgctggaattacaggtgtgagccaccgtgcccggccaagtatctcttttctacagccttattaaactaactacaaacatttattttccaatttagttttactttcagtgcatatcaaagttgttgtactcttcagaccaacaaattaacttgagggcaaattacatagctttccatgtacccttttttcctcaggtgctaatcaaaggctctgaaaatggatactgctttagtgatgtctgctttattcttaaaatgcttatttcttttgctagatgtaaagatttggtgttaacaaaagtggttttaatatgtaaatatgaatgaatgcctttagtttaccctgtttgtctattattaatctgttttcatttatccttcatagaggaggatcctttcatgatcttgaatacatttcattagatattgttgcattttaagaatgaaaatacaactgttttctgtcttagattaatcctgctgctatgagaaactgaaaatcaagaatgtgatgcactttttacattactatataccatacatataccataggttgctttgatacctttcctgtagcacagccactaacaagagtgaatgaattataaaattctttttgggagggaatcaatacaagtaactaattcttagctgatattgtcctatgaaggacaataacttaggaatataagaattctgttaatagtacactttttggccttaaatgtcttctactactgaaaatagtttaaatcttagctttgtttctattattccctctctctgcctcagaaagaggaattgggaagaatggcttaaaggacgtggtgtcattgatttgttgctgatcttttagaaaacatttgtctatgtaagctggggacttattttttgtttgtatatagaggggaaatagtgctgccctgaaccaatcagatttagtttaaatcaaatcaatcaaaactccagctgtttctcttgtctttttacttagcaaaggaaaactttagtgaatgctacttgacaagaagaaaagtcatttctcaagcacatacccaaacttgaaggtgattgaacccaaaataatgggtgggaaacaccaaatgaggtggaggaatgagaaagatgtgtgggccaaagctatctggttatattttgatgttgccaatatcgcaaagccaaaattttaatttgcttatttaatatatttgttggccagagatctatttttatatcaatgtgccttgcatgtatattaaaaaaaaaaaattggaaacgccatgtagtaatgcctgagatagtcgatggttcttaccacctcactaatttttatgcagtatgaaatgctcattctattgcccaactggtgctctctgtttaaagttacagatcttgcgaaactggaactattttataagctggggaagtgatttactttttttgttgtatcttttttgttcttagtctgttagtggctgtcctgtagtgggaaatagtaaaaggattcttcactcccttctcccctcagcaccttcttcaagtaaacatttcttgtgtgctttgaaaaaagtttcagcttgctgtctcttttagtgttttaaagaagtgttatacaaagcattgtttgcaaaatatagggagataatggagtccactttaatttggaattctgtgtgagctatgatccaagttatcagctctttccaactttaaaaattttgttaaaagcaccttgcttagaaaattttaaatatttatgtctgcaacaattgtctcaaaataataaactgtgcaattcttgtcattaaaaaaaaaaaagatctgaattttccctaatgtgacttgttagtttctctctgtatttcctgccagtgtaaatgtgaaagctttgcttgcattacgttttagaaatgcattttgcacactcgaattttgccgaagctccgtgaaaaggttagatctaagtagatgaataaagctatgcacatgttttgaaagtttaatttgtgtgtcattaccaaaagtgaccgatttgtccttactactttgctgttgttagctttaccatctttggaaacttggctcaaagttacatagttctgggctagctcatcagtggaactaggagagaggaaaactggcacctattttaataaagttcaatttaaacgagagcttgacttgtatctattaaagagcttttcttgaaacagggcagttttatcagctttacaaatcattggatgctcttccttagtaatattttggtttatttgatcaaatagaaatggaaagtaattcaaactgaaagacccttttttgtcatatggaacttggtgacgattttttgtcttaaagctggtttaaaggtaggataggcttttacctttattgctttagcataaatttggtttactgaattgactggcttgagattagaattattcagttgtttgtaagatcaaagcactggttgttttaaagataacgtgtatcttttaaaaaattgcccaagctgattagaacaagtttaggagttgggtacatttggttcaagtgctgcaatctgtatgtactaaatagctttactttgtgtatgtgtacttataatgtgtagatgtactactacccaggttttgtcaaatcatcttttttaaagtttttttttttttaattggttcaggacctttgtaggagaggctaatatgtttaagtagaagatattactgatagcattttccccatgctcctacataaaaaataaatatttccattttatagctttttcaatatacagaagagggttacttcttcatcaagtatattgttgcctttgaggacacagcaaaacccttctatatgtatcttcattgatagtggcagttaaaaactaagttatccagttaagacttaaaaggtgacccatattaattgcatggccttaaaaggcagaaatgcaggagtgtagcaagcatcattttagatggctatggttcctcttccgcatctgtcagtagttcacttatgttcagtcttagaacctactggaggagtgaagtaatttctctgtctcgtgcagaggcactaaggagctgagttacctcttaatctgggggaatggataataagtggagtacagttatgttaaaggatgttccccccgctcaaaaaaaagtttcaatgtttgttttgcccagtcaaaaatataggtcttttctacatataagaacagtcaccagaaattttcccttttgctaaatgcttaggtatttgctatagctgtttctgatgtcatggattctgaggaagtgtcatttacgtgatgatcttcctttattgatgtcttcatcatgttcagtgttttaaaaatataaattacaaacactctacaaccatacccagatttacttattttatcagaaaaaaaacttgagaaatttgtagatcaaattgagagacaataagtgtacattgttgaataaaaaattttaaagtttctgaaaaaaaaaaaaaaaaaa

SEQ ID NO: 2 - DNA, 9167 bp, Homo sapiens
atgtttgaagagtacccgggtttggtagagtgacttctattcactaaaaccatgtgtctgaactgaagaagcttgggctcacttccacaaatgtagccttgtcagatgatatgcaaatgattcacatcagtgtttgaagttcaaaccaaggaaaactatcagaaaaggcttctgctttctttaaaaaataaaactacttgaaaagaaaaaaatcaagaattagaaagaagagtataacaataaagaaggaggggtcacaggtgaacgagatgtggtcaacacacacaaaggagaacaaaaagtggaaaaatgctaatcactgaaagaaaacattttcggtcaggaagaattgcacaaagtatgtctgaagcaaatttgattgacatggaagctggaaaactctcaaaaagttgcaatattacagaatgccaggacccagacttgcttcacaattggccggatgctttcacccttcgtggtaataatgcttccaaagttgcaaatccattctggaatcaactgtctgcttctaacccatttttggatgacataactcaactaagaaataacaggaagagaaataatatttccatcttaaaggaagatccttttcttttctgtagagaaatagaaaatggaaattcttttgattcctccggtgatgaacttgatgtgcatcagttacttaggcagacttcctcaagaaattctggaagatctaaaagtgtttcagaacttctggacattttagacgacacagcacatgcccatcagagtatacataactctgaccagatcctactacacgacttagagtggcttaaaaatgatcgggaggcttataaaatggcttggttaagtcaacgccagctggcccgctcctgccttgatttgaatacaattagtcagagccctggatgggcccagacacaacttgcggaggtcaccatagcttgcaaagtaaaccatcaaggagggtcagtacaattacctgaatcagacatcactgttcatgtgccccaaggtcatgtggctgtgggagaattccaagaggtgtctctaagggctttccttgatccgccacacatgcttaaccatgatctttcgtgcactgtgagcccgttgttggaaatcatgttaggcaacctcaatacaatggaagcccttttgctggagatgaaaattggggctgaagtaagaaaggatcctttcagccaagtcatgacagaaatggtgtgtttacacagcttgggtaaagaaggcccttttaaagttttaagcaactgctacatttataaagacaccatccaagtcaagctaatcgacttgagtcaggtaatgtatctagtggttgctgcacaagctaaagctcttccgtcaccagctgccaccatttgggattatatccacaaaaccacctcaattggaatttatggacccaaatatatccatcccagttttactgttgttttaacagtttgtggacacaattatatgccaggacagcttacaatttctgatattaagaagggtggaaaaaacatatctccagttgtgtttcagctctgggggaagcagtcatttttacttgacaagccacaagatttaagtatttctattttttcctgtgatcctgattttgaagtaaagacagaaggagaaaggaaagaaattaaacaaaagcagttggaagcaggtgaagtagttcatcaacaatttttattttctttagttgagcacagagagatgcacttgtttgatttttgtgttcaagtggagcctcccaatggtgaaccagttgcacagttctctatcactactcctgatccaaccccaaacctaaaaagactctcgaatctgccaggctatttgcagaagaaggaggaaatcaagtctgctcctttatcaccaaaaattcttgttaaatatcctacatttcaagataaaacattgaactttagcaactatggggtaaccctgaaggcagtgctaagacaaagcaagattgattacttccttgaatatttcaaaggggacacaatagctctcctcggggaaggtaaggtaaaagctattggtcagtccaaagtgaaagaatggtatgtaggagtcctcagaggtaagattggacttgtacactgcaaaaatgtcaaggtgatttcaaaggagcaagtaatgtttatgtcagatagtgtctttacaaccagaaatcttcttgaacagattgtcctgcctttaaaaaaattgacttatatctactcagttgtattaaccttggtgtcagaaaaagtttatgattggaaagttttagctgatgtcctgggttactcacatctgtccctggaagattttgatcaaattcaagcagacaaagaatcagagaaagtttcttatgttataaagaagttaaaggaagattgccacacagagagaaatacaaggaagtttctgtatgaacttattgtggctcttctgaaaatggattgccaagagttagtcgcacgtctcatccaagaagctgctgttctgacttcagctgtcaagcttggaaaaggctggagggaactagctgaaaagttagtacgactcacaaagcaacaaatggaggcatatgaaattcctcatcgaggaaacactggagatgttgctgttgagatgatgtggaaacctgcctatgattttctgtatacctggagtgctcactatggaaataactacagagatgtgttacaagaccttcagtcagctttggacagaatgaaaaaccctgtgactaaacactggagagaattaactggagttttaatactagtaaattctttggaggttttgagagtaactgcattctccacttctgaggaagtatagaaacaaagcgtgtgtttttgatgggagggaaaatgaggtaatggtgtgtgtgtgtgtgtgtctgtgtgtgtctgtgtgtgtctctgtgtgtctgtgtgtgtgtgtctgtgtgtgtgtgtctgtgtgtgtgtgtgtgtgtgtgtaggaaagaaagaatctcagaaaagcattatattaattttcttcatgctcaaaaccagtttttttttcctgatgaaagcacagcctaactgataaccaagatgggttttatcctcaaatatgtatttttgtgtatgtttcaaatacaagtattaggctgctttgttcttagaaaggaaagaaaaaagaaaagtgccctctctctctttcagtgttattttaaatttactaagtcaaagctgtttgaataattacatcacacagatatctgggtaaactagagactatcaacatgatcaaggcagtgttcccaggaggcagctagaaagaggggaagcaagcacacaccctgtggccagtcacggctgcccgctttccacacctgacctcttcagttcatcagtggggttcaccagcatcacccccatttttcatggggagaaactcagaagtggagagaacgtctgaggctacatagccagtacaaagtaggttttctgcttgaaaaacctgtttctatttctttttaaaaaatcatactgcataacagaatagtaaaaacaaaatgcgtgttaagacttacagggaaacagttgccgtttcattttaagtgagacttgctactctttttcatcgtctcttgaaagactgacagaaggaaaatatgacttatcagaaatctgttgtctgcatgcatggacctagtgttttcatcagctcccttcagcatcttgggacctctctaatcctgcctaatttgggactttttctgcaggattgtaatgtaaaatagttctttagctcttggagatttttaataatacgagttattaaaaaccaccaccaccagaaacttgattaacttgattaccctgttgagtagagaggtcttaaccaccgaaaacactgatatctttatgttggcatgctcatgcaaacacatgtgtgtgtgtgtgtgtgtgtgtgtgtgtgtgtgtgtaccacagtgttttataaagcacagcctaattgattatataggacaaaaattgtataggaccctgggtcagtataaatgctaatggctgacaaagttcacaaagagatgtattttgcttactcctctgttcaatcctctggttgcctgccagtgtttatgtgtgtatttggacagacattcatttattgtcattcagtcaataggtagagtatatgtgtctattttttggcaggcatatagatgcttgaggctaatgggaaaaaaccagcatgaactctgactttagtagtgctaagtaatagataattttaaaaaatgacaccgttaaatagaaaatggcatgcatactaacagttgcaatggagaggctgtgatgctacgagatataaacgtagagatgccatcatgtgaaactggaagtgggggtgggtcagggaaatttgttcttggaaagaaataatgaacctcaaggaagagtaggcattgtcctggtgtggtggggtgtaagcggtgatcccacaaagcactgaagctcttagatgggtgggagctgaataggtgcagatagcaggggtgaaggagtgaaaggataaaagattcaaggttgagatgaggatggagcaagaagaagccacattagggccattaaggctgctagaatttagaaagaaaacacacagcctcaaagaaatgtgggtaagccaaagaaggattttgttttgggaacctgaataaaagatgtccatttggctaaaaagtaaaagcagaatctttttagggcttttaatatacccaccctgggatatttggtatgctggcaatggtaattcaaattggcgtttaagaataatcttggccgggcgcgatggctcatgcctgaaatcccagcactttgggaggccgaggcgggcagatcactaggtcaggagatcgagaccatcctggctaacgcggtgaaaccccgtctctactaaaaatacaaaaaattagccgggcgtggtggcaggcgcctgtagtcccagctactcaggaggctgaggcaggagaatggcgtgaacccgggaggcggagcttgcagtgagccgagttcatgccactgcactccagcctgggtgacaggctgtctcaaaaaaaaaaaaaggaataatctgtacggctttcagtatttatatttgattataagggaacacagcctgaccaaataattatgtatacacattcaaggacagaatttattttaattaaaaataaattatgagagaaggaaaaaaaagcacagtttttactttcagaacacagtccttttttgtggtgattttgctttctttagaacattcttggaatcttattaacatgtcagctaaccagagaattttgggaagggatagtggggattaataactgggtttttccaggctccaagatctaagaagacagagatcttgttagctgattagtgtagtaagattaaataaataatttaaggtttacattgcatcatgtattatgattgtgattgagaataataagagtttaaaaaaatgaaaaacaagatctctgtaatttgaggatgaaacaatggttctaatattaatacacacaaatatattttataatcttgtaacaaatccttccaggggaaattttttttttttttttttttttttttttttgagccagagtctggctctgttgcccagactggagtgcggtgtttcaatcttgactcactgcaacctccacctcctgggttcaaaagatccttctgcctccgcctcccaagtagctgggattacaggcatgcaccaccttgtccgggtaatttttgtatttttagtggagacaaggttttaccattttggccagactggtctggaactcctgacctcaggtcatccacctgcctcggcctcccagagtgctaggattacaggcatgagccactgctcccagccttccagaggaattttaagcccatgtccaaacattctgtttgtataaatatattctaatttttaaataaatagtttctacttttctgaactttatattttttcttgctataatggattttcataatcagaaaagattaaattagtaatcatgaattgccttcaatatttggcagtaagtcaatgaaataataaggcacttatataccatctttgacatcattaaaagtatcaaatcccattaatctaaaacttctttaagcattttgaaagcagaaaatgtttacatggttctttcagttcctcaggctttttgtctaatgatgcgtgacttaggataagatttgaattaagtgcccagcttgaaacataataatttttctgtataagccacagatcctctacctcctttgtgttaaagcctttatatgaaacaattaagtagaagcattcaatagtgtgtcattaactgttcatactaataaatggatacagcacattttcatggcctgtaatgtagaacatactatataaagttctcagtttggggatgactaggtttctggaaggaatagaatgctaaatcaatggatggcattgggctgagaaacactgctgctactaatcagccttgaatgtgtaatgtgaacatgcaaaagagaacatgcatacactcaaatttgtacaatgctataactggaagttgaaggacttgaatttttatattgtgctattgttatgttttctgtaattgtttatatctaaggaatttttgaggtaatataaaagaaaaagagaataatgaacaatgatgtcactggagggtttttacattaaattagatcatttttcttcttattcacaataataatcttaatctttaagaattaattataatttaatattataattcataatctttaagaattaataattataatttaatattataattaataatctttaagaattaataatataatttaatattataattaataatctttaagaattaataattacaattaataattaataataatcttaatctttaagaattaataataatccttaatcgcaataataatcgcaaggaggagaagtaagtccctcctccttctgtatgaacttttctcccacatgctgctgtatggtttagtgagagtgaagttctaaagaacatcaatatgattggtgggataatccaaagacattttttcagaatcaaatggcatgtcgaaggtttgtttcttgcatatgtatttactggtccacagcacaaaataaagtgaccacatatacataggaaagttgaatttgtacacatacagcatctgaaatgtatctgatgttcagcatcaagatttcactgaacattgtagaaatgtgtatcttttgcatgtatattttacattgattttctatttatgtacatctagaaagttttaaccctaataaatagttttgtaattttgaataatagtgtcagtttatatgtgagggagtagagacagagaggttagcactggataataattagtaaggccaaaggagaaaatttcatagaaaatattgttgttgtcataatgagtacagcatgaaaggcttcctctacaagacactagtcaaagagttgagagctgcggtttctaatctttgtccattactcccttactccctatgagactgtggacctgtcacttggcctctctggtcttcagttttctcaccagtaaaacaaggaacttgaaccaaatgacctctagtgttccccttgggtttaaatgtctataaatgttcaatgactagaatgtattgcgtttttctttattctttttgctttgagaaaagagaatgtgatttaagagtaataatttgaataccaattatccacattaaaattgtgtcctctatgtgtaaggcatagcacatttagcacacatacataagcacactaagcaccttacaaatatcctcatttattctttacataatcttttgaaattgattatgtaatacacactgtttttgaacaattggtgacttccagctgtttaaaacaaactacagtatggtgcttgagtactgacttaggaggtcagcattggtttcactaggagcttctcaaagcacgctgccaaacatgctccagtctcattgtcaaggccttagaccaggcaatcattacggcagtggttcttcaacttcagcagcagcaaaacgatctggcgggggcttggtgaaacagactgctgggctcgaccaccagaatttctcattcagagggtctggcctgatcacttgcatttctaatcacttcccaggtgatgcagatgtttctggtccagggaccccagtttgagaaccactgtattaaaatttccttcatctctatagaaatggaaagattttttataagtcctctaatttgctttaagataaatgagatttcacttaattctgttggagaaattgttttaaaaattgtgctaaagaaccgaaaatcactttatgttaaggctctatttatagcaagtgaacttttcatgagttaataaaggcctacaaaaataattttgactgtgaaactaattaaaatctctgtgtttcatttaaagcataaacatatttgaataaaaataggttaacaataatttgggacatgtattcagtataattttaagataattttacaaaatatatgtaacattgcatttgtttctgtaaaatatcttcggaaaaagccttgttttccctagtgtgttatttgttgaatttcttgttaaatgtattttttcccattgaaaaaaatgtttttaatcaatgtgatcaatacagctatctatatgccctgctttcactgtagaattagaaagtgttaataaggtgatcggatgttctttctaaggatcatattccacatttaaagagatggtgactgagaagaggtggcaagctgaaccatctcactttgagattgacgtatcacgttttatcctctgccatcatttccttgttaattgtttttctttgggtgattggaagaatctatggcttccttttctctgttcttaaagatatcaagactctgcccttttgtgactggaagtagattttaaatgtccctaatgtttatatgctcacttaaactcaatacatggaatttactggggcatttaacttgttcatgaaaatagagtgagtcattgaaaaatcaaaaaaaaaaa

SEQ ID NO: 3 - DNA, 3935 bp, Homo sapiens
ccccgcccgtagaaaagatggctgctgtgcaagttgtcggttcgtggccttccgtgcagccgcgggaggcaccgcgggaagcaatccctgagcgaggcaatgggtttcgcctcttgtctgccaggctctgcgccctgcgcccggatgacagcagctccgcccgcaccgagatccacctgctcttcgatcagctcatctccgagaactacagcgagggcagtggcgtggccccggaggacgttagtgctcttcttgtccaggcttgccgactggtacctcttaatcagaatcatcttgtcagcaaagtgagccagcttatccaccatttacttaacagattacaggtaattgttgatgaacagcacttggatttcctgttggcatatactatttcggctattcatcagtgtagttcctggacacacagggaaattcttcaagccctggcagctctggtgtactgcaatggctccaaatgtcaaaagtacctcccagagctgctaggcaacaccggactcttaatgaagttgagtgacttggctcagtctgatcctgaagtcaggagagctgcagtacattgtatggcaaacttatgtctcagtgtgccaggacagccgtatttggaggagccctaccaaaatgtctgtttccaagcttttctgactattttacagtctccaaaatcatctgatatggatgatatcacattttgcatgttattgcaaaatgcattaaaaggtatacagtcacttctaaatggtgggagaatgaaactaacacagactgatgaacttggagcacttttagctgtgctaaagaaattcatgtttcacggactccctggactaaacatagagatgcccacggtgttatacccaactccgcttcctcagtatgatgggcgaacacctatcaaaccacagcaatcagaatccagtgcttctcgaccaactttgaataaaaagaaaaaatccaaagtaaaaccaaagaaaatccagcaaggagaggaggaggaaaaggaatccagtggtgaaatagaggcagccccagtcactggcacaggcagagtgaacctgcatgaagggaacacttggtgtccctcctccctgggtgtccagagtttgcctttagatggaagtggagctgcagaaaaagatggagtctcctcatccttcagttcttccagttggaaaagggtcagcagtagtgagtcagacttttctgatgctgaaggaggcatgcagagtaaaatgaggtcttaccaagctaaagttcgccaaggagccttagtttgttttctttctactataaaatcgatagaaaaaaaagttctttatggctactggtcagcttttattcctgatacgcctgaacttggcagcccacagtcagtgtccttgatgactcttacattgaaagacccttctccaaagacacgtgcctgtgctctgcaagttttatctgccatcttggaaggctcaaagcagtttctttctgttgctgaagataccagtgaccacagaagggcttttacccccttctccgtaatgatcgcttgcagcattagagagttgcacagatgtcttttgttagctttggtggcggagtcatcctcacagaccgttactcagataattaagtgccttgcaaatttagtatcaaatgcaccttatgatcgtctaaaactcagcctgctgaccaaagtctggaaccagataaagccttatattcgccacaaagatgttaatgttcgtgtgtcaagtctcacactcttgggagctatagtgtccacccacgcacctttacctgaagtccaactacttctgcaacagccatgttcttctggactcggtaatagcaattcagcaacccctcacctcagccctcctgattggtggaagaaagcccctgcaggaccctctctggaagaaacgtcagttagctcacctaaggggtcttcagagccctgctggctcattcgactctgcatttccattgtcgtactgcccaaggaggattcctgttcaggtagcgatgctggctctgcagcaggaagcacctacgaaccatcccccatgcgactggaggccttacaggtattgactcttctggcaaggggctacttttcaatgactcaagcctacttgatggagcttggagaggtgatttgcaagtgcatgggggaagcagatccatccattcagcttcatggagcaaagcttctggaagaactgggcacaggcttaatacagcagtataaaccagactccactgcagcacctgatcagagagcaccagtcttcttggtggtgatgttctggactatgatgctgaacggtcctttacccagagccctgcagaattcagaacacccaactctccaggcgagcgcctgtgatgccctgtcttccatcttgccagaggccttcagcaatctgccgaatgacaggcagatgctgtgcatcacagtgctgctcgggctgaatgacagcaagaatcgcttagtgaaagctgcaacttcacgggccctgggagtctatgtgctttttccctgtctcagacaggatgtcatatttgttgcagacgcagcaaatgcaatattgatgtcacttgaagacaagtctctgaatgttcgagccaaagcagcctggtccctgggcaacctgacagacactctgattgtcaacatggaaacaccagacccaagtttccaggaagagttctctggtctcctgctcttgaaaatgttacgatcagctatagaagcatccaaggataaagacaaggtaaaaagcaatgcagtccgggcccttggaaatttgcttcattttctgcaaccctctcatatagaaaaacccacatttgcagaaatcattgaggagtctatccaggccctaatttctactgttctaacagaagctgccatgaaagtccgatggaatgcttgttatgcaatgggaaatgtatttaaaaatcctgcccttcctttagggacagccccatggacctcccaggcctacaatgccctgacatcggtcgtgacatcatgcaagaacttcaaagtgcgcatcagatctgcagctgccctttccgtcccggggaagagagagcagtacgggtctgttgaccagtatgctcggatctggaatgcattggtcaccgctttacagaagagtgaagacaccatagactttttggaattcaagtactgtgtcagcctacggacccaaatctgccaggcactgattcacctcttgagcttggccagtgcctcggacctcccttgtatgaaagaaacccttgaactgagtgggaatatggtccagtcctatattctacagtttttaaaatcaggagcagagggagatgacactggagcaccccacagcccacaggaaagagaccagatggtcagaatggcccttaaacacatgggcagcatccaggcaccaactggagacacagccagaagggccatcatgggctttttagaagagatcctggccgtttgttttgactcatctggatcacaaggggcactcccagggttaacaaatcagtgaagatcccaccatactttctagatgtcgaaggcggcagtaggaagacctgagcttgagcataagatctgtgggatttcatcttaggggcagaaacaatccgttcactatttatttagaatgacttagcagccatttaaattttcacagagggctcaaccacctttggagtgactccatagcactggccatggtcagggttgttggaacatctgacctgtgcatccaggagccgaggagtcaggttgtaatacaggccaagcagacgggctttgagggcatttagtctcagaaaaaaaaaatgtagaaggatttcggaattagaattttgtgtattgtatctgtagttttgtaataaactaacgaaaaatagtg

SEQ ID NO: 4 - DNA, 5384 bp, Homo sapiens
aaaatgttggagatctgcctgaagctggtgggctgcaaatccaagaaggggctgtcctcgtcctccagctgttatctggaagaagcccttcagcggccagtagcatctgactttgagcctcagggtctgagtgaagccgctcgttggaactccaaggaaaaccttctcgctggacccagtgaaaatgaccccaaccttttcgttgcactgtatgattttgtggccagtggagataacactctaagcataactaaaggtgaaaagctccgggtcttaggctataatcacaatggggaatggtgtgaagcccaaaccaaaaatggccaaggctgggtcccaagcaactacatcacgccagtcaacagtctggagaaacactcctggtaccatgggcctgtgtcccgcaatgccgctgagtatctgctgagcagcgggatcaatggcagcttcttggtgcgtgagagtgagagcagtcctggccagaggtccatctcgctgagatacgaagggagggtgtaccattacaggatcaacactgcttctgatggcaagctctacgtctcctccgagagccgcttcaacaccctggccgagttggttcatcatcattcaacggtggccgacgggctcatcaccacgctccattatccagccccaaagcgcaacaagcccactgtctatggtgtgtcccccaactacgacaagtgggagatggaacgcacggacatcaccatgaagcacaagctgggcgggggccagtacggggaggtgtacgagggcgtgtggaagaaatacagcctgacggtggccgtgaagaccttgaaggaggacaccatggaggtggaagagttcttgaaagaagctgcagtcatgaaagagatcaaacaccctaacctggtgcagctccttggggtctgcacccgggagcccccgttctatatcatcactgagttcatgacctacgggaacctcctggactacctgagggagtgcaaccggcaggaggtgaacgccgtggtgctgctgtacatggccactcagatctcgtcagccatggagtacctggagaagaaaaacttcatccacagagatcttgctgcccgaaactgcctggtaggggagaaccacttggtgaaggtagctgattttggcctgagcaggttgatgacaggggacacctacacagcccatgctggagccaagttccccatcaaatggactgcacccgagagcctggcctacaacaagttctccatcaagtccgacgtctgggcatttggagtattgctttgggaaattgctacctatggcatgtccccttacccgggaattgacctgtcccaggtgtatgagctgctagagaaggactaccgcatggagcgcccagaaggctgcccagagaaggtctatgaactcatgcgagcatgttggcagtggaatccctctgaccggccctcctttgctgaaatccaccaagcctttgaaacaatgttccaggaatccagtatctcagacgaagtggaaaaggagctggggaaacaaggcgtccgtggggctgtgagtaccttgctgcaggccccagagctgcccaccaagacgaggacctccaggagagctgcagagcacagagacaccactgacgtgcctgagatgcctcactccaagggccagggagagagcgatcctctggaccatgagcctgccgtgtctccattgctccctcgaaaagagcgaggtcccccggagggcggcctgaatgaagatgagcgccttctccccaaagacaaaaagaccaacttgttcagcgccttgatcaagaagaagaagaagacagccccaacccctcccaaacgcagcagctccttccgggagatggacggccagccggagcgcagaggggccggcgaggaagagggccgagacatcagcaacggggcactggctttcacccccttggacacagctgacccagccaagtccccaaagcccagcaatggggctggggtccccaatggagccctccgggagtccgggggctcaggcttccggtctccccacctgtggaagaagtccagcacgctgaccagcagccgcctagccaccggcgaggaggagggcggtggcagctccagcaagcgcttcctgcgctcttgctccgcctcctgcgttccccatggggccaaggacacggagtggaggtcagtcacgctgcctcgggacttgcagtccacgggaagacagtttgactcgtccacatttggagggcacaaaagtgagaagccggctctgcctcggaagagggcaggggagaacaggtctgaccaggtgacccgaggcacagtaacgcctccccccaggctggtgaaaaagaatgaggaagctgctgatgaggtcttcaaagacatcatggagtccagcccgggctccagcccgcccaacctgactccaaaacccctccggcggcaggtcaccgtggcccctgcctcgggcctcccccacaaggaagaagctggaaagggcagtgccttagggacccctgctgcagctgagccagtgacccccaccagcaaagcaggctcaggtgcaccagggggcaccagcaagggccccgccgaggagtccagagtgaggaggcacaagcactcctctgagtcgccagggagggacaaggggaaattgtccaggctcaaacctgccccgccgcccccaccagcagcctctgcagggaaggctggaggaaagccctcgcagagcccgagccaggaggcggccggggaggcagtcctgggcgcaaagacaaaagccacgagtctggttgatgctgtgaacagtgacgctgccaagcccagccagccgggagagggcctcaaaaagcccgtgctcccggccactccaaagccacagtccgccaagccgtcggggacccccatcagcccagcccccgttccctccacgttgccatcagcatcctcggccctggcaggggaccagccgtcttccaccgccttcatccctctcatatcaacccgagtgtctcttcggaaaacccgccagcctccagagcggatcgccagcggcgccatcaccaagggcgtggtcctggacagcaccgaggcgctgtgcctcgccatctctaggaactccgagcagatggccagccacagcgcagtgctggaggccggcaaaaacctctacacgttctgcgtgagctatgtggattccatccagcaaatgaggaacaagtttgccttccgagaggccatcaacaaactggagaataatctccgggagcttcagatctgcccggcgacagcaggcagtggtccagcggccactcaggacttcagcaagctcctcagttcggtgaaggaaatcagtgacatagtgcagaggtagcagcagtcaggggtcaggtgtcaggcccgtcggagctgcctgcagcacatgcgggctcgcccatacccgtgacagtggctgacaagggactagtgagtcagcaccttggcccaggagctctgcgccaggcagagctgagggccctgtggagtccagctctactacctacgtttgcaccgcctgccctcccgcaccttcctcctccccgctccgtctctgtcctcgaattttatctgtggagttcctgctccgtggactgcagtcggcatgccaggacccgccagccccgctcccacctagtgccccagactgagctctccaggccaggtgggaacggctgatgtggactgtctttttcatttttttctctctggagcccctcctcccccggctgggcctccttcttccacttctccaagaatggaagcctgaactgaggccttgtgtgtcaggccctctgcctgcactccctggccttgcccgtcgtgtgctgaagacatgtttcaagaaccgcatttcgggaagggcatgcacgggcatgcacacggctggtcactctgccctctgctgctgcccggggtggggtgcactcgccatttcctcacgtgcaggacagctcttgatttgggtggaaaacagggtgctaaagccaaccagcctttgggtcctgggcaggtgggagctgaaaaggatcgaggcatggggcatgtcctttccatctgtccacatccccagagcccagctcttgctctcttgtgacgtgcactgtgaatcctggcaagaaagcttgagtctcaagggtggcaggtcactgtcactgccgacatccctcccccagcagaatggaggcaggggacaagggaggcagtggctagtggggtgaacagctggtgccaaatagccccagactgggcccaggcaggtctgcaagggcccagagtgaaccgtcctttcacacatctgggtgccctgaaagggcccttcccctcccccactcctctaagacaaagtagattcttacaaggccctttcctttggaacaagacagccttcacttttctgagttcttgaagcatttcaaagccctgcctctgtgtagccgccctgagagagaatagagctgccactgggcacctgcgcacaggtgggaggaaagggcctggccagtcctggtcctggctgcactcttgaactgggcgaatgtcttatttaattaccgtgagtgacatagcctcatgttctgtgggggtcatcagggagggttaggaaaaccacaaacggagcccctgaaagcctcacgtatttcacagagcacgcctgccatcttctccccgaggctgccccaggccggagcccagatacgggggctgtgactctgggcagggacccggggtctcctggaccttgacagagcagctaactccgagagcagtgggcaggtggccgcccctgaggcttcacgccgggagaagccaccttcccaccccttcataccgcctcgtgccagcagcctcgcacaggccctagctttacgctcatcacctaaacttgtactttatttttctgatagaaatggtttcctctggatcgttttatgcggttcttacagcacatcacctctttgcccccgacggctgtgacgcagccggagggaggcactagtcaccgacagcggccttgaagacagagcaaagcgcccacccaggtcccccgactgcctgtctccatgaggtactggtcccttccttttgttaacgtgatgtgccactatattttacacgtatctcttggtatgcatcttttatagacgctcttttctaagtggcgtgtgcatagcgtcctgccctgccccctcgggggcctgtggtggctccccctctgcttctcggggtccagtgcattttgtttctgtatatgattctctgtggttttttttgaatccaaatctgtcctctgtagtattttttaaataaatcagtgtttacatt

SEQ ID NO: 5 - DNA, 11927 bp, Homo sapiens
acagtttaacttttgtgcttctgggcagaggtatggtccttgggacagttctccttccacctaatagttatggcagagatcaggacacttcactttgctgcctgtgcactgaggcctcagaatctgctctacccgacttaacagatcactttgccagctgtgtggaggatggatttgagggagacaagactggaggcagtagtccagaagctttgcatcgtccctatggttgtgatgttgaaccccaggcactaaatgaggctatcaggtggagctccaaggagaacttgctcggagccactgagagtgaccctaatctcttcgttgcactttatgattttgtagcaagtggtgataacacactcagcatcactaaaggtgaaaagctacgagtccttggttacaaccagaatggtgagtggagtgaagttcgctctaagaatgggcagggctgggtgccaagcaactacatcaccccagtgaacagcctggaaaaacactcctggtaccatggacctgtgtcacgcagtgcagctgagtatctgctcagcagtctaatcaatggcagcttcctggtgcgagaaagtgagagtagccctgggcagctgtccatctcgctcaggtacgagggacgtgtgtatcactacaggatcaataccactgcagatggcaaggtgtatgtgactgctgagagccgcttcagcaccttggcagagcttgtacaccatcactccacagtggctgatgggctggtgacaacattacactacccagcacccaagtgtaataagcctacagtctatggtgtgtcccccatccacgacaaatgggaaatggagcgaacagatattaccatgaagcacaaacttgggggcggtcagtatggagaggtttacgttggcgtctggaagaaatacagccttacagttgctgtgaaaacattgaaggaagataccatggaggtagaagaattcctgaaagaagctgcagtaatgaaggaaatcaagcatcctaatctggtacaacttttaggtgtgtgtactttggagccaccattttacattgtgactgaatacatgccatacgggaatttgctggattacctccgagaatgcaaccgagaagaggtgactgcagttgtgctgctctacatggccactcagatttcttctgcaatggagtacttagagaagaagaatttcatccatagagatcttgcagctcgtaactgcctagtgggagaaaaccatgtggtaaaagtggctgactttggcttaagtagattgatgactggagacacttatactgctcatgctggagccaaatttcctattaagtggacagcaccagagagtcttgcctacaataccttctcaattaaatctgacgtctgggcttttggggtattgttgtgggaaattgctacctatggaatgtcaccatatccaggtattgacctgtctcaggtctatgacctactagaaaaaggatatcgaatggaacagcctgagggatgcccccctaaggtttatgaacttatgagagcatgctggaagtggagccctgccgataggccctcttttgctgaaacacaccaagcttttgaaaccatgttccatgactccagcatttctgaagaggtagctgaggagcttgggagagccgcctcctcgtcatctgttgttccatacctgccccggctacctatacttccttccaagactcggacactgaagaaacaggtggagaacaaggagaacattgaaggggcacaagatgccacagaaaattctgcttccagtttagcaccagggttcatcagaggtgcacaggcctctagtggatccccagcactgcctcgaaagcaaagagacaagtcacccagcagcctcttggaagatgccaaagagacatgcttcaccagggataggaaggggggcttcttcagctccttcatgaagaagagaaatgctcctacaccccccaaacgcagcagctccttccgagaaatggagaatcagccccataagaaatacgaactcacgggtaacttctcatctgttgcttctctacagcatgctgatgggttctctttcactcctgcccagcaagaggcgaatctggtgccacccaagtgctatggggggagctttgcacagaggaacctctgtaatgacgacggtggtgggggtgggggcagtggcactgctgggggtgggtggtctggcatcacaggcttctttacaccacgcttaatcaaaaagacactgggcttacgagcaggtaaacccacagccagtgatgacacttccaagccttttccaaggtcaaactctacatcttccatgtcctcagggcttccagagcaggataggatggcaatgacccttcccaggaactgccagaggtccaaactccagctggaaaggacagtgtccacctcttctcagccagaagagaatgtggacagggccaatgacatgcttccaaaaaaatcagaggaaagtgctgctccaagcagggagagaccaaaagccaagttattgcccagaggagccacagctcttcctctcagaacaccctctggggatctagccattacagagaaggaccctccaggggtgggagtggctggagtggcagctgcccccaagggtaaagagaagaatggtggggcacgacttgggatggctggagttccagaggatggagagcagccgggctggccttctccagccaaggctgcccccgtcctcccaaccactcacaaccacaaagtgccagtccttatctcacccactctgaaacacactccagctgacgtgcagctcattggcacagactctcaggggaataaattcaagctcttatctgagcatcaggtcacatcctctggagacaaggaccgaccccgacgggtaaaaccaaagtgtgccccacccccaccaccagtgatgagactactgcagcatccgtccatctgctcagaccctacagaagagccaactgccctaactgcaggacagtccacatcagaaacacaggaaggaggaaagaaggcagctctgggcgcagtgcccatcagtgggaaagctgggaggccagtgatgcctccacctcaagtgcctctgcccacatcttccatctcgccagccaaaatggccaatggcacagcaggtactaaagtggctctgagaaaaaccaaacaggccgctgagaaaatctcagcagacaaaatcagcaaagaggccctgctggaatgtgctgacctactgtccagtgcactcacggaacctgtgcccaacagccagctggtagacactggacaccagctgcttgactactgctcaggctatgtggactgcatccctcaaactcgcaacaaatttgccttccgagaggctgtgagcaaactggaactcagcctgcaggagctacaggtttcttcagcagctgctggtgtgcccgggacaaaccctgtccttaataacttattgtcatgtgtacaggaaatcagtgatgtggtgcagaggtagccactgttagcctggtgggaaaatgcacacatttctgaggggagagggaaaaggacttgttttcctgtgttcttgttttcagaaaatgaaagactcatacttgagtgtgtttatgtgaagtacctcagatccctgagttctcacgtttacagtttcatctcaaaaataagaagcaaaccacataagtataggagaggtaaattaagtgggggcaaggcagtagtggacagggttggaaactgcactggaaaatagggaacatgtgtatgtcataaggaaggcaatgcagcccatccctacctggaatgctgggaagtgctaggcagggctgctctcagcaagactgcagcagctgcacccagacctggggctctggtaggtactaatggtgattatgctccaatttacctaatgaatttggtgggacagcagaaaagaaagctgggaatgtaccaagagaaatttttgttcagggctgttggaagtagctgttagccttgcttccacaaggccattgctgctgtaataagaactgcaaatcagagtgctacaacataaaactgggaaatatggccctatctgaatgcctctgtcctattttccgctggtgtatcagttagtgcaggaagtaaagaatgctggaaagttgaatcagaaattgaaaaccttctaaaatcttacacagattagcagaagtcacttctcccagtctggtatattatttcataatggaccaggatcggcttcctgcctgttggtggctatctgtaaaccataagtacaggggtctccctagtggttcttctctgtcttttgctgggcaggctgtcttcctttattcctggtagcattcagagcattaaccagtgttgattttgaaaatagtagtccctacaggttctcacaaaggaatgaatcctgttctgatacagttcccctgcatactgacatactggccaaggacttgagcagctgtgtatttttctttatcaactaaaataccagggagatggtcttttcttgaaacccagtggcctgtatgtgactgagaggaaaagctggcttggtcctaatggctgtttctctgtacctttcccttcccttaccaccttaagcccaatccaggtagagaatagggagaggcattctcctctctatggatttgaagtgaatcacccccacattattctcacatgcttttcttctctcacatattcctccctactcccccacccaatcattgtgcttatttgtacagatcttattgggaatattctttatttattttgtcatttcacttctattttaagaatgcataattgaaggagtagtcattttcagggagcaccaggtagaccctgggaacctaatgacttaatccttaaatatgttttgcccttgaaaaataggccttttccttccttccttagttataattgtggaagctaattaggatggcatggaagtgaatctaatgagttaggtattattaatgttcttggtatcgggtctaattccagttactgcttcattctctttttaaagctttatgaatacttcccccatcctccccaaggagagctcaatacacacatatttttattttattctctcaaaggaatattagcttaggaagataggaattcaacattgagcactgagttttcttctggctctgtcattgatacactgtcaaaccacagcctcatctcttaatctatttaattaaggtaacagtacatgttctcaagggtgttgcaagtaagtgtgcagctatcccttggagagcctctctggaaagctcttttagtgcagtgttgttatgctgaattgttttccattatcttatttgctgagtagaaaatattaatgaaattaagaattgttgagattatatgaattgggctagaatactaaggggaaaactatgttttgaatagagtttggcatttttgaccaagaacaaaattgagttttcattggaaagaaaggaaaccttgattcttaccattgctgctccaaaggaggcccaggttaagaggattagaggagacacgcggtgctgggcattcctggcaggtgttgggtgatccccgcagtatgtcacctgcagttgcagcacaggcagctagtgattgggttcatctcctcctagtggttggaagagaactcagatgtaaaaaccagcggtccttctcccaccttctttcctgccattcttgctcatcatacatgtccgtaaacttgaagaactcgttttagcagctagccttttaaggtcgaggatgggaaagctaaaactgtagaatattattatgctgctttttaggtttatccctgttgttgtgggatgcaagttaagggattgtaattgtttttcagggtttttttgttttttgttttttaagcaagggctctattttcccttgagagttctggaactaagccttggagaaacactactgagtgtatttaggctccctggttttcttgcccaacaacaatctgaagggtagggggtgggggctgtgtcttactcaggggcagcacctagctgtcttgcctacagtgggtgcacgatatataaatggaattgatttttgtcaacactgtcaagagtggcattgactattggagcataccccgtccacatgatgcttgaactatgtaacttcaggggttgagggctcaaggttcaggttaaagaggcactgtcaacttactatacaagcataatttaggtttttcctttttctacttgaaaaggaccagcttaaacacaaacccttatgtaaattaaaaggtttgaatccaaagcagagagaactgcttctggaaaagtgtagtttaattttaactattctaaaagcaatgagcaaaggcccttgtccaaggcgttgacagttttctaaagtggttatgctgtatatctggatgcatgcctttgggctgccactgcttgattcctttcatgtacagataatattacttcagtttagatttcccactttaaaatgcagtgatttgtgttgaatacatcttgattgtgctttacctaaagtattttcttaaaaggctttgtgtaaaatttaaatgtatatattttcctgtagacttccatcatgattttcagagattagccttaaaaaatttggccctaagaaattcattcagtgtttttctagatgacctctgtacatagaggtcattatagtggagaccctttaccagcagcattttaagatttaaattagatagaaagtttcttaggattcaactgaaaattggctagtaaaatatgtcccaggtaataaagcatgctgactttgctaaggcactgcccatttttatttaactaaagtcatggagattttgagtttaaaggatgcagtatagatagtggtttagtgtttaggctctaatgccagtctaaaaggcaagtcatttaaccttgggagcctcagtttcctcactgtaaaacagggataataatagtaactacctcagggttgttgtaaggattaaatgagatgatatttgtaagatacttagctcaagtgcctggcacacaatgagcacactctataaatgttctactactactattattaacacctagtctagggatgcacagcagaatcccctagggttaaaaaacaaaacaaaacaaacaaaaaaaactgacggaatagccccactccagatcagaattcccagtgggctggggtctcggccagtgtattctccagtaatctcgccaggtgtttgaaacacccagtgctatctgaaaactatcagtaccccaaccctttggtttatagattaagaaactagcagaagatggttaaattacttgcctattgtctcagaacggttaattagtggcggagccaaggctagaattcaagtctcttgactttatggttgtggggtctttccaccatacctgctgccatgtgagacactgcaaaaaagtggctcagaccgacaatcagcctgtgtggtgctgcacactttctaaagcacatgctcctgacactttgaccttaaggggcttgaatgtggagtaatgggaacacaagccaagcaagcactcagtagaattcagtcatttaaaaaattcaatggggtcattcttttggacagacctcagcaacacagcaatgtgcactttgtagtaaagaaataccaacttgagtttttaaaaaacctagttagtcctacattcccttttctttaaaaaaactttattgttcacattattttaatgactatgagataatgtatatgacagcactttgagaaaatatcaactgtaatataactataaggttgtagtattgtctgtttaaaagataagacagttgattcaatgtggatggaccctgtggggtacctgaaaatgtagatacgtaagaatcacctctgtcatttatcacatttagaaatatgaaactgcttaacaggtatgagcaggtatagcaagtgtttgctaaagttgtagttcagagctgaattacttcaggaaactagggaccaactttttggtttaattccgatctttaaaaagtaagaatgtgtactcactccagaacacagaagctcttccaaggaccttgactcaagaaggatgaggtcctcttactcttctccatttatccactatatgcttggccatttatcctaaatgtggtgggaacagacttgttatctgttgatgttgacagtgtcttttttaacctatgtcctgcatagttttgttaggtttacagggggaggtggatggccataaaaccagtgcactttgggaattacttttctaggatttcctaccagttataaatgacattgacatttgtcatcttttttttctttttctaaaaagaatagctgaatttaattcacctattataaaatactcaaaagtaaattgccttggtggccacttctgaattatagctacatttcattatgaccccttctgctcccttccattttgctactgatgtcattcttgttatcaggctgtgcccctaccaggagttcatattgggttgacagggttatctatatttttgttcttgatttttgagtttcatcatcttgcattaaattgttccacctggatttggggttcatctctgtgccctaaggatctgctatgaccaatcctctttttgtaggtgggtctctggcttaagtattgataggcttcagcggtttgtgtctctgtcttagcttgtatcaagccagtagtagctcacttcctttgtaaattcctgcttcagtctgggatccgtaggagtatgtgagaacttctgaaacgtctccaactcttaacagtcaagatatctatatcatttggatagagttctggttttccaactactagacttaaagaaattctggccgggtgcggtggctcacgcctgtaatcccagcactttggggggctgaggcgggtggatcacgaggtcaggagattgagaccatcctggctaacacggtgaaaccccacctctactaaaaatacaaaaacttagctgggcgtggtggcgggcgcctgtagtcccagctactggggaggctgaggcaggagaatggcgtgaacccaggaggcggagcttgcagtgagcccagatcgcgccactgcactccagcctgggtgacagtgagactccgtctcaaaaaaaaaaaaaaaaaaaaaaaaaaaaaaaaaaagaaattctaatgcaaagcttgctttttttttcttttttccagcaagccagtagtaatagttattgttacttgctctgttcagcacaactgtagttcacttgaacttcactgtcattccctacgctcctctcttactgagaagcatgggtgggattcagggctgtgggacaagctacagcctactctggagcactcacccccatgactcagtccagcctgtctcttgggaagtttattgcaatgtgcagacggatgaatttctgcttttcatgccacctctctgaggtatgtattctatcttgagtatgtacaagatgataccttttggctgggcacagtggctcgtgcctgtaatcccagcactttgggagaccaagatgggcggatcacttgaggtcaggagtttgagaccagcctggccaacatggtgaaaccccgtctctactaaaaatataaaaattagccgggcgtagtacatgcctgtaatcccagctactcccgaggctgaggcagaattgcttgaacccaggaggcggaggttgcagtgagctgagatcgcgccgctgcactccagcctaagtgacagagtgagacacgttaagaagaaaaaaaaaaaaaaggataccttcatttctgactcaatatcctagatccaaaggacaggaaattagggaaggcttcaccctgtgggatcaagataagaagatcccatacttcttcccaggtaaggaggcctgtggcaggtcatgattcaaagctgacttggaatggcagaaactgctgagaggccacccttggagatttgtgccttcaaagatgggtttcatgagtctcagagaggaaaagacttgtcagctgggttgattttgcatgattattgaactagagctggtagacacgagcttctcagatggcagtggccagatcctccatctgtgagaatccgccacttgaagtggtttcctgagagtgttcacttggcagttgctgcgtttctcaagcccacctggcgaggtctcgccggacccttccctccaagtgcacttacttcttcatccccatgtacatctctaactttgaaattgtttacctctcctacaaaaatcttaccttttgacctgagcagagtagcaaagccctgttcactctgagggagcagctggcgtgttgaaggggaaaggccaggcacagcactgtcctcagaccacaccatatttggagcagaattgtgatacatgtcatctgtgtctattctggaaggttctttgttcatcactgtactcgcatcagcaaattttcagggtcctacctgtcactccaggctactgagctgaaccctcagaagctgaggtctccgagcatgctaagtaaccttttagaaaagctggaggcaaactgtcgaatgctagcaggctttatgaaaggaaacataaggagtttgtgtagtcagaacttgcttaaatttgcttcggaattaggcaccataaactttagttggagaatgggacttaaattttcacatatatgtatacttaattttcagcaattatgacacaataaaaagaatatgcaaatttattgttgtttcagaaggttttgcaggactgggaacgctttagtgtcatcaacagtaaacctcagatactgttctgcacagttcagaagtaccataccaggtattgtgagtggcaagaacgccaggggacagagatgcttctggtagatgagggccagagaaaccagctctcctccattttgacagcaatttctcactgtggccatttggcctccattatgttttgagaggaatttcttgagatcttgagaaatcaccatgattaggccaattgtcaatcagtattcagaaactagaaaggaacaatgagatacttgtttatggttctttagggcatatgtttgaaaaccctctcatctcagatctgtatagctggtgtgtgtttgtgtccataaatacacgtgcattgctgtcgtgcccattaagaaagggggagtaagtaaaagaggaatcgctcagatctttccttggatgaacagcagtggcgtggttggtgtgttgactgtgaacaggctgacttagctgttgatgtatactcagaacctccatctcctcccagaccctgcacttttccttctctgcagtctgattctctaatgactgtcactggacaaaccccagttttatgctcgcttagtaaaaataagtttaaacatttcatggtggttgacagaactttgtccccaaacatgcggattcaattctttaaaactcgttgaacgtttataccaaaggtcccgccccgcaggtgtgtatgtggtgcacagagggtgaggtttggagcatcgggcactgtgtgcattgctaaggggacatagtgagacaatgtgggatttaactaaaaacacatcaattgtgtgtcacattaccagtgttgtcaggtatttgttcttaattgttattgtaatatattttcagttgtttttctaatttaattctctccgtctgttgtctgactgtgaactgctaacagtgttaaacttgatgtaaataaatgaggcccttgaaagggactgctttctctgtcttctcacaaggtttgccaagttgtgttctgttttaaataaaggttgcaatattttattggcaaagta

SEQ ID NO: 6 - DNA, 11864 bp, Homo sapiens
acagtttaacttttgtgcttctgggcagaggtatggtccttgggacagttctccttccacctaatagttatggcagagatcaggacacttcactttgctgcctgtgcactgaggcctcagaatctgctctacccgacttaacagaagctttgcatcgtccctatggttgtgatgttgaaccccaggcactaaatgaggctatcaggtggagctccaaggagaacttgctcggagccactgagagtgaccctaatctcttcgttgcactttatgattttgtagcaagtggtgataacacactcagcatcactaaaggtgaaaagctacgagtccttggttacaaccagaatggtgagtggagtgaagttcgctctaagaatgggcagggctgggtgccaagcaactacatcaccccagtgaacagcctggaaaaacactcctggtaccatggacctgtgtcacgcagtgcagctgagtatctgctcagcagtctaatcaatggcagcttcctggtgcgagaaagtgagagtagccctgggcagctgtccatctcgctcaggtacgagggacgtgtgtatcactacaggatcaataccactgcagatggcaaggtgtatgtgactgctgagagccgcttcagcaccttggcagagcttgtacaccatcactccacagtggctgatgggctggtgacaacattacactacccagcacccaagtgtaataagcctacagtctatggtgtgtcccccatccacgacaaatgggaaatggagcgaacagatattaccatgaagcacaaacttgggggcggtcagtatggagaggtttacgttggcgtctggaagaaatacagccttacagttgctgtgaaaacattgaaggaagataccatggaggtagaagaattcctgaaagaagctgcagtaatgaaggaaatcaagcatcctaatctggtacaacttttaggtgtgtgtactttggagccaccattttacattgtgactgaatacatgccatacgggaatttgctggattacctccgagaatgcaaccgagaagaggtgactgcagttgtgctgctctacatggccactcagatttcttctgcaatggagtacttagagaagaagaatttcatccatagagatcttgcagctcgtaactgcctagtgggagaaaaccatgtggtaaaagtggctgactttggcttaagtagattgatgactggagacacttatactgctcatgctggagccaaatttcctattaagtggacagcaccagagagtcttgcctacaataccttctcaattaaatctgacgtctgggcttttggggtattgttgtgggaaattgctacctatggaatgtcaccatatccaggtattgacctgtctcaggtctatgacctactagaaaaaggatatcgaatggaacagcctgagggatgcccccctaaggtttatgaacttatgagagcatgctggaagtggagccctgccgataggccctcttttgctgaaacacaccaagcttttgaaaccatgttccatgactccagcatttctgaagaggtagctgaggagcttgggagagccgcctcctcgtcatctgttgttccatacctgccccggctacctatacttccttccaagactcggacactgaagaaacaggtggagaacaaggagaacattgaaggggcacaagatgccacagaaaattctgcttccagtttagcaccagggttcatcagaggtgcacaggcctctagtggatccccagcactgcctcgaaagcaaagagacaagtcacccagcagcctcttggaagatgccaaagagacatgcttcaccagggataggaaggggggcttcttcagctccttcatgaagaagagaaatgctcctacaccccccaaacgcagcagctccttccgagaaatggagaatcagccccataagaaatacgaactcacgggtaacttctcatctgttgcttctctacagcatgctgatgggttctctttcactcctgcccagcaagaggcgaatctggtgccacccaagtgctatggggggagctttgcacagaggaacctctgtaatgacgacggtggtgggggtgggggcagtggcactgctgggggtgggtggtctggcatcacaggcttctttacaccacgcttaatcaaaaagacactgggcttacgagcaggtaaacccacagccagtgatgacacttccaagccttttccaaggtcaaactctacatcttccatgtcctcagggcttccagagcaggataggatggcaatgacccttcccaggaactgccagaggtccaaactccagctggaaaggacagtgtccacctcttctcagccagaagagaatgtggacagggccaatgacatgcttccaaaaaaatcagaggaaagtgctgctccaagcagggagagaccaaaagccaagttattgcccagaggagccacagctcttcctctcagaacaccctctggggatctagccattacagagaaggaccctccaggggtgggagtggctggagtggcagctgcccccaagggtaaagagaagaatggtggggcacgacttgggatggctggagttccagaggatggagagcagccgggctggccttctccagccaaggctgcccccgtcctcccaaccactcacaaccacaaagtgccagtccttatctcacccactctgaaacacactccagctgacgtgcagctcattggcacagactctcaggggaataaattcaagctcttatctgagcatcaggtcacatcctctggagacaaggaccgaccccgacgggtaaaaccaaagtgtgccccacccccaccaccagtgatgagactactgcagcatccgtccatctgctcagaccctacagaagagccaactgccctaactgcaggacagtccacatcagaaacacaggaaggaggaaagaaggcagctctgggcgcagtgcccatcagtgggaaagctgggaggccagtgatgcctccacctcaagtgcctctgcccacatcttccatctcgccagccaaaatggccaatggcacagcaggtactaaagtggctctgagaaaaaccaaacaggccgctgagaaaatctcagcagacaaaatcagcaaagaggccctgctggaatgtgctgacctactgtccagtgcactcacggaacctgtgcccaacagccagctggtagacactggacaccagctgcttgactactgctcaggctatgtggactgcatccctcaaactcgcaacaaatttgccttccgagaggctgtgagcaaactggaactcagcctgcaggagctacaggtttcttcagcagctgctggtgtgcccgggacaaaccctgtccttaataacttattgtcatgtgtacaggaaatcagtgatgtggtgcagaggtagccactgttagcctggtgggaaaatgcacacatttctgaggggagagggaaaaggacttgttttcctgtgttcttgttttcagaaaatgaaagactcatacttgagtgtgtttatgtgaagtacctcagatccctgagttctcacgtttacagtttcatctcaaaaataagaagcaaaccacataagtataggagaggtaaattaagtgggggcaaggcagtagtggacagggttggaaactgcactggaaaatagggaacatgtgtatgtcataaggaaggcaatgcagcccatccctacctggaatgctgggaagtgctaggcagggctgctctcagcaagactgcagcagctgcacccagacctggggctctggtaggtactaatggtgattatgctccaatttacctaatgaatttggtgggacagcagaaaagaaagctgggaatgtaccaagagaaatttttgttcagggctgttggaagtagctgttagccttgcttccacaaggccattgctgctgtaataagaactgcaaatcagagtgctacaacataaaactgggaaatatggccctatctgaatgcctctgtcctattttccgctggtgtatcagttagtgcaggaagtaaagaatgctggaaagttgaatcagaaattgaaaaccttctaaaatcttacacagattagcagaagtcacttctcccagtctggtatattatttcataatggaccaggatcggcttcctgcctgttggtggctatctgtaaaccataagtacaggggtctccctagtggttcttctctgtcttttgctgggcaggctgtcttcctttattcctggtagcattcagagcattaaccagtgttgattttgaaaatagtagtccctacaggttctcacaaaggaatgaatcctgttctgatacagttcccctgcatactgacatactggccaaggacttgagcagctgtgtatttttctttatcaactaaaataccagggagatggtcttttcttgaaacccagtggcctgtatgtgactgagaggaaaagctggcttggtcctaatggctgtttctctgtacctttcccttcccttaccaccttaagcccaatccaggtagagaatagggagaggcattctcctctctatggatttgaagtgaatcacccccacattattctcacatgcttttcttctctcacatattcctccctactcccccacccaatcattgtgcttatttgtacagatcttattgggaatattctttatttattttgtcatttcacttctattttaagaatgcataattgaaggagtagtcattttcagggagcaccaggtagaccctgggaacctaatgacttaatccttaaatatgttttgcccttgaaaaataggccttttccttccttccttagttataattgtggaagctaattaggatggcatggaagtgaatctaatgagttaggtattattaatgttcttggtatcgggtctaattccagttactgcttcattctctttttaaagctttatgaatacttcccccatcctccccaaggagagctcaatacacacatatttttattttattctctcaaaggaatattagcttaggaagataggaattcaacattgagcactgagttttcttctggctctgtcattgatacactgtcaaaccacagcctcatctcttaatctatttaattaaggtaacagtacatgttctcaagggtgttgcaagtaagtgtgcagctatcccttggagagcctctctggaaagctcttttagtgcagtgttgttatgctgaattgttttccattatcttatttgctgagtagaaaatattaatgaaattaagaattgttgagattatatgaattgggctagaatactaaggggaaaactatgttttgaatagagtttggcatttttgaccaagaacaaaattgagttttcattggaaagaaaggaaaccttgattcttaccattgctgctccaaaggaggcccaggttaagaggattagaggagacacgcggtgctgggcattcctggcaggtgttgggtgatccccgcagtatgtcacctgcagttgcagcacaggcagctagtgattgggttcatctcctcctagtggttggaagagaactcagatgtaaaaaccagcggtccttctcccaccttctttcctgccattcttgctcatcatacatgtccgtaaacttgaagaactcgttttagcagctagccttttaaggtcgaggatgggaaagctaaaactgtagaatattattatgctgctttttaggtttatccctgttgttgtgggatgcaagttaagggattgtaattgtttttcagggtttttttgttttttgttttttaagcaagggctctattttcccttgagagttctggaactaagccttggagaaacactactgagtgtatttaggctccctggttttcttgcccaacaacaatctgaagggtagggggtgggggctgtgtcttactcaggggcagcacctagctgtcttgcctacagtgggtgcacgatatataaatggaattgatttttgtcaacactgtcaagagtggcattgactattggagcataccccgtccacatgatgcttgaactatgtaacttcaggggttgagggctcaaggttcaggttaaagaggcactgtcaacttactatacaagcataatttaggtttttcctttttctacttgaaaaggaccagcttaaacacaaacccttatgtaaattaaaaggtttgaatccaaagcagagagaactgcttctggaaaagtgtagtttaattttaactattctaaaagcaatgagcaaaggcccttgtccaaggcgttgacagttttctaaagtggttatgctgtatatctggatgcatgcctttgggctgccactgcttgattcctttcatgtacagataatattacttcagtttagatttcccactttaaaatgcagtgatttgtgttgaatacatcttgattgtgctttacctaaagtattttcttaaaaggctttgtgtaaaatttaaatgtatatattttcctgtagacttccatcatgattttcagagattagccttaaaaaatttggccctaagaaattcattcagtgtttttctagatgacctctgtacatagaggtcattatagtggagaccctttaccagcagcattttaagatttaaattagatagaaagtttcttaggattcaactgaaaattggctagtaaaatatgtcccaggtaataaagcatgctgactttgctaaggcactgcccatttttatttaactaaagtcatggagattttgagtttaaaggatgcagtatagatagtggtttagtgtttaggctctaatgccagtctaaaaggcaagtcatttaaccttgggagcctcagtttcctcactgtaaaacagggataataatagtaactacctcagggttgttgtaaggattaaatgagatgatatttgtaagatacttagctcaagtgcctggcacacaatgagcacactctataaatgttctactactactattattaacacctagtctagggatgcacagcagaatcccctagggttaaaaaacaaaacaaaacaaacaaaaaaaactgacggaatagccccactccagatcagaattcccagtgggctggggtctcggccagtgtattctccagtaatctcgccaggtgtttgaaacacccagtgctatctgaaaactatcagtaccccaaccctttggtttatagattaagaaactagcagaagatggttaaattacttgcctattgtctcagaacggttaattagtggcggagccaaggctagaattcaagtctcttgactttatggttgtggggtctttccaccatacctgctgccatgtgagacactgcaaaaaagtggctcagaccgacaatcagcctgtgtggtgctgcacactttctaaagcacatgctcctgacactttgaccttaaggggcttgaatgtggagtaatgggaacacaagccaagcaagcactcagtagaattcagtcatttaaaaaattcaatggggtcattcttttggacagacctcagcaacacagcaatgtgcactttgtagtaaagaaataccaacttgagtttttaaaaaacctagttagtcctacattcccttttctttaaaaaaactttattgttcacattattttaatgactatgagataatgtatatgacagcactttgagaaaatatcaactgtaatataactataaggttgtagtattgtctgtttaaaagataagacagttgattcaatgtggatggaccctgtggggtacctgaaaatgtagatacgtaagaatcacctctgtcatttatcacatttagaaatatgaaactgcttaacaggtatgagcaggtatagcaagtgtttgctaaagttgtagttcagagctgaattacttcaggaaactagggaccaactttttggtttaattccgatctttaaaaagtaagaatgtgtactcactccagaacacagaagctcttccaaggaccttgactcaagaaggatgaggtcctcttactcttctccatttatccactatatgcttggccatttatcctaaatgtggtgggaacagacttgttatctgttgatgttgacagtgtcttttttaacctatgtcctgcatagttttgttaggtttacagggggaggtggatggccataaaaccagtgcactttgggaattacttttctaggatttcctaccagttataaatgacattgacatttgtcatcttttttttctttttctaaaaagaatagctgaatttaattcacctattataaaatactcaaaagtaaattgccttggtggccacttctgaattatagctacatttcattatgaccccttctgctcccttccattttgctactgatgtcattcttgttatcaggctgtgcccctaccaggagttcatattgggttgacagggttatctatatttttgttcttgatttttgagtttcatcatcttgcattaaattgttccacctggatttggggttcatctctgtgccctaaggatctgctatgaccaatcctctttttgtaggtgggtctctggcttaagtattgataggcttcagcggtttgtgtctctgtcttagcttgtatcaagccagtagtagctcacttcctttgtaaattcctgcttcagtctgggatccgtaggagtatgtgagaacttctgaaacgtctccaactcttaacagtcaagatatctatatcatttggatagagttctggttttccaactactagacttaaagaaattctggccgggtgcggtggctcacgcctgtaatcccagcactttggggggctgaggcgggtggatcacgaggtcaggagattgagaccatcctggctaacacggtgaaaccccacctctactaaaaatacaaaaacttagctgggcgtggtggcgggcgcctgtagtcccagctactggggaggctgaggcaggagaatggcgtgaacccaggaggcggagcttgcagtgagcccagatcgcgccactgcactccagcctgggtgacagtgagactccgtctcaaaaaaaaaaaaaaaaaaaaaaaaaaaaaaaaaaagaaattctaatgcaaagcttgctttttttttcttttttccagcaagccagtagtaatagttattgttacttgctctgttcagcacaactgtagttcacttgaacttcactgtcattccctacgctcctctcttactgagaagcatgggtgggattcagggctgtgggacaagctacagcctactctggagcactcacccccatgactcagtccagcctgtctcttgggaagtttattgcaatgtgcagacggatgaatttctgcttttcatgccacctctctgaggtatgtattctatcttgagtatgtacaagatgataccttttggctgggcacagtggctcgtgcctgtaatcccagcactttgggagaccaagatgggcggatcacttgaggtcaggagtttgagaccagcctggccaacatggtgaaaccccgtctctactaaaaatataaaaattagccgggcgtagtacatgcctgtaatcccagctactcccgaggctgaggcagaattgcttgaacccaggaggcggaggttgcagtgagctgagatcgcgccgctgcactccagcctaagtgacagagtgagacacgttaagaagaaaaaaaaaaaaaaggataccttcatttctgactcaatatcctagatccaaaggacaggaaattagggaaggcttcaccctgtgggatcaagataagaagatcccatacttcttcccaggtaaggaggcctgtggcaggtcatgattcaaagctgacttggaatggcagaaactgctgagaggccacccttggagatttgtgccttcaaagatgggtttcatgagtctcagagaggaaaagacttgtcagctgggttgattttgcatgattattgaactagagctggtagacacgagcttctcagatggcagtggccagatcctccatctgtgagaatccgccacttgaagtggtttcctgagagtgttcacttggcagttgctgcgtttctcaagcccacctggcgaggtctcgccggacccttccctccaagtgcacttacttcttcatccccatgtacatctctaactttgaaattgtttacctctcctacaaaaatcttaccttttgacctgagcagagtagcaaagccctgttcactctgagggagcagctggcgtgttgaaggggaaaggccaggcacagcactgtcctcagaccacaccatatttggagcagaattgtgatacatgtcatctgtgtctattctggaaggttctttgttcatcactgtactcgcatcagcaaattttcagggtcctacctgtcactccaggctactgagctgaaccctcagaagctgaggtctccgagcatgctaagtaaccttttagaaaagctggaggcaaactgtcgaatgctagcaggctttatgaaaggaaacataaggagtttgtgtagtcagaacttgcttaaatttgcttcggaattaggcaccataaactttagttggagaatgggacttaaattttcacatatatgtatacttaattttcagcaattatgacacaataaaaagaatatgcaaatttattgttgtttcagaaggttttgcaggactgggaacgctttagtgtcatcaacagtaaacctcagatactgttctgcacagttcagaagtaccataccaggtattgtgagtggcaagaacgccaggggacagagatgcttctggtagatgagggccagagaaaccagctctcctccattttgacagcaatttctcactgtggccatttggcctccattatgttttgagaggaatttcttgagatcttgagaaatcaccatgattaggccaattgtcaatcagtattcagaaactagaaaggaacaatgagatacttgtttatggttctttagggcatatgtttgaaaaccctctcatctcagatctgtatagctggtgtgtgtttgtgtccataaatacacgtgcattgctgtcgtgcccattaagaaagggggagtaagtaaaagaggaatcgctcagatctttccttggatgaacagcagtggcgtggttggtgtgttgactgtgaacaggctgacttagctgttgatgtatactcagaacctccatctcctcccagaccctgcacttttccttctctgcagtctgattctctaatgactgtcactggacaaaccccagttttatgctcgcttagtaaaaataagtttaaacatttcatggtggttgacagaactttgtccccaaacatgcggattcaattctttaaaactcgttgaacgtttataccaaaggtcccgccccgcaggtgtgtatgtggtgcacagagggtgaggtttggagcatcgggcactgtgtgcattgctaaggggacatagtgagacaatgtgggatttaactaaaaacacatcaattgtgtgtcacattaccagtgttgtcaggtatttgttcttaattgttattgtaatatattttcagttgtttttctaatttaattctctccgtctgttgtctgactgtgaactgctaacagtgttaaacttgatgtaaataaatgaggcccttgaaagggactgctttctctgtcttctcacaaggtttgccaagttgtgttctgttttaaataaaggttgcaatattttattggcaaagta

SEQ ID NO: 7 - DNA, 9260 bp, Homo sapiens
attttctgaatggtcttgcttctttgtctatcttgtctgattttctcctgtctgaccttttcctggttaaaaatctgggggaaaatgacggactccaagccgatcaccaagagtaaatcagaagcaaacctcatcccgagccaggagccctttccagcctctgataactcaggggagacaccgcagagaaatggggagggccacactctgcccaagacacccagccaggccgagccagcctcccacaaaggccccaaagatgccggtcggcggagaaactccctaccaccctcccaccagaagcccccaagaaaccccctttcttccagtgacgcagcaccctccccagagcttcaagccaacgggactgggacacaaggtctggaggccacagataccaatggcctgtcctcctcagccaggccccagggccagcaagctggctccccctccaaagaagacaagaagcaggcaaacatcaagaggcagctgatgaccaacttcatcctgggctcttttgatgactactcctccgacgaggactctgttgctggctcatctcgtgagtctacccggaagggcagccgggccagcttgggggccctgtccctggaggcttatctgaccacaggtgaagctgagacccgcgtccccactatgaggccgagcatgtcgggactccacctggtgaagaggggacgggaacacaagaagctggacctgcacagagactttaccgtggcttctcccgctgagtttgtcacacgctttgggggggatcgggtcatcgagaaggtgcttattgccaacaacgggattgccgccgtgaagtgcatgcgctccatccgcaggtgggcctatgagatgttccgcaacgagcgggccatccggtttgttgtgatggtgacccccgaggaccttaaggccaacgcagagtacatcaagatggcggatcattacgtccccgtcccaggagggcccaataacaacaactatgccaacgtggagctgattgtggacattgccaagagaatccccgtgcaggcggtgtgggctggctggggccatgcttcagaaaaccctaaacttccggagctgctgtgcaagaatggagttgctttcttaggccctcccagtgaggccatgtgggccttaggagataagatcgcctccaccgttgtcgcccagacgctacaggtcccaaccctgccctggagtggaagcggcctgacagtggagtggacagaagatgatctgcagcagggaaaaagaatcagtgtcccagaagatgtttatgacaagggttgcgtgaaagacgtagatgagggcttggaggcagcagaaagaattggttttccattgatgatcaaagcttctgaaggtggcggagggaagggaatccggaaggctgagagtgcggaggacttcccgatccttttcagacaagtacagagtgagatcccaggctcgcccatctttctcatgaagctggcccagcacgcccgtcacctggaagttcagatcctcgctgaccagtatgggaatgctgtgtctctgtttggtcgcgactgctccatccagcggcggcatcagaagatcgttgaggaagcaccggccaccatcgccccgctggccatattcgagttcatggagcagtgtgccatccgcctggccaagaccgtgggctatgtgagtgcagggacagtggaatacctctatagtcaggatggcagcttccacttcttggagctgaatcctcgcttgcaggtggaacatccctgcacagaaatgattgctgatgttaatctgccggccgcccagctacagatcgccatgggcgtgccactgcaccggctgaaggatatccggcttctgtatggagagtcaccatggggagtgactcccatttcttttgaaaccccctcaaaccctcccctcgcccgaggccacgtcattgccgccagaatcaccagcgaaaacccagacgagggttttaagccgagctccgggactgtccaggaactgaatttccggagcagcaagaacgtgtggggttacttcagcgtggccgctactggaggcctgcacgagtttgcggattcccaatttgggcactgcttctcctggggagagaaccgggaagaggccatttcgaacatggtggtggctttgaaggaactgtccatccgaggcgactttaggactaccgtggaatacctcattaacctcctggagaccgagagcttccagaacaacgacatcgacaccgggtggttggactacctcattgctgagaaagtgcaggcggagaaaccggatatcatgcttggggtggtatgcggggccttgaacgtggccgatgcgatgttcagaacgtgcatgacagatttcttacactccctggaaaggggccaggtcctcccagcggattcactactgaacctcgtagatgtggaattaatttacggaggtgttaagtacattctcaaggtggcccggcagtctctgaccatgttcgttctcatcatgaatggctgccacatcgagattgatgcccaccggctgaatgatggggggctcctgctctcctacaatgggaacagctacaccacctacatgaaggaagaggttgacagttaccgaattaccatcggcaataagacgtgtgtgtttgagaaggagaacgatcctacagtcctgagatccccctcggctgggaagctgacacagtacacagtggaggatgggggccacgttgaggctgggagcagctacgctgagatggaggtgatgaagatgatcatgaccctgaacgttcaggaaagaggccgggtgaagtacatcaagcgtccaggtgccgtgctggaagcaggctgcgtggtggccaggctggagctcgatgacccttctaaagtccacccggctgaaccgttcacaggagaactccctgcccagcagacactgcccatcctcggagagaaactgcaccaggtcttccacagcgtcctggaaaacctcaccaacgtcatgagtggcttttgtctgccagagcccgtttttagcataaagctgaaggagtgggtgcagaagctcatgatgaccctccggcacccgtcactgccgctgctggagctgcaggagatcatgaccagcgtggcaggccgcatccccgcccctgtggagaagtctgtccgcagggtgatggcccagtatgccagcaacatcacctcggtgctgtgccagttccccagccagcagatagccaccatcctggactgccatgcagccaccctgcagcggaaggctgatcgagaggtcttcttcatcaacacccagagcatcgtgcagttggtccagagataccgcagcgggatccgcggctatatgaaaacagtggtgttggatctcctgagaagatacttgcgtgttgagcaccattttcagcaagcccactacgacaagtgtgtgataaacctcagggagcagttcaagccagacatgtcccaggtgctggactgcatcttctcccacgcacaggtggccaagaagaaccagctggtgatcatgttgatcgatgagctgtgtggcccagacccttccctgtcggacgagctgatctccatcctcaacgagctcactcagctgagcaaaagcgagcactgcaaagtggccctcagagcccggcagatcctgattgcctcccacctcccctcctacgagctgcggcataaccaggtggagtccattttcctgtctgccattgacatgtacggccaccagttctgccccgagaacctcaagaaattaatactttcggaaacaaccatcttcgacgtcctgcctactttcttctatcacgcaaacaaagtcgtgtgcatggcgtccttggaggtttacgtgcggaggggctacatcgcctatgagttaaacagcctgcagcaccggcagctcccggacggcacctgcgtggtagaattccagttcatgctgccgtcctcccacccaaaccggatgaccgtgcccatcagcatcaccaaccctgacctgctgaggcacagcacagagctcttcatggacagcggcttctccccactgtgccagcgcatgggagccatggtagccttcaggagattcgaggacttcaccagaaattttgatgaagtcatctcttgcttcgccaacgtgcccaaagacacccccctcttcagcgaggcccgcacctccctatactccgaggatgactgcaagagcctcagagaagagcccatccacattctgaatgtgtccatccagtgtgcagaccacctggaggatgaggcactggtgccgattttacggacattcgtacagtccaagaaaaatatccttgtggattatggactccgacgaatcacattcttgattgcccaagagaaagaatttcccaagtttttcacattcagagcaagagatgagtttgcagaagatcgcatttaccgtcacttggaacctgccctggccttccagctggaacttaaccggatgcgtaacttcgatctgaccgccgtgccctgtgccaaccacaagatgcacctttacctgggtgctgccaaggtgaaggaaggtgtggaagtgacggaccataggttcttcatccgcgccatcatcaggcactctgacctgatcacaaaggaagcctccttcgaatacctgcagaacgagggtgagcggctgctcctggaggccatggacgagctggaggtggcgttcaataacaccagcgtgcgcaccgactgcaaccacatcttcctcaacttcgtgcccactgtcatcatggaccccttcaagatcgaggagtccgtgcgctacatggttatgcgctacggcagccggctgtggaaactccgtgtgctacaggctgaggtcaagatcaacatccgccagaccaccaccggcagtgccgttcccatccgcctgttcatcaccaatgagtcgggctactacctggacatcagcctctacaaagaagtgactgactccagatctggaaatatcatgtttcactccttcggcaacaagcaagggccccagcacgggatgctgatcaatactccctacgtcaccaaggatctgctccaggccaagcgattccaggcccagaccctgggaaccacctacatctatgacttcccggaaatgttcaggcaggctctctttaaactgtggggctccccagacaagtatcccaaagacatcctgacatacactgaattagtgttggactctcagggccagctggtggagatgaaccgacttcctggtggaaatgaggtgggcatggtggccttcaaaatgaggtttaagacccaggagtacccggaaggacgggatgtgatcgtcatcggcaatgacatcacctttcgcattggatcctttggccctggagaggaccttctgtacctgcgggcatccgagatggcccgggcagagggcattcccaaaatttacgtggcagccaacagtggcgcccgtattggcatggcagaggagatcaaacacatgttccacgtggcttgggtggacccagaagacccccacaaaggatttaaatacctgtacctgactccccaagactacaccagaatcagctccctgaactccgtccactgtaaacacatcgaggaaggaggagagtccagatacatgatcacggatatcatcgggaaggatgatggcttgggcgtggagaatctgaggggctcaggcatgattgctggggagtcctctctggcttacgaagagatcgtcaccattagcttggtgacctgccgagccattgggattggggcctacttggtgaggctgggccagcgagtgatccaggtggagaattcccacatcatcctcacaggagcaagtgctctcaacaaggtcctgggaagagaggtctacacatccaacaaccagctgggtggcgttcagatcatgcattacaatggtgtctcccacatcaccgtgccagatgactttgagggggtttataccatcctggagtggctgtcctatatgccaaaggataatcacagccctgtccctatcatcacacccactgaccccattgacagagaaattgaattcctcccatccagagctccctacgacccccggtggatgcttgcaggaaggcctcacccaactctgaagggaacgtggcagagcggattctttgaccacggcagtttcaaggaaatcatggcaccctgggcgcagaccgtggtgacaggacgagcaaggcttggggggattcccgtgggagtgattgctgtggagacacggactgtggaggtggcagtccctgcagaccctgccaacctggattctgaggccaagataattcagcaggcaggacaggtgtggttcccagactcagcctacaaaaccgcccaggccgtcaaggacttcaaccgggagaagttgcccctgatgatctttgccaactggagggggttctccggtggcatgaaagacatgtatgaccaggtgctgaagtttggagcctacatcgtggacggccttagacaatacaaacagcccatcctgatctatatcccgccctatgcggagctccggggaggctcctgggtggtcatagatgccaccatcaacccgctgtgcatagaaatgtatgcagacaaagagagcaggggtggtgttctggaaccagaggggacagtggagattaagttccgaaagaaagatctgataaagtccatgagaaggatcgatccagcttacaagaagctcatggaacagctaggggaacctgatctctccgacaaggaccgaaaggacctggagggccggctaaaggctcgcgaggacctgctgctccccatctaccaccaggtggcggtgcagttcgccgacttccatgacacacccggccggatgctggagaagggcgtcatatctgacatcctggagtggaagaccgcacgcaccttcctgtattggcgtctgcgccgcctcctcctggaggaccaggtcaagcaggagatcctgcaggccagcggggagctgagtcacgtgcatatccagtccatgctgcgtcgctggttcgtggagacggagggggctgtcaaggcctacttgtgggacaacaaccaggtggttgtgcagtggctggaacagcactggcaggcaggggatggcccgcgctccaccatccgtgagaacatcacgtacctgaagcacgactctgtcctcaagaccatccgaggcctggttgaagaaaaccccgaggtggccgtggactgtgtgatatacctgagccagcacatcagcccagctgagcgggcgcaggtcgttcacctgctgtctaccatggacagcccggcctccacctgaccgtggcccgcccagccactcccgggaccacggcaaaaggaaccacccagacccaccacccgtacaccctcagcagaccctgaagacttgcttttaaacaaagaaaatcctgggcacttctgcagggctgctggttccgagctgacacccgtcttaacaaaaggcccaggagtgcctcttccaaacaaaaacagcctcctctccatagctgggaagtttattttgttttgtctctgaagacagcagttttattgcatcactaaatctaatcaagctaaaacatccctgtttccttttgcaaaacagtgcctggcatgtgggatccaggcgttctttaggatccttggataccacatcgtgaaatcttttatttttttactctgagaccagcaccagatgtaagtaagcatctcatatatttcagccaaataaatgggccaagggaaaaaaatatatatatatagacaggactagagaaaacctatttttgtaatgatgtttctttggatactgtctagtcacccagaaaaatgtatggatgaatttttttttttttttttgagacaaagtctcactgtgtcatgcaggctggagtgcagtggcatgatctcactgcaacctccatctcctgtctcagcctcctagataactgggattacaggtgcccaccaccatgcccggctaatttttgtatttttggtagagacagagtttcaccaggttggtcaggctggtctcaaactcttgacttcaggtaatccacccaccttggcctcccaaagtgctgggattacaggcatgagccaccatcttcagccagatgatttttttattgagagagtgaaatgctattttgttccccaaatggcgctagtgaatcactaggagggtcccactgataggccatgtttagcactggttgccagggattctctttttgagagagggaaagcaaaatgaatggaagtacccagctggaggtttcagggcttctggaggatgctctcgcatagctcgaggtcctctgcccacctcttctctccaaggaaaatgaggactgccccttccccctgcaggattggcccccagcctgcgcatgcaccctcctcttgcccaagtggggagcacagaggcggagaggaatcccttaccacacccacggcccagcttgctcacgagtgtcacctctgtgacggtcaccactgctcccttggagggccacttgagttactgttgcttcctcgcctgctggcttgatgagcaccgatggtgggatctgaccccgaggggcagagctgtcggtgactgaggactggactgtggtgaccatgccgatttgctcagggagaacgttgcaatgcacccagcagctcctggctctgcaggcggcacagcctggggccctgtgatcctctggtttcttccattggggcggagtcggggatggagggagctggccacaacccactgctctgatgggtggtttgtccaaggatgctgaatgtaatgcctggtcaatgtggaagcccatgaggttgcccagggaagcctccaaaagctgggatgcttgagggtatccaagttgaaaaagacaaaatctgaccatcagccagtgacagtcctggcaaatgaaggtggggcggggcagtgaggggtgggagaaggtgaatgattcattattccaccccgaggtttgctggggtgaggggaagaatcgatgctgctttgggaactgaaggtttttctgttgggaaggccctcttggttttggagagaaagacaagttatgagtagctgctaccctggaacggtgggcagagagcctactaggaaatgtgcagaataaactattttttgaaggaaaaaaaaaaaaa

SEQ ID NO: 8 - DNA, 3470 bp, Homo sapiens
cacctgggagagccgaggcgagaagcgacacttccctgcggctagcatccttgaaggaccccggcggcgaacagcctcccgcaggacgccctgagaagctctcagccccaggcgagagcgggcgcctggcaggacttaggcgcaggacttggggaagcctaagcaggtctctgccgagcgcagcccagggagcagtaacaaggaagggtcctggaggggaagggaaagaaggcggcagccggcaaggcgaccactcacccccgtacacacccaccccgcccgcccagccaggagccgcggtgcgcctctgggggcgctcgttccttggcgccttctctcccgtgtcccagcaccgctgggctacgggccgggctggtggggtccctggggatgtccagatcaggcatggtggccgagtggcccttctcccaggaccagcgtaaaagctggggttaggcggggcaggggggactcggctcagggtcccccgaggtccaggacgagggaaggcgggcgcagcacccagggactggagaggcggctcccagtgggacccctccagaagtagtgccgggcgccgggcatcctccaggaagaccaggggccgggaaagcctgggaggcgctcgggagaggccactgccaggggctgcgggctgaggcggcgctcagccccgggcgggcgcccgcggaggcggcagcggcggcgccgggcgggcatgccgcgccaccggagctcctttcgggcgcacgcttccctggcgcgggctgcgcgcggctgccgctgctgctgcttccactgctgctgcggactcccatggcggctccgcccggccggggccgccgccgctgccgccagccgcgggctgaatgaatgagccggattggcggagccgggctgcccgcagccgcgctcaccggcccgggacgcttccgcatggcccgcgaggagccggcgcccgcggcgttggcggctgccgggcagcccgggggcggcagaggcggcgagcgggcgctgcaggggccaggggtcgcccgcagggggcggccatcgctgagccgcgctaaactgcacgggctgcggcacatgtgtgccgggcgcacggcggctgggggctccttccagcggcgggcgctgtgggtgctggccttctgtacatccttcggcttgctgctgtcctggtcctcgaaccgcttgctctactggctcagcttcccgtcacacacgcgggtgcaccgcgagtggagccgccagttacccttccccgccgtcactgtgtgcaacaacaacccgctgcgcttcccgcgcctctccaagggggacctctactatgccggccactggctcgggctgctgctgcccaaccgcaccgcgcgcccgcttgtcagcgagctgctgcggggcgacgagccgcgccgccagtggttccgcaagctggcggacttccgcctcttcctgcctccgcgccacttcgagggaatcagcgccgccttcatggaccgcctgggccaccagctggaggacatgctgctctcctgcaagtaccgcggcgagctctgcgggccgcacaacttctcctccgtgtttacaaaatatgggaagtgttacatgtttaactcaggcgaggatggcaaacctctgctcaccacggtcaagggggggacaggcaacgggctggagatcatgctggacattcagcaggatgagtacctgcccatctggggagagacagaggaaacgacatttgaagcaggagtgaaagttcagatccacagtcagtctgagccacctttcatccaagagctgggctttggggtggctccagggttccagacctttgtggccacacaggagcagaggctcacatacctgcccccaccgtggggtgagtgccgatcctcagagatgggcctcgacttttttcctgtttacagcatcaccgcctgtaggattgactgtgagacccgctacattgtggaaaactgcaactgccgcatggttcacatgccaggggatgcccctttttgtacccctgagcagcacaaggagtgtgcagagcctgccctaggtctgttggcggaaaaggacagcaattactgtctctgcaggacaccctgcaacctaacccgctacaacaaagagctctccatggtgaagatccccagcaagacatcagccaagtaccttgagaagaaatttaacaaatcagaaaaatatatctcagagaacatccttgttctggatatattttttgaagctctcaattatgagacaattgaacagaagaaggcgtatgaagttgctgccttacttggtgatattggtggtcagatgggattgttcattggtgctagtatccttacaatactagagctctttgattatatttatgagctgatcaaagagaagctattagacctgcttggcaaagaggaggacgaagggagccacgatgagaatgtgagtacttgtgacacaatgccaaaccactctgaaaccatcagtcacactgtgaacgtgcccctgcagacgaccctggggaccttggaggagattgcctgctgacacccctcgagtcacccagcactccctccaaacagaccttgaggcccaagacccaggacaaggaacagcaagctcaggtgggatggccccagtgctggaaagaagcaagagccccctatgcacacattgcagactagctgcctagacctcgctccggccacgtccaacacgacgcatccttgggccccgccgtgcgtccctcttaggagagatgagtcacactctggaactgtccaagaacgaacctgccatcacatctcactgccagatgtataaagcacctgcatgctcagacttcttgtggcgccacctccacgtctgtcttgtacatgacactcctccacgcggtttccagtgtccacactgctgcccgtgcagtgggaccagattccaggtccaaagtcaccatgaggccaccctggaatcagaactgcacaatcaagagggaacccatgggactctctgctacattcagttcttgtgtcgtttgtgaaagttcttaacctgcccaaaaacccccttttccccaagctgcccatggggcttcggcgccaaaggtgacccgcgccaacctccctcccccccagtgcctatgacggcggcacagcagccagcgggtgggggacgcctgtgttcacccatggtgcccatgtcgttcttctctccctgtgacacagcttgtacagtctgattctttttatctggggtaggggggcttttatgtttgtccgatggagatttgttttgttttgcttcattttatgcttttttattttagttttgatgttctgaggtttgctttggtttttccattttctttggcatttatttattcgtgcttcaaatcacagtcatattaaaagctggtcttgtggaaaaaaaaaaaaaaaaaaaaaaaaaaaaaa

SEQ ID NO: 9 - DNA, 2747 bp, Homo sapiens
ctcttccacatcaccttggtgtctccctaaataaaaccagccctccttatcgcctggaaaaaatcaagagctagagtttgaatgggttttatataaacactcacccctgtcagcgtgcggctgggctctcaggataaactcacagcatctggcgcgatgcttgccttgcgttctctcccctgaacgtcaaggtttaagcagagcccgaggactgggagctcttctctgaaattcgatcaacctgaagccagttgcggaactgcacggggtcccgatggacctcaaggaaagccccagtgagggcagcctgcaaccttctagcatccagatctttgccaacacctccaccctccatggcatccgccacatcttcgtgtatgggccgctgaccatccggcgtgtgctgtgggcagtggccttcgtgggctctctgggcctgctgctggtggagagctctgagagggtgtcctactacttctcctaccagcatgtcactaaggtggacgaagtggtggctcaaagcctggtcttcccagctgtgaccctctgtaacctgaatggcttccggttctccaggctcaccaccaatgacctgtaccatgctggggagctgctggccctgctggatgtcaacctgcagatcccggacccccatctggctgacccctccgtgctggaggccctgcggcagaaggccaacttcaagcactacaaacccaagcagttcagcatgctggagttcctgcaccgtgtgggccatgacctgaaggatatgatgctctactgcaagttcaaagggcaggagtgcggccaccaagacttcaccacagtgtttacaaaatatgggaagtgttacatgtttaactcaggcgaggatggcaaacctctgctcaccacggtcaagggggggacaggcaacgggctggagatcatgctggacattcagcaggatgagtacctgcccatctggggagagacagaggaaacgacatttgaagcaggagtgaaagttcagatccacagtcagtctgagccacctttcatccaagagctgggctttggggtggctccagggttccagacctttgtggccacacaggagcagaggctcacatacctgcccccaccgtggggtgagtgccgatcctcagagatgggcctcgacttttttcctgtttacagcatcaccgcctgtaggattgactgtgagacccgctacattgtggaaaactgcaactgccgcatggttcacatgccaggggatgcccctttttgtacccctgagcagcacaaggagtgtgcagagcctgccctaggtctgttggcggaaaaggacagcaattactgtctctgcaggacaccctgcaacctaacccgctacaacaaagagctctccatggtgaagatccccagcaagacatcagccaagtaccttgagaagaaatttaacaaatcagaaaaatatatctcagagaacatccttgttctggatatattttttgaagctctcaattatgagacaattgaacagaagaaggcgtatgaagttgctgccttacttggtgatattggtggtcagatgggattgttcattggtgctagtatccttacaatactagagctctttgattatatttatgagctgatcaaagagaagctattagacctgcttggcaaagaggaggacgaagggagccacgatgagaatgtgagtacttgtgacacaatgccaaaccactctgaaaccatcagtcacactgtgaacgtgcccctgcagacgaccctggggaccttggaggagattgcctgctgacacccctcgagtcacccagcactccctccaaacagaccttgaggcccaagacccaggacaaggaacagcaagctcaggtgggatggccccagtgctggaaagaagcaagagccccctatgcacacattgcagactagctgcctagacctcgctccggccacgtccaacacgacgcatccttgggccccgccgtgcgtccctcttaggagagatgagtcacactctggaactgtccaagaacgaacctgccatcacatctcactgccagatgtataaagcacctgcatgctcagacttcttgtggcgccacctccacgtctgtcttgtacatgacactcctccacgcggtttccagtgtccacactgctgcccgtgcagtgggaccagattccaggtccaaagtcaccatgaggccaccctggaatcagaactgcacaatcaagagggaacccatgggactctctgctacattcagttcttgtgtcgtttgtgaaagttcttaacctgcccaaaaacccccttttccccaagctgcccatggggcttcggcgccaaaggtgacccgcgccaacctccctcccccccagtgcctatgacggcggcacagcagccagcgggtgggggacgcctgtgttcacccatggtgcccatgtcgttcttctctccctgtgacacagcttgtacagtctgattctttttatctggggtaggggggcttttatgtttgtccgatggagatttgttttgttttgcttcattttatgcttttttattttagttttgatgttctgaggtttgctttggtttttccattttctttggcatttatttattcgtgcttcaaatcacagtcatattaaaagctggtcttgtggaaaaaaaaaaaaaaaaaaaaaaaaaaaaaaaaaaaaaaaaaaaaaaaaaaaaaaaaaaa

SEQ ID NO: 10 - DNA, 4934 bp, Homo sapiens
cttttctctcgaagggcacccgaagattgtcacgagtccttagactccaactactgcggcagcttccaaatttcctaaaaccctaagctgggccagcccggcagcccacgcacttccggcctcggacccgccccaaacacccaagcgccccagcgcctcatctctaggtccggaaataaacgaacatctccgattatggttataccagggtcgagggtttccgaatatattcgattcaaagcttcggcaagacgaagaaaaccgagcctgaaagcagggcgagaaaaggggcgctgcagggcggatggaaagaattgattggtaacgatgtggagacggaaacatccgaggacatccggaggaacccggggagttctgagtggtaatcgaggggtagagtatggcagtgggcggggtcatctcggtacgttcgaagggcgttggcggaaattaccgaagatgcccgaagccgtcgggacggacccgagtacctcacgcaagatggcggagctggaggaggtgactctggacgggaagcctcttcaggcgctgcgggtgaccgacctgaaggccgcactggagcagcgaggcctagccaagagcgggcagaagagtgccctggtcaagcggctcaaaggggctctaatgctagaaaatttacagaaacactcaacaccccatgctgcattccagccaaattcccagattggtgaggaaatgagccagaacagtttcataaaacagtatctggaaaagcagcaggagctacttaggcagcgtctggaacgtgaagctcgagaagctgcagaacttgaagaagcttcagctgagtcggaggacgagatgatccatcctgagggagtggcttccctgctgcctcctgactttcagagcagcctggagagaccagagctggagctcagcagacattcgcccagaaaaagctcctcaatttctgaagagaaaggtgactctgatgatgagaaaccaaggaaaggagaaagacgatcatctagggtcagacaggcaagagcagctaaactgtctgagggcagccaacctgctgaggaggaagaggatcaagaaacaccttccagaaacctaagggtcagagcagatcgaaatttgaaaacagaggaggaagaagaggaggaggaggaggaggaagaagatgatgaagaagaggaaggtgatgatgagggacaaaaatctagggaggcaccaatcctgaaagagtttaaggaagaaggggaagagatacctagagtaaaaccagaggagatgatggatgagagacccaaaacaagatcccaggaacaggaggtgttagagagaggagggagatttacaagatcccaggaagaggctagaaaaagtcatctggccagacagcagcaggagaaggaaatgaaaacaacatctccccttgaggaggaagaaagagaaataaaatcttcacaaggcttaaaggaaaaatcgaagtctccttcccctcctcgactgactgaagatcgaaagaaggcctcacttgtagcgctgccagagcaaactgccagcgaggaggagactcctccacctttactaacaaaggaagcatcttctccaccacctcatccacagctccatagcgaagaagaaatagagcccatggaaggcccagccccccctgtcctcattcagttatctcctcctaatacagatgctgacaccagggagctattagtatctcagcatactgtccagttggtaggaggcctgtctcctttgtcaagtccttcagacaccaaagcagaatctccagcagagaaagtgccagaggagagtgtcctgcctctggttcagaaaagcacactggctgactactcagcccagaaggatcttgaacctgagtcagacagatctgctcagcccctccctctaaaaattgaggaattagcactggccaaaggaatcactgaagaatgtctgaaacagccatctttggaacagaaggaaggcagaagagcttctcatacccttctcccaagccacagattgaaacagtcagctgattcatcctctagccggtcctcctcatcttcctcctccagttctagatcaagatctcgctctcctgacagttcaggttctcggtctcattcaccgctcagatccaagcagagagatgtagcccaggcacgtactcatgccaaccctcgtggtagacccaagatgggctccagatcaacatcagagtccagatcaaggtcacgttcacgttctcgttcagcatcaagcaacagcagaaaatctctgagccctggagtctccagggacagcagcaccagctatactgaaaccaaagatccctcttctggtcaggaggttgcaactccaccagtgccacaactgcaggtctgtgagccaaaggagaggacttccacctcctcatcctctgtccaagcaaggcgtctgagtcagcctgaatcagctgaaaagcatgtgacccagaggttacagcctgagcgggggagcccaaagaagtgtgaagctgaagaggcagagccaccagctgccacacagccccaaacctcagagactcagacctctcatctgccagaatcagaaagaattcatcacactgttgaggagaaggaggaagtgaccatggacacaagtgaaaacagacctgaaaatgatgttccagaacctcccatgcctattgcagaccaagtcagcaatgatgaccgcccggagggcagtgttgaagatgaggagaagaaagagagctcgctgcccaaatcattcaagaggaagatctccgttgtctcagctaccaagggggtgccagctggaaacagtgacacagaggggggccagcctggtcggaaacgacgctggggagccagcacagccaccacacagaagaaaccttccatcagtatcaccactgaatcactaaagagcctcatccccgacatcaaacccctggcggggcaggaggctgttgtggatcttcatgctgatgactctcgcatctctgaggatgagacagagcgtaatggcgatgatgggacccatgacaaggggctgaaaatatgccggacagtcactcaggtagtacctgcagagggccaggagaatgggcagagggaagaagaggaagaagagaaggaacctgaagcagaacctcctgtacctccccaggtgtcagtagaggtggccttgcccccacctgcagagcatgaagtaaagaaagtgactttaggagataccttaactcgacgttccattagccagcagaagtccggagtttccattaccattgatgacccagtccgaactgcccaggtgccctccccaccccggggcaagattagcaacattgtccatatctccaatttggtccgtcctttcactttaggccagctaaaggagttgttggggcgcacaggaaccttggtggaagaggccttctggattgacaagatcaaatctcattgctttgtaacgtactcaacagtagaggaagctgttgccacccgcacagctctgcacggggtcaaatggccccagtccaatcccaaattcctttgtgctgactatgccgagcaagatgagctggattatcaccgaggcctcttggtggaccgtccctctgaaactaagacagaggagcagggaataccacggcccctgcaccccccacccccacccccggtccagccaccacagcacccccgggcagagcagcgggagcaggaacgggcagtgcgggaacagtgggcagaacgggaacgggaaatggagcggcgggagcggactcgatcagagcgtgaatgggatcgggacaaagttcgagaagggccccgttcccgatcaaggtcccgtgaccgccgccgcaaggaacgtgcgaagtctaaagaaaagaagagtgagaagaaagagaaagcccaggaggaaccacctgccaagctgctggatgaccttttccgaaagaccaaggcagctccctgcatctattggctcccactgactgacagccagatcgttcagaaagaggcagagcgggccgaacgggccaaggagcgggagaagcggcgaaaggagcaagaagaagaagagcaaaaggagcgggagaaggaagccgagcgggaacggaaccgacagctggagcgagagaaacgtcgggagcacagtcgggagagggacagggagagagagagagaaagggagcgggacaggggggaccgagatcgggatagggaaagggaccgagaacgaggcagggaaagggatcgcagggacaccaagcgccacagcagaagccggagtcggagcacacctgtgcgggaccggggtgggcgccgctagctgggaaaacactagagctgcaggtaccagccactcggccccagggggttatggccacagagggataggcacagtctccaccaccctggagccaagggtctttcacatcacctatccctacatacataccaaatggaaaagtggccatccttttccccccaaacacacccccttaacctatctcttgggacttagcccgaccctccctctcatttcccattaagtctgagaggcaagagctaggttaggcaaggaggtggttggccagagatggggaacagccaggtgccccagtcctctgatttttcctccatcctgcttaccacctccctgggtacttacagccttctcttgggaacagccggggccaggactgggtcacctatgagctgaatcagcatctcctcctgagtcccagggcccctgcagttcccagtctcttctgtcctgcagcccttgcctctttcccacaggttccactttatatccaccttttccttttgttcaatttttatttttattttttttattattaaatgatgtggtctatggaaaaaaaaataaaaatctgacttagtttt

SEQ ID NO: 11 - DNA, 1832 bp, Homo sapiens
gtccctgagtaggtgaggaggtgggtaggagcttgcttatagaaaagtggaatcgagtagtccttgctggtggagccgctgccgccagggaactcagggccggctcctgttccttcaagagtgctggaggccaaacttgaaatacaagtttaatgttcctcgtcgggcaaaagataaggatccgatctcccccggcccggtgtgcagcaggagcgaccaaccccgacccgggttaaaactcccagggactcttcgctgctgccacctcttgttctctcccccgttcccactcggggtctccctcagggccgggaggcacagcggtccctgcttgctgaagggctggatgtacgcatccgcaggttcccgcggacttgggggcgcccgctgagccccggcgcccgcagaagacttgtgtttgcctcctgcagcctcaacccggagggcagcgagggcctaccaccatgatcactggtgtgttcagcatgcgcttgtggaccccagtgggcgtcctgacctcgctggcgtactgcctgcaccagcggcgggtggccctggccgagctgcaggaggccgatggccagtgtccggtcgaccgcagcctgctgaagttgaaaatggtgcaggtcgtgtttcgacacggggctcggagtcctctcaagccgctcccgctggaggagcaggtagagtggaacccccagctattagaggtcccaccccaaactcagtttgattacacagtcaccaatctagctggtggtccgaaaccatattctccttacgactctcaataccatgagaccaccctgaaggggggcatgtttgctgggcagctgaccaaggtgggcatgcagcaaatgtttgccttgggagagagactgaggaagaactatgtggaagacattccctttctttcaccaaccttcaacccacaggaggtctttattcgttccactaacatttttcggaatctggagtccacccgttgtttgctggctgggcttttccagtgtcagaaagaaggacccatcatcatccacactgatgaagcagattcagaagtcttgtatcccaactaccaaagctgctggagcctgaggcagagaaccagaggccggaggcagactgcctctttacagccaggaatctcagaggatttgaaaaaggtgaaggacaggatgggcattgacagtagtgataaagtggacttcttcatcctcctggacaacgtggctgccgagcaggcacacaacctcccaagctgccccatgctgaagagatttgcaaggatgatcgaacagagagctgtggacacatccttgtacatactgcccaaggaagacagggaaagtcttcagatggcagtaggcccattcctccacatcctagagagcaacctgctgaaagccgtggactctgccactgcccccgacaagatcagaaagctgtatctctatgcggctcatgatgtgaccttcataccgctcttaatgaccctggggatttttgaccacaaatggccaccgtttgctgttgacctgaccatggaactttaccagcacctggaatctaaggagtggtttgtgcagctctattaccacgggaaggagcaggtgccgagaggttgccctgatgggctctgcccgctggacatgttcttgaatgccatgtcagtttataccttaagcccagaaaaataccacgcactctgctctcaaactcaggtgatggaagttggaaatgaagagtaactgatttataaaagcaggatgtgttgattttaaaataaagtgcctttatacaatgccaaaaaaaaaaaaaaaaaaaaaaaa

SEQ ID NO: 12 - DNA, 3693 bp, Homo sapiens
tggctgatcctctcccctgcccttggctccatgaatggcctcggcagtcctagcgggtgcgaaggggaccaaataaggcaaggtggcagaccgggccccccacccctgcccccggctgctccaactgaccctgtccatcagcgttctataaagcggccctcctggagccagccacccagagcccgctgccgccggagccgagccgacccgccccgccgacgaaccccctgaagctgtgccaagatgtgtgacgacgaggagaccaccgccctggtgtgcgacaacggctctgggctggtgaaggccggctttgcgggcgatgacgcgccccgcgctgtcttcccgtccatcgtgggccgcccgcggcaccagggagttatggtgggtatgggtcagaaggactcctacgtaggtgatgaagcccagagcaagagaggcatcctgaccctgaagtatcccatcgagcatggtatcatcaccaactgggacgacatggagaagatctggcaccacaccttctacaatgagctccgtgtggctcccgaggagcaccccaccctgctcacagaggccccgctgaaccccaaggccaaccgggagaagatgactcagatcatgtttgagaccttcaatgtccctgccatgtacgtggccatccaggcagtgctatccctgtatgcttctggccgtaccacaggcattgttctggactctggggatggtgtaactcacaatgtccccatctatgagggctacgctttgccccatgccatcatgcgtctggatctggctggtcgggacctcactgactacctcatgaagatcctcactgagcgtggctactcctttgtcaccactgctgaacgtgaaattgtccgtgacattaaagagaagctgtgctatgtcgccctggattttgagaatgagatggccacagctgcctcttcctcctccctggagaagagctatgaactgcctgatggccaagtcatcactattggcaatgagcgcttccgctgtcctgagacactcttccagccctccttcattggtatggaatctgctggcatccatgaaacaacttacaatagcatcatgaagtgtgacattgatatccgcaaggacctgtatgccaacaatgtcttatctggaggcaccactatgtaccctggtattgctgatcgtatgcagaaggaaatcactgctctggctcctagcaccatgaagattaagattattgctccccctgagcgtaaatactctgtctggattgggggctccatcctggcctctctgtccaccttccagcaaatgtggattagcaagcaagagtacgatgaggcaggcccatccattgtccaccgcaaatgcttctaagatgccttctctctccatctaccttccagtcaggatgacggtattatgcttcttggagtcttccaaaccaccttccctcatctttcatcaatcattgtacagtttgtttacacacgtgcaatttgtttgtgcttctaatatttattgctttataaataaaccagaccaggacttgcaacctataaaagcctctcgtttgtttttggggtaggcgtggggtggggcaggtgtttgctttgacaccctgagcattgtcaaagttcagtaccacaaggttcatccagatgaattaatatgacagttagctgggagttataatgctaacttttgatttcatattttgagacagaatcatgaatatatttcatacctgaaaagcagattaaggtttagttccatataagtaagaaatgaaattgaataagatagttctctagaattagttgctgcagatgacactgaagattattttaacatatgttccagttgtttttgtaaccttgcagaaaatacacatatattgataatgagaaagtcaaagattattttaaatgaattggcttaacttttcaattctttgaactcttcaattttcttcctgggggctatgaaagaaacatgaaggttagctgacagttgggccagccacatcccattgcaaataccctctaaacatatcaagaccattgtgtgtgtgcaaaacaaatgtgaggaagcaggagccaaacacttctgcctgatcagtgactaacttgcgagacagaagccttcaatctcttcgtttctttgaaatcttgagatcttgggttgagtgaactgaaggctgcgaggtcctgagggagcaaggggaggcgagagccacagtgtttgctttgctctgtgcagagctctctgcaaagtatggtgggaaggctgctaggggcagcgttgaaaagaattgaatgtgttccatcctcgaggagttcacacacctacacataatcccccagtgcgtgtggcctggaggctttaaggagatgtatgtgggtctgggtcttagagaatggtcaggaattagggaggtgagaagagcagagaggacatctcagcagaaggaagtgtggcagaagccaggatacaagacatggggcaggctggtaggtgctgatgaattttagaaaatccactgggaaaggtagatttcaactagattgcagaagccttacagatttttgttttcaaattaattgccagtgaactgttagcattcacagaagtgtttgaatagacttaattgaattttattgatgaggattcaagacacagagattaagcaactggtgcaatgttataaactttatttgtggaatgtgctagacaggaactcagattttctgacacctactctgatggtgtctctaaaataatctttctaactttatagtttatcaagggtaaccccattctatcacatgccttttgagaatttgggttcaatatttggagtactctggactcatcagacatctttaataaattgtaatacattgccactgtcattcaaggtcctatgtgtgtctttttgcctattcataccaaaaatatcttttgatccctgactctgggtcgggcatagtattaagggcaggggacacaaagatgtatgagagcacattttctgtgaataaaaagctcagagtttagagttctgtatgtagcatattcaaatggaaggccttctatgcaataaaggctaaataatacatcaacttggtggcattttatttagataaggtgcaaacattattgtacatatgccccccgcccccaccaccccattgtatcctatagcacagttgaactggtttaaaagccatgcatggggaggtatgatttcactagtttttgtgtctctttcttttcctctgtacaattgagtgcataaatattatgaattgtatcctctgaacacagtattaatgctttaactgtagatgattggctggggtatcacctctggttctttccatctgtgattagaaatggagaggacatttttatttctatgtaaaagtagaagctttaagaatcagcttctgatatttatatcagaagaggtaagcacccagattcttgttgaattctgaggtcttctcatctttgcttgattatagggtataaagtattagaacaattgaatcttaaaaattgtgcttaaggaaggtactaagacaaaaatgtttgcttaaggtaatcttcatatgtatacaataactgagacatggatagtgcctacgtctttggttaaagtgcaataaacaaagaactatataaatt

SEQ ID NO: 13 - DNA, 4528 bp, Homo sapiens
attaagccgcgcggcagctgctcgcagccggagctggtgcttcgcccgagacccagcgcccaggcgtgtcgccccgagaggagccgcgcgaaggtcaccccgcgcccgccgcccgccgcccgccgcctccgtgggtccgtttgccagtcagcccgtgcgtccgagcccctcgcgccccgccgcagccccggccaaccgagcgccatgaaccagatagagcccggcgtgcagtacaactacgtgtacgacgaggatgagtacatgatccaggaggaggagtgggaccgcgacctgctcctggacccagcctgggagaagcagcagaggaagaccttcactgcctggtgtaactcccacctaaggaaagccggcacccagattgagaacatcgaggaagacttcaggaatggccttaagctcatgctgcttttggaagtcatctcaggggaaaggctgcccaaacctgaccggggaaaaatgcggttccacaaaattgctaatgtcaacaaagctttggattacatagccagcaaaggggtgaaactggtgtccatcggcgctgaagaaattgttgatggcaatgtgaaaatgaccctgggtatgatctggaccatcatccttcgctttgctattcaggatatttcggttgaagaaacatctgccaaagaaggtctgctgctttggtgtcagaggaaaactgctccttatagaaatgtgaacattcagaacttccatactagctggaaagatggccttggactctgtgccctcatccaccgacaccggcctgacctcattgactactcaaagcttaacaaggatgaccccataggaaatattaacctggccatggaaatcgctgagaagcacctggatattcctaaaatgttggatgctgaagacatcgtgaacacccctaaacccgatgaaagagccatcatgacgtacgtctcttgcttctaccacgcttttgcgggcgcggagcaggccgagacagcggctaacaggatatgtaaggttcttgctgtgaatcaagagaatgagaggctgatggaagaatatgagaggctagcgagtgagcttttggaatggattcgtcgcacgatcccctggctggagaaccggactcccgagaagaccatgcaagccatgcagaagaagctggaggacttccgggattaccgccggaagcacaagccacccaaggtgcaggagaaatgccagctggagatcaacttcaacacgctgcagaccaagctgcggatcagcaaccgtcctgccttcatgccctccgagggcaagatggtgtcggatattgctggtgcctggcagaggctggagcaggctgagaagggttacgaggagtggttgctcaatgagattcggagactggagcgcttggaacacctggctgagaagttcaggcagaaggcctcaacgcacgagacttgggcttatggcaaagagcagatcttgctgcagaaggattacgagtcggcgtcgctgacagaggtgcgggctctgctgcggaagcacgaggcgttcgagagcgacctggcagcgcaccaggaccgcgtggagcagatcgcagccatcgcgcaggagctcaatgaactggactatcacgacgctgtgaatgtcaatgatcggtgccagaaaatttgtgaccagtgggaccgactgggaacgcttactcagaagaggagagaagccctagagagaatggagaaattgctagaaaccattgatcagcttcacctggagtttgccaagagggctgctcctttcaacaattggatggagggcgctatggaggatctgcaagatatgttcattgtccacagcattgaggagatccagagtctgatcactgcgcatgagcagttcaaggccacgctgcccgaggcggacggagagcggcagtccatcatggccatccagaacgaggtggagaaggtgattcagagctacaacatcagaatcagctcaagcaacccgtacagcactgtcaccatggatgagctccggaccaagtgggacaaggtgaagcaactcgtgcccatccgcgatcaatccctgcaggaggagctggctcgccagcatgctaacgagcgtctgaggcgccagtttgctgcccaagccaatgccattgggccctggatccagaacaagatggaggagattgcccggagctccatccagatcacaggagccctggaagaccagatgaaccagctgaagcagtatgagcacaacatcatcaactataagaacaacatcgacaagctggagggagaccatcagctcatccaggaggcccttgtctttgacaacaagcacacgaactacacgatggagcacattcgtgttggatgggagctgctgctgacaaccatcgccagaaccatcaatgaggtggagactcagatcctgacgagagatgcgaagggcatcacccaggagcagatgaatgagttcagagcctccttcaaccactttgacaggaggaagaatggcctgatggatcatgaggatttcagagcctgcctgatttccatgggttatgacctgggtgaagccgaatttgcccgcattatgaccctggtagatcccaacgggcaaggcaccgtcaccttccaatccttcatcgacttcatgactagagagacggctgacaccgacactgccgagcaggtcatcgcctccttccggatcctggcttctgataagccatacatcctggcggaggagctgcgtcgggagctgcccccggatcaggcccagtactgcatcaagaggatgcccgcctactcgggcccaggcagtgtgcctggtgcactggattacgctgcgttctcttccgcactctacggggagagcgatctgtgatgctgagcttctgtaatcactcatcccatcagaatgcaataaaagcggaagtcacagtttgtttcctggaaactttgacaagctttattaagttgagagagagagaggggaaaaaaaaaagcctttcgtagttcagtaattgccagcaatataacacggctaaaatgaagtttttacagtatatgacatagtgcgcttcataaataggtttatttctgagtttttagcaaaatgtaatgaaatatcaggttgatttctttgattaaacagaacaaattacttgagtaataggaaattaggaggatctagggacagaaggaaagtgaaaaatgtgaaaatacaaaatacccaagatttaagaccggggggaaaaaaccacaaattggtaaataaaggtttgctatttgtaaaaaatttcatttatctctaatatgcttatgtgattgcccctaggggagtatatttgggattctaatgttttattttcatgcttatccaaagattactattgtatcttcaaatgaatttaatattgtgagatggaactgccggggattaaaaagactacccaaaagatttttggcacttacaatttttaaaatagtttatgtcatctcttcattatttagggctggatggtcaactcagtcagtgattttttgatgcttctcttatcctccagaatagagacctaaggacacgtggaagtcagtttaattgccagagagaaggatgcaatcactaggtaaaatgaggtttttaggattatttattgattccaggttcccatgctttttgttagagcttattagtacaggttctcaagagatgaccacataaaagtgctctgtttataaataagcaggtttctgtagtactgactggttcatcacaaggcaagtcagaaaccagtatccttctagctctccagtcaggacttccttatgcctctagttttatgaccggttaaggagaagccagagttagagtaggagaggactaattctcagcagcagtggaggtgagttctttcttttgcggaagctttacatatgttttgtgtagtaggaataactagatattttagctagtgtgcggtgtgtgttcacccctgggattggacagtgtatcctaacaagtcccatgtctggttctgtgtctaaaggcctgctccatgacacaggatgctacatgcactcctgctagcacatcttgatctgttgaatgttcattctttctttttgctcatactgctgtaggctataattcccccctgtttttccatcttgttgacagcttgtagagaataaagcaggaattctttttatatctgagtccttaatgatcaggaaatggattacaaacaaacaaaaacagttgcaaacagcaattaaagcattactagagaagcagtaacatgtctgttacctacagtctgtttgctcagatttttatagatttccaccaacagctggaaatgtaatatttccattccaagctgtctgacagcttgactcttcttcctacactgggccatttagaaccttcaacctttatgaatttcacttaatttgcttcattattaagtaattggtagtttccagattcctgaaatatttgaatccttgagtttaatgcc

SEQ ID NO: 14 - DNA, 4540 bp, Homo sapiens
cgctgctgggctgcggcggcggcggcggcggcggtggttactatggcggagtcggccggagcctcctccttcttcccccttgttgtcctcctgctcgccggcagcggcgggtccgggccccggggggtccaggctctgctgtgtgcgtgcaccagctgcctccaggccaactacacgtgtgagacagatggggcctgcatggtttccattttcaatctggatgggatggagcaccatgtgcgcacctgcatccccaaagtggagctggtccctgccgggaagcccttctactgcctgagctcggaggacctgcgcaacacccactgctgctacactgactactgcaacaggatcgacttgagggtgcccagtggtcacctcaaggagcctgagcacccgtccatgtggggcccggtggagctggtaggcatcatcgccggcccggtgttcctcctgttcctcatcatcatcattgttttccttgtcattaactatcatcagcgtgtctatcacaaccgccagagactggacatggaagatccctcatgtgagatgtgtctctccaaagacaagacgctccaggatcttgtctacgatctctccacctcagggtctggctcagggttacccctctttgtccagcgcacagtggcccgaaccatcgttttacaagagattattggcaagggtcggtttggggaagtatggcggggccgctggaggggtggtgatgtggctgtgaaaatattctcttctcgtgaagaacggtcttggttcagggaagcagagatataccagacggtcatgctgcgccatgaaaacatccttggatttattgctgctgacaataaagataatggcacctggacacagctgtggcttgtttctgactatcatgagcacgggtccctgtttgattatctgaaccggtacacagtgacaattgaggggatgattaagctggccttgtctgctgctagtgggctggcacacctgcacatggagatcgtgggcacccaagggaagcctggaattgctcatcgagacttaaagtcaaagaacattctggtgaagaaaaatggcatgtgtgccatagcagacctgggcctggctgtccgtcatgatgcagtcactgacaccattgacattgccccgaatcagagggtggggaccaaacgatacatggcccctgaagtacttgatgaaaccattaatatgaaacactttgactcctttaaatgtgctgatatttatgccctcgggcttgtatattgggagattgctcgaagatgcaattctggaggagtccatgaagaatatcagctgccatattacgacttagtgccctctgacccttccattgaggaaatgcgaaaggttgtatgtgatcagaagctgcgtcccaacatccccaactggtggcagagttatgaggcactgcgggtgatggggaagatgatgcgagagtgttggtatgccaacggcgcagcccgcctgacggccctgcgcatcaagaagaccctctcccagctcagcgtgcaggaagacgtgaagatctaactgctccctctctccacacggagctcctggcagcgagaactacgcacagctgccgcgttgagcgtacgatggaggcctacctctcgtttctgcccagccctctgtggccaggagccctggcccgcaagagggacagagcccgggagagactcgctcactcccatgttgggtttgagacagacaccttttctatttacctcctaatggcatggagactctgagagcgaattgtgtggagaactcagtgccacacctcgaactggttgtagtgggaagtcccgcgaaacccggtgcatctggcacgtggccaggagccatgacaggggcgcttgggaggggccggaggaaccgaggtgttgccagtgctaagctgccctgagggtttccttcggggaccagcccacagcacaccaaggtggcccggaagaaccagaagtgcagcccctctcacaggcagctctgagccgcgctttcccctcctccctgggatggacgctgccgggagactgccagtggagacggaatctgccgctttgtctgtccagccgtgtgtgcatgtgccgaggtgcgtcccccgttgtgcctggttcgtgccatgcccttacacgtgcgtgtgagtgtgtgtgtgtgtctgtaggtgcgcacttacctgcttgagctttctgtgcatgtgcaggtcgggggtgtggtcgtcatgctgtccgtgcttgctggtgcctcttttcagtagtgagcagcatctagtttccctggtgcccttccctggaggtctctccctcccccagagcccctcatgccacagtggtactctgtgtctggcaggctactctgcccaccccagcatcagcacagctctcctcctccatctcagactgtggaaccaaagctggcccagttgtccatgacaaaagaggcttttgggccaaaatgtgagggtggtgggtgggatgggcagggaaggaatcctggtggaagtcttgggtgttagtgtcagccgtgggaaatgagccagcccaagggcatcatcctcagcagcatcgaggaagggccgaggaatgtgaagccagatctcgggactcagattggaatgttacatctgtctttcatctcccagatcctggaaacagcagtgtatatttttggtggtggtgggtttggggtggggaagggaagggcgggcaaggagtggggagggagtctggggtgggagggaggcatctgcatgggtcttcttttactggactgtctgatcagggtggagggaaggtgagaggtttgcatccacttcaggagccctactgaagggaacagcctgagccgaacatgttatttaacctgagtatagtatttaacgaagcctagaagcacggctgtgggtggtgatttggtcagcatatcttaggtatataataactttgaagccataacttttaactggagtggtttgatttctttttttaattttattgggagggtttggattttaactttttttaatgttgttaaatattaagtttttgtaaaaggaaaaccatctctgtgattacctctcaatctatttgtttttaaagaaatccctaaaaaaaaaaattatccaattgaacgcacatagctcaatcacactggaaatgtttgtcgttgcacctgagcctgttcccactcagcagtgagagttcctctttgccctgaggctcagtctctctcgtattttgtccccacccccaattccttgagtggtttttgctctagggccctttcttgcactgtccagctggttgtaccctctccaggcatttattcaacaaatgtgggtgaagtgcctgctgggtgccaggtgctgggaatacatctgtggacaagacatgcttgggtcctactcctggagcactgtaaaaagagctgattcaagtaagtagatgcctgttttgagaccagaaggtttcataattggttctacgacccttttgagcctagaattattgttcttatataagatcactgaagaaagaggaacccccacaaccccctccacaaagagaccaggggcgggtgatgagacctggggtttagaaccccaggtgagacctcaaatcactgcattcattctgagcccccttcctgtccccaggggaggtgtattgtgtatgtagccttagagcatctctgcctccaacccagcagttctctgccaaagcttgtggaggagggagagccctgtccctgccctcaggctccccagtgctcctggcccttctatttatttgactgattattgcttctttccttgcattaaaggagatcttcccctaacctttgggccaatttactggccactaatttcgtttaaataccattgtgtcattggggggaccgtctttacccctgctgacctcccacctatccgccctgcagcagaaccttggcggtttataggtaatgatggaacttagactcctcttcccagagtcacaagtagcctctgggatctgccaacacacgtccactcccaagccactagcccactccccagttggcccttctgcccttaccccacacacagtccaactcttccacctctggggaagatggagcaggtctttgggaagctcccacacccacctctgccactcttaacactaagtgagagttggggagaaactgaagccgtgtttttggccccccgaggctaaccctgatccatagtgctacctgcacctctggattctggattcacagaccaagtccaagcccgttcttacgtcgccataaaggcccccgaacggcattctcggtacttctgtttgtttttgtacattttattagaaaggactgtaaaatagccacttagacactttacctcttcagtatgcaaatgtaaataaattgtaatataggaaatcttttgttttaatataagaatgagcctgtccaatttctgctgtacattattaaaagttttattcacaaaaaaaaaaaaaaa

SEQ ID NO: 15 - DNA, 1783 bp, Homo sapiens
cgctgctgggctgcggcggcggcggcggcggcggtggttactatggcggagtcggccggagcctcctccttcttcccccttgttgtcctcctgctcgccggcagcggcgggtccgggccccggggggtccaggctctgctgtgtgcgtgcaccagctgcctccaggccaactacacgtgtgagacagatggggcctgcatggtttccattttcaatctggatgggatggagcaccatgtgcgcacctgcatccccaaagtggagctggtccctgccgggaagcccttctactgcctgagctcggaggacctgcgcaacacccactgctgctacactgactactgcaacaggatcgacttgagggtgcccagtggtcacctcaaggagcctgagcacccgtccatgtggggcccggtggagctggtaggcatcatcgccggcccggtgttcctcctgttcctcatcatcatcattgttttccttgtcattaactatcatcagcgtgtctatcacaaccgccagagactggacatggaagatccctcatgtgagatgtgtctctccaaagacaagacgctccaggatcttgtctacgatctctccacctcagggtctggctcagggttacccctctttgtccagcgcacagtggcccgaaccatcgttttacaagagattattggcaagggtcggtttggggaagtatggcggggccgctggaggggtggtgatgtggctgtgaaaatattctcttctcgtgaagaacggtcttggttcagggaagcagagatataccagacggtcatgctgcgccatgaaaacatccttggatttattgctgctgacaataaagataatggcacctggacacagctgtggcttgtttctgactatcatgagcacgggtccctgtttgattatctgaaccggtacacagtgacaattgaggggatgattaagctggccttgtctgctgctagtgggctggcacacctgcacatggagatcgtgggcacccaagggaagcctggaattgctcatcgagacttaaagtcaaagaacattctggtgaagaaaaatggcatgtgtgccatagcagacctgggcctggctgtccgtcatgatgcagtcactgacaccattgacattgccccgaatcagagggtggggaccaaacgatacatggcccctgaagtacttgatgaaaccattaatatgaaacactttgactcctttaaatgtgctgatatttatgccctcgggcttgtatattgggagattgctcgaagatgcaattctggaggagtccatgaagaatatcagctgccatattacgacttagtgccctctgacccttccattgaggaaatgcgaaaggttgtatgtgatcagaagctgcgtcccaacatccccaactggtggcagagttatgaggtaagaagctggcctcctgctgctttcccatcagcctgatttctccaccttagaaaagggtttcttgacaatggggtcaggccccagaggagccccctgagagtgtcagttattatttactattacgtgctattttacatatcccaagccctttagggctacagtctcttgtcctggaccctgtagggtgccatttggagttcacagcctagaagaagaaaaggctttgggcctggtgtggtggcataggcctgtaatcgtagcgctttgagaggctgaggcaggaagatagcttgagctcaggagttcgagacaaacctgggcaatgtggggagaccccatctctaca

SEQ ID NO: 16 - DNA, 11373 bp, Homo sapiens
gtgcgcggggcggcgccgcggaacatgacggcgccctgggtggccctcgccctcctctggggatcgctgtgcgccggctctgggcgtggggaggctgagacacgggagtgcatctactacaacgccaactgggagctggagcgcaccaaccagagcggcctggagcgctgcgaaggcgagcaggacaagcggctgcactgctacgcctcctggcgcaacagctctggcaccatcgagctcgtgaagaagggctgctggctagatgacttcaactgctacgataggcaggagtgtgtggccactgaggagaacccccaggtgtacttctgctgctgtgaaggcaacttctgcaacgaacgcttcactcatttgccagaggctgggggcccggaagtcacgtacgagccacccccgacagcccccaccctgctcacggtgctggcctactcactgctgcccatcgggggcctttccctcatcgtcctgctggccttttggatgtaccggcatcgcaagcccccctacggtcatgtggacatccatgaggaccctgggcctccaccaccatcccctctggtgggcctgaagccactgcagctgctggagatcaaggctcgggggcgctttggctgtgtctggaaggcccagctcatgaatgactttgtagctgtcaagatcttcccactccaggacaagcagtcgtggcagagtgaacgggagatcttcagcacacctggcatgaagcacgagaacctgctacagttcattgctgccgagaagcgaggctccaacctcgaagtagagctgtggctcatcacggccttccatgacaagggctccctcacggattacctcaaggggaacatcatcacatggaacgaactgtgtcatgtagcagagacgatgtcacgaggcctctcatacctgcatgaggatgtgccctggtgccgtggcgagggccacaagccgtctattgcccacagggactttaaaagtaagaatgtattgctgaagagcgacctcacagccgtgctggctgactttggcttggctgttcgatttgagccagggaaacctccaggggacacccacggacaggtaggcacgagacggtacatggctcctgaggtgctcgagggagccatcaacttccagagagatgccttcctgcgcattgacatgtatgccatggggttggtgctgtgggagcttgtgtctcgctgcaaggctgcagacggacccgtggatgagtacatgctgccctttgaggaagagattggccagcacccttcgttggaggagctgcaggaggtggtggtgcacaagaagatgaggcccaccattaaagatcactggttgaaacacccgggcctggcccagctttgtgtgaccatcgaggagtgctgggaccatgatgcagaggctcgcttgtccgcgggctgtgtggaggagcgggtgtccctgattcggaggtcggtcaacggcactacctcggactgtctcgtttccctggtgacctctgtcaccaatgtggacctgccccctaaagagtcaagcatctaagcccaggacatgagtgtctgtccagactcagtggatctgaagaaaaaaggaaaaaaagttgtgttttgttttggaaatcccataaaaccaacaaacacataaaatgcagctgctattttaccttgactttttattattattattataattattataattattattattaatattattttttggattggatcagtttttaccagcatattgctctactgtatcacaaacagcggacacgtcagcaggcgttgaggtgctgagctgtggatgcagaaccagcgccatgctgaagagcctcagccacctcctgtcctttgggattcgtttttcccgctttctctttgtttgtcgtctcagaatctgtgacacaaagaaacccatctcctgtcttaggaaacctaatgctgcaaactctacctagaggaacctttgaagactgttacataagaacataccttcctcagaagaggagtttcctctgccctctgcccttctcccctgcctccctccctcccctccttttattttgttttagtgagcttaagaaacagcagatgtgtctttcacggatctaacgggtgttgtcctgatcgagaaaaaaactgggatgagaatggtttggactggagttggaaggggaggacggtactgggggtagggtttggaacagagctacactggactcgggcacattcggagcagcatcctttagtatggaggctacttctcaggtaaccaggaattgaggggaaggaccttgtggaggccgagcattaacagcaagagcggggtttggagaaagtctgagattgggtgcagccctgacttacctgctggccctgaccagtttcttttcactaacttggccttgggcataggatgaaacattttttctgccctaattttaaaactaggtgagggtagaatcatcacaggttaggaatacattcttcataagacacgatgctgtaaatacccttaatggacgaaaagttgaaatacttttgtttcctcttggagcagttcagggaaatgcccacaggggattgtcctgcacagatagggcaagaggatttcctgggtggagtctgccaaggcctgcctcgctggggaccccagagtcctgcacctctggttccgccccaggtggtgacattactgtccccgttctgtggctcgtggacaagactttctccagaccccttaaagtggtacatattctaaaaaactgtttttctattatgccataaccttgctctagtcagtgaatgttcctaatgctgctgtttcaacatttgaattctttttaatttatgaaacatgctaaattttttttttcaaacaaaacacacacatccacatatacacatgcttcgctatgtggcttccaaggtttaaattttgaaaagtaaaagaattaaaacttcacgaccacagatcacctcaaaccagaaatacctcagaattttctacttatgtaaggtttattatatattttgttagttgtgttgtcttgtagtaagtatattttaatgtaagttggcttttgtgacaaggaagtttaaaagaaatagagaaaaagaaaaaagtttgcatcttctagggagtgctaccatttttgtttgataacgcccccttgtaaataattgtcatcaactgtaggttggctgtctgggccaagtctgggcatttatcagtcttgtttgtgaaggcttttccttctggtttctttagatcattttatttaaaaacagtgcatctcttcatcgtgagggtaggcaaggcgggggccgtggggagaggttgacctgggtgagaactgaagaggccgcctcctcttgggttgtttggagcttcacatgtaattcacatgtaacatgtaacttgatcggtcagtgttcagaatgacaagtaaccccgcttaaacttggtagaaggatggcccttagacctgaatggggtgattttacttgggatttaacttcttcagcaaattaacagcaacgttggaagagatctgtggcgcctctgtgaagcacaccgtgactcaggccagtcttttagtgcagcgtgtctgggagtgaagggttttgcccttgctggtcttggagtccacagtgtgaggggcactgcacatgcctgggcatctacctagtgtgctatgttcagtgtctggggcttactgccccggggtcctttcctctgggtgttggggcacagggtgctatgggaggcccatttgcttccctctcggagctcagtttttgcttcatgggtcaaaatgtgggctggccaagtggttacaggaacagggtttcggtaagctatgttgtctttttttttttttttttttttttttttaatggtttgattttgtgctgtggtattttttttcccttagaataatttttaatggcaaaacaggccttacagcagttgcttttctttaccatttatttctttaagaagctttaaaatatttattgaaaagtgccatatctaatttctttagctttcgcctcaggcagtgcaggcatctttacttttcatcctcagaagaaacaaacgactaacaaatgtagcaaatttactgcaggaatagttaggtcatgatactacctgaacactaaaccccagcctctttgtttggttttagttcctctgggtggtttttcttttgtgtgctggcttgattcttgtgagaagttttgacctggccaagggagggttgagccatggttctggtgtgggactttgcggtcaagacacagtacagacaggtcaggcctgcgtgccttttctctgggtggcctccccgttaggcccaccgtacgctcagccactatagtgtccctgtggggccttgccatcagattgtgtgtcaggagatggtacctttttggtgtggctggggaggagtgtggtccatgccagttctttgggcttcaggccactcttcccctcatgctgtggtgtaaagtgcacccatcaggtggtatatctggttctgatggcaagaagaaggtgggggatctccttatagggcatgggtctaggagcacagatgggccttttgccccgggtaaatgcttgtctgtttgctgtcatgtgttctttgaggagtgagccatctcgagccctgctttgaatttactgggtcatagagcctctgcctgtgctcttttccataatgacttcatgtgacatgcacttttggtgggctcagataattggtttctttttgtttttgacctcaggctctgtggcagactggggaaaatggggcctggcatcattttccctgtcaatgggaggggctgttccatgcagggtgggaggggaccaagttagcagagagtagccaaggatccttgcttcttcctttctagtgtgctgtcatccaagcaggctcctggctgtagggatgggccttggggaagaatcttctttgaaagcatctatgataactgagaagtcatccctagttggagaaatccagtaatgagcagaaggaggaagcaagtgaggacagaggccattgtattacagtgtcacgcagagggccctcaatgatggggcattggggaaggctgtagacatagtcatcagaacatcctggcctggcataagctgggttttctcctgggaccattggtcctcagcaggagttctttgcatgagttgctcaggggcaagggctgcaagtgggctgtgcttaggagaaagtgacacctggcagtgagggaagatggtgagcattattagcctttgttgtccagcatggccttcttgtcctgtctgctctggagaggagcctgtgggaccagtcctgcctggggagggcatacccacacgtgccagctgattctgactctgaatacatcatgtccggacttgggggtgtttctgcagaaaaaggaggttgtttttcagccttgaacatcttcaggaggatagagactcttgctcacatattcttagcaaagggaagggtctctcatctccaggccacagagatagttcttccattgccctaagaggctaggctaaccctcttgacataacttagacagcaaagcacttcatcctgtagttgggctctgtcacctttctcttcagttggccacattctcgtttcctccatcctgctatgctttgtgtgctcgggctgtgtgtggggtttttccctggtggaaggaagcccagctgtgtattgaatgtccttcatgtgttgtgtgtggctcagaaagcctgtcacttggcccctgtgctctgagccgtgagggtggggaggtggctgttccattaaagtgggagtattggatggccctcttgaaactagaattttgccttttttagtatgcagtataaagtttccagcatctattggtaacacaaagatttgctggtttttaaaataatacagtaagcataagtatgtaagtttttagaattggtactagaagttggacagctagttattctcgagaactttatttcactagaaaaatatactaattggaaagcagtttccaggagttaactcagtttaattttcagtctcagttattttagcctgttgagtttttgatggcacacctttggagagatggccacgcctgattcccatttcaggggcatcagaccatacctttttaagaagctccgtgaatctagtcatctacccttcatcctgggcgaacagccaaaaagagaaggggacaaggtgtctttttctccttctcactggggtgacatgaattcttttagttaatggctgtttgcaaattctaaactaatgaaatacttagcagctaacatgttcaatctagtaatgatgagtttaaatctcaattgacagtaatgttttagataaacaggcccagtaattcagttgatgaactgtatatcttctcagtctagatttgtaaatgtttaatgaattcagggttataagcatagttctttaagtaagattccagatagttgatttgcaaccagcagtctacctatgaatgtatcccaaacctttagaagattggaaaagatttttgaaataatgatttagttttgtaggaaaaacacccccttgaaaattaattcggttgacccagtaacattttttaaaacaattggtggctccaaaaggcctgccaacaaagaaaagtccaaattatctagtgggacattttgaatgttttatgtttattttgggtccactgtaaactttggttcaaaaaagaatttgaatttaaagaatttaccattatttaaattattaccaagtttttacattttcatgatggtattttccaggtatgaatgaaacatgactttttgattgtggtacttcctgtatcccctgtagtgccaaaaccagtgatactttatttgctcctatggcagctcatagaggtaaccgaagtgatttttcctcagtaattgaaacacatattctctaaatgccaatgtgtggtgatgggccctgcactgccttcatttctctagggcagtgtctttggattgtctagggcctaggtaattctgagaactactgtaaaccaaccacagggcactaaagcaatgtacacaccactctttgtgtgtatggaaggggttatataaacctgggctatgctggacatctacagaagagtattacattcacttgcaaagtttacatttttgagctcacagttatgaaaaatatgacccacaagtttttcaggcaggtgaggatgggtcttcttgcaaatgcatgagttctgtcttgagtcctgggaacttctctgttggttgagtgtgggctcattccctgactctcctaatcatgtttgcgtcagaatgttagcattgtaaataaaagaataggttgtataatagatacacaacacttgaaactttactttaaaaaaatcgatagttctacatatatatttagttatatcacttgacagatttcttctacacagtgtggagattgttttataccacagattatttttataaagttagtgaatttgaatgattttgtaatcagagctaatgagctttacctttcaagagaaacgtacactggagcatgagtggtgtggaacttttacttagtgtttatatggattcttgtgatacactggcagactggagtcaatttgcgggtcttttttggccaaaactccacttgtggttgtgtaggacagtgatattcagctcagcttcttgtggattgggaggagagagggcctgcaatgtgttttacattggtgcttcctcctgagatttctgttgaacaaagggttctgaggtcaaaaattagtttgtaagcctttgccataggacatagtcatgtgagagtgtttgggggaacagaaattgtataggggtgcctattggggtgggatgggactcgaataagattcaggtacaaaaactttgaaatgagaatctggtggtttgagtaatccaccagactgaattatctaagatcacattatccaggttggggggcagaattacccagttaagtaattgttcagaaaagtggggagggtggcatgtggatgcagtgatccaattaaatggagagctgccaggcacattttgtcctctctggtcagtgagaatggttgggttggctcgctgcttcaatctgtggaatcagccaggagcccagtgaggaagctcagaaccccagtaacagcagagcatctttcagatagctccagagttttcctgcttttctgaggaagctcagcatcactgccacaatacggaaagtggtcttcattttagcctatttatttttaggcagagagtggatggttatttgtgtgggacttttggtggcgatatataatgaataattaagttaatttctggtatgcataatggccagtcctgaggcccagctgaagacctgtcccccagaccctgcccgctggcttcaggctgctgcttctagacagaggtgcactggacgggatagttttatcaagagaatccctaatgtgtcattttaaaccagctgtgctttttattcattctggttgagcgtataggtttacactttaccctttttatacttggaataaatttagttccagcagatctagtagcactccagaaaccaaccccatctgttccccataaaaagaacattttctctgctctccagccacgtgtcttggaatgtaattctgttgtgcctttgtttttatcactctcttcgccccaaaagcaactgctgtaagcttttttctacttgtcttttctagtccccaacctctacctttttcctttttcccagccctaatttctggatgcacttctgtgatccaggtattttaagaaccagttacctcagacctcatgttgaacagtgtcgccatctgggtcctcttgatactgcagacttttaacgtacacatgcaggaaccctgctgagcgtgggcacttgttttaaagcaaaactcttcccaaggactgaagaaagggcttctggcaagctcgtcatggcattgtggtgggatgggtctagagtgtcatctgaatggtgcttcctgtgttcctctttgaattctgccattttcagtattcttgtgtgtctgaataggcaaagcgatttaattggctggtcttgcacgcaaattagttccaaagataagctctttgtaacacatttccagtcgctaatgctcaaatgtagaacattcctttaaatggcaggataaaaaacccactatccaccatagtgcattttgggaagatgtctgtagcatatgttgctgtgaaattaggccttgtgggatatggctgtttgtcattttgatgtattttaaataaatatatatattttttaaagagccttttttaccagttcaaaaagtttaattaaccagcagtcaccgcatctgaatttttgtctctggggcatagatggcagaccaagattaaaagtggtaactcagctatacgagcatgggctaccttcctgggctctcctgcagtcctgtagacctgctgttccgcagaccatgggacacaaggtcagtgtgttcccagtgagggtcccaagtcagtcatcttaagtgtttgttctctgccccattcagtggactgttgacttcagtccctgcaagtgctttagcccgagtggggttttctcagagcactgccacgagttaagtgtgtgtttagccaaataatttctccgtaagggaaaaatgcagtcacccaaattttaccaacaatgacagagatgagagtagaaaagattaggcaacatctgagttttaacttgaaaagtgtccaagtcatcatgaaaggccgactgggagcaagtgattattagagattcttcaggagacctcatctgaaaatgttaagactgccagtgagggaaggaattgttaaaatgccagcggcttttttttcctctttttttctgtaattctgtaaaaatgcagagaaagttgagtggtacttcagaattgagggagagggttaccgcagagtagaaatatatttctagatttcagttccacaccacaaatccacaacaatgccatttttcaactgtacaaaaatctgcttatgaactggacatgatcttaatggtagtgtcaaaggccaagtttttcacctgttaatatttttccacatttgtccttgaatctgaataactttatacagtactgtaaatttaacttacatcgagtttgttgtcaattcttatgaaaagagctttctgcatgtaacacatacggttaaagaacacagcaaaggacaaaatttgcaggaacagttttggaaccaacagaaaatgtcaccttttatttgccatcttatatatatctatcagttttaccagctacttctaaatttgtacattatttgtaagggaaagaaggaaaaccctaagacttgtctaacttagtggagaatgtgtgtgttgggcttaggatggatagctaagtcttattgagctgtgttacctaacttgtatataaaaattgtaattaaaagtttgggttcacctgtttctcacagtttaaaatgatgagtaattgcaaactctggaaatgtgactagtatatgatttaaggctgtagaagcaaggaagctctttcaagtgctaaaactaaagacttctagtttttggctcaaataagtactgtttgtataccaggatatgtgagatgtaaatgtagtaggtcacttttcacccttgtagctataaaataaaaattttgtagaacagaaatagcttgtactactgaattaacaaaagttatactaaagtatcatgtttaaaaaaaatatatatatatatacagagttaagcttgttgctgttaccctgtctggatttgaaaagtgtgctgatttatatatatatattacacacacacacacacacacacacacacacacacacacacacacacacacacacacacacacacacacacacatacacctaaaatggcctaaagcagacatccatgtaattacagttgcaaaatgaaaacattttggaaagaacattgtatcatagttcattcatttgcagtggatctttgttcctttttactgtggtaattttagaaatgagtgtcaagtttgaaattagatctgctaagttggggttttgctgcttgaactctgcactgggtcctcaaataaaccgatgtgaatgtagttttttccccctgtgtgaagaagcagttacaccccaacaataggaggaaaaatctagaactatttcaagttttatctttttgtatatgaaaataaaataataataaaacaa

SEQ ID NO: 17 - DNA, 2768 bp, Homo sapiens
ccggatcgggaagtgtcaagcgggcgctcccccatctccgccgctattaccactgaacccggaccccctacccaggtccagggccagccgccatgacgaacgtgtactccttggatgggattctggtgtttggtttgctctttgtttgcacctgtgcctacttcaagaaagtacctcgtctcaaaacctggctgctatcagagaagaagggtgtttggggtgtgttttacaaagccgctgtgattggaaccaggctgcatgctgctgtggcaattgcttgtgttgtaatggccttttacgtcctgtttataaaatgaattccaaagcacccaagtcatcaactgccaaccaaggggacggggatgaagaacctgttggagacctgaacccagtgtaggagagttcagctgaaatcatcggtccccaggatgacaccacagcatctgcccctgctatatgtggggaaaactcatggtcacgaacattatttatgcttcaggggactacagaaagccagcttcctttgatctatgtgtaaatcagtccttggcagagtgcatataatgtccggataaattacacccctcggtgataagattacatacctccttcataaaaacctgtcatcctgttttgttcttcagctcctcatcaggatcttttcaaactgaggctcattagggaaggaactaggctgtgttcagacttcttttgaagagagagaattttcaagacttcttttcactctttgatttggatctggcaaattggggaggggatgctgggtgggaaacagttatgaaatgccaagaaattctttggctttagaaatttatctttcatgtacccatccgggaacataaaagagaggcatagtgctcattgcaaaaagagaacagatgaagtagctgtgttatgtgctggtatcttgagagttttgccaagaaaatctgggcctacataaaatttgagaattatctgtgtgatgagaccagaaagcagtggcttagacaagaaaaaatctttctgttcaccagtatcctcaaatggagacttcacttgatcagatggtatatgaaaaatgaatcaactattgctatttcgtaaaacctttttatattttctaaatttacttagtgctaaatactgttactcagttttaaatgccacgactaggggaaaaagaaactattgaagaaataattgtttagtatatttgcagttggggtagaagaaagaaatctagtatattgattcatatactagtaaattcatctagtataagaacttgtgatgttagattgaagttttgtcatcttataaaagacaacaaacttattttctgtttaagtctgagtgttatggcaatttttagttgattacttatttttcttagccaaattttaattttcttcatattgcattgctctttagttgtctctggaaattctatttactttaaggacatgagaaattcaaatgagagaagttgctgatattcatcagtgtgtttggacagttcatagggtccacaaatcaaatgaggttgtttcctgaagtagaagaaaacagaactttgcaattgatactgaagtactttgccatggagttagtaactcctgagcagaccattttagatggctcagcatttggcaggaagacttctccattccctgcttatatctatggaaggatcagctgttggatgtctagaacttctctatttaaaaaaaaagagtaggtctaaaattaaattattataagcaagcatagacatgggtcttccagttgaattgtccattaccgtaaaacttaatggtggacaagttagctgtggttgattcctgtgtggcagtaaattgtcttctgtctgcttactccaaataataaaagctgctaggaagtttagattttgaaataggcagtttaatgctttgagggtttctagaaatacagaaagtcatcaagtaaacactgcatgtctaatcatctcagagttgtggctgttatctcttcaggaattggtccacagggtaaatttcaacaattcatacgttttccattgtcatttctgaggacctttgagatgagagaaaggaaatctagtggaacaggaaagagagttacaccttgtgggtgtgagtttgggacctgttggcagaagggaatgtcactccctggaaacaggttcagcatgtttgcacttgttattttgtagctttaatgatttttgttttctaatagggcaaatgtctctaagcttggtgtttagagctgcttcatattttaaactagttccattccacagttctagttcaaaccagtttttacagcctcctgggtgggtcgtcttgacccaaactcttgtgttgttacattttgagaggttttcataccagaatgtaccaaaaagtgcacaaggtaaaggtaatttacagccagaaacaaatatacatttgtttcatttcttgactttccctaagcagataagcagaaacttgtttaactcattactttgtttgatgtgtcttacatatttttgactaaaagttatagaatgttattcctctgggggaatcttttacaggtggaggaatggggatagcagtattgcctcagattcaaactggcatcaccataaaccctgtaggccagggtggaatgaagtcagctcctttttatagttgaaatacaattttttattcaccattgtctgcacaaatccttgaaaataaacctttttttccctaaaaaaaaaaaaaaaaaaa

SEQ ID NO: 18 - DNA, 1375 bp, Homo sapiens
gtttgaaatcggaaagttggcggggctgcgggagctgagcctagagtccggctgttggctagagtgggcgcggatctggtgtggggaaggcggcgggactcaggcctgcctgcgaagcattgtcctacataatggtagaggacgaactggcacttttcgataaaagcataaatgaattttggaataaattcaaaagtacggacacctcctgtcagatggcgggactaagagatacctacaaggattccatcaaagcatttgcagaaaagctgtctgtgaaattaaaggaagaagaacgaatggttgagatgtttctggaatatcaaaatcagatcagcaggcaaaataagctcattcaagaaaaaaaggataacttgttaaaattgattgctgaagtaaaaggcaaaaagcaggaattggaagtactgactgcaaatatccaggatcttaaggaagaatattctaggaagaaggaaactatttctactgctaataaagcgaatgcagagaggttgaaaaggctgcagaaatctgcagacttgtataaagatcgacttggactagaaattcgaaaaatttatggtgagaaattgcagtttattttcactaatattgaccctaagaatcctgagagcccatttatgttttccttacatctcaatgaagcaagggactatgaagtgtcagatagtgcccctcatcttgagggcctagcagaatttcaagagaatgtaaggaagaccaacaatttttcagcttttcttgccaatgttcggaaagcttttactgccacggtttataattaacatacaaatagtgtatataaaaacggtttatttttcttctctattacatatctctttttttcttgtttttattattattatactttaagttttagggtacatgtgcacaatgtgcaggtttgttacatatgtatacatgtgccatattggtgtgctgcacccattaactcgtcatttcattaggtatatctcctaatgctatccctcccccctcccccaacccacaacagtccccgttgtgtgatgttccccttcctgtgtccatgtgttctcattgttcaattcccacctaggagtgagaatatgtggtgtttggttttttgtcctttcgatagtttgctgagaatgatggtttccagcttcatccatgttcctacaaaggacatgaactcatccttttttatggctgcatagtattccatggtgtatatgtgccacattttcttaatccagtctatcattgttggacatttgggttggttccaagtctttgctattgtgaatagtgccgaaataaacatacgtgtgcatgtgtctttaaaaaaaaaaaaaaaaaaaaaaaaaaaaaa

SEQ ID NO: 19 - DNA, 4111 bp, Homo sapiens
cggcagggttggaaaatgatggaagaggcggaggtggaggcgaccgagtgctgagaggaacctgcggaatcggccgagatggggtctggcgcgcgctttccctcggggacccttcgtgtccggtggttgctgttgcttggcctggtgggcccagtcctcggtgcggcgcggccaggctttcaacagacctcacatctttcttcttatgaaattataactccttggagattaactagagaaagaagagaagcccctaggccctattcaaaacaagtatcttatgttattcaggctgaaggaaaagagcatattattcacttggaaaggaacaaagaccttttgcctgaagattttgtggtttatacttacaacaaggaagggactttaatcactgaccatcccaatatacagaatcattgtcattatcggggctatgtggagggagttcataattcatccattgctcttagcgactgttttggactcagaggattgctgcatttagagaatgcgagttatgggattgaacccctgcagaacagctctcattttgagcacatcatttatcgaatggatgatgtctacaaagagcctctgaaatgtggagtttccaacaaggatatagagaaagaaactgcaaaggatgaagaggaagagcctcccagcatgactcagctacttcgaagaagaagagctgtcttgccacagacccggtatgtggagctgttcattgtcgtagacaaggaaaggtatgacatgatgggaagaaatcagactgctgtgagagaagagatgattctcctggcaaactacttggatagtatgtatattatgttaaatattcgaattgtgctagttggactggagatttggaccaatggaaacctgatcaacatagttgggggtgctggtgatgtgctggggaacttcgtgcagtggcgggaaaagtttcttatcacacgtcggagacatgacagtgcacagctagttctaaagaaaggttttggtggaactgcaggaatggcatttgtgggaacagtgtgttcaaggagccacgcaggcgggattaatgtgtttggacaaatcactgtggagacatttgcttccattgttgctcatgaattgggtcataatcttggaatgaatcacgatgatgggagagattgttcctgtggagcaaagagctgcatcatgaattcaggagcatcgggttccagaaactttagcagttgcagtgcagaggactttgagaagttaactttaaataaaggaggaaactgccttcttaatattccaaagcctgatgaagcctatagtgctccctcctgtggtaataagttggtggacgctggggaagagtgtgactgtggtactccaaaggaatgtgaattggacccttgctgcgaaggaagtacctgtaagcttaaatcatttgctgagtgtgcatatggtgactgttgtaaagactgtcggttccttccaggaggtactttatgccgaggaaaaaccagtgagtgtgatgttccagagtactgcaatggttcttctcagttctgtcagccagatgtttttattcagaatggatatccttgccagaataacaaagcctattgctacaacggcatgtgccagtattatgatgctcaatgtcaagtcatctttggctcaaaagccaaggctgcccccaaagattgtttcattgaagtgaattctaaaggtgacagatttggcaattgtggtttctctggcaatgaatacaagaagtgtgccactgggaatgctttgtgtggaaagcttcagtgtgagaatgtacaagagatacctgtatttggaattgtgcctgctattattcaaacgcctagtcgaggcaccaaatgttggggtgtggatttccagctaggatcagatgttccagatcctgggatggttaacgaaggcacaaaatgtggtgctggaaagatctgtagaaacttccagtgtgtagatgcttctgttctgaattatgactgtgatgttcagaaaaagtgtcatggacatggggtatgtaatagcaataagaattgtcactgtgaaaatggctgggctcccccaaattgtgagactaaaggatacggaggaagtgtggacagtggacctacatacaatgaaatgaatactgcattgagggacggacttctggtcttcttcttcctaattgttccccttattgtctgtgctatttttatcttcatcaagagggatcaactgtggagaagctacttcagaaagaagagatcacaaacatatgagtcagatggcaaaaatcaagcaaacccttctagacagccggggagtgttcctcgacatgtttctccagtgacacctcccagagaagttcctatatatgcaaacagatttgcagtaccaacctatgcagccaagcaacctcagcagttcccatcaaggccacctccaccacaaccgaaagtatcatctcagggaaacttaattcctgcccgtcctgctcctgcacctcctttatatagttccctcacttgatttttttaaccttctttttgcaaatgtcttcagggaactgagctaatactttttttttttcttgatgttttcttgaaaagcctttctgttgcaactatgaatgaaaacaaaacaccacaaaacagacttcactaacacagaaaaacagaaactgagtgtgagagttgtgaaatacaaggaaatgcagtaaagccagggaatttacaataacatttccgtttccatcattgaataagtcttattcagtcatcggtgaggttaatgcactaatcatggattttttgaacatgttattgcagtgattctcaaattaactgtattggtgtaagatttttgtcattaagtgtttaagtgttattctgaattttctaccttagttatcattaatgtagttcctcattgaacatgtgataatctaatacctgtgaaaactgactaatcagctgccaataatatctaatatttttcatcatgcacgaattaataatcatcatactctagaatcttgtctgtcactcactacatgaataagcaaatattgtcttcaaaagaatgcacaagaaccacaattaagatgtcatattattttgaaagtacaaaatatactaaaagagtgtgtgtgtattcacgcagttactcgcttccatttttatgacctttcaactataggtaataactcttagagaaattaatttaatattagaatttctattatgaatcatgtgaaagcatgacattcgttcacaatagcactattttaaataaattataagctttaaggtacgaagtatttaatagatctaatcaaatatgttgattcatggctataataaagcaggagcaattataaaatcttcaatcaattgaacttttacaaaaccacttgagaatttcatgagcactttaaaatctgaactttcaaagcttgctattaaatcatttagaatgtttacatttactaaggtgtgctgggtcatgtaaaatattagacactaatattttcatagaaattaggctggagaaagaaggaagaaatggttttcttaaatacctacaaaaaagttactgtggtatctatgagttatcatcttagctgtgttaaaaatgaatttttactatggcagatatggtatggatcgtaaaattttaagcactaaaaattttttcataacctttcataataaagtttaataataggtttattaactgaatttcattagttttttaaaagtgtttttggtttgtgtatatatacatatacaaatacaacatttacaataaataaaatacttgaaattctcttttgtgtctcctagtagcttcctactcaactatttataatctcattaattaaaaagttataattttagataaaaattctagtcaaatttttacagatattatctcactaattttcagacttttgccaaagtgtgcacaatggctttttgttaataaagaacagattagttttgaagaaggcaaaaatttcagttttctgaagacagcatgttattttaacaatcaagtatacatattaaaaattgtgagcaatctcaaaaaaaaaaaaaaa

SEQ ID NO: 20 - DNA, 4955 bp, Homo sapiens
gcttaaaaaagcacagggagatcgcgggcagctttgcagtcgctgccttctcgcgcctgaccatgcacccctgcatcttcctgctgggccacaggcgagcgctttatttctggagctgagggctaaaacttttttgacttttcttctcctcaacatctgaatcatgccatgtgcccagaggagctggcttgcaaacctttccgtggtggctcagctccttaactttggggcgctttgctatgggagacagcctcagccaggcccggttcgcttcccggacaggaggcaagagcattttatcaagggcctgccagaataccacgtggtgggtccagtccgagtagatgccagtgggcattttttgtcatatggcttgcactatcccatcacgagcagcaggaggaagagagatttggatggctcagaggactgggtgtactacagaatttctcacgaggagaaggacctgttttttaacttgacggtcaatcaaggatttctttccaatagctacatcatggagaagagatatgggaacctctcccatgttaagatgatggcttcctctgcccccctctgccatctcagtggcacggttctacagcagggcaccagagttgggacggcagccctcagtgcctgccatggactgactggatttttccaactaccacatggagactttttcattgaacccgtgaagaagcatccactggttgagggagggtaccacccgcacatcgtttacaggaggcagaaagttccagaaaccaaggagccaacctgtggattaaaggacagtgttaacatctcccagaagcaagagctatggcgggagaagtgggagaggcacaacttgccaagcagaagcctctctcggcgttccatcagcaaggagagatgggtggagacactggtggtggccgacacaaagatgattgaataccatgggagtgagaatgtggagtcctacatcctcaccatcatgaacatggtcactgggttgttccataacccaagcattggcaatgcaattcacattgttgtggttcggctcattctactcgaagaagaagagcaaggactgaaaatagttcaccatgcagaaaagacactgtctagcttctgcaagtggcagaagagtatcaatcccaagagtgacctcaatcctgttcatcacgacgtggctgtccttctcaccagaaaggacatctgtgctggtttcaatcgcccctgcgagaccctgggcctgtctcacctttcaggaatgtgtcagcctcaccgcagttgtaacatcaatgaagattcgggactccctctggctttcacaattgcccatgagctaggacacagcttcggcatccagcatgatgggaaagaaaatgactgtgagcctgtgggcagacatccgtacatcatgtcccgccagctccagtacgatcccactccgctgacatggtccaagtgcagcgaggagtacatcacccgcttcttggaccgaggctgggggttctgtcttgatgacatacctaaaaagaaaggcttgaagtccaaggtcattgcccccggagtgatctatgatgttcaccaccagtgccagctacaatatggacccaatgctaccttctgccaggaagtagaaaacgtctgccagacactgtggtgctccgtgaagggcttttgtcgctctaagctggacgctgctgcagatggaactcaatgtggtgagaagaagtggtgtatggcaggcaagtgcatcacagtggggaagaaaccagagagcattcctggaggctggggccgctggtcaccctggtcccactgttccaggacctgtggggctggagtccagagcgcagagaggctctgcaacaaccccgagccaaagtttggagggaaatattgcactggagaaagaaaacgctatcgcttgtgcaacgtccacccctgtcgctcagaggcaccaacatttcggcagatgcagtgcagtgaatttgacactgttccctacaagaatgaactctaccactggtttcccatttttaacccagcacatccttgtgagctctactgccgacccatagatggccagttttctgagaaaatgctggatgctgtcattgatggtaccccttgctttgaaggcggcaacagcagaaatgtctgtattaatggcatatgtaagatggttggctgtgactatgagatcgattccaatgccaccgaggatcgctgcggtgtgtgcctgggagatggctcttcctgccagactgtgagaaagatgtttaagcagaaggaaggatctggttatgttgacattgggctcattccaaaaggagcaagggacataagagtgatggaaattgagggagctggaaacttcctggccatcaggagtgaagatcctgaaaaatattacctgaatggagggtttattatccagtggaacgggaactataagctggcagggactgtctttcagtatgacaggaaaggagacctggaaaagctgatggccacaggtcccaccaatgagtctgtgtggatccagcttctattccaggtgactaaccctggcatcaagtatgagtacacaatccagaaagatggccttgacaatgatgttgagcagcagatgtacttctggcagtacggccactggacagagtgcagtgtgacctgcgggacaggtatccgccgccaaactgcccattgcataaagaagggccgcgggatggtgaaagctacattctgtgacccagaaacacagcccaatgggagacagaagaagtgccatgaaaaggcttgtccacccaggtggtgggcaggggagtgggaagcatgctcggcgacatgcgggccccacggggagaagaagcgaaccgtgctgtgcatccagaccatggtctctgacgagcaggctctcccgcccacagactgccagcacctgctgaagcccaagaccctcctttcctgcaacagagacatcctgtgcccctcggactggacagtgggcaactggagtgagtgttctgtttcctgtggtggtggagtgcggattcgcagtgtcacatgtgccaagaaccatgatgaaccttgcgatgtgacaaggaaacccaacagccgagctctgtgtggcctccagcaatgcccttctagccggagagttctgaaaccaaacaaaggcactatttccaatggaaaaaacccaccaacactaaagcccgtccctccacctacatccaggcccagaatgctgaccacacccacagggcctgagtctatgagcacaagcactccagcaatcagcagccctagtcctaccacagcctccaaagaaggagacctgggtgggaaacagtggcaagatagctcaacccaacctgagctgagctctcgctatctcatttccactggaagcacttcccagcccatcctcacttcccaatccttgagcattcagccaagtgaggaaaatgtttccagttcagatactggtcctacctcggagggaggccttgtagctacaacaacaagtggttctggcttgtcatcttcccgcaaccctatcacttggcctgtgactccattttacaataccttgaccaaaggtccagaaatggagattcacagtggctcaggggaagaaagagaacagcctgaggacaaagatgaaagcaatcctgtaatatggaccaagatcagagtacctggaaatgacgctccagtggaaagtacagaaatgccacttgcacctccactaacaccagatctcagcagggagtcctggtggccacccttcagcacagtaatggaaggactgctccccagccaaaggcccactacttccgaaactgggacacccagagttgaggggatggttactgaaaagccagccaacactctgctccctctgggaggagaccaccagccagaaccctcaggaaagacggcaaaccgtaaccacctgaaacttccaaacaacatgaaccaaacaaaaagttctgaaccagtcctgactgaggaggatgcaacaagtctgattactgagggctttttgctaaatgcctccaattacaagcagctcacaaacggccacggctctgcacactggatcgtcggaaactggagcgagtgctccaccacatgtggcctgggggcctactggagaagggtggagtgcagcacccagatggattctgactgtgcggccatccagagacctgaccctgcaaaaagatgccacctccgtccctgtgctggctggaaagtgggaaactggagcaagtgctccagaaactgcagtgggggcttcaagatacgcgagattcagtgcgtggacagccgggaccaccggaacctgaggccatttcactgccagttcctggccggcattcctcccccattgagcatgagctgtaacccggagccctgtgaggcgtggcaggtggagccttggagccagtgctccaggtcctgtggaggtggagttcaggagagaggagtgttctgtccaggaggcctctgtgattggacaaaaagacccacatccaccatgtcttgcaatgagcacctgtgctgtcactgggccactgggaactgggacctgtgttccacttcctgtggaggtggctttcagaagaggactgtccaatgtgtgccctcagagggcaataaaactgaagaccaagaccaatgtctatgtgatcacaaacccagacctccagaattcaaaaaatgcaaccagcaggcctgcaagaaaagtgccgatttactttgcactaaggacaaactgtcagccagtttctgccagacactgaaagccatgaagaaatgttctgtgcccaccgtgagggctgagtgctgcttctcgtgtccccagacacacatcacacacacccaaaggcaaagaaggcaacggttgctccaaaagtcaaaagaactctaagcccaaa

SEQ ID NO: 21 - DNA, 7818 bp, Homo sapiens
gagaggggctgatggaagctgataggcaggactggagtgttagcaccagtactggatgtgacagcaggcagaggagcacttagcagcttattcagtgtccgattctgattccggcaaggatccaagcatggaatgctgccgtcgggcaactcctggcacactgctcctctttctggctttcctgctcctgagttccaggaccgcacgctccgaggaggaccgggacggcctatgggatgcctggggcccatggagtgaatgctcacgcacctgcgggggtggggcctcctactctctgaggcgctgcctgagcagcaagagctgtgaaggaagaaatatccgatacagaacatgcagtaatgtggactgcccaccagaagcaggtgatttccgagctcagcaatgctcagctcataatgatgtcaagcaccatggccagttttatgaatggcttcctgtgtctaatgaccctgacaacccatgttcactcaagtgccaagccaaaggaacaaccctggttgttgaactagcacctaaggtcttagatggtacgcgttgctatacagaatctttggatatgtgcatcagtggtttatgccaaattgttggctgcgatcaccagctgggaagcaccgtcaaggaagataactgtggggtctgcaacggagatgggtccacctgccggctggtccgagggcagtataaatcccagctctccgcaaccaaatcggatgatactgtggttgcaattccctatggaagtagacatattcgccttgtcttaaaaggtcctgatcacttatatctggaaaccaaaaccctccaggggactaaaggtgaaaacagtctcagctccacaggaactttccttgtggacaattctagtgtggacttccagaaatttccagacaaagagatactgagaatggctggaccactcacagcagatttcattgtcaagattcgtaactcgggctccgctgacagtacagtccagttcatcttctatcaacccatcatccaccgatggagggagacggatttctttccttgctcagcaacctgtggaggaggttatcagctgacatcggctgagtgctacgatctgaggagcaaccgtgtggttgctgaccaatactgtcactattacccagagaacatcaaacccaaacccaagcttcaggagtgcaacttggatccttgtccagccagtgacggatacaagcagatcatgccttatgacctctaccatccccttcctcggtgggaggccaccccatggaccgcgtgctcctcctcgtgtggggggggcatccagagccgggcagtttcctgtgtggaggaggacatccaggggcatgtcacttcagtggaagagtggaaatgcatgtacacccctaagatgcccatcgcgcagccctgcaacatttttgactgccctaaatggctggcacaggagtggtctccgtgcacagtgacatgtggccagggcctcagataccgtgtggtcctctgcatcgaccatcgaggaatgcacacaggaggctgtagcccaaaaacaaagccccacataaaagaggaatgcatcgtacccactccctgctataaacccaaagagaaacttccagtcgaggccaagttgccatggttcaaacaagctcaagagctagaagaaggagctgctgtgtcagaggagccctcgttcatcccagaggcctggtcggcctgcacagtcacctgtggtgtggggacccaggtgcgaatagtcaggtgccaggtgctcctgtctttctctcagtccgtggctgacctgcctattgacgagtgtgaagggcccaagccagcatcccagcgtgcctgttatgcaggcccatgcagcggggaaattcctgagttcaacccagacgagacagatgggctctttggtggcctgcaggatttcgacgagctgtatgactgggagtatgaggggttcaccaagtgctccgagtcctgtggaggaggtgtccaggaggctgtggtgagctgcttgaacaaacagactcgggagcctgctgaggagaacctgtgcgtgaccagccgccggcccccacagctcctgaagtcctgcaatttggatccctgcccagcaaggtgggaaattggcaagtggagtccatgtagtctcacatgtggggtcggcctacagaccagagacgtcttctgcagccacctgctttccagagagatgaatgaaacagtcatcctggctgatgagctgtgtcgccagcccaagcccagcacggtgcaagcttgtaaccgctttaattgccccccagcctggtaccctgcacagtggcagccgtgttccagaacgtgtggcgggggtgttcagaaacgtgaggttctttgcaagcagcgcatggctgatggcagcttcctggagcttcctgagaccttctgttcagcttcaaaacctgcctgccagcaagcatgcaagaaagatgactgtcccagcgagtggcttctctcagactggacagagtgttccacaagctgcggggaaggcacccagactcgaagcgccatttgccgaaagatgctgaaaaccggcctctcaacggttgtcaattccaccctgtgcccgcccctgcctttctcttcctccatcaggccctgtatgctggcaacctgtgcaaggcccgggcggccatccacgaagcacagcccgcacatcgcggccgccaggaaggtctacatacagactcgcaggcagaggaagctgcacttcgtggtggggggcttcgcctacctgctccccaagacggcggtggtgctgcgctgcccggcgcgcagggtccgcaagcccctcatcacctgggagaaggacggccagcacctcatcagctcgacgcacgtcacggtggcccccttcggctatctcaagatccaccgcctcaagccctcggatgcaggcgtctacacctgctcagcgggcccggcccgggagcactttgtgattaagctcatcggaggcaaccgcaagctcgtggcccggcccttgagcccgagaagtgaggaagaggtgcttgcggggaggaagggcggcccgaaggaggccctgcagacccacaaacaccagaacgggatcttctccaacggcagcaaggcggagaagcggggcctggccgccaacccggggagccgctacgacgacctcgtctcccggctgctggagcagggcggctggcccggagagctgctggcctcgtgggaggcgcaggactctgcggaaaggaacacgacctcggaggaggacccgggtgcagagcaagtgctcctgcacctgcccttcaccatggtgaccgagcagcggcgcctggacgacatcctggggaacctctcccagcagcccgaggagctgcgcgacctctacagcaagcacctggtggcccagctggcccaggagatcttccgcagccacctggagcaccaggacacgctcctgaagccctcggagcgcaggacttccccagtgactctctcgcctcataaacacgtgtctggcttcagcagctccctgcggacctcctccaccggggacgccgggggaggctctcgaaggccacaccgcaagcccaccatcctgcgcaagatctcagcggcccagcagctctcagcctcggaggtggtcacccacctggggcagacggtggccctggccagcgggacactgagtgttcttctgcactgtgaggccatcggccacccaaggcctaccatcagctgggccaggaatggagaagaagttcagttcagtgacaggattcttctacagccagatgattccttacagatcttggcaccagtggaagcagatgtgggtttctacacttgcaatgccaccaatgccttgggatacgactctgtctccattgccgtcacattagcaggaaagccactagtgaaaacgtcacgaatgacagtgatcaacacggagaagcctgcagtcacagtcgatataggaagcaccatcaaaacagtgcagggagtgaatgtgacaatcaactgccaggttgcaggagtgcctgaagctgaagtcacttggttcaggaataaaagcaaactgggctccccgcaccatctgcacgaaggctccttgctgctcacaaacgtgtcctcctcggatcagggcctgtactcctgcagggcggccaatcttcatggagagctgactgagagcacccagctgctgatcctagatcccccccaagtccccacacagttggaagacatcagggccttgctcgctgccactggaccgaaccttccttcagtgctgacgtctcctctgggaacacagctggtcctggatcctgggaattctgctctccttggctgccccatcaaaggtcaccctgtccctaatatcacctggtttcatggtggtcagccaattgtcactgccacaggactgacgcatcacatcttggcagctggacagatccttcaagttgcaaaccttagcggtgggtctcaaggggaattcagctgccttgctcagaatgaggcaggggtgctcatgcagaaggcatctttagtgatccaagattactggtggtctgtggacagactggcaacctgctcagcctcctgtggtaaccggggggttcagcagccccgcttgaggtgcctgctgaacagcacggaggtcaaccctgcccactgcgcagggaaggttcgccctgcggtgcagcccatcgcgtgcaaccggagagactgcccttctcggtggatggtgacctcctggtctgcctgtacccggagctgtgggggaggtgtccagacccgcagggtgacctgtcaaaagctgaaagcctctgggatctccacccctgtgtccaatgacatgtgcacccaggtcgccaagcggcctgtggacacccaggcctgtaaccagcagctgtgtgtggagtgggccttctccagctggggccagtgcaatgggccttgcatcgggcctcacctagctgtgcaacacagacaagtcttctgccagacacgggatggcatcaccttaccatcagagcagtgcagtgctcttccgaggcctgtgagcacccagaactgctggtcagaggcctgcagtgtacactggagagtcagcctgtggaccctgtgcacagctacctgtggcaactacggcttccagtcccggcgtgtggagtgtgtgcatgcccgcaccaacaaggcagtgcctgagcacctgtgctcctgggggccccggcctgccaactggcagcgctgcaacatcaccccatgtgaaaacatggagtgcagagacaccaccaggtactgcgagaaggtgaaacagctgaaactctgccaactcagccagtttaaatctcgctgctgtggaacttgtggcaaagcgtgaagatagggtgtggggaaaaactctaccctggccacacgaaggactcacgcaaccacctcggacagaacctaagctttcttcattttatttatttatttccccctccccactccacacacacccttccaacctcctccacctccaccttcaagcataaggacgtccgcgtgttttctctttcagttagctggaggacaggatgttgggaaaggaaaggacagatgtctaaaggaggttgcagagcaggccaggcagacagtgggggctcccttgaagagcttcctccctcccaaacctgggtctcaaagacctagaaagaggcaggcacagcccctgcggacagcagggagccagaaggtttgtagcctattggtgcaaacattggacaaattcctgtgtctttcctagaagcgcactatcacaaacacaggagtgttttgctcctttgtctcctcttccccatctatgtccctttagtcacagttaggacaaatggggaggggacaccatgctgaggcagaaactagcccagaactcactcagttcttctagtgggtgagtgcagagagagaagaactcagatcaccagtagggagaggtaaaaaagcaaacaaagcaggctctaaggcacacaacattgcagaaaatgaggaagggaggggagggaagggacagaagcaaaaaggagcctgtggtgttccccagtggggcagggtgagcaggggcttccaggctgcatgaggctcatggaccagctctgatcccatgcatgtgcgcatgctcagagccctgctgcccacaacagagcactgcgctgcgtgggagtccccacttcccaagctatcagagtcaacgtcctgcctgtgcagctgcagcaaagccagtgagaggtgggtctcgccatgcagtaaggccaccctggcacctctttatctaaatccgaagtcccctagccccgcactaactaactgctgctgtgggccagggccattttgagcatgaatggcccaggttttttgccttctaggacctttgctgctccaccgaagggccagggactatggttaacttatcaacatcaacccattaactagtcactgtgccagagagtatctgtcaggctgtcaggttgtagcaacctcttcattccagagctggcccagggaccggggtgggacaatgggtttatgcgtgtccacagtacaccctccctctcccagcctccaccccagggtctgcaggtcctccggcatgtagtatttatctagcaaggcggggtggtggaggcagcaccctggcaaagcagctcacacactgcagccacactcatcagctgtggtgaggcggctggagcaaagtcaaagtcatgcagcaaaatgaaaactctgggactcttcggcaaaatcctcattaagccgagcagctttggccaagtaatttttgcctccttccctcgcgtggcctgagtttaggagcaagggtggccagagtcccttacccacagataagcctcccctcatgaaatgccactcaccccgggctaccattgacatcagggctgcatttccagccagcctggaagtaaaatttgagaggaagacaatattaatctgtgtccccacctagtgagctgtggacaggtttaagttgggtctccttcttcttcaccacaaaaacaggctctaagaaatcatgttactaaaaaatcagtgtaaagtctgtttaaaataaaaaagaatgttttctatgtctgtatatcttttgtgaatatttattaggatttcttattaaaaaagtgcaatattaataattgtacattgtcatccagaaacaaaactattggggggactttattaactaacttcctgcagttgtgttcctgtaaactcagtagtgattattatatttttcctatttttaatagaacctggtgtttaactctggatccattcactgtacaggatgtgttgtaaaaactaacatgggatgctgaggcagtaagagggaattcatttgtggcataatagttatgcatggaatgataaagacagacaaattccatactactactaatgtggttaattatttctagttcgatagtgattgaaaatcagtggtcactatttacatttcctaaagagcaagcatcctccagctccatgttgggttggagcagttggcagtgggtctcagtgagctggcagaacctaggtttgggtgggaagcagaatgctcgttgcatgaaatgaatgtacatttaatgtttgttctgtgaattgcaactcagcagcaccacaagacaatgaaggctgctggctaatgtggaaggaggcactttctcctctaaaacacaaaactgtatttgtattttttgtacagataatacagcttatttatttaaa

SEQ ID NO: 22 - DNA, 644 bp, Homo sapiens
agaacgaccgacggaccgagggttcgagggagggacacggaccaggaacctgagctaggtcaaagacgcccgggccaggtgccccgtcgcaggtgcccctggccggagatgcggtaggaggggcgagcgcgagaagccccttcctcggcgctgccaacccgccacccagcccatggcgaaccccgggctggggctgcttctggcgctgggcctgccgttcctgctggcccgctggggccgagcctgggggcaaatacagaccacttctgcaaatgagaatagcactgttttgccttcatccaccagctccagctccgatggcaacctgcgtccagaagccatcactgctatcatcgtggtcttctccctcttggctgccttgctcctggctgtggggctggcactgttggtgcggaagcttcgggagaagcggcagacggagggcacctaccggcccagtagcgaggagcaggtgggtgcccgcgtgccaccgacccccaacctcaagttgccgccggaagagcggctcatctgaacgctggggcctgctgcagccaccaacactgcccaggactgcgggttgctggcttgtacaccgcagctgccaccgagacaccagcctctgatggctcaggaggacttgt

SEQ ID NO: 23 - DNA, 1864 bp, Homo sapiens
aaaaaaaatgtgagaggggctgatggaagctgataggcaggactggagtgttagcaccagtactggatgtgacagcaggcagaggagcacttagcagcttattcagtgtccgattctgattccggcaaggatccaagcatggaatgctgccgtcgggcaactcctggcacactgctcctctttctggctttcctgctcctgagttccaggaccgcacgctccgaggaggaccgggacggcctatgggatgcctggggcccatggagtgaatgctcacgcacctgcgggggaggggcctcctactctctgaggcgctgcctgagcagcaagagctgtgaaggaagaaatatccgatacagaacatgcagtaatgtggactgcccaccagaagcaggtgatttccgagctcagcaatgctcagctcataatgatgtcaagcaccatggccagttttatgaatggcttcctgtgtctaatgaccctgacaacccatgttcactcaagtgccaagccaaaggaacaaccctggttgttgaactagcacctaaggtcttagatggtacgcgttgctatacagagtctttggatatgtgcatcagtggtttatgccaaattgttggctgcgatcaccagctgggaagcaccgtcaaggaagataactgtggggtctgcaacggagatgggtccacctgccggctggtccgagggcagtataaatcccagctctccgcaaccaaatcggatgatactgtggttgcaattccctatggaagtagacatattcgccttgtcttaaaaggtcctgatcacttatatctggaaaccaaaaccctccaggggactaaaggtgaaaacagtctcagctccacaggaactttccttgtggacaattctagtgtggacttccagaaatttccagacaaagagatactgagaatggctggaccactcacagcagatttcattgtcaagattcgtaactcgggctccgctgacagtacagtccagttcatcttctatcaacccatcatccaccgatggagggagacggatttctttccttgctcagcaacctgtggaggaggttatcagctgacatcggctgagtgctacgatctgaggagcaaccgtgtggttgctgaccaatactgtcactattacccagaggacatcaaacccaaacccaagcttcaggagtgcaacttggatccttgtccagccagtgacggatacaagcagatcatgccttatgacctctaccatccccttcctcggtgggaggccaccccatggaccgcgtgctcctcctcgtgtggggggggcatccagagccgggcagtttcctgtgtggaggaggacatccaggggcatgtcacttcagtggaagagtggaaatgcatgtacacccctaagatgcccatcgcgcagccctgcaacatttttgactgccctaaatggctggcacaggagtggtctccgtgcacagtgacatgtggccagggcctcagataccgtgtggtcctctgcatcgaccatcgaggaatgcacacaggaggctgtagcccaaaaacaaagccccacataaaagaggaatgcatcgtacccactccctgctataaacccaaagagaaacttccagtcgaggccaagttgccatggttcaaacaagctcaagagctagaagaaggagctgctgtgtcagaggagccctcgtaagttgtaaaagcacagactgttctatatttgaaactgttttgtttaaagaaagcagtgtctcattggttgtagctttcatgggttctgaactaagtgtaatcatctcaccaaagctttttggctctcaaattaaagattgattagtttc

SEQ ID NO: 24 - DNA, 6583 bp, Homo sapiens
tttttttttttttgagacggagtctcactctgtcacccaggctggagtgcaatggcgcgatctttgctcactgcaacctctgccacccgggttcaagcaattctcctgcctcagctcctgagtagctgggattacaggcgcccgccaccacgcccggctaatttttgtatttttagtagagacgaggtttcaccatcttggccaggctggtcttgaactcctgaccttgtgatctacctgccagggccttccaaagtgctgggattacggacgtgagccaccacgcctggcccaggctaattttttgaaattttaatagaggcagggtcttgctgtattgcccaggttgctctcacattcctagccttaagccatcctcctatctcggcctcacaaagtgctgggattacaggtgtaagccactgtgcctggttttgggcaagtttcttgtcctgactgtgtcttgggttctcacctgttgattggggatacccttgttgcctacctccaagtaattttatgaggatgaaactcatagcttgtcagtgggaagtgcttaggtaatgagctactagtggtggcagtggctgtgatggtggtattaataccactcctactggatggtctctaatactatctccttccttccctaccagcaacatgtcatggtttagtggcctcctggtccctaaagtggatgaacggaaaacagcctggggtgaacgcaatgggcagaagcgttcgcggcgccgtggcactcgggcaggtggcttctgcacgccccgctatatgagctgcctccgggatgcagagccacccagccccacccctgcgggcccccctcggtgcccctggcaggatgacgccttcatccggaggggcggcccaggcaagggcaaggagctggggctgcgggcagtggccctgggcttcgaggataccgaggtgacaacgacagcgggcgggacggctgaggtggcgcccgacgcggtgcccaggagtgggcgatcctgctggcgccgtctggtgcaggtgttccagtcgaagcagttccgttcggccaagctggagcgcctgtaccagcggtacttcttccagatgaaccagagcagcctgacgctgctgatggcggtgctggtgctgctcacagcggtgctgctggctttccacgccgcacccgcccgccctcagcctgcctatgtggcactgttggcctgtgccgccgccctgttcgtggggctcatggtggtgtgtaaccggcatagcttccgccaggactccatgtgggtggtgagctacgtggtgctgggcatcctggcggcagtgcaggtcgggggcgctctcgcagcagacccgcgcagcccctctgcgggcctctggtgccctgtgttctttgtctacatcgcctacacgctcctccccatccgcatgcgggctgccgtcctcagcggcctgggcctctccaccttgcatttgatcttggcctggcaacttaaccgtggtgatgccttcctctggaagcagctcggtgccaatgtgctgctgttcctctgcaccaacgtcattggcatctgcacacactatccagcagaggtgtctcagcgccaggcctttcaggagacccgcggttacatccaggcccggctccacctgcagcatgagaatcggcagcaggagcggctgctgctgtcggtattgccccagcacgttgccatggagatgaaagaagacatcaacacaaaaaaagaagacatgatgttccacaagatctacatacagaagcatgacaatgtcagcatcctgtttgcagacattgagggcttcaccagcctggcatcccagtgcactgcgcaggagctggtcatgaccctgaatgagctctttgcccggtttgacaagctggctgcggagaatcactgcctgaggatcaagatcttgggggactgttactactgtgtgtcagggctgccggaggcccgggccgaccatgcccactgctgtgtggagatgggggtagacatgattgaggccatctcgctggtacgtgaggtgacaggtgtgaatgtgaacatgcgcgtgggcatccacagcgggcgcgtgcactgcggcgtccttggcttgcggaaatggcagttcgatgtgtggtccaatgatgtgaccctggccaaccacatggaggcaggaggccgggctggccgcatccacatcactcgggcaacactgcagtacctgaacggggactacgaggtggagccaggccgtggtggcgagcgcaacgcgtacctcaaggagcagcacattgagactttcctcatcctgggcgccagccagaaacggaaagaggagaaggccatgctggccaagctgcagcggactcgggccaactccatggaagggctgatgccgcgctgggttcctgatcgtgccttctcccggaccaaggactccaaggccttccgccagatgggcattgatgattccagcaaagacaaccggggcacccaagatgccctgaaccctgaggatgaggtggatgagttcctgagccgtgccatcgatgcccgcagcattgatcagctgcggaaggaccatgtgcgccggtttctgctcaccttccagagagaggatcttgagaagaagtactcccggaaggtggatccccgcttcggagcctacgttgcctgtgccctgttggtcttctgcttcatctgcttcatccagcttctcatcttcccacactccaccctgatgcttgggatctatgccagcatcttcctgctgctgctaatcaccgtgctgatctgtgctgtgtactcctgtggttctctgttccctaaggccctgcaacgtctgtcccgcagcattgtccgctcacgggcacatagcaccgcagttggcatcttttccgtcctgcttgtgtttacttctgccattgccaacatgttcacctgtaaccacacccccatacggagctgtgcagcccggatgctgaatttaacacctgctgacatcactgcctgccacctgcagcagctcaattactctctgggcctggatgctcccctgtgtgagggcaccatgcccacctgcagctttcctgagtacttcatcgggaacatgctgctgagtctcttggccagctctgtcttcctgcacatcagcagcatcgggaagttggccatgatctttgtcttggggctcatctatttggtgctgcttctgctgggtcccccagccaccatctttgacaactatgacctactgcttggcgtccatggcttggcttcttccaatgagacctttgatgggctggactgtccagctgcagggagggtggccctcaaatatatgacccctgtgattctgctggtgtttgcgctggcgctgtatctgcatgctcagcaggtggagtcgactgcccgcctagacttcctctggaaactacaggcaacaggggagaaggaggagatggaggagctacaggcatacaaccggaggctgctgcataacattctgcccaaggacgtggcggcccacttcctggcccgggagcgccgcaatgatgaactctactatcagtcgtgtgagtgtgtggctgttatgtttgcctccattgccaacttctctgagttctatgtggagctggaggcaaacaatgagggtgtcgagtgcctgcggctgctcaacgagatcatcgctgactttgatgagattatcagcgaggagcggttccggcagctggaaaagatcaagacgattggtagcacctacatggctgcctcagggctgaacgccagcacctacgatcaggtgggccgctcccacatcactgccctggctgactacgccatgcggctcatggagcagatgaagcacatcaatgagcactccttcaacaatttccagatgaagattgggctgaacatgggcccagtcgtggcaggtgtcatcggggctcggaagccacagtatgacatctgggggaacacagtgaatgtctctagtcgtatggacagcacgggggtccccgaccgaatccaggtgaccacggacctgtaccaggttctagctgccaagggctaccagctggagtgtcgaggggtggtcaaggtgaagggcaagggggagatgaccacctacttcctcaatgggggccccagcagttaacagggcccagccacaaattcagctgaagggaccaaggtgggcattgagtggactctgtgctcactgggtggagctgtggcagggggcactgagcctccagaccctgctaaccacaaaagggaacatcccagcaggctgtgcttggatcatgctcgtctgccctcaagctggaaaacaaggggctacctaccgagaggattatgcaagtgactttctttcttacttggggtagggctgttccctctccaatcttccagcctttgggagcaggggaggggtcagtagcagaagcagagggaggcctcttgcctgagggattaaaatggcagcttgccatgcctacccttccctgtctgtctgggcagcaggttcagggctgagcccttcttttccctcttttttcctgggaatattttgtacaatattttgtacaaagacaggcatgaggagtgcctattccatgcttgcctttgcaatacctgcatccccagcactggtcctgggcacttccccaccccagccaggtgtccctcctatgcacagagcagaggagggagaagctctggggagccagctttggccatatttcaggagaatgtttccatgtgccaaatcttagtcccatgatctgtccccaaaggggaacaaagggacctctgacagcttagatttagccccagttcctgcacgctccagggaacggggtgtctggcctcactggtactgtgaaaaatgctcagagagcaagcctgtgtgtggggatgtcaggtcaggagctggaagttcacctgcaggtgccaaagagcaggccggccagggctggggcagtgccagactctgatctgaggaccccgtcggggtccagatcaggtcactctgccccagtgctctcttgctgtctgctgacaagggggcatggagcatctcttcctcttctgttgccaaatagaaaagggtcagggcatggagaaaggtgaccctgatcccaaacctgccctcccaagtctctggtgttggggagggcccgtgtgtttgtgtaactgtgtgtgcatgttggtctttgtgtgcatatctgttttccaggtctatgtgagtccttgtgctcctgctcctcagctctccaccccaggttgcctctctcctgtgggcctctgtcttctgggaataaagcagggtttcctacttcaggggatgtagagagatgcccaggttgcacaggagtgggatggggtgtggtagcaaaaggagggagaggagtcctttttgtgccaaatccctaagtgccgttcgggggccatgtgtgcagcatgactctccctgtctgtggcagggacccaagcgcttgcttaagccccagtgctccatgccagcacttgaactgtctggggtttgatggacagaggctgaggaatttcctggcttccccagatagtgtcctgggacatggtatgctttggggctggggtagcatggaatccctctgaggacctggatactggtactacggggtggggaagaggaaccttaaacttggctttccccagccttcagcctgagtctagcatgtttctagctccccagtcccttgtgaagccttgagggctggcagaagggttaggaggttgaactctagattcccttcctgtctttgccttccttttacccctttccctgcaacctccttgactctggcctgaatttgttggtgcctcagtttctctgtctgtacctatttaagccaaaggcactagcctgaattttgcttgaagatcactttgtcttggaaatgactagagaggcagaggagaagggtttccagagttgctaggtttgggagtggaaggggcaggcagtgcacttgcccctcctcatgccccttctgacaccagctccctgtggaggcctggtttctgggtaatgcctcccttgggcatcttcatgcatcaaccaaatgggccatcaggtacttcattagtcatggcagaaggaggggaaaagacttgttttccagacagaaaatctactcccctgtccccagccatatccctggataggaagggataggaagagactacttggtgccatggggtaggggtgagggtataagtagatcagagtgggaagacctcagccttgggtggcttgtctctgcttcttgccaggtgggagggcctgtccacaccctggatccccgtaccacagtgccagccatgcccttcccctgggctaccattgtccctttcctcacccagttggtagaggagtcaggaggtgggaggccgtgggctttggttttataatgtaaccactgtgggggtgggggaggatggtgaaccatgtatttcagtgaaatatttaatatatttaaatatcaataaaatcaaactctttgtaaaattaaaaaaaaaaaaaaaaa

SEQ ID NO: 25 - DNA, 5877 bp, Homo sapiens
cggacggcggacggcgggcgggacggccaggacgcgcgggctcggaggaccgcgggacggccggccggccggccggagcccgcgggggcggcggggcgggggcccagggcaggcgcggagccgggccggcagcaacatgtcatggtttagtggcctcctggtccctaaagtggatgaacggaaaacagcctggggtgaacgcaatgggcagaagcgttcgcggcgccgtggcactcgggcaggtggcttctgcacgccccgctatatgagctgcctccgggatgcagagccacccagccccacccctgcgggcccccctcggtgcccctggcaggatgacgccttcatccggaggggcggcccaggcaagggcaaggagctggggctgcgggcagtggccctgggcttcgaggataccgaggtgacaacgacagcgggcgggacggctgaggtggcgcccgacgcggtgcccaggagtgggcgatcctgctggcgccgtctggtgcaggtgttccagtcgaagcagttccgttcggccaagctggagcgcctgtaccagcggtacttcttccagatgaaccagagcagcctgacgctgctgatggcggtgctggtgctgctcacagcggtgctgctggctttccacgccgcacccgcccgccctcagcctgcctatgtggcactgttggcctgtgccgccgccctgttcgtggggctcatggtggtgtgtaaccggcatagcttccgccaggactccatgtgggtggtgagctacgtggtgctgggcatcctggcggcagtgcaggtcgggggcgctctcgcagcagacccgcgcagcccctctgcgggcctctggtgccctgtgttctttgtctacatcgcctacacgctcctccccatccgcatgcgggctgccgtcctcagcggcctgggcctctccaccttgcatttgatcttggcctggcaacttaaccgtggtgatgccttcctctggaagcagctcggtgccaatgtgctgctgttcctctgcaccaacgtcattggcatctgcacacactatccagcagaggtgtctcagcgccaggcctttcaggagacccgcggttacatccaggcccggctccacctgcagcatgagaatcggcagcaggagcggctgctgctgtcggtattgccccagcacgttgccatggagatgaaagaagacatcaacacaaaaaaagaagacatgatgttccacaagatctacatacagaagcatgacaatgtcagcatcctgtttgcagacattgagggcttcaccagcctggcatcccagtgcactgcgcaggagctggtcatgaccctgaatgagctctttgcccggtttgacaagctggctgcggagaatcactgcctgaggatcaagatcttgggggactgttactactgtgtgtcagggctgccggaggcccgggccgaccatgcccactgctgtgtggagatgggggtagacatgattgaggccatctcgctggtacgtgaggtgacaggtgtgaatgtgaacatgcgcgtgggcatccacagcgggcgcgtgcactgcggcgtccttggcttgcggaaatggcagttcgatgtgtggtccaatgatgtgaccctggccaaccacatggaggcaggaggccgggctggccgcatccacatcactcgggcaacactgcagtacctgaacggggactacgaggtggagccaggccgtggtggcgagcgcaacgcgtacctcaaggagcagcacattgagactttcctcatcctgggcgccagccagaaacggaaagaggagaaggccatgctggccaagctgcagcggactcgggccaactccatggaagggctgatgccgcgctgggttcctgatcgtgccttctcccggaccaaggactccaaggccttccgccagatgggcattgatgattccagcaaagacaaccggggcacccaagatgccctgaaccctgaggatgaggtggatgagttcctgagccgtgccatcgatgcccgcagcattgatcagctgcggaaggaccatgtgcgccggtttctgctcaccttccagagagaggatcttgagaagaagtactcccggaaggtggatccccgcttcggagcctacgttgcctgtgccctgttggtcttctgcttcatctgcttcatccagcttctcatcttcccacactccaccctgatgcttgggatctatgccagcatcttcctgctgctgctaatcaccgtgctgatctgtgctgtgtactcctgtggttctctgttccctaaggccctgcaacgtctgtcccgcagcattgtccgctcacgggcacatagcaccgcagttggcatcttttccgtcctgcttgtgtttacttctgccattgccaacatgtacttcatcgggaacatgctgctgagtctcttggccagctctgtcttcctgcacatcagcagcatcgggaagttggccatgatctttgtcttggggctcatctatttggtgctgcttctgctgggtcccccagccaccatctttgacaactatgacctactgcttggcgtccatggcttggcttcttccaatgagacctttgatgggctggactgtccagctgcagggagggtggccctcaaatatatgacccctgtgattctgctggtgtttgcgctggcgctgtatctgcatgctcagcaggtggagtcgactgcccgcctagacttcctctggaaactacaggcaacaggggagaaggaggagatggaggagctacaggcatacaaccggaggctgctgcataacattctgcccaaggacgtggcggcccacttcctggcccgggagcgccgcaatgatgaactctactatcagtcgtgtgagtgtgtggctgttatgtttgcctccattgccaacttctctgagttctatgtggagctggaggcaaacaatgagggtgtcgagtgcctgcggctgctcaacgagatcatcgctgactttgatgagattatcagcgaggagcggttccggcagctggaaaagatcaagacgattggtagcacctacatggctgcctcagggctgaacgccagcacctacgatcaggtgggccgctcccacatcactgccctggctgactacgccatgcggctcatggagcagatgaagcacatcaatgagcactccttcaacaatttccagatgaagattgggctgaacatgggcccagtcgtggcaggtgtcatcggggctcggaagccacagtatgacatctgggggaacacagtgaatgtctctagtcgtatggacagcacgggggtccccgaccgaatccaggtgaccacggacctgtaccaggttctagctgccaagggctaccagctggagtgtcgaggggtggtcaaggtgaagggcaagggggagatgaccacctacttcctcaatgggggccccagcagttaacagggcccagccacaaattcagctgaagggaccaaggtgggcattgagtggactctgtgctcactgggtggagctgtggcagggggcactgagcctccagaccctgctaaccacaaaagggaacatcccagcaggctgtgcttggatcatgctcgtctgccctcaagctggaaaacaaggggctacctaccgagaggattatgcaagtgactttctttcttacttggggtagggctgttccctctccaatcttccagcctttgggagcaggggaggggtcagtagcagaagcagagggaggcctcttgcctgagggattaaaatggcagcttgccatgcctacccttccctgtctgtctgggcagcaggttcagggctgagcccttcttttccctcttttttcctgggaatattttgtacaatattttgtacaaagacaggcatgaggagtgcctattccatgcttgcctttgcaatacctgcatccccagcactggtcctgggcacttccccaccccagccaggtgtccctcctatgcacagagcagaggagggagaagctctggggagccagctttggccatatttcaggagaatgtttccatgtgccaaatcttagtcccatgatctgtccccaaaggggaacaaagggacctctgacagcttagatttagccccagttcctgcacgctccagggaacggggtgtctggcctcactggtactgtgaaaaatgctcagagagcaagcctgtgtgtggggatgtcaggtcaggagctggaagttcacctgcaggtgccaaagagcaggccggccagggctggggcagtgccagactctgatctgaggaccccgtcggggtccagatcaggtcactctgccccagtgctctcttgctgtctgctgacaagggggcatggagcatctcttcctcttctgttgccaaatagaaaagggtcagggcatggagaaaggtgaccctgatcccaaacctgccctcccaagtctctggtgttggggagggcccgtgtgtttgtgtaactgtgtgtgcatgttggtctttgtgtgcatatctgttttccaggtctatgtgagtccttgtgctcctgctcctcagctctccaccccaggttgcctctctcctgtgggcctctgtcttctgggaataaagcagggtttcctacttcaggggatgtagagagatgcccaggttgcacaggagtgggatggggtgtggtagcaaaaggagggagaggagtcctttttgtgccaaatccctaagtgccgttcgggggccatgtgtgcagcatgactctccctgtctgtggcagggacccaagcgcttgcttaagccccagtgctccatgccagcacttgaactgtctggggtttgatggacagaggctgaggaatttcctggcttccccagatagtgtcctgggacatggtatgctttggggctggggtagcatggaatccctctgaggacctggatactggtactacggggtggggaagaggaaccttaaacttggctttccccagccttcagcctgagtctagcatgtttctagctccccagtcccttgtgaagccttgagggctggcagaagggttaggaggttgaactctagattcccttcctgtctttgccttccttttacccctttccctgcaacctccttgactctggcctgaatttgttggtgcctcagtttctctgtctgtacctatttaagccaaaggcactagcctgaattttgcttgaagatcactttgtcttggaaatgactagagaggcagaggagaagggtttccagagttgctaggtttgggagtggaaggggcaggcagtgcacttgcccctcctcatgccccttctgacaccagctccctgtggaggcctggtttctgggtaatgcctcccttgggcatcttcatgcatcaaccaaatgggccatcaggtacttcattagtcatggcagaaggaggggaaaagacttgttttccagacagaaaatctactcccctgtccccagccatatccctggataggaagggataggaagagactacttggtgccatggggtaggggtgagggtataagtagatcagagtgggaagacctcagccttgggtggcttgtctctgcttcttgccaggtgggagggcctgtccacaccctggatccccgtaccacagtgccagccatgcccttcccctgggctaccattgtccctttcctcacccagttggtagaggagtcaggaggtgggaggccgtgggctttggttttataatgtaaccactgtgggggtgggggaggatggtgaaccatgtatttcagtgaaatatttaatatatttaaatatcaataaaatcaaactctttgt

SEQ ID NO: 26 - DNA, 2805 bp, Homo sapiens
atggtccgaggggggcggggctgacgtcgcgctgggaatgccctggccgagacactgaggcagggtagagagcgcttgcgggcgccgggcggagctgctgcggatcaggacccgagccgattcccgatcccgacccagatcctaacccgcgcccccgccccgccgccgccgccatgtacgacgcagagcgcggctggagcttgtccttcgcgggctgcggcttcctgggcttctaccacgtcggggcgacccgctgcctgagcgagcacgccccgcacctcctccgcgacgcgcgcatgttgttcggcgcttcggccggggcgttgcactgcgtcggcgtcctctccggtatcccgctggagcagactctgcaggtcctctcagatcttgtgcggaaggccaggagtcggaacattggcatcttccatccatccttcaacttaagcaagttcctccgacagggtctctgcaaatgcctcccggccaatgtccaccagctcatctccggcaaaataggcatctctcttaccagagtgtctgatggggaaaacgttctggtgtctgactttcggtccaaagacgaagtcgtggatgccttggtatgttcctgcttcatccccttctacagtggccttatccctccttccttcagaggcgtgcgatatgtggatggaggagtgagtgacaacgtacccttcattgatgccaaaacaaccatcaccgtgtcccccttctatggggagtacgacatctgccctaaagtcaagtccacgaactttcttcatgtggacatcaccaagctcagtctacgcctctgcacagggaacctctaccttctctcgagagcttttgtccccccggatctcaaggtgctgggagagatatgccttcgaggatatttggatgcattcaggttcttggaagagaagggcatctgcaacaggccccagccaggcctgaagtcatcctcagaagggatggatcctgaggtcgccatgcccagctgggcaaacatgagtctggattcttccccggagtcggctgccttggctgtgaggctggagggagatgagctgctagaccacctgcgtctcagcatcctgccctgggatgagagcatcctggacaccctctcgcccaggctcgctacagcactgagtgaagaaatgaaagacaaaggtggatacatgagcaagatttgcaacttgctacccattaggataatgtcttatgtaatgctgccctgtaccctgcctgtggaatctgccattgcgattgtccagagactggtgacatggcttccagatatgcccgacgatgtcctgtggttgcagtgggtgacctcacaggtgttcactcgagtgctgatgtgtctgctccccgcctccaggtcccaaatgccagtgagcagccaacaggcctccccatgcacacctgagcaggactggccctgctggactccctgctcccccaagggctgtccagcagagaccaaagcagaggccaccccgcggtccatcctcaggtccagcctgaacttcttcttgggcaataaagtacctgctggtgctgaggggctctccacctttcccagtttttcactagagaagagtctgtgagtcacttgaggaggcgagtctagcagattctttcagaggtgctaaagtttcccatctttgtgcagctacctccgcattgctgtgtagtgacccctgcctgtgacgtggaggatcccagcctctgagctgagttggttttatgaaaagctaggaagcaacctttcgcctgtgcagcggtccagcacttaactctaatacatcagcatgcgttaattcagctggttgggaaatgacaccaggaagcccagtgcagagggtcccttactgactgtttcgtggccctattaatggtcagactgttccagcatgaggttcttagaatgacaggtgtttggatgggtgggggccttgtgatggggggtaggctggcccatgtgtgatcttgtggggtggagggaagagaatagcatgatcccacttccccatgctgtgggaaggggtgcagttcgtccccaagaacgacactgcctgtcaggtggtctgcaaagatgataaccttgactactaaaaacgtctccatggcgggggtaacaagatgataatctacttaattttagaacacctttttcacctaactaaaataatgtttaaagagttttgtataaaaatgtaaggaagcgttgttacctgttgaattttgtattatgtgaatcagtgagatgttagtagaataagccttaaaaaaaaaaaaatcggttgggtgcagtggcacacggctgtaatcccagcactttgggaggccaaggttggcagatcacctgaggtcaggagttcaagaccagtctggccaacatagcaaaaccctgtctctactaaaaatacaaaaattatctgggcatggtggtgcatgcctgtaatcccagctattcggaaggctgaggcaggagaatcacttgaacccaggaggcggaggttgcggtgagctgagattgcaccatttcattccagcctgggcaacatgagtgaaagtctgactcaaaaaaaaaaaatttaaaaaacaaaataatctagtgtgcagggcattcacctcagccccccaggcaggagccaagcacagcaggagcttccgcctcctctccactggagcacacaacttgaacctggcttattttctgcagggaccagccccacatggtcagtgagtttctccccatgtgtggcgatgagagagtgtagaaataaagac

SEQ ID NO: 27 - DNA, 1705 bp, Homo sapiens
tgaccactataaaagtcaggcgggctgaggaggagacaaaggccaggacgctccgcagctgttggggaagaggagctgcctcctgggatggagaaatttaaggctgcgatgttgctggggagcgtcggcgatgctcttggctacagaaatgtctgcaaggagaacagcactgtaggcatgaagatccaggaggagctgcaacgttccgggggcctggaccacctcgtactctcgccaggagaatggcccgtgagtgacaacaccatcatgcacatcgcaaccgccgaggccctcaccacagactactggtgcctggatgatctgtaccgggagatggtgagatgctatgtggaaatcgttgagaagcttccagaacgccggccagacccagctaccattgaaggctgtgctcagctaaagcccaataactaccttctcgcctggcacacaccgttcaatgaaaaaggctcagggtttggagcggccaccaaggccatgtgcatcggcctgcggtactggaagcctgagcggctggagaccctcatcgaggtcagcgtggagtgcggccggatgacccacaaccatcccacaggcttcctgggctccctgtgcacggccctgtttgtgtcgttcgccgcacaaggaaagcccctggtccagtgggggagagacatgctgcgggcggtgcctctggcagaagagtactgcaggaagaccatccggcacacggcagaataccaggagcactggttttactttgaagctaaatggcaattttatttggaggagaggaaaatcagtaaagactcagaaaataaagccatcttccccgacaattatgatgcagaagagagggaaaagacctacaggaagtggagctcggaaggtcgagggggaagacgaggccacgatgcccccatgatagcctatgacgccctccttgcagcaggaaacagctggactgagctgtgtcaccgggccatgtttcatggaggggagagcgcggccacgggcaccattgcaggctgcctgttcgggttgctgtacggcctggacctcgttcccaaaggcttgtaccaggacctggaggacaaggagaagctggaggacctgggcgcggctctctaccgcctgtccacagaggagaagtaaagccatttctgccactttccccctagagagccgattccaccccggggcccgtagggccctctcgcagcccctgggtgagggtgtctctgtgaggctccactgcggtctgtgcctgactggccacatctaactctctgtttccaatttcagaatcctaactgttgcataaaatacattgtttgtcctgcgagaatattttccgtcctccaccatcaacattgacactgcgtagatttgccgcacttggacctccatgcgtggcactcacccgcagtctcctggacaggcgctgtattttattctgtcgcagagctaatgctgtttactcactcacttcaacaacactaactgcggtggtggcctccagcaggcccccccgctgcagaccctctgtcctgcctctgcctccaggcatgcgtttccccgtgagggccaatgcacctccccccaccccccaccctcccatgtccacagtgggtcgtgtgttcctggacagagaaacagtccacactggggcctgcgggacacatatagcagcatattttgctcttaa

SEQ ID NO: 28 - DNA, 1917 bp, Homo sapiens
ggcacgagagcagactctgaaccaggaagtagccgtgtctagcgctctacaagacacataggagaggtggcatccatggccctgaaacgacaagcccatgttgccagcgcattatcaccaagtcacttggcaagcgtttagcagactactggtgcctggatgatctgtaccgggagatggtgagatgctatgtggaaatcgttgagaagcttccagaacgccggccagacccagctaccattgaaggctgtgctcagctaaagcccaataactaccttctcgcctggcacacaccgttcaatgaaaaaggctcagggtttggagcggccaccaaggccatgtgcatcggcctgcggtactggaagcctgagcggctggagaccctcatcgaggtcagcgtggagtgcggccggatgacccacaaccatcccacaggcttcctgggctccctgtgcacggccctgtttgtgtcgttcgccgcacaaggaaagcccctggtccagtgggggagagacatgctgcgggcggtgcctctggcagaagagtactgcaggaagaccatccggcacacggcagaataccaggagcactggttttactttgaagctaaatggcaattttatttggaggagaggaaaatcagtaaagactcagaaaataaagccatcttccccgacaattatgatgcagaagagagggaaaagacctacaggaagtggagctcggaaggtcgagggggaagacgaggccacgatgcccccatgatagcctatgacgccctccttgcagcaggaaacagctggactgagctgtgtcaccgggccatgtttcatggaggggagagcgcggccacgggcaccattgcaggctgcctgttcgggttgctgtacggcctggacctcgttcccaaaggcttgtaccaggacctggaggacaaggagaagctggaggacctgggcgcggctctctaccgcctgtccacagaggagaagtaaagccatttctgccactttccccctagagagccgattccaccccggggcccgtagggccctctcgcagcccctgggtgagggtgtctctgtgaggctccactgcggtctgtgcctgactggccacatctaactctctgtttccaatttcagaatcctaactgttgcataaaatacattgtttgtcctgcgagaatattttccgtcctccaccatcaacattgacactgcgtagatttgccgcacttggacctccatgcgtggcactcacccgcagtctcctggacaggcgctgtattttattctgtcgcagagctaatgctgtttactcactcacttcaacaacactaactgcggtggtggcctccagcaggcccccccgctgcagaccctctgtcctgcctctgcctccaggcatgcgtttccccgtgagggccaatgcacctccccccaccccccaccctcccatgtccacagtgggtcgtgtgttcctggacagagaaacagtccacactggggcctgcgggacacatatagcagcatattttgctcttaaccccacccacctttttaatcacactagattttaagatcaatccctttttgaaacaactcacggagaaaaccagaacataaatggcctcctgccagctccggcgtctctctgtggtctgccttagtgggccaagtccaaatgcagagaaggcctttcccttccgcgcctgccccatcgggctcgctgacgaggaagcgctgtccctgtgatgaggttctctctcagagagtcttggaaaagagaccacttgctcttgtttaaaataaatttggacgtgatttttccatgcagcatctggtgtgaataaaacagcagttgactgataaaaaaaaaaaaaaaaaaaaaaaaaaaaaaaaaaaaaaaaaaaaa

SEQ ID NO: 29 - DNA, 3653 bp, Homo sapiens
gcgctcggcgcccaccaggcggacgcccaggagaacccctgcctccgtcgcggctcctggagagctgatcgttcacctgccccggcccgcctgaggacgggggtgccttcatgcggcccccacactcctcaccccgccgccgccgccgtccccgagctccgcacagtgcgccccagccccagcagggcgcacaactttggaagtctcgcggcgctccgagaggcggcagagtccgcgccccagccccgggccgggccgggccagaaccgcagcgtctgggggaagccagagagtcggtaatcgcttcggggatgtaaggcgacagacataggacccccgagctcgcatcagcacccttcggctgcctcccggggtgggggcgggccccgcacacggtaagacctcttgctttcgctcaggctcaagattcaagatacagatattgatatgtatatatatatttaatttcctgtcatccttccaagttatcaggccaccgatgatttttgttctcccttcttgaagaataaatctctctttacccatcggctctccctactctctcccgccgcttagaaataaaacttggctgtattaggagctcggagcaagaaggcgcccaccgagagcgtctgaagcgcgagccaggcgcagttcgcgggacccgggccatgggccgctagcggtcctccagttcgggcccggcctccctgcggccccctccctatgtgagccgcagccaggcgagcggggcgccggaggaagaggaggacccacgggcgccgggccggaaggcagctggcagcaggcccaggccagcgggcgcccgcgttcatgttccgccaggagcagccgttggccgagggcagctttgcgcccatgggctccctgcagccggacgcgggcaacgcgagctggaacgggaccgaggcgccggggggcggcgcccgggccaccccttactccctgcaggtgacgctgacgctggtgtgcctggccggcctgctcatgctgctcaccgtgttcggcaacgtgctcgtcatcatcgccgtgttcacgagccgcgcgctcaaggcgccccaaaacctcttcctggtgtctctggcctcggccgacatcctggtggccacgctcgtcatccctttctcgctggccaacgaggtcatgggctactggtacttcggcaaggcttggtgcgagatctacctggcgctcgacgtgctcttctgcacgtcgtccatcgtgcacctgtgcgccatcagcctggaccgctactggtccatcacacaggccatcgagtacaacctgaagcgcacgccgcgccgcatcaaggccatcatcatcaccgtgtgggtcatctcggccgtcatctccttcccgccgctcatctccatcgagaagaagggcggcggcggcggcccgcagccggccgagccgcgctgcgagatcaacgaccagaagtggtacgtcatctcgtcgtgcatcggctccttcttcgctccctgcctcatcatgatcctggtctacgtgcgcatctaccagatcgccaagcgtcgcacccgcgtgccacccagccgccggggtccggacgccgtcgccgcgccgccggggggcaccgagcgcaggcccaacggtctgggccccgagcgcagcgcgggcccggggggcgcagaggccgaaccgctgcccacccagctcaacggcgcccctggcgagcccgcgccggccgggccgcgcgacaccgacgcgctggacctggaggagagctcgtcttccgaccacgccgagcggcctccagggccccgcagacccgagcgcggtccccggggcaaaggcaaggcccgagcgagccaggtgaagccgggcgacagcctgccgcggcgcgggccgggggcgacggggatcgggacgccggctgcagggccgggggaggagcgcgtcggggctgccaaggcgtcgcgctggcgcgggcggcagaaccgcgagaagcgcttcacgttcgtgctggccgtggtcatcggagtgttcgtggtgtgctggttccccttcttcttcacctacacgctcacggccgtcgggtgctccgtgccacgcacgctcttcaaattcttcttctggttcggctactgcaacagctcgttgaacccggtcatctacaccatcttcaaccacgatttccgccgcgccttcaagaagatcctctgtcggggggacaggaagcggatcgtgtgaggtttccgctggcgcccgcgtagactcacgctgactgcaggcagcggggggcatcgaggggtgcttagccccagggcactcagaaacccgggcgctgcctgctctgcgtttcctcgtctggggtggctctgcagcctcctgcgggcgggcgtctgctgctcctacaagggaagcttcttgctgccaggcccacacatccccagttgttggtttggccactcttgacctggagccatcttcctagtgggccacccctaatcactattgcttcctaaaggtattttcaccctcttcgcctggtacagccctcacagctcttcagagcaagcactggactacaagggcatggctcacaaaaggttaatggatgggggttacctagccctggctaattccccttccattcccaactctctctctctttttgaagaaaaatgctaagggcagccctgcctgccctccccatcccccgctgtaaatatacactatttttgatagcacacatggggcccccatatctcttggccttggttttgatgttgaaatcctggccttgggagagatgccttccaggcagacacagctgtctggttcaggccaagcccctttgcaatgcaagccctttctggtgttatgaagtccctctatgtcgtcgttttcaccagcaactggtgactgtcccttcgacacggacctgctttgagatttcctgacagggaaaagatttctgtccatttttttcctgtgcctaacagcataattgccttttcctatgtaaatattatgatggtggatcaagacataagtaaatgagcctttctgcctcacatcagccctgtgtataaagccattattctctgatgcactgtttgccccagtaactcactttaaaacctctctttccagtgttccctctctccctccagggccactgcttgaagaagaatatgtatgtttctatcttgtatgtctgtgtgcccctcctgccccgaaagtgctgactatggggaaatcttttagctgctgtttttagactccaaggagtggaaattatgtggaagaagcaaacctgatacaatttgcccaaggtaaacagtttgaaaagacaaatgggcctgccaaactgtacagtttcttccccaagagctgttaggtatcaaaatgttgtcctttcccccctccgtgcttttctggttgagatcatgtcattgatgaactgccaaagtcaggggaggagggcagagactttgtgtttacatctgcatttctacatgttttagacagagacaatttaaggcctgcactcttatttcactaaagaaaaactaatgtcagcacatgttgctaatgacagtggatttttttttaaataaaaaagtttacagatcaaatgtgaaataaatatgaatggagtggtcaaa

SEQ ID NO: 30 - DNA, 3478 bp, Homo sapiens
cgggcgcgcgggcggcggcggcggcggcgccccgactgcagtcccggcgggagcggagcgcgagccggggccgggcccgagccggcgccatggggcggcgccgcctgtgagcggcggcgagcggagccgcgggcgccgagcagggccaggcgggaggcgtcggcgcccgaggccgagcgagccgcggccgggccgggccgagcgccgagcgagcaggagcggcggcggcggcggcggcggcgggaggaggcagcgccgccgccaagatggcggacctggaggcggtgctggccgacgtgagctacctgatggccatggagaagagcaaggccacgccggccgcgcgcgccagcaagaagatcctgctgcccgagcccagcatccgcagtgtcatgcagaagtacctggaggaccggggcgaggtgacctttgagaagatcttttcccagaagctggggtacctgctcttccgagacttctgcctgaaccacctggaggaggccaggcccttggtggaattctatgaggagatcaagaagtacgagaagctggagacggaggaggagcgtgtggcccgcagccgggagatcttcgactcatacatcatgaaggagctgctggcctgctcgcatcccttctcgaagagtgccactgagcatgtccaaggccacctggggaagaagcaggtgcctccggatctcttccagccatacatcgaagagatttgtcaaaacctccgaggggacgtgttccagaaattcattgagagcgataagttcacacggttttgccagtggaagaatgtggagctcaacatccacctgaccatgaatgacttcagcgtgcatcgcatcattgggcgcgggggctttggcgaggtctatgggtgccggaaggctgacacaggcaagatgtacgccatgaagtgcctggacaaaaagcgcatcaagatgaagcagggggagaccctggccctgaacgagcgcatcatgctctcgctcgtcagcactggggactgcccattcattgtctgcatgtcatacgcgttccacacgccagacaagctcagcttcatcctggacctcatgaacggtggggacctgcactaccacctctcccagcacggggtcttctcagaggctgacatgcgcttctatgcggccgagatcatcctgggcctggagcacatgcacaaccgcttcgtggtctaccgggacctgaagccagccaacatccttctggacgagcatggccacgtgcggatctcggacctgggcctggcctgtgacttctccaagaagaagccccatgccagcgtgggcacccacgggtacatggctccggaggtcctgcagaagggcgtggcctacgacagcagtgccgactggttctctctggggtgcatgctcttcaagttgctgcgggggcacagccccttccggcagcacaagaccaaagacaagcatgagatcgaccgcatgacgctgacgatggccgtggagctgcccgactccttctcccctgaactacgctccctgctggaggggttgctgcagagggatgtcaaccggagattgggctgcctgggccgaggggctcaggaggtgaaagagagcccctttttccgctccctggactggcagatggtcttcttgcagaagtaccctcccccgctgatccccccacgaggggaggtgaacgcggccgacgccttcgacattggctccttcgatgaggaggacacaaaaggaatcaagttactggacagtgatcaggagctctaccgcaacttccccctcaccatctcggagcggtggcagcaggaggtggcagagactgtcttcgacaccatcaacgctgagacagaccggctggaggctcgcaagaaagccaagaacaagcagctgggccatgaggaagactacgccctgggcaaggactgcatcatgcatggctacatgtccaagatgggcaaccccttcctgacccagtggcagcggcggtacttctacctgttccccaaccgcctcgagtggcggggcgagggcgaggccccgcagagcctgctgaccatggaggagatccagtcggtggaggagacgcagatcaaggagcgcaagtgcctgctcctcaagatccgcggtgggaaacagttcattttgcagtgcgatagcgaccctgagctggtgcagtggaagaaggagctgcgcgacgcctaccgcgaggcccagcagctggtgcagcgggtgcccaagatgaagaacaagccgcgctcgcccgtggtggagctgagcaaggtgccgctggtccagcgcggcagtgccaacggcctctgacccgcccacccgccttttataaacctctaatttattttgtcgaatttttattatttgttttcccgccaagcggaaaaggttttattttgtaattattgtgatttcccgtggccccagcctggcccagctcccccgggaggggcccgcttgcctcggctcctgctgcaccaacccagccgctgcccggcgccctctgtcctgacttcaggggctgcccgctcccagtgtcttcctgtgggggaagagcacagccctcccgccccttccccgagggatgatgccacaccaagctgtgccaccctgggctctgtgggctgcactctgtgcccatgggcactgctgggtggcccatcccccctcaccaggggcaggcacagcacagggatccgacttgaattttcccactgcaccccctcctgctgcagaggggcaggccctgcactgtcctgctccacagtgttggcgagaggaggggcccgttgtctccctggccctcaaggcctcccacagtgactcgggctcctgtgcccttattcaggaaaagcctctgtgtcactggctgcctccactcccacttccctgacactgcggggcttggctgagagagtggcattggcagcaggtgctgctaccctccctgctgtcccctcttgccccaacccccagcacccgggctcagggaccacagcaaggcacctgcaggttgggccatactggcctcgcctggcctgaggtctcgctgatgctgggctgggtgcgaccccatctgcccaggacggggccggccaggtgggcgggcagcacagcaaggaggctggctggggcctatcagtgtgccccccatcctggcccatcagtgtacccccgcccaggctggccagccccacagcccacgtcctgtcagtgccgccgcctcgcccaccgcatgccccctcgtgccagtcgcgctgcctgtgtggtgtcgcgccttctcccccccggggctgggttggcgcaccctcccctcccgtctactcattccccggggcgtttctttgccgatttttgaatgtgattttaaagagtgaaaaatgagactatgcgtttttataaaaaatggtgcctgattaaaaaaaaaaaaaaaaaaaaaaaaaaaaaaaaaa

SEQ ID NO: 31 - DNA, 9068 bp, Homo sapiens
cggcgcgcgcgcggggcgggggcgcgcggaggggggggctgccccggggcggcccccccaggtcggggcgcggcgggcggcggcggcgggcgcgcgtcccgtccaggtccggagtaaccgccgccgccgccgccaaagctcgccaacatggcggacctggaggctgtgctggccgatgtcagttacctgatggccatggagaagagcaaggcgaccccggccgcccgcgccagcaagaggatcgtcctgccggagcccagtatccggagtgtgatgcagaagtaccttgcagagagaaatgaaataacctttgacaagattttcaatcagaaaattggtttcttgctatttaaagatttttgtttgaatgaaattaatgaagctgtacctcaggtgaagttttatgaagagataaaggaatatgaaaaacttgataatgaggaagaccgcctttgcagaagtcgacaaatttatgatgcctacatcatgaaggaacttctttcctgttcacatcctttctcaaagcaagctgtagaacacgtacaaagtcatttatccaagaaacaagtgacatcaactctttttcagccatacatagaagaaatttgtgaaagccttcgaggtgacatttttcaaaaatttatggaaagtgacaagttcactagattttgtcagtggaaaaacgttgaattaaatatccatttgaccatgaatgagttcagtgtgcataggattattggacgaggaggattcggggaagtttatggttgcaggaaagcagacactggaaaaatgtatgcaatgaaatgcttagataagaagaggatcaaaatgaaacaaggagaaacattagccttaaatgaaagaatcatgttgtctcttgtcagcacaggagactgtcctttcattgtatgtatgacctatgccttccataccccagataaactctgcttcatcctggatctgatgaacgggggcgatttgcactaccacctttcacaacacggtgtgttctctgagaaggagatgcggttttatgccactgaaatcattctgggtctggaacacatgcacaatcggtttgttgtctacagagatttgaagccagcaaatattctcttggatgaacatggacacgcaagaatatcagatcttggtcttgcctgcgatttttccaaaaagaagcctcatgcgagtgttggcacccatgggtacatggctcccgaggtgctgcagaaggggacggcctatgacagcagtgccgactggttctccctgggctgcatgcttttcaaacttctgagaggtcacagccctttcagacaacataaaaccaaagacaagcatgaaattgaccgaatgacactcaccgtgaatgtggaacttccagacaccttctctcctgaactgaagtcccttttggagggcttgcttcagcgagacgttagcaagcggctgggctgtcacggaggcggctcacaggaagtaaaagagcacagctttttcaaaggtgttgactggcagcatgtctacttacaaaagtacccaccacccttgattcctccccggggagaagtcaatgctgctgatgcctttgatattggctcatttgatgaagaggataccaaagggattaagctacttgattgcgaccaagaactctacaagaacttccctttggtcatctctgaacgctggcagcaagaagtaacggaaacagtttatgaagcagtaaatgcagacacagataaaatcgaggccaggaagagagctaaaaataagcaacttggccacgaagaagattacgctctggggaaggactgtattatgcacgggtacatgctgaaactgggaaacccatttctgactcagtggcagcgtcgctatttttacctctttccaaatagacttgaatggagaggagagggagagtcccggcaaaatttactgacaatggaacagattctctctgtggaagaaactcaaattaaagacaaaaaatgcattttgttcagaataaaaggagggaaacaatttgtcttgcaatgtgagagtgatccagagtttgtgcagtggaagaaagagttgaacgaaaccttcaaggaggcccagcggctattgcgtcgtgccccgaagttcctcaacaaacctcggtcaggtactgtggagctcccaaagccatccctctgtcacagaaacagcaacggcctctagcacccagaaacagggagggtcctcgaggaggacacaccagggtctcagccttttggggtgaacgaggatgaggcatctgatctattcgctaccgggactcctccaggctcccgagaggagtcgggacccttcggcttggggtcagctcagctccctgccttgtcacatttgtctgcattagaaactactgaagaaataaaagttctttttctttgctacacactttggtacctatgaacctagaacttgaagtgactcctacttatcacgtaaatttttatgtctgatatcaaacacatcttagactccccagaatggaatttaaagatgttcagtgttgggtaacagattgccctaagcattgccacatattctgtctagtcactgctgattttctatgtctttgctccatactgctgggggatgggagagccacagtgtgtttcttttgtgcacttcgcaactgacttcttgtcctggggttaaaagttgaagatattttctgatgatattaaaagttgaagatatttctgcacttgggccctcctctgggagccgcacccacatgactgccctgcctctgaccagtctgttccggggccccctcagccaggtgggaatgacggacacgtactatccaagtgtatgggattaactaatcattgaaggcattcatccgtccatcattggaaagatttacagtgattctgaaggacaggccgtggagttttaggtttcaggggcaagagcagttttcaaaagtctttgagtccagtgtgcacgagtcgacaagcagtacctggcatgcaggagcactcatgggtgagtccgtctcaggtctcgacaattagcagttgtgtgacagtcattctggttccttctgcctgaccctgggagacatatcagtaatggatgtacaaaagcaggtctgttttatgtcttagtataatttcagatgaattgtattgaaaaaatgctgaggaatgaatgtgtcaaaatgggttaactgtgtatattgactttcatgtcgtcatgcatctgtcatgaatgaatgatactttgcactgggctgtacgacagtgaggaccttagggcatgaagcctttttcctggtcccagcagcatctgccctgtgaagtttgttttctcccactgcctccaggccccactgatacccccaaatagatgctgggttatgagaaccagcgaaatcccccatgtcatcagtcttaaaaaaaaaattttacaaatccacgtatttgtcccattcttggagtagttttagtgtatgtctttacattaactactaacagtataaataacttgacatcgtaattgtctgcatcctgtccttgatatttttagcagttccaaatctttgtttttgtatttgtttgctgtgttcatgggcaaagtaagtactttttaatgcagttattttgagagtttggaagataattaccaaaagggtccattatttcataagagttactttgcaaaaaaaaaaatgtgggtttttttttttgtctatctcaactactagttggggtttaaattaacatacattttctactatctgttatttccagtgtgggaggagggatgtactacttacatgcattctccttatttaaaaaggaagaatagtattcaaattctgttgaaacacacacacacacacacacacacacacacacacactccagaagcagaaaagccattgttcttaaagagtgaatgtcttcccagccctggttaattatagctgtgactgatgccgttcccgtctgcatctcaagctcataggttctcagcatgtgcagttgaggatgcgctgggcctcatgcctgttctagatctccaggataaagggcctgctgttgactccaccagggtctgggcttagcgtctaatatctcgtacctagggcgtgagctgcacaaacgtgttcagaaagattattcaactttcccatacttgttctaaaattgagctgatccgcatctctttcaaaaactagaatttctgctctaagaatagaacataaggctccactcccttttagaaaagatatatgaattggaaaatgctctgaaagtccttttgcttcaaacaaaagtgtaaacttttacacttccccaactcacatttgatttgtaatgatatggttgagaagtacatctagatgtcatttattaaaagtgctttgtaagactagattgagctgtttctgagggcggtcaccagttgtgttggggtctggtttgagtgccttctgccaaaatgttgtgatggaggtgtttctgcgaccagacacaggataccgctgtgtctgcacccggttgcctgcatggccagaggaaaagtcagttggattaaacatcatggtatacttggctgttgtttttttttaattttttaattttttgggatagggcctcgctctgtcacccaggctggagaacagtgggatgatcatggctcactgcagccttgaattcctaggttcaagcaatcctcccacgtcagcctcctgagtagctaggactacaggtgcatgccacctttcctggctaatttattttttgggtagagatggggtcttgaactcttaggctcaagtgatcctccttccttggcctcccaaaatgctggaattagagatgtaagccaccatgcccagccatagtacttggatgttttagaaggttttccaagtattacataattcctagatgttcacccttattacactccaactattaaaaaggtcaaaattcagcctattttttttcattattttagattcctgtggttgggatattttaacattgatgagaaaaataattgaggttgatatttttacaaaatcatgcggtaataagtcttgatttcatgattcaaaagaatcaataaagcctaaaaataatagattactttaagctgctatgtaagatatatatggaataaattaaaaacctttgtgaattcaggtttattatttttaacctaaaacattctctttggttcattcatcccctcatgtcatgggggctcattggttttccttctttgtcatatttaagtatgatttttcaacaaaacttctagaagtcagcttattatgtcaccattcatgcaaagtgctcatgcctctgattggtccattcactgacgtgacaatttcaggtcctatgtttaaaaagaaggggctggccgggcacgatggctcacgcctataatcccagcactttgggaggccgagaggggcggttcacgaggtcaggagattgagaccatcctggttagcagagtgaaaccccgtctctactaaaaatacaaataaaaattagccgggcgtggtggcgggcgcctgtagtcccagctacttgggaggctgaggcaggagaatggcatgaacccgggaggcagagcttgcagtgagccgagattgcgccactgcactccagcctgggcgacagagcgagactctgtctcaaaaaaaaaaaggaggggggctaaatatccagtgagatgcactgaggaaaggaagcattttgctgaagacagcagcagcaacaaacaatggtctgtttgttgcaaacaagatgtagcttgatttctggtctgacatatgccatatacagatattagaaacgactgtttgaaggccacactggtcatctacaaagtaatgtttaccaattgacgacagggatttaactagattaaaaagatcaaagtgtggtttttctctgctttttaaaatttcactcggaatttgtagctgggccaattcaacacattttacttttcagtggaattgatttttctaatgtttcagaattttaacatatcaagaagaaaacaacgttctcaaagtctggcctctttagcatgatgtaaacctatagaaatgctttgaaatgtgctggtgtaagataagagttatcttgtatgatttaatcatatgcagtgttgtctcagttacgttcagggaaatgtttctgtgtcattcagagatgcttgatgaattaacacctcccaccctgagtgaggggttgacttgttgggagatgatttgggcttcactgggatctgtgacaggtgggggctgggctgggtgtcacaaagagaatagtggtagaaatcgggcgaaggaagaaagaagttactggtaaaaatcattacaccataaagcaccaaggaaataactgagttaaaataggtgaagtttcttttttcccccctgtaacaggagagttttccttatgataattattctgagacttggtcactttgtttttgaatgtggagctgctgaactcattcagaagccatttgctgcctatcaggactttctgaagaagttcttttgcctctgcctaccctctggcaccctcccatggaggcacaggggacccagagctaaagcattaccaggccatctccaaaacaccccgtgtgtgtgtgtgtgtgtgtgtgtgtgtgtgtgtgtgtgtgtgtgcactttgcagcccccgaggtggagaggcagtgtctggatcactgtgaatgcattgccccattggtcagttggggacactgttacaaatccactgaagtcctggtaaaactgtcaagagtaacaggcctcttctgttctaccctgctcacttccacggtgagttaccagcctgggcaacacagcaagaccccatctctacaaaaaaaatttttttaagtaattaaccgtttaaattttttcctaaagatttaacatgatttttccctcctatgtaaagtttactggagagacttgaattacttaaattcatgttaatatgatttttttttaatccaggtcacattttaacaaagtttattatgaaacaaatgaaatttgaactctaaaatggtactccttggcttcctcaagtcacaatgaactttatattttctttgtccttaaggactaagatagttgttttatttcagccgaatcacagagataaccactcctgcaggcccccacagctggcccaaaggggctgtctttctgacctggctgtgttagcactgattgagaaacgcaggctcccaaattttaaattgcctttattaaaaacacaaactacagaaaatgggttaagagtatacgcatttcatcaaacacatataggggaaaaaatccttcaatttagagttaaataactcagctttgtatagtagagttagcgctccagtatctaacaatctcagaatcatctctgaaaactggtaactatgcttccatttttaattttgtcctaaatatcagatgtctttgatgtaagggtagggaatggagaaatattttcaattgtgtatttgtattacaaagaacttgaaatttactttcttagttgattatattaaatgatgtatatattatatgtggtttataagctcaacactggccatttttttagttttattgttaaatggtatttttctatgtttaattataatagatctggctttttctggatagcataaagatcactgaactatatatatataagaaacaagagttctattttagcacaaaggcattttatattatttattgaatccataagtttgttttcgtcaaaaacattccatattatttctgctcctttttatttgtatagtttgttatttaaagaaatggcagtccttcctgttcttaatacaataaaattgaaataatgcacctagtaatgtggccgacatctcttctcaccaccatggactgttttcaacaacagttgatcttctggtctgtgctgagaggcgcatgcatgtctttcgtcacgtcgggcagcacacctgctgtgaaatactgctttcatctacctcttcagaaggcttcttgcttgttgacaagtaccgcaaaggctttattctggactggctatctcataaaaggatttctgtaagactttgcagtgtcattccctcagaacctaggtttgtttctaaagccacggtattgtccaggagcccctgtgtgtggggcaggtagctatccctcccatgtcattagtaatcctttaggatttaaggtacaactggacagcatcattccttccccttattgtgccaaatccccaccatcagccttgccattgccttaagatttgattattgcacccaattacctaaccactaaacagaaaggccaccttcactctttgaaaaaggcaagctgtgcttagaaacactgcttttaagagtagcacatttgagtgtgactttttccccccttcactatttcaaaatggttttgaaatggggtcttaaaggtaagcgccctcatacatgactgaaactttgtgagaggtcttatatttgaatggacccttaatgatttatgtgaaatagaatgaagtcctgtctctgtgagagaacgtgcctcctcactcatttgtctctgtctgttttcatagccatcaatatagtaacatatttactatattcttgaatacccttgaagaaagaaatccgttttctattgtgcattgctatacgaagtgaagccagtaaactagatactgtaaatctagatattgtacctagacaaaatatcattggttctatctctttttgtatctgttgtgccagggaaggtttataatcccttctcagtatacactcactagtgcacgtctgaaatagtatcccacgggagatgctgctccacgtctgaggtcacctgccctgtgtggggcacaccaccgtcagcaccaccgtttttacagttactttggagctgctagactggttttctgtgttggtaaattgcctatataaatctgaataaaaaggatctgtacaaaaaaaaaaaaaaa

SEQ ID NO: 32 - DNA, 1410 bp, Homo sapiens
tccggcggggcccggcaggcgccgaggaggaagagcgagcccggacggcgcctctcgaacgagtgtgggcgcgaggcaggatgacgacctcaggcgcgctctttccaagcctggtgccaggctctcggggcgcctccaacaagtacttggtggagtttcgggcgggaaagatgtccctgaaggggaccaccgtgactccggataagcggaaagggctggtgtacattcagcagacggacgactcgcttattcacttctgctggaaggacaggacgtccgggaacgtggaagacgacttgatcatcttccctgacgactgtgagttcaagcgggtgccgcagtgccccagcgggagggtctacgtgctgaagttcaaggcagggtccaagcggcttttcttctggatgcaggaacccaagacagaccaggatgaggagcattgccggaaagtcaacgagtatctgaacaaccccccgatgcctggggcgctgggggccagcggaagcagcggccacgaactctctgcgctaggcggtgagggtggcctgcagagcctgctgggaaacatgagccacagccagctcatgcagctcatcggaccagccggcctcggaggactgggtgggctgggggccctgactggacctggcctggccagcttactggggagcagtgggcctccagggagcagctcctcctccagctcccggagccagtcggcagcggtcaccccgtcatccaccacctcttccacccgtgccaccccagccccttctgctccagcagctgcctcagcaactagcccgagccccgcgcccagttccgggaatggagccagcacagcagccagcccgacccagcccatccagctgagcgacctccagagcatcctggccacgatgaacgtaccagccgggccagcaggcggccagcaagtggacctggccagtgtgctgacgccggagataatggctcccatcctcgccaacgcggatgtccaggagcgcctgcttccctacttgccatctggggagtcgctgccgcagaccgcggatgagatccagaataccctgacctcgccccagttccagcaggccctgggcatgttcagcgcagccttggcctcggggcagctgggccccctcatgtgccagttcggtctgcctgcagaggctgtggaggccgccaacaagggcgatgtggaagcgtttgccaaagccatgcagaacaacgccaagcccgagcagaaagagggcgacacgaaggacaagaaggacgaagaggaggacatgagcctggactgagccacgcgccgtcctccgaggaactgggcgcttgcagtgcgttgcacaccctcacctcccacccactgattattaataaagtcttttcttttacctgccaaaaaaa

SEQ ID NO: 33 - DNA, 1406 bp, Homo sapiens
tccggcggggcccggcaggcgccgaggaggaagagcgagcccggacggcgcctctcgaacgagtgtgggcgcgaggatgacgacctcaggcgcgctctttccaagcctggtgccaggctctcggggcgcctccaacaagtacttggtggagtttcgggcgggaaagatgtccctgaaggggaccaccgtgactccggataagcggaaagggctggtgtacattcagcagacggacgactcgcttattcacttctgctggaaggacaggacgtccgggaacgtggaagacgacttgatcatcttccctgacgactgtgagttcaagcgggtgccgcagtgccccagcgggagggtctacgtgctgaagttcaaggcagggtccaagcggcttttcttctggatgcaggaacccaagacagaccaggatgaggagcattgccggaaagtcaacgagtatctgaacaaccccccgatgcctggggcgctgggggccagcggaagcagcggccacgaactctctgcgctaggcggtgagggtggcctgcagagcctgctgggaaacatgagccacagccagctcatgcagctcatcggaccagccggcctcggaggactgggtgggctgggggccctgactggacctggcctggccagcttactggggagcagtgggcctccagggagcagctcctcctccagctcccggagccagtcggcagcggtcaccccgtcatccaccacctcttccacccgtgccaccccagccccttctgctccagcagctgcctcagcaactagcccgagccccgcgcccagttccgggaatggagccagcacagcagccagcccgacccagcccatccagctgagcgacctccagagcatcctggccacgatgaacgtaccagccgggccagcaggcggccagcaagtggacctggccagtgtgctgacgccggagataatggctcccatcctcgccaacgcggatgtccaggagcgcctgcttccctacttgccatctggggagtcgctgccgcagaccgcggatgagatccagaataccctgacctcgccccagttccagcaggccctgggcatgttcagcgcagccttggcctcggggcagctgggccccctcatgtgccagttcggtctgcctgcagaggctgtggaggccgccaacaagggcgatgtggaagcgtttgccaaagccatgcagaacaacgccaagcccgagcagaaagagggcgacacgaaggacaagaaggacgaagaggaggacatgagcctggactgagccacgcgccgtcctccgaggaactgggcgcttgcagtgcgttgcacaccctcacctcccacccactgattattaataaagtcttttcttttacctgccaaaaaaa

SEQ ID NO: 34 - DNA, 5660 bp, Homo sapiens
gaggaggaggaggagcaggcgccgccatggccgccgctatcaccgacatggccgacctggaggagctctcccgcctgagccctctgccccccggcagcccgggttcggcggcgcggggccgggctgagccccccgaggaggaggaggaagaggaggaggaggaagaggaggcggaggccgaggcggtggcggcgctgctgctgaacggcggcagcggtgggggcggcggaggcggcggcggaggagtggggggcggcgaggcagagacgatgtcggagccgagccccgagagcgccagccaggccggggaggacgaagacgaggaggaggacgacgaggaggaggaagatgagagcagcagcagcggcgggggtgaggaggagagtagcgccgagagcctggtgggcagcagcggcgggagcagcagcgacgagacccgctcgttgagccccggcgccgccagcagcagcagcggggatggggacggcaaggagggcctggaggagcccaagggaccgcggggcagccagggcggcggcgggggcggcagcagtagcagcagcgtagtctccagcggcggcgacgagggctacgggactgggggaggcggaagcagcgcgacctccgggggccggcggggcagcttggagatgtcgtcggatggggaacccctgagccgcatggactcggaggacagcataagcagtactataatggatgtagacagcacaatttccagtgggcgttcaactccagcaatgatgaatggacaaggaagcactacttcttcaagcaaaaatattgcctataattgttgttgggaccagtgccaggcttgcttcaactctagcccagatctggcagatcacatccgttccatacatgtagatggtcagcgaggaggggtatttgtttgcttatggaaaggttgtaaagtatataacactccatctaccagtcaaagttggttacaaaggcatatgctgacacacagtggagacaaacctttcaagtgtgttgttggtggctgcaatgccagctttgcttctcagggagggctagctcgtcatgtacccacacacttcagtcagcagaactcctcaaaagtttctagccagccaaaggccaaagaagaatctccttctaaagctggaatgaacaaaaggaggaaattaaagaacaaaagacgacgctcattaccacggccacatgatttcttcgatgcacaaacactggatgcgataagacatcgagccatatgctttaacctctcagctcatatagaaagtttagggaagggacacagtgttgtttttcatagtactgtaatagctaagagaaaagaagattctgggaagatcaaacttttgcttcattggatgcctgaagacattctgcctgatgtgtgggtgaatgaaagtgaacgacatcagttaaaaactaaagtagttcatttatcaaagctacccaaagatactgccttgcttttggacccaaacatatacagaacaatgccgcagaagaggttgaagaggtaaaaaataaataaatacataaaaagcaaacaagcggggacacctgcagtcttagtcactgacaatgggtttagggaaagttgcacattagagtcaaccccttcttttttttttttttttttttaaatccagtatttaggataatatttatgcttagtgtaaacattctgtgaatgaagtagactcttcggtggaatatattaatatattactgtatatccacattttcatggaatggtactgtgggagactgagcaaacactcttttggcaacttagtagaacagcttcttaaaggctttgcatgcttgctgctttaagctgcttttttttttcttttcttccctttagtgatttcagtagtttatattggaaagaaaaacaattacaacatgtgcccttacaaataccaaaagcactgtaaggatatttgtcttgacagtgtttattgatttgaagtcatattaggaaatatttagacaatgaaaattatcaagagataatttacctttcaattatgataaatagatgtgattggttgccatttgtgttcttttgcagaactctgataagaaaagtgttcaatttgtatttaagcaaacagtgaacgacgtttgcaatcaactaaaaattcgtctatcgaattagggctgaaaattactgttaaagagtgttgcagtatgtctggtggctcccttttcaggactagggctttctcatggagtacagtatgttaatatttacctatataactaatctgttaacggtttttgaaaaacctttcaaattatttgaataatcttcatattttcatttaacctatatgactctaattttttttctgaggaaatcatttggtttttgagttgttttttcttaatgtaagaaaaattgtattttttttacaagtatcttcaaactgaatcttttatgcaccaaagttggtcttgaaaaggaaaataaaatcactttcttgcttggtaagcaagaagccatatcgattttttttaacttacagaaatggaaatatgtgtaacttgttagtattgtattaaacaaatgttgcatagagataatagaacattgcttgtaaataattcagcagatttgtaatatatttttatattttgaaatgtactgtagatgttttctagaggcatgaaagttaaatgtatatattatggtagaaataatattgaaggatattgtacttcactagtgctgccagaggaattgttaataaaagcaccttctttaacaataaatgtctttcacagacttaagggactatgtactactgttaatatctctaagaacaaaacacattgaacatccttccagaaagtctttgagggaggacctatacccataatagaattatggcactcatttctgacagtgatcaagaaatcagttatttccttactgttggaaggacattgtaaagtatgtggttatatgcagtgaaactgcagaaaatactcctggttgaggagttttcactttactacagtgatataaaaaccagcagtttttacactaaattttttaaagaaatattagacaaaaatatagaattaaaacctttggttccaaaatgggaaaggttccacgatacataaatcatttctcatttgctttaaaaaatttaaaagtgtaaaaattatgagagactttattcgttaacaatgggggtaaagagctatatacatgaaaatgagtcttataaaattaagtgaagtgcaaataaaagcactgctactataagacattctggaatggttgtttaataagggtattatccatttgatctatagcaatgtgattttatttttaaaaagaaaagcagtgtgttttctttttttgttgttttcttttgcttaagcacttcatcaattgctttattctgtatctgcgaagtaatctgcaatctcttttgttctttttaaaatttgatttgttataaaattgccaaatagaagtgtttcagatacatagtttgtacctgtatttttattttattgcctcatgttcttgtaagtcattcttaattgaccaatgattgtagaccttgcttgagtattttttctaataaaacaaagcaaatcacatttagcttcaaattgtaacaattcaattgaattttaaaatgacacctgaaaagatacatctgatattttctatatagagcacagtaaataagttttttcattgtgtagaaatacttagatgtcaaaaccagatttcgtgatccttgattaacttctgagtactcaatcaatcataatccttttgctgcttatctgatgttggtttgatactgttaacacaccaaaaagaatatggaattgaaatgagctagctttataacttgtatgtatacatatatacacataacatccaattatgactgggtaataagtgtgaaaattttaatttgtggttttcatttattaatgtctgcccatctgtattgttgctcctaccttcaaatatgacacctgaaataataagtctgttgtccagaatttatgtattgttcagcatcaagcaaactacagctcacaagcatacccatttatatgttgtctatgcctgctttctcctgcagtggcagaattgagtggtgagaccttaggtcctgcaagcccccaatttttactacaggttggcaatccctaatccaaaaatctgacataaaaaatgctccaaagttcaaaactttctgagtgctgacatcatgctgcaagtggaaaattccacgcctgacctcatgtgactggtcatagtcaaaacaattaagactttgtttcatgcacaaaattattaaaactgttgtataaaattaccttcagtctatgtgtataaggtgtttgtgagatataaatgaactttatgtttagtcttggatcgcatttctgagtctcattatgtatatgcagatactcaaaaatctgaaaaaaatcaaaaatctgaaatacttctggtcccaagcatttcggataagggatactcagcctgtctctggtcctttaagaaaaagttttcgattcctttgtctagttgacaaaaagtttggaaacataaacttagaccacacaacttgcattttaatatgacaatgttgatcttggtaataagccagtacattaaattttagtgaaagctgtttcatgtattttacagtaaatactgccatattaggtacctacaacaaatggtggtttttggaaacttttacggtgggtttttaaagttattaatagtccatcatttcatcatttgtgtttctgtatttattttgctaagaactaaataagattttgtacatcagattgtgtttgaaccgtaaggcacatctgctttatctaaaagaatcttaaggtggaaatagtgtaaaatttaaaattttttatatttctaataaactttttatatataaatgttacctaaagtggacacatgttacttctgaatttcacatgaaaggaaattaaagatggacaataattatctctcaatattttaagatttgttttactaattgaaaacagtatgtcagtaaatctttggccttagtgcttttttcccccttttacacattaataaaatgttttaaatatggtaatactcttaaaacggtagaatttgccacagttgtttaaagcatttttattttttctttgaattcttaattcatggtgaacagatgttgggttcttaaaatataaaaatgagaaaatatgtattaaaaatacttgatagagggttttctctttaatcacaacttaaaaaaagaaacctttaatacctctgcataagttctctgaaagaacttaaattcttagtttatatgaaaactgatatgtatgtctgtgtaacaaagcctgttgggtacaggtctacaaggagatactttgtttctaaaaaaggagttaaatcgtgtcacctgaattttttttttttgagataagtggacattttggggattttggttaaaacatatttctctattctaaaaattacagaatatgtattcataaaagggaagaaattgttagaaaatttcctgtgtacgtagtttgtttttaaattaaagaatcttgtgacctggtgtaggacattt

SEQ ID NO: 35 - DNA, 5099 bp, Homo sapiens
gaggaggaggaggagcaggcgccgccatggccgccgctatcaccgacatggccgacctggaggagctctcccgcctgagccctctgccccccggcagcccgggttcggcggcgcggggccgggctgagccccccgaggaggaggaggaagaggaggaggaggaagaggaggcggaggccgaggcggtggcggcgctgctgctgaacggcggcagcggtgggggcggcggaggcggcggcggaggagtggggggcggcgaggcagagacgatgtcggagccgagccccgagagcgccagccaggccggggaggacgaagacgaggaggaggacgacgaggaggaggaagatgagagcagcagcagcggcgggggtgaggaggagagtagcgccgagagcctggtgggcagcagcggcgggagcagcagcgacgagacccgctcgttgagccccggcgccgccagcagcagcagcggggatggggacggcaaggagggcctggaggagcccaagggaccgcggggcagccagggcggcggcgggggcggcagcagtagcagcagcgtagtctccagcggcggcgacgagggctacgggactgggggaggcggaagcagcgcgacctccgggggccggcggggcagcttggagatgtcgtcggatggggaacccctgagccgcatggactcggaggacagcataagcagtactataatggatgtagacagcacaatttccagtgggcgttcaactccagcaatgatgaatggacaaggaagcactacttcttcaagcaaaaatattgcctataattgttgttgggaccagtgccaggcttgcttcaactctagcccagatctggcagatcacatccgttccatacatgtagatggtcagcgaggaggggtatttgtttgcttatggaaaggttgtaaagtatataacactccatctaccagtcaaagttggttacaaaggcatatgctgacacacagtggagacaaacctttcaagtgtgttgttggtggctgcaatgccagctttgcttctcagggagggctagctcgtcatgtacccacacacttcagtcagcagaactcctcaaaagtttctagccagccaaaggccaaagaagaatctccttctaaagctggaatgaacaaaaggaggaaattaaagaacaaaagacgacgctcattaccacggccacatgatttcttcgatgcacaaacactggatgcgataagacatcgagccatatgctttaacctctcagctcatatagaaagtttagggaagggacacagtgttgtttttcatagtactgtaatagctaagagaaaagaagattctgggaagatcaaacttttgcttcattggatgcctgaagacattctgcctgatgtgtgggtgaatgaaagtgaacgacatcagttaaaaactaaagtagttcatttatcaaagctacccaaagatactgccttgcttttggacccaaacatatacagaacaatgccgcagaagaggttgaagagaactctgataagaaaagtgttcaatttgtatttaagcaaacagtgaacgacgtttgcaatcaactaaaaattcgtctatcgaattagggctgaaaattactgttaaagagtgttgcagtatgtctggtggctcccttttcaggactagggctttctcatggagtacagtatgttaatatttacctatataactaatctgttaacggtttttgaaaaacctttcaaattatttgaataatcttcatattttcatttaacctatatgactctaattttttttctgaggaaatcatttggtttttgagttgttttttcttaatgtaagaaaaattgtattttttttacaagtatcttcaaactgaatcttttatgcaccaaagttggtcttgaaaaggaaaataaaatcactttcttgcttggtaagcaagaagccatatcgattttttttaacttacagaaatggaaatatgtgtaacttgttagtattgtattaaacaaatgttgcatagagataatagaacattgcttgtaaataattcagcagatttgtaatatatttttatattttgaaatgtactgtagatgttttctagaggcatgaaagttaaatgtatatattatggtagaaataatattgaaggatattgtacttcactagtgctgccagaggaattgttaataaaagcaccttctttaacaataaatgtctttcacagacttaagggactatgtactactgttaatatctctaagaacaaaacacattgaacatccttccagaaagtctttgagggaggacctatacccataatagaattatggcactcatttctgacagtgatcaagaaatcagttatttccttactgttggaaggacattgtaaagtatgtggttatatgcagtgaaactgcagaaaatactcctggttgaggagttttcactttactacagtgatataaaaaccagcagtttttacactaaattttttaaagaaatattagacaaaaatatagaattaaaacctttggttccaaaatgggaaaggttccacgatacataaatcatttctcatttgctttaaaaaatttaaaagtgtaaaaattatgagagactttattcgttaacaatgggggtaaagagctatatacatgaaaatgagtcttataaaattaagtgaagtgcaaataaaagcactgctactataagacattctggaatggttgtttaataagggtattatccatttgatctatagcaatgtgattttatttttaaaaagaaaagcagtgtgttttctttttttgttgttttcttttgcttaagcacttcatcaattgctttattctgtatctgcgaagtaatctgcaatctcttttgttctttttaaaatttgatttgttataaaattgccaaatagaagtgtttcagatacatagtttgtacctgtatttttattttattgcctcatgttcttgtaagtcattcttaattgaccaatgattgtagaccttgcttgagtattttttctaataaaacaaagcaaatcacatttagcttcaaattgtaacaattcaattgaattttaaaatgacacctgaaaagatacatctgatattttctatatagagcacagtaaataagttttttcattgtgtagaaatacttagatgtcaaaaccagatttcgtgatccttgattaacttctgagtactcaatcaatcataatccttttgctgcttatctgatgttggtttgatactgttaacacaccaaaaagaatatggaattgaaatgagctagctttataacttgtatgtatacatatatacacataacatccaattatgactgggtaataagtgtgaaaattttaatttgtggttttcatttattaatgtctgcccatctgtattgttgctcctaccttcaaatatgacacctgaaataataagtctgttgtccagaatttatgtattgttcagcatcaagcaaactacagctcacaagcatacccatttatatgttgtctatgcctgctttctcctgcagtggcagaattgagtggtgagaccttaggtcctgcaagcccccaatttttactacaggttggcaatccctaatccaaaaatctgacataaaaaatgctccaaagttcaaaactttctgagtgctgacatcatgctgcaagtggaaaattccacgcctgacctcatgtgactggtcatagtcaaaacaattaagactttgtttcatgcacaaaattattaaaactgttgtataaaattaccttcagtctatgtgtataaggtgtttgtgagatataaatgaactttatgtttagtcttggatcgcatttctgagtctcattatgtatatgcagatactcaaaaatctgaaaaaaatcaaaaatctgaaatacttctggtcccaagcatttcggataagggatactcagcctgtctctggtcctttaagaaaaagttttcgattcctttgtctagttgacaaaaagtttggaaacataaacttagaccacacaacttgcattttaatatgacaatgttgatcttggtaataagccagtacattaaattttagtgaaagctgtttcatgtattttacagtaaatactgccatattaggtacctacaacaaatggtggtttttggaaacttttacggtgggtttttaaagttattaatagtccatcatttcatcatttgtgtttctgtatttattttgctaagaactaaataagattttgtacatcagattgtgtttgaaccgtaaggcacatctgctttatctaaaagaatcttaaggtggaaatagtgtaaaatttaaaattttttatatttctaataaactttttatatataaatgttacctaaagtggacacatgttacttctgaatttcacatgaaaggaaattaaagatggacaataattatctctcaatattttaagatttgttttactaattgaaaacagtatgtcagtaaatctttggccttagtgcttttttcccccttttacacattaataaaatgttttaaatatggtaatactcttaaaacggtagaatttgccacagttgtttaaagcatttttattttttctttgaattcttaattcatggtgaacagatgttgggttcttaaaatataaaaatgagaaaatatgtattaaaaatacttgatagagggttttctctttaatcacaacttaaaaaaagaaacctttaatacctctgcataagttctctgaaagaacttaaattcttagtttatatgaaaactgatatgtatgtctgtgtaacaaagcctgttgggtacaggtctacaaggagatactttgtttctaaaaaaggagttaaatcgtgtcacctgaattttttttttttgagataagtggacattttggggattttggttaaaacatatttctctattctaaaaattacagaatatgtattcataaaagggaagaaattgttagaaaatttcctgtgtacgtagtttgtttttaaattaaagaatcttgtgacctggtgtaggacattt

SEQ ID NO: 36 - DNA, 4152 bp, Homo sapiens
gccgtctcctccgcctcctcctcggtagttcacggctgccccggctccaggcctgtggaaatcgaatcaagggtttctggagtggagtgattccagctgctttgagctgaaggaaaagtagcctggccagtaaagcgtccgtgtgctggaggagtgcagccacccatcccggcgggccttgcaggacgaccgacaccaggaaggctttgtgccaggcccagcagccacccccagccgccttatgcaagtgggtacatgccctcgccagacgccagctttctgatctgcgtctttagattttttccatcgcctaagcgttacttctccactgatcggttttagagacctgaaacatcacagaagcttctgagtggttctgaagattcaagaggtttgcaggttgctatgttaatgttgtttgtctttggagtcttacttcatgaagtctcactgagtggtcagaatgaagctcctcctaatactcacagcattccaggcgaacctctgtataactatgccagcatccgcttgccagaggagcacattcccttctttttgcacaacaataggcatattgccactgtctgtaggaaagactctctttgtccatataagaaacacctagagaagctaaagtactgctggggttatgagaaatcctgcaaaccagagttcaggtttggttacccagtttgcagctatgtcgacatgggatggacggacactcttgagtcagctgaggacatattttggaaacaagctgactttggatatgccagagagaggctggaggagatgcatgtgctctgtcagcctaaggaaacgagtgactcaagtctggtgtgttcccgttatcttcagtactgcagggcaaccaatctctatcttgatttaagaaacatcaagagaaatcatgacagatttaaggaggactttttccagagtggtgaaattggagggcactgtaaacttgacatccgtacattgacgtctgaaggtcagcgcaaaagccctctgcagtcatggtttgctgagctacaaagctatactcagctcaacttcagacctatagaagatgctaaatgtgacattgtcattgaaaaaccaacatatttcatgaaattagatgcaggtgttaacatgtatcaccacttctgtgatttcatcaatctttatattactcagcacgttaataactcattcagtactgacgtgtacatcgtgatgtgggacaccgatggaaaaattcgagtcaccattcttgcacggagcacagaataccggaaaatccttaaccaaaatgagcttgtaaatgcactgaaaacagtatctacatttgaagtccagattgttgattacaagtatagagaacttgggtttttagatcaactaaggatcacacacaacacggacatatttattggaatgcatggagctggtctgacccatttacttttccttccagactgggctgctgtatttgaactgtacaactgtgaagatgaacgctgttacttagacttggccaggctgagaggcgttcactacatcacttggcgacggcagaacaaagtctttcctcaggataagggccaccatccaaccctgggggagcacccgaagttcaccaactactctttcgatgtagaagaatttatgtatcttgtccttcaggctgcagaccacgtattgcaacacccaaagtggccatttaagaagaaacatgatgagctataaatatgctgagtctgtttgcaaaaagagagtgtttaaacactccaacacccagacttagaattaaatcagtaaagcaatctgttatttcctatccccgaattaccttttctatgccaaaacataccttcaggatattgttatgtgttgtatagatgttaagtgtttcatgtggtttttgtgtcattgctatttatcaatagcaataattttgcactgaaaactttttatagttcaaaaattaagcatggactccccagtatactttaactttctttctttctttttttttttttggagacagagtctcactgtcacccaggctggagtgcagtggcatgatctcagtttatgcaacttctgcctccccaggttcaagcgattcttttgcctcagccacctgactagctgggattgcagcctgcaccaccacacctggctaaatttttgttgttgtcgttgagatacagtttcactctgtcacccaggctggagtgcagtggcatgatctcagctcactgcaacctctgccttctggattcaagtgattcttgtgccttagcctcccaagtagctgggattacaggcgtgcaccaccacgcccagttgatttttgtatttttgatagagacggagtttcaccatgttggccaggctggtctcgaactctgggttcaagaaatcctcccaccttgcctcccaaagtgctgggattacaggtgtgagccaccacgcatggccctgaactttctctttttaggaataccaaagttttcaactttttcagctttagaatttgtaaatatttttgtagaatatcatatgactgtaattccagagtgttccaacttgtttatgatatatttgggtaaatttacaactgttcttttatttgccataatctggttataacactgtttgtggtaggaaaggaaaacatgcaaaacatacacacacacacacacacacacacacacacgcagagttgtgattctcagtaccaagctataggaccatgttatagatcagcgtttagtcacctccaggttatatgcatcgagaacctgaataaatcatgccactatattaatttatattacatgtttcatatttaaatcatgttttcctaaaatgtagcaactacatgtgataaaagcaaattagaacattctgtaggactgtcttgcataccttctgtctggtttccactgattccttcttagccatggagagcatttgtgattaattaatttatatatgaaataatggtttccattttatgcgagtatttgtaactgcatataccagtgcgtgtgcgtctacctctgtcagcatgaaagtattccagtctttaatttcaaaaacttcaaattagcctcatgaagagaatttttccctgtgaaaagtaagaccaagaaaaaacaaactaaagacatgtgacttattcaatgaaagtgaaaaagaagctctaaaacagtgtcattgattaaaaagaatatctggaatgtagccccactctttgagtgggattcatttcttactgcttatgaactttcaatttagtagtcagaaaccatggatttattttactgcacaatgtgaagtttacattttattaacacttgagtagtctgatttagagactagttacttctattttttaaaataatggagtaacaaattacagaatagctaaataattttttaaaaatattttacagttgtaaaaaatatccatcagaaaaatgacacacaaaacaaaatatctggacctttacagaagacgtttgctgacccccactttaaaggattggaacagtcttctagaattgaggaatatttattaaaatacctgtaaagaaaatagtgaatcactgtagcaatggctttgattcagaccttaaaatcacataagaagaattacaacatgttatggatttttaagtggcaggtattgtaactgttttttgtgtgcaaaatactgagtaaccactgggaaaatatttcagatgaaagggatgacaaaagcatgttgcgctttgcatcagcaaggcattgacttctgaaaaaatgatctgaaaaaagtttcaccgtttgtcttcttacctcattttaagaagcatgtgaaaatgggatactatagactactgagaatttcagaaattgagaacaatttcataataaaacggctatatttgaagagagaatacattttatataaacaggaaaatacatttgacactttatggaattttatgagactttttgtgggaacagaaggtcttcaaattgtaaaatgtaaagattgctctttttattaagtctttaacagggatgtatttcattgtatgttttgggtatggctttggaataaatcattttatattttatttgaatatcagaaaaaaaaaaaaaaaa

SEQ ID NO: 37 - DNA, 2947 bp, Homo sapiens
atgcgcgcgcccgggcggcgcgggatctgggtctggggatgtggtaccggctgctggcggcggccggcagtagagcggtggccaggccgctggccttgctgtggcgatgtggtggcccaggaggcggcaggacggccaagaccagcgcgagggccctgggcaaggcccgacagaagaagctaggaaagctcatctggcctcctgttccagtgcttccaggggatccacgttcagaagctgactctgcaggcaagaccgacgttattttcctggtggctgtgttcaaaaccacccaaagggtttgagaaatactttaagaggagtggaaggaacacaaactgagaaacatcaacagcaccaaaaaaagagactggtgaactagagaatgctgagtctggaggagacggaggcaggagaggagggaagcaggataacgttgcctggtggaggcggatgcagaaggggggacttcccctgggatgacgaggatttccgcagtctggcccttttgggggcaggcgttgccatgggatttttctacctctattttcgagatcctggaagagaaatcacgtggaagcactttgtacagtattacctggccagaggtctggtggaccggctggaagtcgtgaacaaacaatctgtgcgtgttattcctgcccctgggacctcttctgaaggagccatgctcactggtcctcctggtaccggcaagacccttcttgccaaagcaactgcaggggaggccactgtgcccttcatcactgtgaacgggtctgagttcctggaaatgtttattggcgttgggccagcaaggggttcaactctgccaccaacgtcgtggtgttggctggcaccaaccgccctgacgtcctggacccggccctcatgcggcctggccggtttcatcgccagatttacactggtcccccttacattaaaggcaggtcctccatctttaaggtccacctgcgcccactgaagctggacaagagcctcaataaggacaccctggcgaggaagctggcagtgctcaccccaggcttccctgacggggatgactcagcactacccctcaacagagatgactttgatgactctgcccctcagcagggcttactaagcactaccccttaacagggatgactccgcactgcccctcaacagggatgactcagcagagatgactcagcactgtcccttagcagggatgacacagcaaggatgactcagcactgcccctcagcaaggatgactcagcactgccgctcaacagacatgactcagggatggcttagtactgcccctcagcagggatgactcagcaccgcctctcaacagggatgactcagcagggatgactcagcaccgcccctcaacaggcatgactctgcagagatgactcagcactgtcccttagcagggatgacacagcaaggatgactcagcactgcccctcagcaaggatgactcagcactgccgctcaacagggatgactcagggatggcttagtactgcccctcaacagggatgactcagcagggatgactcagcaccgcccctcaacaggcatgactctgcagagatgacttagtactgcccctcagcagggatgactcagtactgcccctcagcagggatgactcagcactgcccctcaacagggatgactcagcagggatgactcagcactgtcccttagcagtgatgacacagcaaggatgactcagcactgcccctcagcaaggatgactcagcactgccgctcaacagacatgactcagggatggcttagtactgcccctcagcagggatgactcagcaccgcccctcaacagggatgactcagcactgcccctcaacagggatgactcagcagggatgactcagcagtgtcccttagcagcgatgacacagcaaggatgactcagcactgcccctcaccaaggatgactcagcactgccgctcaacagacatgactcagggatggcttagtactgcccctcagcagggatgactcagcagggatgactcagcaccacccctcaacagggatgactcagcagggatgactcagcactgcccctcaacagggatgactgcagggatgactcagcactgcccctcagcagggatgactcagcactgcccctcagcagggatgactcagcagggatgactcagcaccgcccctcaacaggcatgactctgcagagatgactcagcactgcccctcagcagggatggctcagcagggatgactcagcattgcccctcaacagggatgactcagcagactcagcagggatgactcagcactgcccctcaacagacatgactcagcagggatgactcagcaccgcccctcagcaaggatgactcagcagggatgattcagcagagataactcggggatgactctgattgtccttcagcagggatgagtctgttttgctccgatggaagcatctgtagtgtccatcagcaggtgaatggccaaagtggtatatactgtagtcacattcagctataaaaaggaataaagtatcgatgcatgccacaacatgggtgaacctagaaaatactgatctaaatgcaagaagccaggcacaaaaggccacatagtatatgttcccatttatgtgaaatgtgcagaataataataaaaatgtatagaatagcaaatctgtagggacagacatgaggtgagtggttgccagaagtggaaatgggagttaactataaattgcacagggtaccttacagagatgatggaaatgtcctaaaactagattatggcaatagttgcactacgtgatcagtttattaaaaatcgttgatgtgtgtgtgtaaaatgggtggattttatggtttataaattataccttaataaaggttaacaaaaaatgtggctaaaaaaaaaaaaaaaaaaaaaaaaaaaa

SEQ ID NO: 38 - DNA, 4902 bp, Homo sapiens
attgataacagtaaagccacactcctcaagtgcctgaaatacccctcattgtcttcttcaggtggcaagggctctggaacagccacataaagcccttgaagataaggatggtcaaacaaaataatatcatacctggagaaactcagatcttgctaagatttactggttgggaatccaaagttaatgccaagaagcagctgccagttgggatcaaatgtgagcctatggatcaaggaatgtctggacacagtagacaaaggtttttcaacaggatgccttaggatacatgcttccaaaaacaaagtagccaaaaagaaaccagagtcacagaatatcagagccagaggaacatttggagacggttacctggcacgctggccacaatctacctcactcttatcagagtctgagcagtgctttcagctctgagttgaggcacctcgaaccttgtttttgtggtgaaggatcctaaagtgctgtggggagtgatcacatttttcacaacatccctgactccacctcttctgccacaaacgtcagcatggtggtatcagccggcccttggtccagcgagaaggcagagatgaacattctagaaatcaacgagaaattgcgcccccagttggcagagaacaaacagcagttcagaaacctcaaagagagatgttttctaactcaactggccggcttcctggccaaccgacagaagaaatacagcaatataaagtcctggttcactctcaggaacgagagctgacccagttaagggagaagttacgggaagggagagatgcctcccgctcattgaatgagcatctccaggccctcctcactccggatgagccggacaagtcccaggggcaggacctccaagaacagctggctgaggggtgtagactggcacagcaccttgtccaaaagctcagcccagaaaatgacgaagatgaggatgaagatgttcaagttgaggaggatgagaaagtactggaatcatctgcccccagggaggtgcagaaggctgaagagagcaaagtccctgaggactcactggaggaatgtgccatcacttgttcaaatagccacggcccttgtgactccatccagcctcacaagaacatcaaaatcacatttgaggaagacaaagtcaactcatctctggttgtagacagagaatcctctcatgatggatgtcaggatgctctaaacattctcccagtccctggccccacctcttctgccacaaacgtcagcatggtggtatcagccggccctttgtccagcgagaaggcagagatgaacattctagaaatcaatgagaaattgtgcccccagctggcagagaagaaacagcagttcagaagcctcaaagagaaatgttttgtaactcaagtggcctgcttcctggccaagcagcagaacaaatacaaatatgaagagtgcaaagacctcataaaatctatgctgaggaatgagcgacagttcaaggaggagaagcttgcagagcagctgaagcaagctgaggagctcaggcaatataaagtcctggttcactctcaggaacgagagctgacccagttaagggagaagttacgggaagggagagatgcctcccgctcattgaatgagcatctccaggccctcctcactccggatgagccggacaagtcccaggggcaggacctccaagaacagctggctgaggggtgtagactggcacagcaccttgtccaaaagctcagcccagaaaatgataacgatgacgatgaagatgttcaagttgaggtggctgagaaagtgcagaaatcgtcttcccccagggagatgcagaaggctgaagaaaaggaagtccctgaggactcactggaggagtgtgccatcacttgttcaaatagccatggcccttatgactccaaccagccacatagaaaaaccaaaatcacatttgaggaagacaaagtcgactcaactctcattggctcatcctctcatgttgaatgggaggatgctgtacacattatcccagaaaatgaaagtgatgatgaggaagaggaagaaaaagggccagtgtctcccaggaatctgcaggagtctgaagaggaggaagtcccccaggagtcctgggatgaaggttattcgactctctcaattcctcctgaaaggttggcctcgtaccagtcttacagcagcacatttcactcattagaggaacagcaagtctgcatggctgttgacataggcagacatcggtgggatcaagtgaaaaaggaggaccaagaggcaacaggtcccaggctcagcagggagctgctggatgagaaagagcctgaagtcttgcaggactcactggatagatgttattcaactccttcagtttatcttggactgactgactcatgccagccctacagaagtgccttttacgtattggagcaacagcgtattggcttggctgttgacatggatgaaattgaaaagtaccaagaagtggaagaagaccaagacccatcatgccccaggctcagcagggagctgctggctgagaaagagcctgaagtcttgcaggactcactggatagatgttattcgactccttcaggttatcttgaactgcctgacttaggccagccctacagaagtgctgtttactcattggaggaacagtaccttggcttggctcttgacgtggacagaattaaaaaggaccaagaagaggaagaagaccaaggcccaccgtgccccaggctcagcagggagctgctggaggtagtagagcctgaagtcttgcaggactcactggatgttattcaactccttccagttgtcttgaacagcctgactcctgccagccctacggaagttccttttatgcattggaggaaaaacatgttggcttttctcttgacgtgggagaaattgaaaagaaggggaaggggaagaaaagaaggggaagaagatcaaagaagaaaagaagaaggggaagaaaagaaggggaagaagatcaaaacccaccatgccccaggctcagcagcgtgctgatggaagtggaagtgcctgaagtcttacaggactcactggatagatattattcgactccatcaatgtactttgaactacctgactcattccagcactacagaagtgtgttttactcatttgaggaacagcacatcagctttgcccttgacatggacaataggttttttactttgacggtgagaagtctccacctggtcttccagatgggagtcatattcccacaataagcagcccttactaagccgagaggtgtcattcctgcaggcaggacctataggcacctgaagatttgaatgaaactatagttccatttggaagcccagacataggatgggtcagtgggcatggctctattcctattctcagagcatgccagtggcaacctgtgctcagtctgaagacaatggacccacgttaggtgtgacacgttcacataactgtgcagcacatgccgggagtgatcagtcggacattttaatttgaaccacgtatctctgggtagctacaaaattcctcagggatttcattttgcaggcatgtctctgagcttctatacctgctcaaggtcagtgtcatctttgtgtttagctcatccaaaggtgttaccctggtttcaatgaacctaacctcattctttgtgtcttcagtgttggcttgttttagctgatccatctgtaacacaggagggatccttggctgaggattgtatttcagaaccaccaactgctcttgacaattgttaacccgctaggctcctttggttagagaagccacagtccttcagcctccaattggtgtcagtacttaggaagaccacagctagatggacaaacagcattgggaggccttagccctgctcctctcaattccatcctgtagagaacaggagtcaggagccgctggcaggagacagcatgtcacccaggactctgccggtgcagaatatgagcaatgccatgttcttgcagaaaacgcttagcctgagtttcataggaggtaatcaccagacaactgcagaatgtagaacactgagcaggacaactgacctgtctccttcacatagtccatatcaccacaaatcacacaacaaaaaggagaagagatattttgggttgaaaaaaagtaaaaagataatgtagctgcatttctttagttattttgaaccccaaatatttcctcatctttttgttgttgtcatggatggtggtgacatggacttgtttatagaggacaggtcagctgtctggctcaatgatctacattctgaagttgtctgaaaatgtcttcatgattaaattcagcctaaactttttgacgggaacactgcagagacaatgctgtgagtttccaacctcagcccatctgcgggcagagaaggtctagtttgtccaacaccattatgatatcaggactggttacttggttaaggaggggtctaggagatctgtcccttttagagacaccttacttataatgaagtacttgggaaagtggttttcaagagtataaatatcctgtattctaatgatcatcctctaaacattttatcatttattaatcctccctgcctgtgtctattattatattcatatctctacgctgcaaattttgggtctcaatttttactgtgcctttgtttttactagtgtctgctgttgcaaaaagaagaaaacattctttgcctgagttttaatttttgtccaaagttaattttaatctatacaattaaaaccttttgcctatcactctggacttttggattgttttttacattcagtgttataatatttgattatgctgattggttttggtgggtactgatgcgaattaataaaaacatttcatttccaaaaaaaaaaaaaaaaa

SEQ ID NO: 39 - DNA, 2701 bp, Homo sapiens
aaagtgctgtggggagtgatcacatttttgacaacatccctgactccacctcttctgccacaaacgtcagcatggtggtatcagccggccctttgtccagcgagaaggcagagatgaacattctagaaatcaatgagaaattgcatccccagctggcagagaagaaacagcagttcagaaacctcaaagagaaatgttttgtaactcaactggcctgcttcctggccaaccagcagaacaaatacaaatatgaagagtgcaaagacctcataaaatctatgctgaggaatgagcgacagttcaaggaggagaagcttgcagagcagctcaagcaagctgaggagctcaggcaatataaagtcctggttcactctcaggaacgagagctgacccagttaagggagaagttacgggaagggagagatgcctcccgctcattgaatcagcatctccaggccctcctcactccggataagccagacaagtcccaggggcaggacctccaagaacagctggctgaggggtgtagactggcacagcaacttttccagaagctcagcccagaaaatgacgaagatgaggatgaagatgttcaagttgaggaggctgagaaagtactggaatcatctgcccccagggaggtgcagaaggctgaagaaagcaaagtccctgaggactcactggaggaatgtgccatcacttgttcaaatagccacggcccttgtgactccaaccagcctcacaagaacatcaacatcacctttgaggaagacaaagtcaactcagctctggttgtagacagagaatcctctcatgatgaatgtcaggatgctgtaaacattctcccagtccctggccccacctcttctgccacaaacgtcagcatggtggtatcagccggccctttgtccagcgagaaggcagagatgaacattctagaaatcaacgagaaattacatccccagctggcagagaagaaacagcagttcagaaacctcaaagagaaatgttttgtaactcaactggcctgcttcctggccaaccagcagaacaaatacaaatatgaagagtgcaaagacctcataaaatctatgctgaggaatgagcgacagttcaaggaggagaagcttgcagagcagctcaagcaagctgaggagctcaggcaatataaagtcctggttcactctcaggaacgggagctgacccagttaagggagaagttacgggaagggagagatgcctcccgctcattgaatcagcatctccaggccctcctcactccggataagccagacaagtcccaggggcaggacctccaagaacagctggctgaggggtgtagactgacacagcaccttgtccaaaagctcagcccagaaaatgacaacgatgacgatgaagatgttcaagttgaggtggctgagaaagtgcagaaatcgtctgcccccagggagatgcagaaggctgaagaaaaggaagtccctgaggactcactggaggaatgtgccatcacttgttcgaatagccatggcccttatgactccaaccagccacatagaaaaaccaaaatcacatttgaggaagacaaagtcgactcaactctcactggctcatcctctcatgttgaatgggaggatgctgtacacattattccagaaaatgaaagtgatgatgaggaagaggaagaaaaagggccagtgtctcccaggaatctgcaggagtctgaagaggaggaagtcccccaggagtcctgggatgaaggttattcgactctctcaattcctcctgaaatgttggcctcgtaccagtcttacagcagcacatttcactcattagaggaacagcaagtctgcatggctgttgacataggcagacatcggtgggatcaagtgaaaaaggaggaccaagaggcaacaggtcccaggctcagcagggagctgctggatgagaaagggcctgaagtcttgcaggactcactggatagatgttattcgactccttcaggttatcttgaactgcctgacttaggccagccctacagcagtgctgtttactcattggaggaacagtaccttggcttggctcttgacgtggacagaattaaaaaggaccaagaagaggaagaagaccaaggcccaccatgccccaggctcagcagggagctgctggaggtagtagagcctgaagtcttgcaggactcactggatagatgttattcaactccttccagttgtcttgaacagcctgactcctgccagccctatggaagttccttttatgcattggaggaaaaacatgttggcttttctcttgacgtgggagaaattgaaaagaaggggaaggggaagaaaagaaggggaagaagatcaaagaaggaaagaagaaggggaagaaaagaaggggaagaagatcaaaacccaccatgccccaggctcaacggcgtgctgatggaagtggaagagcctgaagtcttgcaggactcactggatggatgttattctactccgtcaatgtactttgaactacctgactcattccagcactacagaagtgtgttttactcatttgaggaacagcacatcagcttcgccctttacgtggacaataggttttttactttgacggtgacaagtctccacctggtgttccagatggaagtcatattcccacaataagcagcccttactaagccgagagatgt

SEQ ID NO: 40 - DNA, 2931 bp, Homo sapiens
aaagtgctgtggggagtgatcacatttttcacaacagtaagtccctggccccacctcttctgccacaaacgtcagcatggtggtatcagccggcccttggtccagcgagaaggcagagatgaacattctagaaatcaacgagaaattgcgcccccagttggcagagaacaaacagcagttcggaaacctcaaagagagatgttttctaactcaactggccggcttcctggccaaccgacagaagaaatacaagtatgaagagtgtaaagacctcataaaatttatgctgaggaatgagcgacagttcaaggaggagaagcttgcagagcagctgaagcaagctgaggagctcaggcaatataaagtcctggttcactctcaggaacgagagctgacgcagttaaaggagaagttacgggaagggagagatgcctcccgctcattgaatgagcatctccaggccctcctcactccggatgagccggacaagtcccaggggcaggacctccaagaacagctggctgaggggtgtagactggcacagcaccttgtccaaaagctcagcccagaaaatgacgaagatgaggatgaagatgttcaagttgaggaggatgagaaagtactggaatcacctgcccccagggaggtgcagaaggctgaagagagcaaagtcactgaggactcactggaggaatgtgccatcacttgttcaaatagccacggcccttgtgactccaaccagcctcacaagaacatcaaaatcacatttgaggaagacgaagtcaactcaactcttgttgtagacagagaatcctctcatgatgaatgtcaggatgctctaaacattctcccagtccctggccccacctcttctgccacaaacgtcagcatggtggtatcagccggccctttgtccagcgagaaggcagagatgaacattctagaaatcaatgagaaattgcgcccccagctggcagagaagaaacagcagttcagaaacctcaaagagaaatgttttctaactcaactggccggcttcctggccaaccagcagaacaaatacaagtatgaagagtgtaaagacctcataaaatttatgctgaggaatgagcgacagttcaaggaggagaagcttgcagagcagctgaagcaagctgaggagctcaggcaatataaagtcctggttcacgctcaggaacgagagctgacccagttaagggagaagttgcgggaagggagagatgcctcccgctcattgaatgagcatctccaggccctcctcactccggatgagccggacaagtcccaggggcaggacctccaagaacagctggctgaggggtgtagactggcacagcaccttgtccaaaagctcagcccagaaaatgacaacgatgacaatgaagatgttcaagttgaggtggctgagaaagtgcagaaatcgtctgcccccagggagatgcagaaggctgaagaaaaggaagtccctgaggactcactggaggaatgtgccatcacttattcaaatagccatggcccttatgactccaaccagccacataggaaaaccaaaatcacatttgaggaagacaaagtcgactcaactctcattggctcatcctctcatgttgaacgggaagatgctgtacacattattccagaaaatgaaagtgatgatgaggaagaggaagaaaaagggccagtgtctcccaggaatctgcaggagtctgaagaggaggaagtcccccaggagtcctgggatgaaggttattcgactccctcaattcctcctgaaatgttggcctcgtacaagtcttacagcagcacatttcactcattagaggaacagcaagtctgcatggctgttgacataggcagacatcggtgggatcaagtgaaaaaggaggaccaagaggcaacaggtcccaggctcagcagggagctgctggatgagaaagggcctgaagtcttgcaggactcactgtatagatgttattcaactccttcaggttgtcttgaactgactgactcatgccagccctacagaagtgccttttacgtattggagcaacagcgtgttggcttggctgttgacatggatgaaattgaaaagtaccaagaagtggaagaagaccaagacccatcatgccccaggctcagcagggagctgctggatgagaaagagcctgaagtcttgcaggactcactgggtagatggtattcgactccttcaggttatcctgaactgcctgacttaggccagccctacagcagtgctgtttactcattggaggaacagtaccttggcttggctcttgacttggacagaattaaaaaggaccaagaagaggaagaagaccaaggcccaccatgccccaggctcagcagggagctgctggaggtagtagagcctgaagtcttgcaggactcactggatagatgttattcaactccttccagttgtcttgaacagcctgactcctggcagccctatggaagttccttttatgcattggaggaaaaacatgttggcttttctcttgacgtgggagaaattgaaaagaaggggaaggggaagaaaagaaggggaagaagatcaaagaaggaaagaagaaggggaagaaaagaaggggaagaagatcaaaacccaccatgccccaggctcaacggcgtgctgatggaagtggaagagcctgaagtcttgcaggactcactggatggatgttattctactccgtcaatgtactttgaactacctgactcattccagcactacagaagtgtgttttactcatttgaggaacagcacatcagcttcgccctttacgtggacaataggttttttactttgacggtgacaagtctccacctggtgttccagatggaagtcatattcccacaataagcagcccttactaagccgagagatgt

SEQ ID NO: 41 - DNA, 5661 bp, Homo sapiens
ggcacgtggactccctttaatccagtgactgtcaggtcgatcatatgccgaggacgatgatcccgccgggggagtgcacgtacgcgggccggaagcggaggaggcccctgcagaaacagaggcccgccgtgggggcagagaagtccaacccctccaagcgacaccgggaccgcctcaacgccgagttggaccacctggccagcctgctgccgttcccgcctgacatcatctccaagctggacaagctttctgtcctgcgcctcagtgtcagttacctccgggtgaagagcttcttccaagtcgtgcaggagcagagctcacggcagcctgcggccggcgccccctcgcccggagacagctgtcctcttgcagggtctgccgtgctggagggaaggctgctgttggagtctcttaatggctttgctctggtcgtgagtgcagaagggacgatattttatgcatcagcaacgatcgtggactatctgggcttccatcagacggatgtaatgcaccagaacatttatgactacatccacgtggacgaccgccaggacttctgccggcagctccactgggccatggaccctccccaggtggtgtttgggcagcccccgcccttggagacaggagatgatgctatcctggggaggctgctcagggcccaggagtggggcacaggcacgcccaccgagtactcggccttcctgacccgctgcttcatctgccgtgtgcgctgcctgctggacagcacctcgggcttcctggcccgggggtcacaggcttggcagctgcggctctgctgtcccgagccactcatgacgatgcagtttcaaggaaaactaaaattcctgtttggacagaagaagaaggcgccgtcaggagccatgctcccgccgcggctgtcgctgttctgcattgcggcacccgttctcctcccctccgcagcggagatgaaaatgaggagcgcgctcctgagggcaaaacccagagcagacaccgcagccaccgcggatgcaaaagtaaaagccaccaccagtctgtgcgaatcggaactgcatggaaaacccaattactcagcaggaaggagcagcagagagagcggcgttttggtgctcagggaacagactgacgctggccgatgggcacaggttcccgccagggccccatgcctgtgcctccggggtggccctgaccttgtccttgaccccaaggggggctcaggggacagggaggaggagcagcacaggatgctgagcagggcctctggagtgacagggcggagggagactccaggacccacaaagcccctgccctggacagcgggaaagcacagtgaggatggtgccaggccgaggctgcagcccagcaagaatgacccgccctccctgcgccccatgccccgcggctcctgcctgccctgcccgtgtgtccagggcactttcaggaactcgcccatctctcacccgccgagcccgtcccccagtgcctactccagccggaccagcagacccatgcgggatgtcggtgaggaccaggtgcaccctcccctctgccactttccccagaggagcctgcagcaccagctccctcagcctggagctcagcgttttgccacgaggggctatcccatggaggacatgaagctgcaaggtgtaccgatgcctccgggggacctgtgtggtccgacgctgctgctagatgtgtccatcaagatggagaaggactctgggtgtgagggtgctgcagacggctgtgtgcccagccaggtgtggctgggggccagtgacaggagccacccagccaccttccctaccaggatgcacctgaaaacagagccagactctcggcaacaggtgtacatctcgcacctggggcacggcgtgcggggggctcagccccatgggagggccactgctgggcgcagcagggagctgacccctttccaccctgcacactgtgcctgcctggagcccacagacggccttccccagtcggagcctccccaccagctctgtgcacggggccgaggtgaacagtcctgcacctgcagagctgctgaggccgcccctgtggtcaagcgggagcccttggactcaccccagtgggctactcacagccagggaatggtgcccgggatgttgcccaaaagtgccttggccacgctggtcccgccccaagcttcggggtgcacattcctgccatagcgcagtgaccaccatccaagctcagatctgtgtgtctacgctcagatgcgtcggtggctgggctgccctgctcctggtcaggccggagcccgtcctaagacacacgctttgcagagctgtgcatgcgcagtctgctagtgtgtgtgtgcagcatacgcaggagcctatcctgaattttgtaaaatatcccaacagttcttaaatgaaaactggccttaagtctattcaagcatgacagcatttctctttgaggaattaaaatctttaggaaagtgatcatggctggacagcttcatgccccagaggcagcgagcacccgtcccatggctgccaagtccacagtcggggatgaagcagtcgggtgatgctcccaagtccgcagtcggggatgaagcggtcgggtgatgctcccaagtccgcagtcggggatgaagcggtcgggtgacacacctagctcagccctcccaggccacctgcagctcccagcctgtgctgtgcaggcagggtcagcccatcgccacagtgcactgtagaggccagcacacggcaaattagaaatacaacacgcggagaaaggggtccgtgagcccactcatagaggaatctagaacgttccaggcagcagaggctggcagcgtgggtcccacactgccccacaccgtgcggcaggtgctccatggcgccatgacagagtctgaggccagacctggactggaattgacagcataacccctgttccttctggacatctcccgagttctcagtgggtctctgcggacggttcttcctaatctgcctcttggtacatcacgtaatacagagttcacagactccgggtttggaagtacagagaaacacacaacgtagagagaagacacaggaaactgcgctgcctgtgggggtttctctctggctggctgtacagttcactcaaatgagggttcccattgccatcctaggagaataattagggacaagacagacaagtattaatagcattaaaacagttgtaaaggcgatattttctgagagtaggaaatttggatacaaaagcataagtcagaaagtgaaggtcaccaatccaccaacccgagaacctacagctgatggtgcatttcaggcttcttccacggtctggcctggaaccccacccggctggtgcaggcatcagatcagggtgtagaagtcaccccaagcaagaggaagccaggcagtgaggccctggggtgtggctgcagctgggcccacctgtgcgggggtgggaaggccccatcctcagggagagggcatcggcgccctgacgtcagctccactgggagtggcaggagctgtgggagcccatgggtgagggacccaccaccccgctgcactgtgcattgtgcctcccgtgtggacgccctctctgttgttggcccgcgggtgagggacccaccacccctagggacccaccaccccgccgcactgtgcattctgcctcctgtgtggacgccctctctgttgtcagtggctttgaggtgtcagtgcttacttagatgctggtttaatgctggacccatttgttaaacgcaccttcactttgtcaaaacccaggtttggttggcaggactgggtcttctgcccaatgccaggtgcctgcgcctctcagtggcctggttcttggacagtttgcccccatgtggcagggatagggataaggatctcctctcagtactggaagagaacagccaaccatctgagcccagagtcacagatccatcgtggccccctatgacccccaagccctaccgagggggcactcactctctgcttagccagggggcgtctttcaaaaggtgacctccatgctgtgctgtcgtgggtgtgagacgtgctcatggccttccactgccatctctcccttatctgatgcctaaagtcacgatggggacagagctacccaggggccagccatggggtgaccagccacctgagggtcagtcacctgtggagagcaggcacctgtgaagaccaggcacctgaggactggcgcctacttcccactttggccctacactggcacagagcccctctttattcatttctcatgctgagcatggcacacttctggcctctgggcatttatggatttaagaccaggatggtatttcagaagcttcccacttccttcctattctaaccgagtgcccagctcctttgctgatcatggaaagacccttaataattaggcctgcaggccaggcgcagtggctcatgcctataatcccagcactttaggaggtcaaggtaggaggatcgcttaagcccaggagttcaagaccagcctgggcaacacaggaagaatgtgtctctacaaaaaataattaaaaatcagatctgctgtatccctgaaaaagtctcaatcaacatgcatgttccactcttggagttccctgttctgagggccagccacgtcctgtgtcctggagcttagccctcagcagctcccttcagcctgggcgccgcctgggtcccaaacgtggcagctgctcttccagtctcggggccgaggagggcagggagctcagtgactgagagtcttgtgtatcacatgtcttgagtgtcctggagccaacggctgtcactgggaaaaacaccaggccccaaagatcgaatcagagacgtggctgcgtgtttgcgattgtagccaggcccttcagtgtcatcaaaggagcactggggcctccttaagcacagacggcagcccctgcccaggaggcttcttcaccacgtcctgccctgcagcctcccagacctttagatgcgcccctgcccaaggccctcctggtgacaggtgccagattgagtggtgggttgctgccaggcaggccacgctgtgttgacgctgcactcagcacgtgggtgttggctctgccggttttgtggtgtggggaccctacaggaggctgcggccctgagagcctgggatcagcgaggtgtccgacatcccttcctcaacggcaacaaaaactccccaagtcagcactttggttattttatagccacaaccctcttggaaaacagtggggaagactatggaacatagaaagtgtggatgtatcacttctctctaaaatgtcattgttagcactaattacaggttcatgtttttctgtgtatgtagcttttccctatatagctgaaaaagtattaaagtcaaatataaggtgggaatgggatggaagggaggagatcaatacaacttatatttttgcagtttctactggaagaaaaaagttttcaatacctagaccaacttgttgaatttttaaaacttatgcactataaatgcaactttctctactgctttctcagtgcctttaggaagctttcaaatttttttgtactgtggtttgtattaaatttgcaatattgatgtaaaatacatgacatgctagtacatgtttaacaaaaatttaaa

SEQ ID NO: 42 - DNA, 6609 bp, Homo sapiens
ttcttttaaggagtttgccgcgagcgcgtctccttcattcgcaggctgggcgcgttcgcagtcggctggcggcgaaggaaggcgctctcgggacctcgcgggcgcgcgtcttttggctcttgcccctgtccctgcggcttggggaaggcgtaacccggcggctaggcgcgggagaagtgcggaggagccatgggcgccgggagctccaccgagcagcgcagcccggagcagccgcccgaggggagctccacgccggctgagcccgagcccagcggcggcggcccctcggccgaggcggcgccagacaccaccgcggaccccgccatcgctgcctcggaccccgccaccaagctcctacagaagaatggtcagctgtccaccatcaatggcgtagctgagcaagatgagctcagcctccaggagggtgacctaaatggccagaaaggagccctgaacggtcaaggagccctaaacagccaggaggaagaagaagtcattgtcacagaggttggacagagagactctgaagatgtgagcaaaagagactccgataaagagatggctactaagtcagcggttgttcacgacatcacagatgatgggcaggaggagacacccgaaataatcgaacagattccttcttcagaaagcaatttagaagagctaacacaacccactgagtcccaggctaatgatattggatttaagaaggtgtttaagtttgttggctttaaattcactgtgaaaaaggataagacagagaagcctgacactgtccagctactcactgtgaagaaagatgaaggggagggagcagcaggggctggcgaccacaaggaccccagccttggggctggagaagcagcatccaaagaaagcgaacccaaacaatctacagagaaacccgaagagaccctgaagcgtgagcaaagccacgcagaaatttctcccccagccgaatctggccaagcagtggaggaatgcaaagaggaaggagaagagaaacaagaaaaagaacctagcaagtctgcagaatctccgactagtcccgtgaccagtgaaacaggatcaaccttcaaaaaattcttcactcaaggttgggccggctggcgcaaaaagaccagtttcaggaagccgaaggaggatgaagtggaagcttcagagaagaaaaaggaacaagagccagaaaaagtagacacagaagaagacggaaaggcagaggttgcctccgagaaactgaccgcctccgagcaagcccacccacaggagccggcagaaagtgcccacgagccccggttatcagctgaatatgagaaagttgagctgccctcagaggagcaagtcagtggctcgcagggaccttctgaagagaaacctgctccgttggcgacagaagtgtttgatgagaaaatagaagtccaccaagaagaggttgtggccgaagtccacgtcagcaccgtggaggagagaaccgaagagcagaaaacggaggtggaagaaacagcagggtctgtgccagctgaagaattggttgaaatggatgcagaacctcaggaagctgaacctgccaaggagctggtgaagctcaaagaaacgtgtgtttccggagaggaccctacacagggagctgacctcagtcctgatgagaaggtgctgtccaaaccccccgaaggcgttgtgagtgaggtggaaatgctgtcatcacaggagagaatgaaggtgcagggaagtccactaaagaagctttttaccagcactggcttaaaaaagctttctggaaagaaacagaaagggaaaagaggaggaggagacgaggaatcaggggagcacactcaggttccagccgattctccggacagccaggaggagcaaaagggcgagagctctgcctcatcccctgaggagcccgaggagatcacgtgtctggaaaagggcttagccgaggtgcagcaggatggggaagctgaagaaggagctacttccgatggagagaaaaaaagagaaggtgtcactccctgggcatcattcaaaaagatggtgacgcccaagaagcgtgttagacggccttcggaaagtgataaagaagatgagctggacaaggtcaagagcgctaccttgtcttccaccgagagcacagcctctgaaatgcaagaagaaatgaaagggagcgtggaagagccaaagccggaagaaccaaagcgcaaggtggatacctcagtatcttgggaagctttaatttgtgtgggatcatccaagaaaagagcaaggagagggtcctcttctgatgaggaagggggaccaaaagcaatgggaggagaccaccagaaagctgatgaggccggaaaagacaaagagacggggacagacgggatccttgctggttcccaagaacatgatccagggcagggaagttcctccccggagcaagctggaagccctaccgaaggggagggcgtttccacctgggagtcatttaaaaggttagtcacgccaagaaaaaaatcaaagtccaagctggaagagaaaagcgaagactccatagctgggtctggtgtagaacattccactccagacactgaacccggtaaagaagaatcctgggtctcaatcaagaagtttattcctggacgaaggaagaaaaggccagatgggaaacaagaacaagcccctgttgaagacgcagggccaacaggggccaacgaagatgactctgatgtcccggccgtggtccctctgtctgagtatgatgctgtagaaagggagaaaatggaggcacagcaagcccaaaaaagcgcagagcagcccgagcagaaggcagccactgaggtgtccaaggagctcagcgagagtcaggttcatatgatggcagcagctgtcgctgacgggacgagggcagctaccattattgaagaaaggtctccttcttggatatctgcttcagtgacagaacctcttgaacaagtagaagctgaagccgcactgttaactgaggaggtattggaaagagaagtaattgcagaagaagaaccccccacggttactgaacctctgccagagaacagagaggcccggggcgacacggtcgttagtgaggcggaattgacccccgaagctgtgacagctgcagaaactgcagggccattgggtgccgaagaaggaaccgaagcatctgctgctgaagagaccacagaaatggtgtcagcagtctcccagttaaccgactccccagacaccacagaggaggccactccggtgcaggaggtggaaggtggcgtacctgacatagaagagcaagagaggcggactcaagaggtcctccaggcagtggcagaaaaagtgaaagaggaatcccagctgcctggcaccggtgggccagaagatgtgcttcagcctgtgcagagagcagaggcagaaagaccagaagagcaggctgaagcgtcgggtctgaagaaagagacggatgtagtgttgaaagtagatgctcaggaggcaaaaactgagccttttacacaagggaaggtggtggggcagaccaccccagaaagctttgaaaaagctcctcaagtcacagagagcatagagtccagtgagcttgtaaccacttgtcaagccgaaaccttagctggggtaaaatcacaggagatggtgatggaacaggctatcccccctgactcggtggaaacccctacagacagtgagactgatggaagcacccccgtagccgactttgacgcaccaggcacaacccagaaagacgagattgtggaaatccatgaggagaatgaggtcgcatctggtacccagtcagggggcacagaagcagaggcagttcctgcacagaaagagaggcctccagcaccttccagttttgtgttccaggaagaaactaaagaacaatcaaagatggaagacactctagagcatacagataaagaggtgtcagtggaaactgtatccattctgtcaaagactgaggggactcaagaggctgaccagtatgctgatgagaaaaccaaagacgtaccatttttcgaaggacttgaggggtctatagacacaggcataacagtcagtcgggaaaaggtcactgaagttgcccttaaaggtgaagggacagaagaagctgaatgtaaaaaggatgatgctcttgaactgcagagtcacgctaagtctcctccatcccccgtggagagagagatggtagttcaagtcgaaagggagaaaacagaagcagagccaacccatgtgaatgaagagaagcttgagcacgaaacagctgttaccgtatctgaagaggtcagtaagcagctcctccagacagtgaatgtgcccatcatagatggggcaaaggaagtcagcagtttggaaggaagccctcctccctgcctaggtcaagaggaggcagtatgcaccaaaattcaagttcagagctctgaggcatcattcactctaacagcggctgcagaggaggaaaaggtcttaggagaaactgccaacattttagaaacaggtgaaacgttggagcctgcaggtgcacatttagttctggaagagaaatcctctgaaaaaaatgaagactttgccgctcatccaggggaagatgctgtgcccacagggcccgactgtcaggcaaaatcgacaccagtgatagtatctgctactaccaagaaaggcttaagttccgacctggaaggagagaaaaccacatcactgaagtggaagtcagatgaagtcgatgagcaggttgcttgccaggaggtcaaagtgagtgtagcaattgaggatttagagcctgaaaatgggattttggaacttgagaccaaaagcagtaaacttgtccaaaacatcatccagacagccgttgaccagtttgtacgtacagaagaaacagccaccgaaatgttgacgtctgagttacagacacaagctcacgtgataaaagctgacagccaggacgctggacaggaaacggagaaagaaggagaggaacctcaggcctctgcacaggatgaaacaccaattacttcagccaaagaggagtcagagtcaaccgcagtgggacaagcacattctgatatttccaaagacatgagtgaagcctcagaaaagaccatgactgttgaggtagaaggttccactgtaaatgatcagcagctggaagaggtcgtcctcccatctgaggaagagggaggtggagctggaacaaagtctgtgccagaagatgatggtcatgccttgttagcagaaagaatagagaagtcactagttgaaccgaaagaagatgaaaaaggtgatgatgttgatgaccctgaaaaccagaactcagccctggctgatactgatgcctcaggaggcttaaccaaagagtccccagatacaaatggaccaaaacaaaaagagaaggaggatgcccaggaagtagaattgcaggaaggaaaagtgcacagtgaatcagataaagcgatcacaccccaagcacaggaggagttacagaaacaagagagagaatctgcaaagtcagaacttacagaatcttaaaacatcatgcagttaaactcattgtctgtttggaagaccagaatgtgaagacaagtagtagaagaaaatgaatgctgctgctgagactgaagaccagtatttcagaactttgagaattggagagcaggcacatcaactgatctcatttctagagagcccctgacaatcctgaggcttcatcaggagctagagccatttaacatttcctctttccaagaccaacctacaattttcccttgataaccatataaattctgatttaaggtcctaaattcttaacctggaactggagttggcaatacctagttctgcttctgaaactggagtatcattctttacatatttatatgtatgttttaagtagtcctcctgtatctattgtatatttttttcttaatgtttaaggaaatgtgcaggatactacatgctttttgtatcacacagtatatgatggggcatgtgccatagtgcaggcttggggagctttaagcctcagttatataacccacgaaaaacagagcctcctagatgtaacattcctgatcaaggtacaattctttaaaattcactaatgattgaggtccatatttagtggtactctgaaattggtcactttcctattacacggagtgtgctaaaactaaaaagcattttgaaacatacagaatgttctattgtcattgggaaatttttctttctaacccagtggaggttagaaagaagttatattctggtagcaaattaactttacatcctttttcctacttgttatggttgtttggaccgataagtgtgcttaatcctgaggcaaagtagtgaatatgttttatatgttatgaagaaaagaattgttgtaagtttttgattctactcttatatgctggactgcattcacacatggcatgaaataagtcaggttctttacaaatggtattttgatagatactggattgtgtttgtgccatatttgtgccattcttttaagaacaatgttgcaacacattcatttggataagttgtgatttgacgactgatttaaataaaatatttgcttcacttaaaaaaaaaaaa

SEQ ID NO: 43 - DNA, 6287 bp, Homo sapiens
ggcagctccgagggcacctccggttctcccccatcctccgggagtgtctgggcgctcagtccgctctgatcccgccgaaaccacctgcggttggcaggcaggagactaggcgtctgccggggagggcagggacccgctaagctgatctcctgtacagtagtgctacttaaaatatgctggggaccatcaccatcacagttggacagagagactctgaagatgtgagcaaaagagactccgataaagagatggctactaagtcagcggttgttcacgacatcacagatgatgggcaggaggagacacccgaaataatcgaacagattccttcttcagaaagcaatttagaagagctaacacaacccactgagtcccaggctaatgatattggatttaagaaggtgtttaagtttgttggctttaaattcactgtgaaaaaggataagacagagaagcctgacactgtccagctactcactgtgaagaaagatgaaggggagggagcagcaggggctggcgaccacaaggaccccagccttggggctggagaagcagcatccaaagaaagcgaacccaaacaatctacagagaaacccgaagagaccctgaagcgtgagcaaagccacgcagaaatttctcccccagccgaatctggccaagcagtggaggaatgcaaagaggaaggagaagagaaacaagaaaaagaacctagcaagtctgcagaatctccgactagtcccgtgaccagtgaaacaggatcaaccttcaaaaaattcttcactcaaggttgggccggctggcgcaaaaagaccagtttcaggaagccgaaggaggatgaagtggaagcttcagagaagaaaaaggaacaagagccagaaaaagtagacacagaagaagacggaaaggcagaggttgcctccgagaaactgaccgcctccgagcaagcccacccacaggagccggcagaaagtgcccacgagccccggttatcagctgaatatgagaaagttgagctgccctcagaggagcaagtcagtggctcgcagggaccttctgaagagaaacctgctccgttggcgacagaagtgtttgatgagaaaatagaagtccaccaagaagaggttgtggccgaagtccacgtcagcaccgtggaggagagaaccgaagagcagaaaacggaggtggaagaaacagcagggtctgtgccagctgaagaattggttgaaatggatgcagaacctcaggaagctgaacctgccaaggagctggtgaagctcaaagaaacgtgtgtttccggagaggaccctacacagggagctgacctcagtcctgatgagaaggtgctgtccaaaccccccgaaggcgttgtgagtgaggtggaaatgctgtcatcacaggagagaatgaaggtgcagggaagtccactaaagaagctttttaccagcactggcttaaaaaagctttctggaaagaaacagaaagggaaaagaggaggaggagacgaggaatcaggggagcacactcaggttccagccgattctccggacagccaggaggagcaaaagggcgagagctctgcctcatcccctgaggagcccgaggagatcacgtgtctggaaaagggcttagccgaggtgcagcaggatggggaagctgaagaaggagctacttccgatggagagaaaaaaagagaaggtgtcactccctgggcatcattcaaaaagatggtgacgcccaagaagcgtgttagacggccttcggaaagtgataaagaagatgagctggacaaggtcaagagcgctaccttgtcttccaccgagagcacagcctctgaaatgcaagaagaaatgaaagggagcgtggaagagccaaagccggaagaaccaaagcgcaaggtggatacctcagtatcttgggaagctttaatttgtgtgggatcatccaagaaaagagcaaggagagggtcctcttctgatgaggaagggggaccaaaagcaatgggaggagaccaccagaaagctgatgaggccggaaaagacaaagagacggggacagacgggatccttgctggttcccaagaacatgatccagggcagggaagttcctccccggagcaagctggaagccctaccgaaggggagggcgtttccacctgggagtcatttaaaaggttagtcacgccaagaaaaaaatcaaagtccaagctggaagagaaaagcgaagactccatagctgggtctggtgtagaacattccactccagacactgaacccggtaaagaagaatcctgggtctcaatcaagaagtttattcctggacgaaggaagaaaaggccagatgggaaacaagaacaagcccctgttgaagacgcagggccaacaggggccaacgaagatgactctgatgtcccggccgtggtccctctgtctgagtatgatgctgtagaaagggagaaaatggaggcacagcaagcccaaaaaagcgcagagcagcccgagcagaaggcagccactgaggtgtccaaggagctcagcgagagtcaggttcatatgatggcagcagctgtcgctgacgggacgagggcagctaccattattgaagaaaggtctccttcttggatatctgcttcagtgacagaacctcttgaacaagtagaagctgaagccgcactgttaactgaggaggtattggaaagagaagtaattgcagaagaagaaccccccacggttactgaacctctgccagagaacagagaggcccggggcgacacggtcgttagtgaggcggaattgacccccgaagctgtgacagctgcagaaactgcagggccattgggtgccgaagaaggaaccgaagcatctgctgctgaagagaccacagaaatggtgtcagcagtctcccagttaaccgactccccagacaccacagaggaggccactccggtgcaggaggtggaaggtggcgtacctgacatagaagagcaagagaggcggactcaagaggtcctccaggcagtggcagaaaaagtgaaagaggaatcccagctgcctggcaccggtgggccagaagatgtgcttcagcctgtgcagagagcagaggcagaaagaccagaagagcaggctgaagcgtcgggtctgaagaaagagacggatgtagtgttgaaagtagatgctcaggaggcaaaaactgagccttttacacaagggaaggtggtggggcagaccaccccagaaagctttgaaaaagctcctcaagtcacagagagcatagagtccagtgagcttgtaaccacttgtcaagccgaaaccttagctggggtaaaatcacaggagatggtgatggaacaggctatcccccctgactcggtggaaacccctacagacagtgagactgatggaagcacccccgtagccgactttgacgcaccaggcacaacccagaaagacgagattgtggaaatccatgaggagaatgaggtcgcatctggtacccagtcagggggcacagaagcagaggcagttcctgcacagaaagagaggcctccagcaccttccagttttgtgttccaggaagaaactaaagaacaatcaaagatggaagacactctagagcatacagataaagaggtgtcagtggaaactgtatccattctgtcaaagactgaggggactcaagaggctgaccagtatgctgatgagaaaaccaaagacgtaccatttttcgaaggacttgaggggtctatagacacaggcataacagtcagtcgggaaaaggtcactgaagttgcccttaaaggtgaagggacagaagaagctgaatgtaaaaaggatgatgctcttgaactgcagagtcacgctaagtctcctccatcccccgtggagagagagatggtagttcaagtcgaaagggagaaaacagaagcagagccaacccatgtgaatgaagagaagcttgagcacgaaacagctgttaccgtatctgaagaggtcagtaagcagctcctccagacagtgaatgtgcccatcatagatggggcaaaggaagtcagcagtttggaaggaagccctcctccctgcctaggtcaagaggaggcagtatgcaccaaaattcaagttcagagctctgaggcatcattcactctaacagcggctgcagaggaggaaaaggtcttaggagaaactgccaacattttagaaacaggtgaaacgttggagcctgcaggtgcacatttagttctggaagagaaatcctctgaaaaaaatgaagactttgccgctcatccaggggaagatgctgtgcccacagggcccgactgtcaggcaaaatcgacaccagtgatagtatctgctactaccaagaaaggcttaagttccgacctggaaggagagaaaaccacatcactgaagtggaagtcagatgaagtcgatgagcaggttgcttgccaggaggtcaaagtgagtgtagcaattgaggatttagagcctgaaaatgggattttggaacttgagaccaaaagcagtaaacttgtccaaaacatcatccagacagccgttgaccagtttgtacgtacagaagaaacagccaccgaaatgttgacgtctgagttacagacacaagctcacgtgataaaagctgacagccaggacgctggacaggaaacggagaaagaaggagaggaacctcaggcctctgcacaggatgaaacaccaattacttcagccaaagaggagtcagagtcaaccgcagtgggacaagcacattctgatatttccaaagacatgagtgaagcctcagaaaagaccatgactgttgaggtagaaggttccactgtaaatgatcagcagctggaagaggtcgtcctcccatctgaggaagagggaggtggagctggaacaaagtctgtgccagaagatgatggtcatgccttgttagcagaaagaatagagaagtcactagttgaaccgaaagaagatgaaaaaggtgatgatgttgatgaccctgaaaaccagaactcagccctggctgatactgatgcctcaggaggcttaaccaaagagtccccagatacaaatggaccaaaacaaaaagagaaggaggatgcccaggaagtagaattgcaggaaggaaaagtgcacagtgaatcagataaagcgatcacaccccaagcacaggaggagttacagaaacaagagagagaatctgcaaagtcagaacttacagaatcttaaaacatcatgcagttaaactcattgtctgtttggaagaccagaatgtgaagacaagtagtagaagaaaatgaatgctgctgctgagactgaagaccagtatttcagaactttgagaattggagagcaggcacatcaactgatctcatttctagagagcccctgacaatcctgaggcttcatcaggagctagagccatttaacatttcctctttccaagaccaacctacaattttcccttgataaccatataaattctgatttaaggtcctaaattcttaacctggaactggagttggcaatacctagttctgcttctgaaactggagtatcattctttacatatttatatgtatgttttaagtagtcctcctgtatctattgtatatttttttcttaatgtttaaggaaatgtgcaggatactacatgctttttgtatcacacagtatatgatggggcatgtgccatagtgcaggcttggggagctttaagcctcagttatataacccacgaaaaacagagcctcctagatgtaacattcctgatcaaggtacaattctttaaaattcactaatgattgaggtccatatttagtggtactctgaaattggtcactttcctattacacggagtgtgctaaaactaaaaagcattttgaaacatacagaatgttctattgtcattgggaaatttttctttctaacccagtggaggttagaaagaagttatattctggtagcaaattaactttacatcctttttcctacttgttatggttgtttggaccgataagtgtgcttaatcctgaggcaaagtagtgaatatgttttatatgttatgaagaaaagaattgttgtaagtttttgattctactcttatatgctggactgcattcacacatggcatgaaataagtcaggttctttacaaatggtattttgatagatactggattgtgtttgtgccatatttgtgccattcttttaagaacaatgttgcaacacattcatttggataagttgtgatttgacgactgatttaaataaaatatttgcttcactt

SEQ ID NO: 44 - DNA, 3545 bp, Homo sapiens
tgaacgcatgcgtgctgtggtcgcctagtaaacggggctgctggtgggccgcgtcgaagacatggaccagggctacggaggctacggggcgtggagtgctggacctgccaacacccagggtgcatatggaactggtgtggccagctggcaaggttatgaaaactacaattactatggcgcccagaacaccagtgtcaccacaggcgcaacctacagctacggcccagcctcgtgggaggccgccaaggccaatgatggcggcctggcggccggggcccctgccatgcacatggcctcttacggcccagagccatgcaccgacaattccgactccctcattgccaagatcaaccagcgtttggacatgatgtccaaggaaggaggcaggggcgggagcggcggcggtggggagggcatacaggaccgggagagctccttccgcttccagccgttcgagtcctatgactccaggccctgcctgccggagcacaacccctaccgccccagctacagctacgactatgagttcgacctggggtccgaccgcaatggcagctttggggggcagtacagtgaatgccgagacccagcccgggagcggggctcccttgatggcttcatgcggggccggggccagggccgcttccaggaccggagcaaccctggcaccttcatgcgcagcgaccccttcgtgccccccgctgcgtcctctgagcccctgtccacgccctggaacgagctgaactacgtgggtggacggggcctgggagggccctcccccagccggccacctccgtccctcttctcccagtccatggctcccgactacggcgtgatgggcatgcagggggcgggcggctatgacagcaccatgccctacggatgtggccgctcgcagcctcggatgcgggatcgggatcggcccaagaggagagggtttgaccgcttcggaccagatggcacgggcaggaaacggaagcagttccaactttacgaggagccagacaccaaactggcccgggttgacagtgaaggagatttctccgaaaatgatgacgcagctggtgacttccgctcaggagatgaagaattcaagggtgaggatgaactctgcgactctgggaggcaaagaggagagaaggaggacgaggacgaggatgtgaagaagagaagggaaaagcaaaggagaagagacaggacgcgggaccgtgcagccgacagaattcagtttgcctgttctgtatgcaagttccgtagctttgatgacgaagagatccagaagcatctgcaaagcaaatttcacaaagagaccctgcggttcataagcaccaagctgcccgacaagaccgtggagttcctccaggaatacattgtaaacagaaataagaaaattgagaagcggcgtcaggaattgatggagaaagaaaccgcaaaaccaaaaccagatcctttcaaagggattggccaggagcacttcttcaagaagatcgaggctgctcactgcctggcctgcgacatgctaattcctgcacagccgcagctcctccagcggcacctgcactccgtggaccacaatcacaaccgcaggttggctgctgaacagttcaagaaaaccagtctccatgtggctaagagtgttttgaacaacagacatatagtgaagatgctggaaaaatacctcaagggtgaggaccctttcaccagtgaaactgttgatccagaaatggaaggagatgacaatttaggaggtgaggataagaaagagacacctgaggaggtggccgcggacgtcttagcagaggtgattacagcagcagtgagggccgtagatggggaaggagcgcccgctccagagagcagcggggagccggctgaggacgaaggccccacggacacagcggaggccggtagtgatcctcaagccgaacagctgctggaagagcaggtgccctgtggaacggcacatgagaagggcgtccccaaggccagaagtgaggctgcagaggctggaaatggcgccgagacaatggcagcagaggcagaaagtgcccaaaccagagttgctcctgccccagctgccgcggatgctgaagtggaacaaactgatgcagagtctaaagacgctgttcccacagaatgatgctcatttccctgttccagggaaggcgttgggatgatggatgcgttggtctttctcccttggtttgtaagcagtacaagggcgtgtgctcccagaatatgctgtaatctaattttggtgaagagacccagcgtttcctcctgagcagtgcctctcacggcttgtctcatgcagtcgtgtggcttcttgcccaggtttcaaagctgaagtacattgtccttagcggctgtaacatgtctcttgacagtagtgcacttggaataataaaggttgggtgattatatcttgatgatacattacttgttcaatacagccactgatggaatgcttccttttttatttttttccttaatttttttttttatttggttgggaacagctgaatactaggaatatatcttgctctatagaggatttttttttgtatgtttcaagcttcagcctttaacctatacctttgtagtgcaccatatggtgtgtgactttcacaggacttcgcagcacctggttcacatgtggcactgaccgcgtcacatccacgcactcccaaaggccagaagtatctgaccgacctacgccactggaaacacacccaccgcaacctcaagaaccagactgtgcagagggcattgcgtcccaatctttagtccttgctgaatcagttctctaatattttacctcatttgtgttccacctctagattacttcaggtttttttcctttaaaattagttactaccactcaaatgtatttacaaagagaatttggccaggcacggtgatgcatacctataatcccagcacttggggaggccgtggtgagaggatagcttaagcccaggagttcaagaccaacctggacaacatagcaagaccccatctcttaaaaaaaaaggaaagaaaacttgatgtgattgccataggtggaataatccaacataaattgccatagatagaaggtatctgtaatatatatatatatataaaatgaaatatatgtttcattttagagaaataactattactttagatctttccaaatctgagaaagggaggctagcatgtgttcaaggttagcacgcaacagaatttcctaaaatcagaagaattggaagatcctccccttttgaaatggccctgctgtgtcagtttccctgtggccttttgaactgtacatctcacatgttgggaaacgctggccactgggaaatcattagaaaggaggctgtagaatatttgccgagcctctactgtataccaggggctaactcaccaagcacattctaggaattgggccctgctcatgaggagccttagtggagattccaggtgaatatttatgaaaaagtcaacattagaactgaaaatggaaataaactgcttgaaaagaaaaaaaaaaaaaaaaa

SEQ ID NO: 45 - DNA, 2642 bp, Homo sapiens
acttccgggaacgccggggaaccgcagtagccgcctgctagtggcgctgctagccggccggcgcaggctgccgagcgggtgagcgcgcaggccaggccaaagccctggtacccgcgcggtgcgggcctcagtctgcggccatgggggcgtccgcgcggctgctgcgagcggtgatcatgggggccccgggctcgggcaagggcaccgtgtcgtcgcgcatcactacacacttcgagctgaagcacctctccagcggggacctgctccgggacaacatgctgcggggcacagaaattggcgtgttagccaaggctttcattgaccaagggaaactcatcccagatgatgtcatgactcggctggcccttcatgagctgaaaaatctcacccagtatagctggctgttggatggttttccaaggacacttccacaggcagaagccctagatagagcttatcagatcgacacagtgattaacctgaatgtgccctttgaggtcattaaacaacgccttactgctcgctggattcatcccgccagtggccgagtctataacattgaattcaaccctcccaaaactgtgggcattgatgacctgactggggagcctctcattcagcgtgaggatgataaaccagagacggttatcaagagactaaaggcttatgaagaccaaacaaagccagtcctggaatattaccagaaaaaaggggtgctggaaacattctccggaacagaaaccaacaagatttggccctatgtatatgctttcctacaaactaaagttccacaaagaagccagaaagcttcagttactccatgaggagaaatgtgtgtaactattaatagtaagatgggcaaacctcctagtccttgcatttagaagctgcttttcctaagacttctagtatgtatgaattctttgaaaattatattacttttatttctactgattttattttggatactaaggatgtgccaaatgattcggatactaagatgcatcgtttgaaatcatctagtgtgttgtatgcagttatcctcaaaaacatcagcgatgtctgaacctttaaaacatctgttagagcaaaattaaaagagcatttggtagtaatctaactttttgttcagttaataagtggttgataaagtttccatatttttctggaaaagttaaaaaaagttacatgtcatttggagaaaatacgtaatcagaaatttgtgcatagattgatgccaaaaaagacatttccagcattgtggaacatggtgagacactatataaaattccagaaagaaagcaactggatttacagatttattgtgagacacaaattcactgctgcctttacactaagaaatgtatatgttaaccatatatgctgtatttattttgtcgttaagcatactttcagtttactcagaattttcaatttgctataaagatgtatcaattagcatatagaaaaatattactttaagatgacttgtttcctttgaaaatacctgtgtactgagggttatgatttgtgtcaaaaattgacataagtgcttttacaagcaccaaagttgaatgaattttcaacaaaatgtaattaaagtctatgttttcagttatgactcaggttaagaaatgtgttttaggatctacttgctggtttttctttttgatccaaatgtgtgatctgccctgataaataacaagttatagtaccatctcccccgccaataaaaaagagaagaaaaaagagaaacccgtggcactatgtaaataaagtaagcatactttgttgttagtaaatagatgaggcatgcctgggaaatgctcccttggcataaatagcaatcaattataattagtaaacaggtgtaccaataaaaagaatttacatgataggttaacaaggaccaggaaagtgagtttcctgaaggagttctttgttcctgatcaaagaaattgatacctgttagcattcactgccaccatattttaaggagaaagaactctattggtgtcgtctgagcagccatttaaaaattggaatctaaaggatggttgctgatgtactgtgtggtctggtagaagtggggaaatatgagagatggaggaaaaacttgattatgtcttccatggcatatttactcttactttacttcgtgccaaatcaaatgaaacaagccgtcttacaagtcgttattgcctttaaaaatctgttccgtttttttcccaggtacttaaaatacaagtgccagtaagtggttcttatgtgttttggggggaaaattttatttcccttttcttctgatatttaaaaaattcatcgatctttcaagatgaaccaaggttttttaaaagaaatataggaaacacttcattctttataaaactttctataatgccttatttgaatgttaatcttatgtgctttctaaaaaatgttgtgaaataccaaacttatggattatcactaggttatcaagcatatattagtctttatcagaataaaatgaaatttcataactgtggctattactttgttcttggtccttcacagggcctgctccatcccaccttcctttctgctgcctgatgtctcaatggcttctgaatgactgttctaataaatgatcttaaaacagt

SEQ ID NO: 46 - DNA, 2776 bp, Homo sapiens
gccgcggagcctgtgagcgcgcaggccaggccacagaccagcgtctgcgcagctcggaccaccgccagccaccatgggggcgtcggggcggctgctgcgcgccgtgatcatgggggccccgggctccggcaagggcaccgtgtcgtcacgcatcaccaaacacttcgagctgaagcacctctccagcggggacctgctccgccagaacatgctgcagggcacagaaatcggtgtgttggccaagactttcattgaccaaggaaagctgatcccagatgacgtcatgactcggctggcccttcacgagctcaaaacccttacccagtgtagctggctgttggatggatttccaaggacacttccacaggcagaagccctggataaagtttatcagatagacacagtgataaatctcaacgtgccctttgaggtcattaaacagcgccttactgctcgctggatacatcctgccagtggtcgagtatacaacattgaattcaaccctcccaagactgtgggcattgatgacctgaccggagaacctctgattcagcgcgaggatgacaaaccagagacagtgatcaagagactaaaggcctatgaagcccagacagagccggtcctgcagtattaccagaaaaaaggggtgttggaaacattctctggaacagaaaccaacaagatctggccccacgtatactccttcctacagacgaaagttccagaaactacccaaaaggcctctgttactccctgaagagggcagcaactggcaggatgaggcagggcctcctctcctcttcttgcctctgtatctcaaagctcttttcctaagacttctctaaaaattatgatttattcctaatggctaagccaaatgagtcagatacttagcctgatctgttaaaatagcctcacatgtttaatctaggacctggttgtcttctgtggacgtgcaattggaaaacgtcagagatgttgaaacaaactaactcggagagcaactggtgaccatctaaccttctgttcagttagtcaaagtggttgatcacattttcatgtttttctggaaaagttcaaaaaaaatttaccattcaaggcagataaataatctcattcgaggcttttcaataagccaatgcccactgcaattcaggaagatgttttctggcctgaagggatgtggtattagaagacactgtctatagatttcagaaagcaagcaacaggctttacagatgttaaatgtaaactcactgctaccttaacaggaaaagccaagggaacaggccaccatgctgtgtgtcctctacttatccaatctgctgtgaaaatgcagccactggcacgtagggacgtgtgacttggatatggaccaaggtgtatgacttaggttctgactgaagttctaggagcagcactggcactgacaatggcattaagtcctaagttctcccgtgtcactcagggtgaggaccaagttttaggacctacccgtttgtttccctctttgatccaagcggactgcctgccttgatgagcaagacagtaaacagaaaactaaagggtgacaccacacccatgggaatttgccactctgcaagtagacgggacatgctggggacagccccccagcagaaagactgactaattccactacacaacaggtgtagtaataggattttgcatggtgggttcaaaagcactgtaagggagttcccttaagaacattatacctgtgttgaagttctaaattaaagatcctcttgtctcggcctctctcaagtgctgggatcactgtgtgctaccacttcccaccctaatttaaagggaagcaattcttctggtaccatctaagcagcctcctcttctacttacagcagtgggatccaaccagcctgagtgctgggcaggcatcctatactgtggtttatcttcagccccttctgttgctgatgctggtggtggtggctcagttctgttgctctgacaggatctcactgtagttgactgccctgaactctgtagtcaggctggcttcaaactcagagccatcacctgtttctgcctcccaagtgctgaagttaaaggtgcgcaccaccaccacactcaggctggctttggattattatatagtccaaactggcctcacattcaatcctcttggtttagtctcctgagtgcttaaattacaggtgtgtaccactaaaccaaccctaagaatccattttaaaatgtcagtcactttagatttcttagtggggcaaggacctgcccttacatattgtggcctgaagggacaaaatatgagaagttcaatgaaaagataattccccctttcaggaaagatgttctcttattttacttggtgctaaatcaaagaatcaagcctttgttcaagcctttgcaattttggcctattttatttcagagagcaaatggttgttatatatttgggagtgggaaggaatctttgatttttaaatttcactgttgatctttcaaatagactaggccttaggattacaatgaacaactttgtcctttgtcaacgtttctctactgccttatttggatgttgataaccacttcctacaacctgttgtgaattacctaaagctaggactgatctgcaggtgatctcagcactgtggctgttgccctttgcccctggcccttcacaaacccccatcctgtctgctgccacaatgtctcacaggcttctttctaataaatggtcttcaaacagtaaaaaaaaaaaaaaaaaaaaaaaaaa

SEQ ID NO: 47 - DNA, 7387 bp, Homo sapiens
gcaactgaagacggaggtgcccaaggtcagaaggaagcaccacacagagggcacaggcaggatggccgatgctgacaggaaccagcggtgactctggggcccctggcagcagctctgtctcctgaagatgaagtggcccaggtgaagcccaggccagccccaatggccagctcggagactgagatccgctgggctgagcctggcctggggaagggcccccagcggcggcgctgggcctgggccgaggacaagagggatgtggatagaagtagttcacaaagctgggaagaagagagactctttcccaatgccaccagccccgagctcctagaggacttccgcctggcccagcagcacctgccgcccctggagtgggacccacacccgcagcccgatgggcatcaggattccgagtcaggagagacttcgggagaagaggctgaagcagaggatgtggacagcccagcaagttcccatgagcctcttgcctggctcccccagcagggccgtcagctggacatgactgaagaggagccagatgggaccctcggaagtctggaggttgaggaggctggagagagctcctcaaggttggggtatgaggctggtctcagcttggaaggccatggaaacaccagccccatggctcttgggcatggtcaggccaggggctgggtggcttctggcgaacaagccagtggggacaaactttctgaacattccgaggtcaacccatccgttgaactcagcccggcaaggtcctggagcagtgggacagtgagcctcgaccaccctagtgacagccttgattctacctgggaaggagagaccgatggcccccagcccactgccctggcagaaaccttgccagagggccccagccaccacctcctaagcccagatggcagaactggaggcagtgttgctcgggcaacccccatggaattccaggactcctcagctcccccagcccagagtccgcagcatgccacagatagatggaggagagaaacgaccagattcttctgccctcagcccaaggaacacatctggaagcagacaaagacgtcacctaagccactcccttcccgattcattggctccatcagccccctgaatccccagcccaggccaacgcggcagggcaggccgctgcccagacagggagccactctggctggccgctcctcttctaatgcccccaagtatggccgggggcagttgaactacccactccctgatttctccaaggtagggccccgggtgagattccccaaagatgagagctaccgtccccccaagtccagaagccacaacaggaagcctcaggcccctgccaggcccctcatcttcaagtctccagctgagattgtgcaggaggtgctgttgagcagtggagaagcagccctggcaaaggacacgcctcctgcccaccctatcaccagggtaccccaagaatttcagacgcctgagcaagccactgagctggtccatcagctccaggaagactaccacaggctcctcaccaagtacgctgaggccgagaacaccattgaccagctacgcctcggggccaaggtgaacctgttctctgacccaccccagcccaaccacagcatccacacgggaatggtgccccaggggaccaaggtcttgtccttcaccatcccacagccccgctctgcagagtggtggccgggcccggccgaggacccccaggcctctgcggcctcagggtggccatcagctcgaggagacttgagcccctcctcgcttaccagcatgcccaccctggggtggcttccggagaaccgggacatctctgaggaccagtcctcagcagagcagacccaggcactggcttctcaggccagccagttcctggccaaggtggagtcctttgaaagactgatacaggcaggacgtctcatgccccaggaccaagtcaagggcttccagcggctgaaggctgcccacgcggccctagaggaggagtacctgaaggcttgtcgggagcaacaccctgcccagccgcttgccggctccaaggggacgcctggaagatttgatcctcgcagggagctggaggcagagatataccgtctgggaagctgcctggaagagctgaaggaacacatagaccagacccagcaagagcctgagccgcccgggtcagactcagctctggacagcaccccagccctgccctgcctccatcagccaacgcacctgcctgctccttctggacaagcccccatgccagccatcaagacctcctgccctgagcctgctaccaccactgccgccgccagcactggcccctgcccattgcacgtaaatgtggaggtgagctctggcaacagtgaggtggaggacaggccacaggaccccctggcccgactcaggcacaaggagctgcagatggagcaagtttaccatggcctcatggagcggtacctcagtgtgaagtctctcccagaagccatgagaatggaggaggaggaagaaggagaggaggaggaggaggaagaggggggaggtgactccctggaagttgatggggtggctgcaactccagggaaagcagaggccaccagggtcctcccaaggcagtgcccggtgcaggctgagaaaagtcatggggctcccctggaggaggccacggagaagatggtatctatgaagccaccaggtttccaggcatccctggctagagacgggcacatgtcaggcctgggcaaggctgaggcagcccctccaggccctggcgtgccaccccaccctccaggcaccaagtccgcagcatcccaccaaagtagtatgaccagcctggagggaagcggcatctctgagcgccttccacagaagcctttgcaccgaggcggtgggccccacctggaggagacctggatggcgtccccagagacagacagtggctttgtgggctcagaaacaagcagagtttcacccctcacccagactccagagcaccggctctcccacatcagcacagcaggaacattagcccagccctttgctgcatctgtgcccagggatggagcttcctaccccaaggccaggggttctctgattcccagaagagccacagagcccagcacaccccggagccaagcacagaggtacctctccagcccaagtgggcctctccggcagagggcacccaacttcagcctggagcggacactggcagccgagatggcggttcctggctcagagtttgaggggcacaaacggatttctgaacagccccttcccaacaagacaatcagcccacccccagcccccgcccctgccgctgcgcctctaccctgtggaccaacagagaccatccccagcttcctgctcaccagggcagggcgagaccaggccatctgtgagctgcaagaagaggtgtcccggcttcgtctgcggctggaagacagcctgcaccagccactccagggcagcccgacacgcccagcatctgcctttgaccgccccgcccggacccgcggccggccagcagactccccagccacctggggctcccattatggcagtaaatccacagagagattgcctggtgagcctagaggtgaagagcagattgtccctccaggaaggcagcgagccaggtcttcctcagtgcctcgggaggtgctccgactgtccctgagttcagaatctgagctgccctccctaccactgttctctgagaagagcaagaccaccaaggacagtccacaggcagctcgggatggaaagagaggggtgggcagtgctggatggccagacagggtcaccttccggggccaatacacaggccacgaataccatgttctgtcccctaaggcggtcccaaaaggcaatggcacagtctcctgtccccactgccggcccattaggacccaggatgcgggtggtgctgtcacaggggacccactgggaccgcctcccgctgatacccttcagtgtcccctgtgtggtcaagttgggtctcccccagaggcagatggtccaggctcagccacctctggggcagagaaggccaccacgaggagaaaagcatcttcaactcccagccccaagcagaggagcaagcaggcggggtcgtcgccacgcccaccccccggactgtggtatctggcaacagcgcccccagcaccagcccctccagcctttgcctacatctcctcggttcccatcatgccttatccacctgccgctgtgtactatgcgcctgcaggacctacctcagcccaaccagctgccaagtggccgcccacagcctctcccccaccagcccggagacaccggcactccatccagctcgacctgggcgacctagaggagctcaacaaggccctgagccgggccgtgcaggctgccgagagcgtccgctctaccaccaggcagatgagaagctcgctgtcagccgacctgcgccaggctcacagcctgcggggctcctgcctcttctgacttcactgggggcccagaggcagatgggtgggtgggtgggcaggtggcctgccaggccaggagtgggctggagctgctgaggcccagaaggcccgcatagttcctcaccaggagggtctccctccagcacaggtcccgcctgctcagtccctgtgctttccaagtggagggggtgtcagctcggtcaccaagagaagtgacttcccaggagcaccagtcccctcacagaggtgctgtgagcgaggcctccttcggtccaggcagaacctcaggcagtctctcctggtcctgcatgtgtgcaactccagctaataataggtattttatatacagatggacagatatttttttaaactggggagttttcctgatcttgggtcctctttagggggccagacaagaaaggcctacggtttctggagcaaacctgtcccccacctgtgaccagtcactctggggcaagcatcactgggaagggcatagccggagacctttctcctagtgactggtagtcagtggggcattttaggatgtcagggccccagggtgacatgtgtccagcttttctatggcagcagaggcctttccctcagacaagctacaaagtgcccaggatgccatccaccatggtccccttcagtacctcacgcatggtccccagcttctcctaggatcccagtggcgtttatcagtggccagctacctgccaggcccgggctggggcacggtctgcggccatgaggccaggccgcctcccgcacccctaccccgtggcagcagcatacctctgcatttctggaatgtgtgtgcatcaatgatgtttgtatatttgaggcatttaaaaatctattttcgttacgagggcaaatgaagaatgaatattgatcttaaaaaaagaaaagaagacaaaaaaaatacccaaagccatccgtgtctctgctgtatgtcattaacttttgccttcaatgtcaagtttatggggtggtaggtttgatgcccagccaagccctttcccaggggacctgttgggtgctctgcctgcctccctctggtggcttctgtttctccagttttccccctttgcctatctcagaaccataaatctttcaactgcggagggccttgaggtggggctgcctagccaagtcccttttgactgaggccagagatgtaaatgaggcacacagcaagttgctgtctacaagagtatgcacctggactctccagtgctcctttctttcttttttttttcttttttctttttctttttttttttttttttgagactgagttttgctctggttgcccaggctggggtacagtggtggaatctcggctcactgcaacctccgcctcccgggttcaagtgattctcttgcctcagcctcccgagtagctgggattacaggcatgcaccaccacgtctggctaattttgtatttttagtagagacagggtttctccatgttggtcgggctgatcttgcactcccagcctcaggtgatccacccacctcagcctcccaaattgctgggattacaggcgtgagccatggcgcccagccttccagtactttcagtagcaaacagcacctgccatttagggagcacctgctagaccctgattccggtgctaagcactgggcattgtctgcttcacacagtccatgtgctaaccctcaggaccctcactctgccccccttttactgatgaggagagtggggttccaatgggccatctgcccaaactggtttgggagagaacctggatttaaactcacattggtctgacccaaagtccacattctttgttatgtgtgttttttgcttcctctacctccatgattctttttctcttgacctctggtttcttcctcacgtggctttttcttccatgttccccacttctcgtctcccttgcttctccctgctctgcccatcatgactcatttctgtttcatttttcagcggatcctcctgagtatggttgaaaatggtgtctcactgaaagtaacactgaaatggacaaacttcctgtaggttctgagccttcagttccaggacattgtgggaccccagaggctgtcctgtccacttgccttctgaggacatcagctcggtgtccccagcctccgtgctgtgggcacagctgtggtttgggtgctgagcaaaggatgctgtagtcttggccctgtggagcttggctgttgggacaggaggtacaaaggggagtggtgcctgtggacacaggactagaccccaggacatcagggcctcgggctcatggtcctatcaccctggatggtatacgcagctgcacacgtggaattgctcaaacaattcaggcccaacttttctgccacggaaggggtgctgcttccctcacgtaacaagaggctgtcaatcacgagcacccaggttggggtgaggccggccctttgtggcttgtgccactgagtgggctgtgcctcgggcttggctccacctcagggctccacatttgcaggatgtcagctgatttccagggaccagcctcacccttacgtgttatctccttcttctgggtctcccaggtgagcaccctaagaacacatccatggagacacccagcccctctggcctgggccccaagccctctgcatcaccccagcccttccctgccctgccctgtcctggcccaggcaaccgcctcttgcctagttgcccacagcagccttcactcaggccttcctgcctccagcctggtccccacaacgtgcctcccccgatggccatggtaatactggaataaggtccttgtgataggcaccacatgcctgaactctccccaccccatccaccttgtatttgtctgttctcacattgctataaagaactacctgagactgggtagtttatgaaaaaaa

SEQ ID NO: 48 - DNA, 5263 bp, Homo sapiens
cggggggggccgcgccgtgctagccgttgggcctgcctcggaggaggcgtcgccgccgccgctgccgctgccggcgccgttgccgctgccgggaaacacaaggaaagggaaccagcgcagcgtggcgatgggcgggggtagagccccgccggagaggctgggcggctgccggtgacagactgtgccctgtccacggtgcctcctgcatgtcctgctgccctgagctgtcccgagctaggtgacagcgtaccacgctgccaccatgaatgaggtgtctgtcatcaaagaaggctggctccacaagcgtggtgaatacatcaagacctggaggccacggtacttcctgctgaagagcgacggctccttcattgggtacaaggagaggcccgaggcccctgatcagactctaccccccttaaacaacttctccgtagcagaatgccagctgatgaagaccgagaggccgcgacccaacacctttgtcatacgctgcctgcagtggaccacagtcatcgagaggaccttccacgtggattctccagacgagagggaggagtggatgcgggccatccagatggtcgccaacagcctcaagcagcgggccccaggcgaggaccccatggactacaagtgtggctcccccagtgactcctccacgactgaggagatggaagtggcggtcagcaaggcacgggctaaagtgaccatgaatgacttcgactatctcaaactccttggcaagggaacctttggcaaagtcatcctggtgcgggagaaggccactggccgctactacgccatgaagatcctgcggaaggaagtcatcattgccaaggatgaagtcgctcacacagtcaccgagagccgggtcctccagaacaccaggcacccgttcctcactgcgctgaagtatgccttccagacccacgaccgcctgtgctttgtgatggagtatgccaacgggggtgagctgttcttccacctgtcccgggagcgtgtcttcacagaggagcgggcccggttttatggtgcagagattgtctcggctcttgagtacttgcactcgcgggacgtggtataccgcgacatcaagctggaaaacctcatgctggacaaagatggccacatcaagatcactgactttggcctctgcaaagagggcatcagtgacggggccaccatgaaaaccttctgtgggaccccggagtacctggcgcctgaggtgctggaggacaatgactatggccgggccgtggactggtgggggctgggtgtggtcatgtacgagatgatgtgcggccgcctgcccttctacaaccaggaccacgagcgcctcttcgagctcatcctcatggaagagatccgcttcccgcgcacgctcagccccgaggccaagtccctgcttgctgggctgcttaagaaggaccccaagcagaggcttggtggggggcccagcgatgccaaggaggtcatggagcacaggttcttcctcagcatcaactggcaggacgtggtccagaagaagctcctgccacccttcaaacctcaggtcacgtccgaggtcgacacaaggtacttcgatgatgaatttaccgcccagtccatcacaatcacaccccctgaccgctatgacagcctgggcttactggagctggaccagcggacccacttcccccagttctcctactcggccagcatccgcgagtgagcagtctgcccacgcagaggacgcacgctcgctgccatcaccgctgggtggttttttccccctaactttttacttagcctttttggtttgtgtccccacccccacctcctcaccccctttccagttcttcttcaggcccctcccagacgcaccccagcggcccctgcagcccctgcctccagcctccagcctcacctttgtgcccagactcgcatttggaagactccacctcccgcccaggcctgggctgttgggcggttggagattcaggttttaatccacacaagccccagtgaggggtgaagcatggcgcctggggcctgcctgagtttctggcctgggtgtcgtgctggtgtctgcctccgcgctgctgcatctggacgaaggctgccttctggtgggacgcgacacccggcagacagtggtgctgccttccaggccccgtggcctaggctcggagtggccaggcacggggcggtccaatcccccacccgctgtccccctatgggggcagaaaagcaataatgtccaggggcaggcaggggcccttgggagctgcagggctgggggttagggctgctccctggtgaatggagtcagatcctaggatctgtaccatggggaaccaggagtggccgggctgggtgccgcctcctggtccggcctcctccccaccaaactgtcctcaccctatggatgaggcaggaggaacatttggggccaaacctgcctgcctcccagccccgtgccttactagggcttccttccagctggccttacctcccgctggaccctgggcctggcctggccccactgggggctatgggctgggctcaccctctcctctgcgggggtggagggccaccagccttggctgttacaatcttacaccggacagtattgggccccatggacttggtcagggaggggtgggggtgggcatctctggtacctattggggtggggggcctctgaaaagggaggctcctaggcccccctcacccctccctctccccagggccccacgttctgcagccttaaggttgaacatgagtgcacgtccatgtcagtgctgtgggactcctgtgcgtgcctcggactgcgtgtgtcggcgggacgcaggcacacgtgggtgtgtgtgcatgtgtgtttgtgtgagggcagcgtgtcctccagtgtgcatggtgtgtgggcttgggccccatccctggcccgagcatttcatcctgtgggggaggggtgctgacctagtgggaggagccccactgtgatccatgagctgccctgcccacgcctcccctccctgtagcaacacctctgggtgtttggagtttagcttttgtgggtttgctctccctatcccatctcctgtactacacagttcatggcagggtggggaggggtggggttggttcgggtgggtgagggtctttttcctctgtgtgcgatgttgttatctgacagttctccgtccctactggcctttctcctcgtcttcatatttgtacggtacaagcaataaagacactcatttcagaccagggcccagcctgcactcacgccagcccaaccactctgggctttgccttggtgatggagtcagacccctgggccccagctcctcctgtactagccgttcccttcagcaaggagggcactgagctcagggtgagggcagctggggtgtgtgcaggagctcaggctggagagggtgggtggagctggtgctgtggggctgaggggtatgggaaggctccccgcatgtgggggtggggtggacagagaccactccaggccctcagtgctgcttaggctaagagaggtggggtggagggacagggctggaagatctgggtagcccagaatgaggagggtgcctgtgctgtcactgaatgagagggagtggttcattccacccggctgccgagcctcagaggggggcattcctatcctgccccacctccctgtttatgctgccacctggaagccttgaggcccccaaattccagtacagacccagtggtgtgttcatggtggcgtggttgctgtcacctgggagctcctgagcgtttggttagaaccctgttcagcttggggtcagccctcccctagtcactgccctttagcctggatgtgtctgggcccctgcacttcccgtgcttgagtcacgtggctgcatggccgggcgctggccggatggaacacctcccccagcaagggaccagggaccagagccctggcctgccctgctgagccctgctgtgcagagggcctggcacagatgaatttgagattttgccgcaaggtgttagcacttcacacccattgagtctttgagattttaagtgaatgtaagcagaaaaagtcagatccaatttacagaaatcagagttagctacagctaggactcgtttggttggggttttttagtttgtctttctaaagtcatgtggaccttaatttaattacaaaagtctaccctggtggtcataaaataggcaggcctatgaagaaaggccttttactcttccatctcatcccagccccgagttgacccacgttgctgctcctcacaccatggtgatgcaggtctcgtagtgtgggcacaggcctggctacctcatctttttagtgcctctctcctcttccacaggatggggtcccacagctgcagcagctggccccgtagttgagcatgtgtggttatcctgtagagcttttcccaagaagggtgtttgaacttagagtcttaataaaatcttaccaaataaattttgagtagaataatcgtcttttgcaatgtacattttaaaaatttcacacattcttttttgtatataaagaacagtgactgggcacagtggctcatgcctgtaatcccagcaatttgggaggccgaggcgggcgggtctcttgaggccaggggttcgagaccagcctgggcatcatagggagaccttcatctctacaaaaaatacaaaaattagctgggcatggtggtgcatgcctgcaatcccagctaacttggaaggctgaggtgaggtgggaagatcacttgagcccaggagtttgaggctgcagtgagctatgattgcggcactgcactgcagcctgggacaatgagactgtgtctctaaaaataaaaaaaaaaaaaacatgatacatgctattaaaaaagacagcaaagcaggagtataagaaaggaaattcacccgaggtcgcagggccttgagtactcattttggtgctgattacctctctgcaaatggacacggcatcataaattggtagtttcctgctctttttgtgtaatcttttccagttaatgtgaagcctctgggggctgccctcgtgcactgatggttgtgtggagtcgggggcggcagtgcgattcccttttagctgctgcatggggggaactcaggctttccagctgcttcctggggttccatggggtagacccctcaaccgcttcagctgccccgttaacaggaattgacttggtttcgtttggtgctaccagcagtcctgtaataaactagctatccatctgta

SEQ ID NO: 49 - DNA, 3588 bp, Homo sapiens
gcagcagcagagaatccaaaccctaaagctgatatcacaaagtaccatttctccaagttgggggctcagaggggagtcatcatgagcgatgttaccattgtgaaagaaggttgggttcagaagaggggagaatatataaaaaactggaggccaagatacttccttttgaagacagatggctcattcataggatataaagagaaacctcaagatgtggatttaccttatcccctcaacaacttttcagtggcaaaatgccagttaatgaaaacagaacgaccaaagccaaacacatttataatcagatgtctccagtggactactgttatagagagaacatttcatgtagatactccagaggaaagggaagaatggacagaagctatccaggctgtagcagacagactgcagaggcaagaagaggagagaatgaattgtagtccaacttcacaaattgataatataggagaggaagagatggatgcctctacaacccatcataaaagaaagacaatgaatgattttgactatttgaaactactaggtaaaggcacttttgggaaagttattttggttcgagagaaggcaagtggaaaatactatgctatgaagattctgaagaaagaagtcattattgcaaaggatgaagtggcacacactctaactgaaagcagagtattaaagaacactagacatccctttttaacatccttgaaatattccttccagacaaaagaccgtttgtgttttgtgatggaatatgttaatgggggcgagctgtttttccatttgtcgagagagcgggtgttctctgaggaccgcacacgtttctatggtgcagaaattgtctctgccttggactatctacattccggaaagattgtgtaccgtgatctcaagttggagaatctaatgctggacaaagatggccacataaaaattacagattttggactttgcaaagaagggatcacagatgcagccaccatgaagacattctgtggcactccagaatatctggcaccagaggtgttagaagataatgactatggccgagcagtagactggtggggcctaggggttgtcatgtatgaaatgatgtgtgggaggttacctttctacaaccaggaccatgagaaactttttgaattaatattaatggaagacattaaatttcctcgaacactctcttcagatgcaaaatcattgctttcagggctcttgataaaggatccaaataaacgccttggtggaggaccagatgatgcaaaagaaattatgagacacagtttcttctctggagtaaactggcaagatgtatatgataaaaagcttgtacctccttttaaacctcaagtaacatctgagacagatactagatattttgatgaagaatttacagctcagactattacaataacaccacctgaaaaatatgatgaggatggtatggactgcatggacaatgagaggcggccgcatttccctcaattttcctactctgcaagtggacgagaataagtctctttcattctgctacttcactgtcatcttcaatttattactgaaaatgattcctggacatcaccagtcctagctcttacacatagcaggggcaccttccgacatcccagaccagccaagggtcctcacccctcgccacctttcaccctcatgaaaacacacatacacgcaaatacactccagtttttgtttttgcatgaaattgtatctcagtctaaggtctcatgctgttgctgctactgtcttactattatagcaactttaagaagtaattttccaacctttggaagtcatgagcccaccattgttcatttgtgcaccaattatcatcttttgatcttttagtttttccctcagtgaaggctaaatgagatacactgattctaggtacattttttaactttctagaagagaaaaactaactagactaagaagatttagtttataaattcagaacaagcaattgtggaagggtggtggcgtgcatatgtaaagcacatcagatccgtgcgtgaagtaggcatatatcactaagctgtggctggaattgattaggaagcatttggtagaaggactgaacaactgttgggatatatatatatatatataattttttttttttaaattcctggtggatactgtagaagaagcccatatcacatgtggatgtcgagacttcacgggcaatcatgagcaagtgaacactgttctaccaagaactgaaggcatatgcacagtcaaggtcacttaaagggtcttatgaaacaatttgagccagagagcatctttcccctgtgcttggaaaccttttttccttcttgacatttatcacctctgatggctgaagaatgtagacaggtataatgatactgcttttcaccaaaatttctacaccaaggtaaacaggtgtttgccttatttaattttttactttcagttctacgtgaattagctttttctcagatgttgaaactttgaatgtccttttatgattttgtttatattgcagtagtatttattttttagtgatgagaattgtatgtcatgttagcaaacgcagctccaacttatataaaatagacttactgcagttacttttgacccatgtgcaaggattgtacacgctgatgagaatcatgcactttttctcctctgttaaaaaaaatgataaggctctgaaatggaatatattggttagaatttggctttgggagaagagatgctgccatttaaccccttggtactgaaaatgagaaaatccccaactatgcatgccaaggggttaatgaaacaaatagctgttgacgtttgctcatttaagaatttgaaacgttatgatgacctggcaacaaaaagtaatgaagaaaattgagacctgagtgaagataagaaatgatctttacgtggcaaaatgaacacatcttgagtatttaggaaatgggcagtgaaggctaagaacctggtgtgtttcttgggatcatggtacatttatcactgaattaagccatcagggaaaaaacaacaaaaaaagagaacacctccagcttttctttttctgtatatactcatgtcccccagattccaacatttctcactgaaagggggcatgtatgcaaacctcatctttctccttcattaatgatgatcttcagattaaaccctttggtgctaggagctgacaatttccaaagcagcctgtgaagtcctaggggctgggggccactcttgcggcaagcagaaggccatcctactccgcggagtgatcatggaaatgtattttagttaaactctgacagctcccaaacggaagactacagcatgacgtagtattatgattgcattgtatgaaagagcaagtgactttctaagtaggatgaatcatattcatatgcagatgtcttagcctcttgacgctggaagtgtggatttatagctatgaaaccactgctggcagtgggtgggccactgggactgacgggggttaaagggcattttactaaggcagctaagacatattcagacatcaacgttatccttctttttcatatttctacctgagtgaag

SEQ ID NO: 50 - DNA, 1703 bp, Homo sapiens
gcagcagcagagaatccaaaccctaaagctgatatcacaaagtaccatttctccaagttgggggctcagaggggagtcatcatgagcgatgttaccattgtgaaagaaggttgggttcagaagaggggagaatatataaaaaactggaggccaagatacttccttttgaagacagatggctcattcataggatataaagagaaacctcaagatgtggatttaccttatcccctcaacaacttttcagtggcaaaatgccagttaatgaaaacagaacgaccaaagccaaacacatttataatcagatgtctccagtggactactgttatagagagaacatttcatgtagatactccagaggaaagggaagaatggacagaagctatccaggctgtagcagacagactgcagaggcaagaagaggagagaatgaattgtagtccaacttcacaaattgataatataggagaggaagagatggatgcctctacaacccatcataaaagaaagacaatgaatgattttgactatttgaaactactaggtaaaggcacttttgggaaagttattttggttcgagagaaggcaagtggaaaatactatgctatgaagattctgaagaaagaagtcattattgcaaaggatgaagtggcacacactctaactgaaagcagagtattaaagaacactagacatccctttttaacatccttgaaatattccttccagacaaaagaccgtttgtgttttgtgatggaatatgttaatgggggcgagctgtttttccatttgtcgagagagcgggtgttctctgaggaccgcacacgtttctatggtgcagaaattgtctctgccttggactatctacattccggaaagattgtgtaccgtgatctcaagttggagaatctaatgctggacaaagatggccacataaaaattacagattttggactttgcaaagaagggatcacagatgcagccaccatgaagacattctgtggcactccagaatatctggcaccagaggtgttagaagataatgactatggccgagcagtagactggtggggcctaggggttgtcatgtatgaaatgatgtgtgggaggttacctttctacaaccaggaccatgagaaactttttgaattaatattaatggaagacattaaatttcctcgaacactctcttcagatgcaaaatcattgctttcagggctcttgataaaggatccaaataaacgccttggtggaggaccagatgatgcaaaagaaattatgagacacagtttcttctctggagtaaactggcaagatgtatatgataaaaagcttgtacctccttttaaacctcaagtaacatctgagacagatactagatattttgatgaagaatttacagctcagactattacaataacaccacctgaaaaatgtcagcaatcagattgtggcatgctgggtaactggaaaaaataataaaaatcggcttcctacagccagcagcacagtcacccatggaactgttggctttggattaaatgtggaattgaacgactacccagaagtgttctggaaagaagcgagatgtgtggcctgcctcaccgtcctcacccatcaaaagcaccagcaggcacgttaactcgaattctcacaaggaaaaggccattaaagctcaaggtgcatttcaaactccaggctac

SEQ ID NO: 51 - DNA, 2660 bp, Homo sapiens
accccattgattaccccattgccaggcgtgggcacgggagttggtttgggagctgccagtctcctgggaggatcgcagtcagcagagcagggctgaggcctgggggtaggagcagagcctgcgcatctggaggcagcatgtccaagaaagggagtggaggtgcagcgaaggacccaggggcagagcccacgctgggatggaccccttcgaggacacgctgcggcggctgcgtgaggccttcaactgagggcgcacgcggccggccgagttccgggctgcgcagctccagggcctgggccacttccttcaagaaaacaagcagcttctgcgcgacgtgctggcccaggacctgcataagccagctttcgaggcagacatatctgagctcatcctttgccagaacgaggttgactacgctctcaagaacctgcaggcctggatgaaggatgaaccacggtccacgaacctgttcatgaagctggactcggtcttcatctggaaggaaccctttggcctggtcctcatcatcgcaccctggaactacccactgaacctgaccctggtgctcctggtgggcgccctcgccgcagggagttgcgtggtgctgaagccgtcagaaatcagccagggcacagagaaggtcctggctgaggtgctgccccagtacctggaccagagctgctttgccgtggtgctgggcggaccccaggagacagggcagctgctagagcacaagttggactacatcttcttcacagggagccctcgtgtgggcaagattgtcatgactgctgccaccaagcacctgacgcctgtcaccctggagctggggggcaagaacccctgctacgtggacgacaactgcgacccccagaccgtggccaaccgcgtggcctggttctgctacttcaatgccggccagacctgcgtggcccctgactacgtcctgtgcagccccgagatgcaggagaggctgctgcccgccctgcagagcaccatcacccgtttctatggcgacgacccccagagctccccaaacctgggccgcatcatcaaccagaaacagttccagcggctgcgggcattgctgggctgcggccgcgtggccattgggggccagagcaacgagagcgatcgctacatcgcccccacggtgctggtggacgtgcaggagacggagcctgtgatgcaggaggagatcttcgggcccatcctgcccatcgtgaacgtgcagagcgtggacgaggccatcaagttcatcaaccggcaggagaagcccctggccctgtacgccttctccaacagcagccaggttgtgaaccagatgctggagcggaccagcagcggcagctttggaggcaatgagggcttcacctacatatctctgctgtccgtgccattcgggggagtcggccacagtgggatgggccggtaccacggcaagttcaccttcgacaccttctcccaccaccgcacctgcctgctcgccccctccggcctggagaaattaaaggagatccactacccaccctataccgactggaaccagcagctgttacgctggggcatgggctcccagagctgcaccctcctgtgagcgtcccacccgcctccaacgggtcacacagagaaacctgagtctagccatgaggggcttatgctcccaactcacattgttcctccagaccgcaggttcccccagcctcaggttgctggagctgtcacatgactgcatcctgcctgccagggctgcaaagcaaggtcttgcttctatctgggggacgctgctcgagagaggccaagaggccgcagaacatgccaggtgtcctcactcaccccaccctccccaattccagccctttgccctctcggtcagggttggccaggcccagtcacaggggcagtgtcaccctggaaaatacagtgccctgccttcttaggggcatcagccctgaacggttgagagcgtggagccctccaggcctttgctctcccctctaggcacacgcgcacttccatctctgccccatcccaactgcaccagcactgcctcccccagggatcctctcacatcccacactggtctctgcaccacccctctggttcacaccgcaccctgcactcacccacagcagctccatccactgggaaaactggggtttgcatcactccactgcacagtgttagtgggacctgggggcaagtcccttgacttctctgagcctcagtttccttatgtgaaagttgctggaaccaaaatggagtcacttatgccaaactctaataaaatggagtcggggggccacatagaagccctcacacacacatgcccgtaacaggatttatcacaagacacgcctgcatgtagaccagacacagggcgtatggaaagcacgtcctcaagactgtagtattccagatgagctgcagatgcttacctaccacggccgtctccaccagaaaaccatcgccaactcctgcgatcagcttgtgacttacaaaccttgtttaaaagctgcttacatggacttctgtcctttaaaagcttccccttggctgtggccctctgtgtatgcctgggatccttccaagcactcatagcccagataggaatcctctgctcctcccaaataaattcatctgttctggaaaaaaaaaaa

SEQ ID NO: 52 - DNA, 2504 bp, Homo sapiens
gtgaagaaggatgtggttgcttccccttccaccataactgatggaccccttcgaggacacgctgcggcggctgcgtgaggccttcaactgagggcgcacgcggccggccgagttccgggctgcgcagctccagggcctgggccacttccttcaagaaaacaagcagcttctgcgcgacgtgctggcccaggacctgcataagccagctttcgaggcagacatatctgagctcatcctttgccagaacgaggttgactacgctctcaagaacctgcaggcctggatgaaggatgaaccacggtccacgaacctgttcatgaagctggactcggtcttcatctggaaggaaccctttggcctggtcctcatcatcgcaccctggaactacccactgaacctgaccctggtgctcctggtgggcgccctcgccgcagggagttgcgtggtgctgaagccgtcagaaatcagccagggcacagagaaggtcctggctgaggtgctgccccagtacctggaccagagctgctttgccgtggtgctgggcggaccccaggagacagggcagctgctagagcacaagttggactacatcttcttcacagggagccctcgtgtgggcaagattgtcatgactgctgccaccaagcacctgacgcctgtcaccctggagctggggggcaagaacccctgctacgtggacgacaactgcgacccccagaccgtggccaaccgcgtggcctggttctgctacttcaatgccggccagacctgcgtggcccctgactacgtcctgtgcagccccgagatgcaggagaggctgctgcccgccctgcagagcaccatcacccgtttctatggcgacgacccccagagctccccaaacctgggccgcatcatcaaccagaaacagttccagcggctgcgggcattgctgggctgcggccgcgtggccattgggggccagagcaacgagagcgatcgctacatcgcccccacggtgctggtggacgtgcaggagacggagcctgtgatgcaggaggagatcttcgggcccatcctgcccatcgtgaacgtgcagagcgtggacgaggccatcaagttcatcaaccggcaggagaagcccctggccctgtacgccttctccaacagcagccaggttgtgaaccagatgctggagcggaccagcagcggcagctttggaggcaatgagggcttcacctacatatctctgctgtccgtgccattcgggggagtcggccacagtgggatgggccggtaccacggcaagttcaccttcgacaccttctcccaccaccgcacctgcctgctcgccccctccggcctggagaaattaaaggagatccactacccaccctataccgactggaaccagcagctgttacgctggggcatgggctcccagagctgcaccctcctgtgagcgtcccacccgcctccaacgggtcacacagagaaacctgagtctagccatgaggggcttatgctcccaactcacattgttcctccagaccgcaggttcccccagcctcaggttgctggagctgtcacatgactgcatcctgcctgccagggctgcaaagcaaggtcttgcttctatctgggggacgctgctcgagagaggccaagaggccgcagaacatgccaggtgtcctcactcaccccaccctccccaattccagccctttgccctctcggtcagggttggccaggcccagtcacaggggcagtgtcaccctggaaaatacagtgccctgccttcttaggggcatcagccctgaacggttgagagcgtggagccctccaggcctttgctctcccctctaggcacacgcgcacttccatctctgccccatcccaactgcaccagcactgcctcccccagggatcctctcacatcccacactggtctctgcaccacccctctggttcacaccgcaccctgcactcacccacagcagctccatccactgggaaaactggggtttgcatcactccactgcacagtgttagtgggacctgggggcaagtcccttgacttctctgagcctcagtttccttatgtgaaagttgctggaaccaaaatggagtcacttatgccaaactctaataaaatggagtcggggggccacatagaagccctcacacacacatgcccgtaacaggatttatcacaagacacgcctgcatgtagaccagacacagggcgtatggaaagcacgtcctcaagactgtagtattccagatgagctgcagatgcttacctaccacggccgtctccaccagaaaaccatcgccaactcctgcgatcagcttgtgacttacaaaccttgtttaaaagctgcttacatggacttctgtcctttaaaagcttccccttggctgtggccctctgtgtatgcctgggatccttccaagcactcatagcccagataggaatcctctgctcctcccaaataaattcatctgttctggaaaaaaaaaaa

SEQ ID NO: 53 - DNA, 3160 bp, Homo sapiens
attctcgccgcgcccgggcggacgatccagcgaacagccccgcttctaacccgagatgctgctgccggcgcccgcgctccgccgcgccctgctgtcccgcccctggaccggggccggcctgcggtggaagcacacctcctccctgaaggtggccaacgagcccgtcttagccttcacgcagggcagccctgagcgagatgccctgcaaaaggccttgaaggacctgaagggccggatggaagccatcccatgcgtggtgggggatgaggaggtgtggacgtcggacgtgcagtaccaagtgtcgccttttaaccatggacataaggtggccaagttctgttatgcagacaagagcctgctcaacaaagccattgaggctgccctggctgcccggaaagagtgggacctgaagcctattgcagaccgggcccagatcttcctgaaggcggcagacatgctgagtgggccgcgcagggctgagatcctcgccaagaccatggtgggacagggtaagaccgtgatccaagcggagattgacgctgcagcggaactcatcgacttcttccggttcaatgccaagtatgcggtggagctggaggggcagcagcccatcagcgtgcccccgagcaccaacagcacggtgtaccggggtctggagggcttcgtggcggccatctcgccctttaacttcactgcaatcggcggcaacctggcgggggcaccggccctgatgggcaacgtggtcctatggaagcccagtgacactgccatgctggccagctatgctgtctaccgcatccttcgggaggctggcctgccccccaacatcatccagtttgtgccagctgatgggcccctatttggggacactgtcaccagctcagagcacctctgtggcatcaacttcacaggcagtgtgcccaccttcaaacacctgtggaagcaggtggcccagaacctggaccggttccacaccttcccacgcctggctggagagtgcggcggaaagaacttccacttcgtgcaccgctcggccgacgtggagagcgtggtgagcgggaccctccgctcagccttcgagtacggtggccagaagtgttccgcctgctcgcgtctctacgtgccgcactcgctgtggccgcagatcaaagggcggctgctggaggagcacagtcggatcaaagtgggcgaccctgcagaggattttgggaccttcttctctgcagtgattgatgccaagtcctttgcccgtatcaagaagtggctggagcacgcgcgctcctcgcccagcctcaccatcctggctgggggcaagtgtgatgactccgtgggctactttgtggagccctgcatcgtggagagcaaggaccctcaggagcccatcatgaaggaggagatcttcgggcctgtactgtctgtgtacgtctacccggacgacaagtacaaggagacgctgcagctggttgacagcaccaccagctatggcctcacgggggcagtgttctcccaggataaggacgtcgtgcaggaggccacaaaggtgctgaggaatgctgccggcaacttctacatcaacgacaagtccactggctcgatagtgggccagcagccctttgggggggcccgagcctctggaaccaatgacaagccagggggcccacactacatcctgcgctggacgtcgccgcaggtcatcaaggagacacataagcccctgggggactggagctacgcgtacatgcagtgagcccctctcgggctccaccgtccagctgtctgtccgtccaggtggccgacctcactgcacagaccccactccagcccctccaccccttcttcatgcacagctgcctttctataatccgggcttgactcccttcttaccactgtattctggcctctcccatgcctcaggctctggtttgagatcgtgctggggaggaacatggccactaccccttatcccatcggccatgtgggaggtatgaccctggtgcctggcaggttctccctctgccctccactgggcccagtggctcagggacctggggaaaggagatggagcagctcttgggatcctttggggaaaaggaggccattctgggccccttggcaaacctcaccactcacagaggctcctggccttgatccctgcccctccaggtgtccagggtaaagtgtaactcagactgacctgtggggcacagggggcaccagctggccttgccctctctggtctgggctgtctaccttcctcactgtatctttgcccagacccacctgggccagtaggcccctgtccccagccacacaccttagatgctggcatgccttactccaggtgcctgtgtttggccgaggcctgtgtgattcccggtctgcaccacatggcggggttggggggccgctggaggccacctgccaaggcgtgggatgggatggtcctgccggtttaggccgtgattctggaaaaccttggatgggccttcgtcctatgtcagccttccctttgatcctcaggccctacctgtagagacctccactcctagagccagtctcagggtctgggatttccctgcaggagctcagccaccactgtgccatggtgacacaggccaaggcagacattggccctcccttctcccagcccccagaggcctggccttgggttcgtcagcatgggccgaggacgttgcctgtagaatcctcctctgcctgggagtggctctgtgtggaccagtccctcactggcccattctttttttgacgcagccaatctgtgaccacgattcctcccacagatgcctcctgcttggattctgagtggtcagagatctgtaaagcatgactttcaaggatggttcttaggggactgtgaaagtgttgggtcttcctccaggatgcctgcatgggaccccacccggagctggtgtggccattccccaagtgccactggcccatggatgggggtgggtgctggtgccagctgggctgggtgtgggttctgtgtccttccaggatatgtgtcatttcccatgaggggccggggcaggtggctgggtgggggcacaggctggagtattcttagttctactggttctacactgtgaggtggcaatgggatttgctcagatgccacccaataaaatgcctgttactt

SEQ ID NO: 54 - DNA, 2147 bp, Homo sapiens
attctcgccgcgcccgggcggacgatccagcgaacagccccgcttctaacccgagatgctgctgccggcgcccgcgctccgccgcgccctgctgtcccgcccctggaccggggccggcctgcggtggaagcacacctcctccctgaaggtggccaacgagcccgtcttagccttcacgcagggcagccctgagcgagatgccctgcaaaaggccttgaaggacctgaagggccggatggaagccatcccatgcgtggtgggggatgaggaggtgtggacgtcggacgtgcagtaccaagtgtcgccttttaaccatggacataaggtggccaagttctgttatgcagacaagagcctgctcaacaaagccattgaggctgccctggctgcccggaaagagtgggacctgaagcctattgcagaccgggcccagatcttcctgaaggcggcagacatgctgagtgggccgcgcagggctgagatcctcgccaagaccatggtgggacagggtaagaccgtgatccaagcggagattgacgctgcagcggaactcatcgacttcttccggttcaatgccaagtatgcggtggagctggaggggcagcagcccatcagcgtgcccccgagcaccaacagcacggtgtaccggggtctggagggcttcgtggcggccatctcgccctttaacttcactgcaatcggcggcaacctggcgggggcaccggccctgatgggcaacgtggtcctatggaagcccagtgacactgccatgctggccagctatgctgtctaccgcatccttcgggaggctggcctgccccccaacatcatccagtttgtgccagctgatgggcccctatttggggacactgtcaccagctcagagcacctctgtggcatcaacttcacaggcagtgtgcccaccttcaaacacctgtggaagcaggtggcccagaacctggaccggttccacaccttcccacgcctggctggagagtgcggcggaaagaacttccacttcgtgcaccgctcggccgacgtggagagcgtggtgagcgggaccctccgctcagccttcgagtacggtggccagaagtgttccgcctgctcgcgtctctacgtgccgcactcgctgtggccgcagatcaaagggcggctgctggaggagcacagtcggatcaaagtgggcgaccctgcagaggattttgggaccttcttctctgcagtgattgatgccaagtcctttgcccgtatcaagaagtggctggagcacgcgcgctcctcgcccagcctcaccatcctggctgggggcaagtgtgatgactccgtgggctactttgtggagccctgcatcgtggagagcaaggaccctcaggagcccatcatgaaggaggagatcttcgggcctgtactgtctgtgtacgtctacccggacgacaagtacaaggagacgctgcagctggttgacagcaccaccagctatggcctcacgggggcagtgttctcccaggataaggacgtcgtgcaggaggccacaaaggtgctgaggaatgctgccggcaacttctacatcaacgacaagtccactggctcgatagtgggccagcagccctttgggggggcccgagcctctggaaccaatgacaagccagggggcccacactacatcctgcgctggacgtcgccgcaggtcatcaaggagacacataagcccctgggggactggagctacgcgtacatgcagtgagcccctctcgggctccaccgtccagctgtctgtccgtccagatgcctcctgcttggattctgagtggtcagagatctgtaaagcatgactttcaaggatggttcttaggggactgtgaaagtgttgggtcttcctccaggatgcctgcatgggaccccacccggagctggtgtggccattccccaagtgccactggcccatggatgggggtgggtgctggtgccagctgggctgggtgtgggttctgtgtccttccaggatatgtgtcatttcccatgaggggccggggcaggtggctgggtgggggcacaggctggagtattcttagttctactggttctacactgtgaggtggcaatgggatttgctcagatgccacccaataaaatgcctgttactt

SEQ ID NO: 55 - DNA, 6222 bp, Homo sapiens
gggggcggcagcggtggtagcagctggtacctcccgccgcctctgttcggagggtcgcggggcaccgaggtgctttccggccgccctctggtcggccacccaaagccgcgggcgctgatgatgggtgaggagggggcggcaagatttcgggcgcccctgccctgaacgccctcagctgctgccgccggggccgctccagtgcctgcgaactctgaggagccgaggcgccggtgagagcaaggacgctgcaaacttgcgcagcgcgggggctgggattcacgcccagaagttcagcaggcagacagtccgaagccttcccgcagcggagagatagcttgagggtgcgcaagacggcagcctccgccctcggttcccgcccagaccgggcagaagagcttggaggagccaaaaggaacgcaaaaggcggccaggacagcgtgcagcagctgggagccgccgttctcagccttaaaagttgcagagattggaggctgccccgagaggggacagaccccagctccgactgcggggggcaggagaggacggtacccaactgccacctcccttcaaccatagtagttcctctgtaccgagcgcagcgagctacagacgggggcgcggcactcggcgcggagagcgggaggctcaaggtcccagccagtgagcccagtgtgcttgagtgtctctggactcgcccctgagcttccaggtctgtttcatttagactcctgctcgcctccgtgcagttgggggaaagcaagagacttgcgcgcacgcacagtcctctggagatcaggtggaaggagccgctgggtaccaaggactgttcagagcctcttcccatctcggggagagcgaagggtgaggctgggcccggagagcagtgtaaacggcctcctccggcgggatgggagccatcgggctcctgtggctcctgccgctgctgctttccacggcagctgtgggctccgggatggggaccggccagcgcgcgggctccccagctgcggggccgccgctgcagccccgggagccactcagctactcgcgcctgcagaggaagagtctggcagttgacttcgtggtgccctcgctcttccgtgtctacgcccgggacctactgctgccaccatcctcctcggagctgaaggctggcaggcccgaggcccgcggctcgctagctctggactgcgccccgctgctcaggttgctggggccggcgccgggggtctcctggaccgccggttcaccagccccggcagaggcccggacgctgtccagggtgctgaagggcggctccgtgcgcaagctccggcgtgccaagcagttggtgctggagctgggcgaggaggcgatcttggagggttgcgtcgggccccccggggaggcggctgtggggctgctccagttcaatctcagcgagctgttcagttggtggattcgccaaggcgaagggcgactgaggatccgcctgatgcccgagaagaaggcgtcggaagtgggcagagagggaaggctgtccgcggcaattcgcgcctcccagccccgccttctcttccagatcttcgggactggtcatagctccttggaatcaccaacaaacatgccttctccttctcctgattattttacatggaatctcacctggataatgaaagactccttccctttcctgtctcatcgcagccgatatggtctggagtgcagctttgacttcccctgtgagctggagtattcccctccactgcatgacctcaggaaccagagctggtcctggcgccgcatcccctccgaggaggcctcccagatggacttgctggatgggcctggggcagagcgttctaaggagatgcccagaggctcctttctccttctcaacacctcagctgactccaagcacaccatcctgagtccgtggatgaggagcagcagtgagcactgcacactggccgtctcggtgcacaggcacctgcagccctctggaaggtacattgcccagctgctgccccacaacgaggctgcaagagagatcctcctgatgcccactccagggaagcatggttggacagtgctccagggaagaatcgggcgtccagacaacccatttcgagtggccctggaatacatctccagtggaaaccgcagcttgtctgcagtggacttctttgccctgaagaactgcagtgaaggaacatccccaggctccaagatggccctgcagagctccttcacttgttggaatgggacagtcctccagcttgggcaggcctgtgacttccaccaggactgtgcccagggagaagatgagagccagatgtgccggaaactgcctgtgggtttttactgcaactttgaagatggcttctgtggctggacccaaggcacactgtcaccccacactcctcaatggcaggtcaggaccctaaaggatgcccggttccaggaccaccaagaccatgctctattgctcagtaccactgatgtccccgcttctgaaagtgctacagtgaccagtgctacgtttcctgcaccgatcaagagctctccatgtgagctccgaatgtcctggctcattcgtggagtcttgaggggaaacgtgtccttggtgctagtggagaacaaaaccgggaaggagcaaggcaggatggtctggcatgtcgccgcctatgaaggcttgagcctgtggcagtggatggtgttgcctctcctcgatgtgtctgacaggttctggctgcagatggtcgcatggtggggacaaggatccagagccatcgtggcttttgacaatatctccatcagcctggactgctacctcaccattagcggagaggacaagatcctgcagaatacagcacccaaatcaagaaacctgtttgagagaaacccaaacaaggagctgaaacccggggaaaattcaccaagacagacccccatctttgaccctacagttcattggctgttcaccacatgtggggccagcgggccccatggccccacccaggcacagtgcaacaacgcctaccagaactccaacctgagcgtggaggtggggagcgagggccccctgaaaggcatccagatctggaaggtgccagccaccgacacctacagcatctcgggctacggagctgctggcgggaaaggcgggaagaacaccatgatgcggtcccacggcgtgtctgtgctgggcatcttcaacctggagaaggatgacatgctgtacatcctggttgggcagcagggagaggacgcctgccccagtacaaaccagttaatccagaaagtctgcattggagagaacaatgtgatagaagaagaaatccgtgtgaacagaagcgtgcatgagtgggcaggaggcggaggaggagggggtggagccacctacgtatttaagatgaaggatggagtgccggtgcccctgatcattgcagccggaggtggtggcagggcctacggggccaagacagacacgttccacccagagagactggagaataactcctcggttctagggctaaacggcaattccggagccgcaggtggtggaggtggctggaatgataacacttccttgctctgggccggaaaatctttgcaggagggtgccaccggaggacattcctgcccccaggccatgaagaagtgggggtgggagacaagagggggtttcggagggggtggaggggggtgctcctcaggtggaggaggcggaggatatataggcggcaatgcagcctcaaacaatgaccccgaaatggatggggaagatggggtttccttcatcagtccactgggcatcctgtacaccccagctttaaaagtgatggaaggccacggggaagtgaatattaagcattatctaaactgcagtcactgtgaggtagacgaatgtcacatggaccctgaaagccacaaggtcatctgcttctgtgaccacgggacggtgctggctgaggatggcgtctcctgcattgtgtcacccaccccggagccacacctgccactctcgctgatcctctctgtggtgacctctgccctcgtggccgccctggtcctggctttctccggcatcatgattgtgtaccgccggaagcaccaggagctgcaagccatgcagatggagctgcagagccctgagtacaagctgagcaagctccgcacctcgaccatcatgaccgactacaaccccaactactgctttgctggcaagacctcctccatcagtgacctgaaggaggtgccgcggaaaaacatcaccctcattcggggtctgggccatggcgcctttggggaggtgtatgaaggccaggtgtccggaatgcccaacgacccaagccccctgcaagtggctgtgaagacgctgcctgaagtgtgctctgaacaggacgaactggatttcctcatggaagccctgatcatcagcaaattcaaccaccagaacattgttcgctgcattggggtgagcctgcaatccctgccccggttcatcctgctggagctcatggcggggggagacctcaagtccttcctccgagagacccgccctcgcccgagccagccctcctccctggccatgctggaccttctgcacgtggctcgggacattgcctgtggctgtcagtatttggaggaaaaccacttcatccaccgagacattgctgccagaaactgcctcttgacctgtccaggccctggaagagtggccaagattggagacttcgggatggcccgagacatctacagggcgagctactatagaaagggaggctgtgccatgctgccagttaagtggatgcccccagaggccttcatggaaggaatattcacttctaaaacagacacatggtcctttggagtgctgctatgggaaatcttttctcttggatatatgccataccccagcaaaagcaaccaggaagttctggagtttgtcaccagtggaggccggatggacccacccaagaactgccctgggcctgtataccggataatgactcagtgctggcaacatcagcctgaagacaggcccaactttgccatcattttggagaggattgaatactgcacccaggacccggatgtaatcaacaccgctttgccgatagaatatggtccacttgtggaagaggaagagaaagtgcctgtgaggcccaaggaccctgagggggttcctcctctcctggtctctcaacaggcaaaacgggaggaggagcgcagcccagctgccccaccacctctgcctaccacctcctctggcaaggctgcaaagaaacccacagctgcagagatctctgttcgagtccctagagggccggccgtggaagggggacacgtgaatatggcattctctcagtccaaccctccttcggagttgcacaaggtccacggatccagaaacaagcccaccagcttgtggaacccaacgtacggctcctggtttacagagaaacccaccaaaaagaataatcctatagcaaagaaggagccacacgacaggggtaacctggggctggagggaagctgtactgtcccacctaacgttgcaactgggagacttccgggggcctcactgctcctagagccctcttcgctgactgccaatatgaaggaggtacctctgttcaggctacgtcacttcccttgtgggaatgtcaattacggctaccagcaacagggcttgcccttagaagccgctactgcccctggagctggtcattacgaggataccattctgaaaagcaagaatagcatgaaccagcctgggccctgagctcggtcgcacactcacttctcttccttgggatccctaagaccgtggaggagagagaggcaatggctccttcacaaaccagagaccaaatgtcacgttttgttttgtgccaacctattttgaagtaccaccaaaaaagctgtattttgaaaatgctttagaaaggttttgagcatgggttcatcctattctttcgaaagaagaaaatatcataaaaatgagtgataaatacaaggcccagatgtggttgcataaggtttttatgcatgtttgttgtatacttccttatgcttctttcaaattgtgtgtgctctgcttcaatgtagtcagaattagctgcttctatgtttcatagttggggtcatagatgtttccttgccttgttgatgtggacatgagccatttgaggggagagggaacggaaataaaggagttatttgtaatgactaaaa

SEQ ID NO: 56 - DNA, 2707 bp, Homo sapiens
catctttgagcaagatgggtctctaccgcatccgcgtgtccactggggcctcgctctatgccggttccaacaaccaggtgcagctgtggctggtcggccagcacggggaggcggcgctcgggaagcgactgtggcccgcacggggcaaggagacagaactcaaggtggaagtaccggagtatctggggccgctgctgtttgtgaaactgcgcaaacggcacctccttaaggacgacgcctggttctgcaactggatctctgtgcagggccccggagccggggacgaggtcaggttcccttgttaccgctgggtggagggcaacggcgtcctgagcctgcctgaaggcaccggccgcactgtgggcgaggaccctcagggcctgttccagaaacaccgggaagaagagctggaagagagaaggaagttgtaccggtggggaaactggaaggacgggttaattctgaatatggctggggccaaactatatgacctccctgtggatgagcgatttctggaagacaagagagttgactttgaggtttcgctggccaaggggctggccgacctcgctatcaaagactctctaaatgttctgacttgctggaaggatctagatgacttcaaccggattttctggtgtggtcagagcaagctggctgagcgcgtgcgggactcctggaaggaagatgccttatttgggtaccagtttcttaatggcgccaaccccgtggtgctgaggcgctctgctcaccttcctgctcgcctagtgttccctccaggcatggaggaactgcaggcccagctggagaaggagctggagggaggcacactgttcgaagctgacttctccctgctggatgggatcaaggccaacgtcattctctgtagccagcagcacctggctgcccctctagtcatgctgaaattgcagcctgatgggaaactcttgcccatggtcatccagctccagctgccccgcacaggatccccaccacctccccttttcttgcctacggatcccccaatggcctggcttctggccaaatgctgggtgcgcagctctgacttccagctccatgagctgcagtctcatcttctgaggggacacttgatggctgaggtcattgttgtggccaccatgaggtgcctgccgtcgatacatcctatcttcaagcttataattccccacctgcgatacaccctggaaattaacgtccgggccaggactgggctggtctctgacatgggaattttcgaccagataatgagcactggtgggggaggccacgtgcagctgctcaagcaagctggagccttcctaacctacagctccttctgtccccctgatgacttggccgaccgggggctcctgggagtgaagtcttccttctatgcccaagatgcgctgcggctctgggaaatcatctatcggtatgtggaaggaatcgtgagtctccactataagacagacgtggctgtgaaagacgacccagagctgcagacctggtgtcgagagatcactgaaatcgggctgcaaggggcccaggaccgagggtttcctgtctctttacaggctcgggaccaggtttgccactttgtcaccatgtgtatcttcacctgcaccggccaacacgcctctgtgcacctgggccagctggactggtactcttgggtgcctaatgcaccctgcacgatgcggctgcccccgccaaccaccaaggatgcaacgctggagacagtgatggcgacactgcccaacttccaccaggcttctctccagatgtccatcacttggcagctgggcagacgccagcccgttatggtggctgtgggccagcatgaggaggagtatttttcgggccctgagcctaaggctgtgctgaagaagttcagggaggagctggctgccctggataaggaaattgagatccggaatgcaaagctggacatgccctacgagtacctgcggcccagcgtggtggaaaacagtgtggccatctaagcgtcgccaccctttggttatttcagcccccatcacccaagccacaagctgaccccttcgtggttatagccctgccctcccaagtcccaccctcttcccatgtcccaccctccctagaggggcaccttttcatggtctctgcacccagtgaacacattttactctagaggcatcacctgggaccttactcctctttccttccttcctcctttcctatcttccttcctctctctcttcctctttcttcattcagatctatatggcaaatagccacaattatataaatcatttcaagactagaatagggggatataatacatattactccacaccttttatgaatcaaatatgatttttttgttgttgttaagacagagtctcactttgacacccaggctggagtgcagtggtgccatcaccacggctcactgcagcctcagcgtcctgggctcaaatgatcctcccacctcagcctcctgagtagctgggactacaggctcatgccatcatgcccagctaatatttttttattttcgtggagacggggcctcactatgttgcctaggctggaaataggattttgaacccaaattgagtttaacaataataaaaagttgttttacgctaaagatggaaaagaactaggactgaactattttaaataaaatattggcaaaagaaaaaaaaaaaaaaaaaaaaaaaaa

SEQ ID NO: 57 - DNA, 1777 bp, Homo sapiens
agcaagagcctcctgatctagcagccaagactccccctgacctttggccatgtaccccaaccctctcatctactgcacctgctgggacccctggaacttgggaccacggaagctaatcaagacccctcaactaccacgcaagaactccacagggagttccaagctaactcctcttctaccagctccaaaaaatcacaattacctccaaccaacaaaacctgttgtttccccaaaaatgaaaatccattcagcaaggcaagaagagactaataaatcattttatgaagtgatcaacgtgtcacctggctatcaacttgttcggaatcgggaacagatttctgtcaccttaggggatgagatgtttgataggaaaaagcggtgggaatcggagatcccggacaaaggcagattttccaggaccaacatcatttctgacctagaagagcaaatctcagagctgacagcaataattgaacaaatgaacagagaccaccagtctgcccagaaattgctctccagtgaaatggatctccgctgtgctgagatgaaacagaactttgaaaacaagaacagggagctcaaagaggcccatgaagcagaactcagtgagttggagaacaactacaaagcagccttgaaggcagagaagttggctgcccaagagaagctagaggagatgggaaaagaatacaagtatttgaagaatatgtttcgtacgtatcaggacagtatttatgatgaaatggaagagaagtggtcaaaacagaaggcgaaatggaagaaggatgagaagttcgagcgagaaaatatcctgctacagcaaaaaaaaaagatgaccaaaaaattcgaaatggagtcaggagaagaagataagaaaataaatgaatcctgcagtgctgtctttgagaacttcattcaagagaaggaggagctcttgaaacaacatcaaagtgacaccttgcaattagaagagctgagaaaaaccaaagaggtgccctggagaagagaccaaataaatagacattggcatgatgtcctgcaacagcttcttcttatgcaggtcatgcaggaagaattgcatgcacaagcccttatcctagagtcactgaacacaaacctctactatacccagttggaactccagaaagagaaagctatagtgggaaatctggagaaaatgcttcaaaccaagtttgctgaaactgaagaaaagtataagcacaccatacagatcctgacggaagagaacattcatctgaagcaaaagataatttctaagaatgaagaaatttgtgaaggatgttctgggagattggcctctattactgtttctaaggatgattctgacactgtgcaagatggtagcaagaaaggacaagaatcataaacaaaaagttgctctgcattgttgaagatggttggcacaccatttctgtaggcccaggaaactcctgggagggttttcttgagaaaatgcatataatgagtttagttcttgggttgctctgactctctgaatgtctgaaaatgtttgaattctcatctgaatttcacagcttatcacggactcttcactgaaaaatgatgctctccatactgggagctgagctttctctgagttttgtactatttttcttctaccttgacgtatttcgttagaaagaaactgatttgaaggccttcttcatattgaacttttactatatttgggaggtgtacctttgtcccctggggcatttaggtagcaaaaaaagatgatgtgttgattttaaaaaat

SEQ ID NO: 58 - DNA, 5463 bp, Homo sapiens
gcggccgcgcgcaccagccccacggtggccacgcagacgggcgcgtccgcgacgtccacgcgaggcaccagccccacgcgcagcgccgcgcctggagctcgcgggagccccccacggccgccgccgccgccgccgctgctgggcaccgtgtcgtcgcccagctcgtcgcccacccacctgtggaccggcgaggtgagcgcggccccacccccagcccgcgtccggcatcggaggaggtctccggagcagagccgaagctcgccggagaagaggagccccagcgccccggtttgcaaagcaggtgacaaaacacgacagccttcttcaagcccctccagtattatccgacgcacttcctccctggatactcttgctgcaccgtatcttgctggacactggcctcgggatagccatgggcaagctgcaccttgcatgagggacaaagctacacagacagagagtgcatgggctgaagaatactctgaaaagaagaaagggtctcacaagcgctcagcatcttggggcagtacagatcaacttaaggagattgcaaaattacgccagcagttgcagagaagtaaacacagcagtcggcatcatcgagataaagaaagacagtctccatttcatggcaaccatgcagctattaaccagtgtcaggctcctgttccaaagagtgcacttattcctgtaattcccatcaccaaatcaacaggctcccggttccggaatagcgtggaaggattgaatcaggagattgaaataataattaaagagactggggaaaaggaagagcaacttataccgcaagatattccagatggccatcgtgctccacccccccttgtacagagaagtagcagcacgcgcagcattgacacacagacgcctggtggggcagacaggggaagcaacaacagcagccgttcccagtccgtgtccccaacatcgttcctcaccatttccaatgaaggtagcgaggagagtccttgctcagcggatgacctgcttgttgatcccagagataaagagaatgggaacaattctcctttgcccaaatatgcaacctcaccaaaacctaacaacagttatatgttcaaaagggaacctcctgagggctgtgaaagggtcaaagtctttgaggaatgctcgccaaaacagcttcatgaaatcccagccttttattgtcctgacaaaaacaaggtgaatttcattcctaaaagtggatctgctttctgcctcgtcagcatcctcaagccactccttcctaccccggatcttacactcaagggctctggccacagcctgacagtcaccactggcatgacaaccactctgctgcagcctattgctgtggcctccctgtctacaaacacagagcaagaccgagtctctcgaggaacaagtacagtcatgccatcagcttctctactcccaccaccagaaccaattgaggaagctgaaggataggtcacagtgcaacgtggctgttgttctgggaaattgggaacctcctcagatcactggattctgatggcatcgtgcgcttctggtcggctgtgatgtgctccagctttccagtgacatgtgacggcgaggcttctggaagaaaggatcccccgtgacggctctgccccacttgtgaacgccaaccctcagtgcttagcctgctttttatcaaagcactgattgaaacaagaaaggtctcattctttacctttggagagacaatatcacgtttttgttttcgaattagacttctttaaaacacacacacacacacacacacacacacacacacacacacacacacccctgatccttgccaacatgattcctaaagggagatgtgactgatgctgcaagaaccatcttttctatgaaaatgactattttataatataccaatgttacattttctgaaacgtagcaaacaggatattcaaaagattctttggtggcctctgtttcttgttccctttctagatgtgtgcttttctcagctgttttcagctttgggaccaaagggattgttgacgttttcccagcaatcttaatctcatgactatgttcttctcccaaacaaggattgataggtaaatgcattgaacaagtatatataaaaagagattaaaaagcaatattcgtacattatgtgatttatgtttttgatgtcaaaagtttgtgctttgggtgaaatatttgtataactgctgttttcttcactactcctgtacacatttcaccatgtggtcagaaaagttgtagtctgaagacaagtgctttaatatgttctcacccatattggaacttgatttaaaagtcagtgagccaaaaggaagctatccagcgttgattgctagctaagagtaaggagcccctttggttttctgtgatatatatatatatcacacgctctccctcctttaccacaggtgtcattctacctttaatcatcactgtatcatagccccaaagagatcctgaaatggctgtgcatggatttcctcctttgcccttgtgatgttgttgtcttgtggatttggttgggctagtagtttgccaggagtgtaatccagtggatagtgatccaaactgtagccgcagaatcctgtgactgacatttttctttgtggtggtggttggccctgagatttgttgcctacagattttgctaatttacccccctaacgcttcacatagtggggaaaatacacaagaagaacttgagtatgaacgataagcacctttgaaaactccatacagttttggattagggctcatcctaatataaatcactgccagtatcacatgacatcagtatgtgatttctgggtatgtggtagtgagattaaggagcagcttttttttttttttttttttgagacggagtttcactcttgttgcccaggctggagtgcaatggcgcaatctcggctcactgcgacctctgtctcccaggttcaagcagttctcctgcctcagcctcccaagtagctgggattacaggcatgcaccaccacacccagctaattttgtatttttagtatatatggggtttcaccatgttggtcaggctgttcttgaactcctggcctcaggtgatctgctcgtcttggcctcccaaagtgctgggattacaggtgtgagccaccacgcccatccaggagcagctctttttttaaaagtgagtttcagcaaacagtattgaataaaagcatccttttcatatcttcatatactactttatgatgcaataatttactgttcctatacatattataaggtagaaaaaagtttttaaatccttataaagaggatgcagtttagaaggttaatatgtcagcttacccagacatattctatcaaggaaaacctagtggtagcaataaatctttggaaaggacttcttatactcatgtacctttaaaacatctaagcaatttaaaataatccctgttgagtttaaattcgagatgcatttaggtaaattggataaattcaacatttgaataaatccgtcaggttttagatggtgggattgatgaactttggtactttctcaatccaaaactaatttatttggaactagtacgttatggcttctcagtcatgaaaagctcagttatttggggtctacattttctcactgagagccttgatattttgccttctttgttatgcattataacttgactgtatcaccactgagtatctgctgtatcagaagttcagaagaaaaggtaaaactgaaatcagaatgggggtagaggaagttaaaaacaagttatttaaaaagaactcttggtttttggatgacttgaattctgttaaatctgtgttcttggccttgcacttccgttcctcttccatctctatccctgctagtcacaatggcattttagaactagaatgccactctgtagaggttttcccttttgctctgttgtgcctatttgtctaattcatatctttctgtggagtttcatatgtccttaatctaaagtaacttaaaattggaatggaagaacaagtttcagaattatttacagtcttatacatagaacttctagtgtaatgtttggttgtaaggagaatgtgaatttgcaggtaaatgaattgtatggcaaccagacagatccctggggtttgggagaaatagagcttgagatttgaaaaaaaggtacaaggtacaaaacaactctaactgccagtgccaaagggctaatttttaagcatgtaagctttaccacagtcttgaaaaaaatattaaccataggttcattcagctgttttatttaacccttagttccctggtggttgattttttttttaaatgggtctccagctttccagtgaaatgtgacactctcaatagaatgcataatgttggtttctaaagttacactccataattattgttattctgtagaaaactgtacagaaggtaaatagaatagcttcaatgggaatataatttaaatttttttaattttataaaaatttatttccattgcattaaaagaaatgggtagcatgtgtctttcagagaaaggagctatttggttattcactttgtcaatcttaggtttttttaaatctttaaacaatttcttctttgtgatgataaaaataatataaatttactgtttctgatcatgactgagtctattacttgtcatggcttttgtacgcaactgtgttttaaaaataccggttttgcctctttggttacatgtggtgagcatggatgtcaagattatttttcaactagattattcaatttgttttatatttcttatacttaatacttatgactacagtccaaatcagtcttttagaaggtgctcttgctaactgtggaatatttgacgacatgaaagtcctttttctttgctttcagtggttggctttcactgaaagaaagtgtaaaaaaagtcagaatttatagctttcactatgtccaagactaggactgggttataaagattttcttttgtgaaggaaaataaaagaaaatttgccactactgcatttactttactattgtaaacttaagattcattccttagtctttggaattttgatgtctcaaaaccagatgagtggaagtgctgaatttgcaaaataaagctaagaatgcttaactctgcactttaagttctactctgaccaaattgaagatgagcagagcagccctgaacagcattttgtttatacagtcttgtttaagaatagaatttttttaactcttcattttttgtctctgtggaagctgtgtaactctttttaaaatgcaatttaaaacattttgttattctaacaattctctcaaaaaacagcatttccaatggtaatcggtattgttacgctgtacttatgtattccctgtacctgaacacttgttgctgcctcacaagaaaatagaacttttatgttaaaaataaagtctgttcttcttga

SEQ ID NO: 59 - DNA, 6470 bp, Homo sapiens
cgcagaaccgaggtcgccgagtgatgatgttgtgaagtcgcccgcctgtccctgccacgcccgggcggttgctggcagtgggagcagcggcagcagcttcggctgctgctttcaggctgccgctgcattaggggcttcctgaggaaacgcgggcggacgacagaggatgccgaaccactccagtcatgactgtccaaagtatgataatcacatgagagtgctcgttgctacggatgtcatttgactcatcagagaaaatctgtctaaaagaaaatatccatgtgaccaaatccatttcattattgaatggcttgatggatttcctttactctgattcataccaaagctgtccttctcaaccaaagcaagaaaggatcctgcatgagtcaatcccagaatgcaatttttacatcaccaacaggtgaagaaaacctcatgaatagcaatcacagagactcggagagcatcactgatgtctgctccaatgaggatctccctgaagttgagctggtgagtctgctagaagaacaactaccacagtataggctaaaagtagacactctctttctatatgaaaatcaagactggactcagtctccacaccagcggcagcatgcatctgatgctctctctccagtccttgctgaagagactttccgttacatgattctaggcacagacagggtggagcagatgaccaaaacttacaatgacatcgacatggttacacatctcctggcagagagggatcgtgatctggaactcgctgctcgaattggacaagctctcttaaagcggaaccatatcttatctgagcagaacgaatccctggaggagcaattgggacaagcctttgatcaagttaatcagctgcagcatgagctatgcaagaaagatgagttacttcgaatcgtctccattgcttctgaagaaagtgaaactgattccagctgttctacacctcttcggttcaatgagtcctttagcttatctcaagggttgctgcagttggaaatgctgcaagaaaagctcaaggaactggaagaagagaatatggctcttcgatccaaggcttgtcacataaagacagaaactgttacctatgaagaaaaggaacaacagcttgtcagcgactgtgttaaagaacttcgtgaaacaaatgctcagatgtccagaatgactgaagaattgtcagggaagagtgatgagctgattcgataccaagaagagctttcctctcttttgtcacagattgtagaccttcagcataaacttaaagaacatgtgattgagaaggaagaactaaaacttcacctgcaagcttccaaagatgcccaacggcaactgacaatggagctgcacgagttacaagacaggaatatggagtgtctaggaatgttacatgaatcccaagaagaaataaaggaacttcgtagtagatctggccctactgctcatctctacttctcccaatcatatggagcttttactggggaatctttggcagctgagattgaggggactatgcgtaaaaagctgagtttggatgaggaatcttctctctttaaacaaaaagcccaacagaagcgggtatttgataccgtcaggattgccaatgacacacggggccgctctatctcattcccagctctgttacccattccaggctccaaccgttcaagtgtcatcatgacagcaaaaccttttgagtctggtcttcagcaaacagaggacaaatcactcctgaaccaggggagcagctcagaggaggttgcagggagctcccagaagatgggccaaccaggaccctcaggagatagtgatttggctacagcactgcatcgccttagcttgcgtcgacaaaactatttaagtgagaagcagttctttgctgaagaatggcagcggaagatccaggttctggcagaccagaaggaaggagttagtggctgtgtcaccccgacagagagccttgcctctctctgcaccacccagtcagagatcacagacctcagcagtgccagttgccttcgaggttttatgccagaaaaattacaaattgtcaagccccttgaaggatcacaaactctgtatcactggcagcagcttgctcaaccaaacttgggaaccatccttgatccacgaccaggtgtcattactaaaggctttacccagttgcccggggatgctatttatcacatctcagatttagaagaggatgaagaggagggtattacttttcaggttcagcaacctcttgaagtggaagagaaactttcaacatccaagccagtaacagggatcttcctgccacccattacttcagcaggtggaccagttacagttgcaaccgccaacccaggaaagtgcctgtcgtgcacaaactcaacattcactttcaccacctgtagaatattacatccctctgacatcactcaggttacccccagctctgggttcccttcattatcctgtggaagtagcggtagcagttcatccaacacggctgtgaattctcctgccttgtcctatagactcagcattggtgagtccatcaccaaccgacgagattccactacaaccttcagtagcaccatgagcttggccaaacttctacaagagcgaggcatctctgccaaagtgtaccacagcccaatttcagagaaccccctccagcctctccctaaatccctggctatcccttccacaccaccaaattcaccatctcactcaccttgcccttctcctttaccctttgagcctcgagtgcatctctctgaaaattttttggcctctcgaccagctgagacattcctccaggagatgtatggcttgagaccctcccggaaccctcctgatgttggccagttgaagatgaacttagtggacaggctgaagagactggggatagccagagtggtcaagaaccctggtgcccaagagaatggaagatgccaggaggcagaaattggtcctcaaaaaccagattctgctgtttatttaaattcaggtagcagtttattaggtggactaaggaggaatcagagtcttccagtcataatgggtagctttgctgccccagtttgcacatcctcacccaaaatgggtgtcctgaaggaggactgaggttcagcagttaactgaccttttatacaagttagcacatgaaggatagatatgcactgaaacatgtggtctggtctgacttgagagaaaaggaatgttgcacaagggttgtgaatgtgaaagggggaatggaggaatggaaataaaattgggatgagccctaatggaggaagtcgggcaaattgaaagtataaatgaatgggccatgagtgttcagagggagaaaagaaaggtttaatatactccttcagttgagttttcttgtcttgaacataaaaagtgaatacaaataaattcagtaatactaaaacatacagagatactgaacttgctggcacatttacttctggtaagcataaagcagagagaacccaggttagaaggatgggaagagaaaaggagcagttttattgcttatagaaagccgttctgaggggttggtggggtaagctcagtctattactgagacaatagtgagatggcttatatgtttcccctgttaatatctggttaaattatgtatccatcaaatggtatgctcgcagcattagcaaaattaggagtttcatctttttcattgaatcacaggtggagactcctattttcctttctgttttcaggcctttgagcccctgggagcccaaataccactcaattattttgtatttatgattaataaaagttcattttttaaatttgtatttttatacaacctccaaaaaaaaaaacaactgggtagagggtgggagggatttacttttaagaggcaaaatgtgagtaaattgaaaccaagaaaacttgtttttagaatatttcgtctgaataagtacagtagccaaggaatacaaacctaattgcatgtttttaaaaattccttggaggctggaaggggttaagccagaagtgcaatcaataggaattagggaatgttgtatatttatatatgtaaactttttttgtaagaaaagttggtgacaactaaaccaactttttccaaagtgcgctatgcatatttttaatgaaagatgacatgtatttgcacaaaaattctcaggcacattaaattattgtaaactgaagtaaaacccgggtgcttgctttgagattgtggttttttcttcctaatgtaaaataaaataaaacacatctgccttcttgatatttatagaattagagaataaactttttaatgggggagtcaaagctttttctttttctctaaggttcttttttttattcaaactgtatgaaatggcaaagtgaggctctggggttagatttcagcattcagcagttgacacaggctaagaaatggaaagaagtagatctgttttttctcaatgttgctgagcaaagtctgcttctcatcagatgacgtggctttgtctagacagcacgcagttcagaaagaaatgtctttatacaaaagacatgatagagaaaagatgagagaggggactaattattttgtttatgaaaatggcaagtaaattacttgatctttttggtgcttaatttgcaaatgttttgttcctttgtcctgacttaaaggcagttttctgaagaactcttgactcttgctcctatggttcccataggcacacctattcccaggccaaggagagtccttcctctccccttttgaggcatccccgccatccccccacttagagctatgtgctcaaaaagccaacatgaatgcagtggtaaaaatttgttagtttcttatactttttagaatctctcaataaaatttttctaaataaattccacaaaaacaaagggtgaagatggtctctccctttcgttccccttcactcagttgtgctgaggtcaatagagtgtagagtttcagaaaggattccagcaggtttatatgtgaatataagtgtccctgaatggggcaggcattaaatagaagaatccctgctgtttaaatttcccgcatattccaattcacttttaaaaaataccatttgaatttgtatttcataaagtgactctggggtgcttactttagtcaattcttaaaattttttatttgttccctaagaaagtaattactgtttctgttgcctggacagttacagtttccaggaaacatcaggaagtaggaaactgtagggccagagagtagtacaacgttaaattgtccgatttatgtgtattacttaaagctataaattgaactagatcttgccgtgctctgtattgagtataatttgtatacttttttataattaatgactaaatgatcactttggaggcagggtggtgggggtgtattagcagccaaataagcatatctgatcaaaaagaaccaggcttagattttttttaagtacattgatgttgatgttccaccagaaacaccttaagtgtatactgttgtgtaatgtctctagaaaggaatcctgtcttaaaactgggttttgctgttttttgaagtttctacctaaaatcatttttggtatatcctgataatctctataatactagaattgtctgcaaaatatagtaagaagaattggagcctaatagctgattcctcccaatttatctgttatgttttgtcactattcacattttagtcttttctacgataaaaattgtatgtgtactttcatgccagtataggaaacctcaatcttttttttttttcgcctttaagaaggttttcagtgattatacctcaggtatttctgagtgtcctattgtctaataggagaaatatcttcccgagctcagaattaaaagttctcctaaattatgaagatcccaaatcttatgtaaataaccttaggcatgagtccttagggagaagttaatgaccattgttaaagtgcttttttagaaaatgttgtgctgtatgttcttgatttgacataaatgaatagactttggcaagggaggaaataagttaaaaggcagcttacaagagcctattccctataaagggtataattttacacagtactcaaagcttgttatcttttctgaccattttagtacagaattagtacttggtggttactaacatcaacttgtgacatctagaactagggctcttagtgtttagtgggccacttctctgatgtcagatgcatgcagacctgtactccacatgcaacccaacagcagtgcagtgtgataactgagcggtcgcatggcagaggacatccccctcagagtgggcacaagtgccctctagggcagccaggggaatactattgttcgatacctgggatttgactttgtcaaacagctctttgtgcccctatctttgttttgtcaaatgtagatcagttaataaacatgagtagcttgaattttcaaaaaaaaaa

SEQ ID NO: 60 - DNA, 3444 bp, Homo sapiens
tacagagttgcttgctgcggtgcagacctcgttcggatttaagcgcttcgtacataaaatacgaaatccgattcgtggcaacctaactaaaaatacaaacgagagatatacgggaagcggcgatttgctacatttgtggtttggcaacgtcttttgttttcgaattcggttttttcggtggcccgcggttaaacttgaaaataagctgactcagcaaagccagatacaagatacttatgcagatgcgagctcagagctgcagatagacaacagtgaaatgagataagagtggccatatacacatcgataagctttatttatattgccctggattaaatatatctaaagacatctcgattgtggccgtcaacatgtcgtgctaagctgcgactaatcagctgaacccagatcgcatatcacctatcagacctacaaaccaaagatgctggacaagacgaccagctcatccgtgtcggtgtccacctcctgctgcagttcgaatgccatcaatgcggacctggactacgatgtgcccgtctcccgccgcatcctcatcaaatcgaaactttacgccaaggccatttacgataattatgcggacacgtcggacgagctgcccttcaagaagggtgatattctcacagtccttgagcaggacacggagggcttccagggttggtggctctgctctctgcgcaaccgacagggtctttgcccgggcaaccggttgcgcgtcttgaactcgtacgactcgggatgcttctctccttcgccggccagttctccagttccgtccctggcggccagcacggccacgctggatagctccatctgctcggcggagatatacgagaacggttccgtcatcagtgcggtatcgtcctcaaactcaaattcgggaggggctagtagtggactcggatcggagtcggtgtctcgtgtctcgaggagatcgtggcacgcctcgccgacaaaggtaatcacaccacagcgacacggtgatgtatacatctacaattactcgccaggatcagcgactggatctggagcaagagccgcgcccagcacgccgcagcagcagatctatagcaaccaaagcatctaccagaactttgcaatgatgtccagtcctcgccaaaacgcaagtggcagcgagtttgagacctatgacatacccaagccggccacgcccgttccgctgaactacgacagtcccagaagcggtcttccgaaggcttctaactctacaacgacctccagctccagcctaggcacccggtttgagacactcaagagcgtggccgcatccattgcggaggagtcttacgatgtgccacgacccctgatcttaggcagcaaccagctccagcagcaaatgtcacagatgacgccaagcagttccgcctcctcactgctgaccagcgacagcctctccctgagcttttccagctcgaaccgttcatcgctggccaacatgccggattacgacatccctcgacgaaatccgcttcctgtgcgccgtcaacaaagtgggctgacctacgactttccgctgcctccgttgcaggagcaggttccgcgggtgctgtgcacaccctctaccgtcaccactaccaaagaactgcctctagagctctcctccgcactagaaacactcgcaaagctgcaactgcagactactgcggccattaatcgattgctaagtttcgtagtacccaattggcgcacccgcgctcaactcgagccggccatcatggatctgaagctggccgccctgcgtctgcgcacaacactccacgacctggcagagttcggggagggagccctgggaaacgccacgcgttcggaggaccgaaacctggccctcaagctgcggcccttggtgcgggctttgcgagatgccaacaagctgattcacgactcttccgaatccctcgatgcccagggagcctggtctatagatcagctggccagaagcgacgagaagcacggctgccgacccccggacgcactggaccaactgatggtttgtgcccagacgctcactgaggacgtgcgctcaaccaccagtttcatacagggcaacgcctcgctactttttaagcggcagctgacggtgggtcacaacggaggatcaggaacgggagtgttagagggcagtcggggcagcgctgaatggttggaggactacgactatgtggcctttgagtccaaggatgcagctgccaggaaaaacgaggcgctacgtgaggctattcccgccgacctgaaaacgcagttcgatacggttatccggactgctgagagttcagccatgggcgctgggtctggatcaattccaaccacgcccacggcacgcacgacacctactacgccctgcaagtcgccagagatgaccgacaaagacaagaagctggtgcgctactatgcccaacagatctctactcatatgggaaacttgatgcaggccattgattccttcctggagacagtagaaaagaaccagccgcccaagttcttcattgcatacggaaagtttgtggtcgtgagcgcccacaacttggtgaccataggcgacaacgtttaccgaaatatttcgaaggaggcactgcgggagaaaatcctgcgctgcaccaacgccctctccgatgccctaaaaacgtgcgtcttgaagtcaaagaaggcggcagcccacttccccagcggtagtgcagtccaggaaatggtcgattcggtggtccacatcaacaacctagcccgggacctcaagtcggtcatgctgcaggcagttcatctgtcaacggcggcaggagtgggtgcatgaatggatttcagacaaccagtattagttgagaggcgtgtagccaggtcttccagcattgtccgcggtttggtagatgtagcacatgcattgcatgtgtatctgacatcgacatatcctggcatcagcaaccgagcgccaattgccgcttatattttgcattgtgatattttgagcaaaacatctgaaaatgcacagcaccacagccacaatcgcccgatcgccatcccggccagaactcaggttcgggcaagcataagttacgatattgtacataggacgatgtaaattagcgtattcccaaacccctgtcatgtccgctagcaatattgtattagtgaagcatttcaacatagttttgtatacttatatactctatactctagagcataaacttagccgtaccaccacataaacatctgcctaagttaagcacgcattattatacttgcatagtcagaatctgaaagatttacccccaacattttgaataacgcgccttggcgctactacagtcagcgatatacaagcatatatatataaattgtaaacaaccaagaaattagtatgtaatatgaacaataaactaaagacttcgaataaaataacaataaaccttaaaa

SEQ ID NO: 61 - DNA, 802 bp, Homo sapiens
agaggaccaagcctccctgtgtagcacaaagaaagtttctctgaatatatttaaagaaccatcaagaaatggggacctggattttgtttgcctgccttgtgggagcagcttttgccatgcctctaccacctcatcctgggcaccctggttatatcaacttcagctatgaggtgctcacccctttgaagtggtaccagagcatgataagaccaccatactcttcctatggttacgagcccatgggtggatggctgcaccaccaaatcatccccgtggtgtcccaacagcaccccctgactcacaccctgcagtctcatcaccacatcccagtggtgccagctcagcagcccagggtccgccagcaagcactgatgcctgttcctggccagcaatccatgactccaacccaacaccatcagccaaacctccctctgcctgcccagcagcccttccagccccagcctgttcagccacagcctcaccagcccatgcagccccagccacctgtgcaacccatgcagcccctgctgccacagccacctctgcctccaatgttccccctgcggcccctgccccccatacttcctgatctgcatctggaagcttggccagcaacagacaagaccaagcaggaggaagtggattaaaagaccagaatatgagacaggaactgaagtaaacactttagttgctttcagggatgacacaagcacacaatgatttttgcttacaatcacttaacttagcaaattctgtaactaaaaatgtaccaatagtagacaataaaatgttttaaaaatca

SEQ ID NO: 62 - DNA, 2501 bp, Homo sapiens
acgccgctccctccgctgggatcgctgcgcctccggctccccgcaccgatccgcgccaggcctgcggacctggaggcagcgaccgcggtcggtgggctccggcgggctcagcggtcgaggcggtggcagggtgagcggagcggggccccgcaagtccccgggaggcgacggtgccgggcgcgggcccctgcgtaaggtgggcgcagtgacaggccggccggtgaggcgccgccgggagaggccgcgacggagctcccagaccggccatgggctgagacacgtcctcgccgagcagtgacccttccgtaccccaccagaacatgcccgggtgacctcctcccagatcttccttgtggccttcctcgcccactccagtgacactatgcacccccaccgtgacccgagaggcctctggctcctgctgccgtccttgtccctgctgctttttgaggtggccagagctggccgagccgtggttagctgtcctgccgcctgcttgtgcgccagcaacatcctcagctgctccaagcagcagctgcccaatgtgccccattccttgcccagttacacagcactactggacctcagtcacaacaacctgagccgcctgcgggccgagtggacccccacgcgcctgacccaactgcactccctgctgctgagccacaaccacctgaacttcatctcctctgaggccttttccccggtacccaacctgcgctacctggacctctcctccaaccagctgcgtacactggatgagttcctgttcagtgacctgcaagtactggaggtgctgctgctctacaataaccacatcatggcggtggaccggtgcgccttcgatgacatggcccagctgcagaaactctacttgagccagaaccagatctctcgcttccctctggaactggtcaaggaaggagccaagctacccaaactaacgctcctggatctctcttctaacaagctgaagaacttgccattgcctgacctgcagaagctgccggcctggatcaagaatgggctgtacctacataacaaccccctgaactgcgactgtgagctctaccagctgttttcacactggcagtatcggcagctgagctccgtgatggactttcaagaggatctgtactgcatgaactccaagaagctgcacaatgtcttcaacctgagtttcctcaactgtggcgagtacaaggagcgtgcctgggaggcccacctgggtgacaccttgatcatcaagtgtgacaccaagcagcaagggatgaccaaggtgtgggtgacaccaagtaatgaacgggtgctagatgaggtgaccaatggcacagtgagtgtgtctaaggatggcagtcttcttttccagcaggtgcaggtcgaggacggtggtgtgtatacctgctatgccatgggagagactttcaatgagacactgtctgtggaattgaaagtgcacaatttcaccttgcacggacaccatgacaccctcaacacagcctataccaccctagtgggctgtatccttagtgtggtcctggtcctcatatacctatacctcaccccttgccgctgctggtgccggggtgtagagaagccttccagccatcaaggagacagcctcagctcttccatgcttagtaccacacccaaccatgatcctatggctggtggggacaaagatgatggttttgaccggcgggtggctttcctggaacctgctggacctgggcagggtcaaaacggcaagctcaagccaggcaacaccctgccagtgcctgaggccacaggcaagggccaacggaggatgtcggatccagaatcagtcagctcggtcttctctgatacgcccattgtggtgtgagcaggatgggttggtggggagattctgccccaggagaggtaatgcacccctgaaggatatgaggggatggaagagagggctggctgcccaagggaatggattcctcctgacctcaagggaattggtcccaggtacaacagagagcaagaccccaaacagggcgtggctgccacgattttcaaatgggggtatattaatcctcaggcaaatgctacacccgtacccaaagccctgccaattctcagtgtggtagaggaagagaagcatgtctgagttggatgggaatgaggaaggagtgaggggaagaacagattccctaaactttcatgaggtcatccctagctccttaagagaaaaacatttagaaaaaaaaattttttctatctctgcccacccacacctgtgatgttgtgtgtgttgggggagcttccacaggagccacactggggaaaagctgtagtatcttctttgtttagcaagtcaaacttcacagctggggaagttgaaaacctttggaaaatgagtcaggaaaaggctgagacctcaatcggtaacaattccccaaagctgttgtaagactttgcattaaagccttcctttttcctgaaaaaaaaaaaaaaaaaaaaaaaaaaaaaaa

SEQ ID NO: 63 - DNA, 3761 bp, Homo sapiens
aagggccgcagagcctggcgcggagccggcgagattttggtggggtctcacctgttgcgtgactcccccacagtccggccgcgggagtccgaccctgaatgcccagggagtgttgagagaaatctggacgagtttcgggtcccgctcccttgggagcacgtggcctaccagcctctcgattgcagggttgggtggtcgcgacaccggggtcgccttgaggccagtccggctgccgaggtctgcgggagtccacctccggccagctggcaattttgaaagactgccttactttccccatctcagtgccagggcaggggcccttggagtgacttggctggggtctgtggcccgatccccctgccgtccctcaggacccgggctttctgctgtacagacttctcgtgggcagcctcccctcggaactcgggcatcatggcctcagaggctcggggtggtctgggggcccctccgctgcagtctgcccgatccctgccgggccccgccccctgcctcaagcacttcccgctcgacctgcgcacgtctatggatggcaaatgcaaggagatcgccgaggagctgttcacccgctcactggctgagagcgagctccgtagtgccccgtatgagttccccgaggagagccccattgaacagctggaggagcggcggcagcggctggagcggcagatcagccaggatgtcaagctggagccagacatcctgcttcgggccaagcaagatttcctgaagacggacagtgactcggacctacagctctacaaggaacagggtgaggggcagggtgaccggagcctgcgggagcgtgatgtgctggaacgggagtttcagcgggtcaccatctctggggaggagaagtgtggggtgccgttcacagacctgctggatgcagccaagagtgtggtgcgggcgctcttcatccgggagaagtacatggccctgtccctgcagagcttctgccccaccacccgccgctacctgcagcagctggctgaaaagcctctggagacccggacctatgaacagggccccgacacccctgtgtctgctgatgccccggtgcacccccctgcgctggagcagcacccgtatgagcactgtgagccaagcaccatgcctggggacctgggcttgggtctgcgcatggtgcggggtgtggtgcacgtctacacccgcagggaacccgacgagcattgctcagaggtggagctgccataccctgacctgcaggaatttgtggctgacgtcaatgtgctgatggccctgattatcaatggccccataaagtcattctgctaccgccggctgcagtacctgagctccaagttccagatgcatgtgctactcaatgagatgaaggagctggccgcccagaagaaagtgccacaccgagatttctacaacatccgcaaggtggacacccacatccatgcctcgtcctgcatgaaccagaagcatctgctgcgcttcatcaagcgggcaatgaagcggcacctggaggagatcgtgcacgtggagcagggccgtgaacagacgctgcgggaggtctttgagagcatgaatctcacggcctacgacctgagtgtggacacgctggatgtgcatgcggacaggaacactttccatcgctttgacaagtttaatgccaaatacaaccctattggggagtccgtcctccgagagatcttcatcaagacggacaacagggtatctgggaagtactttgctcacatcatcaaggaggtgatgtcagacctggaggagagcaaataccagaatgcagagctgcggctctccatttacgggcgctcgagggatgagtgggacaagctggcgcgctgggccgtcatgcaccgcgtgcactcccccaacgtgcgctggctggtgcaggtgccccgcctctttgatgtgtaccgtaccaagggccagctggccaacttccaggagatgctggagaacatcttcctgccactgttcgaggccactgtgcaccctgccagccacccggaactgcatctcttcttagagcacgtggatggttttgacagcgtggatgatgagtccaagcctgaaaaccatgtcttcaacctggagagccccctgcctgaggcgtgggtggaggaggacaacccaccctatgcctactacctgtactacacctttgccaacatggccatgttgaaccacctgcgcaggcagaggggcttccacacgtttgtgctgaggccacactgtggggaggctgggcccatccaccacctggtgtcagccttcatgctggctgagaacatttcccacgggctccttctgcgcaaggcccccgtcctgcagtacctgtactacctggcccagatcggcatcgccatgtctccgctcagcaacaacagcctcttcctcagctatcaccggaatccgctaccggagtacctgtcccgcggcctcatggtctccctgtccactgatgatcccttgcagttccacttcaccaaggagccgctgatggaggagtacagcatcgccacccaggtgtggaagctcagctcctgcgatatgtgtgagctggcccgcaacagcgtgctcatgagcggcttctcgcacaaggtaaagagccactggctgggacccaactataccaaggaaggccctgaggggaatgacatccgccggaccaatgtgccagacatccgcgtgggctaccgctacgagaccctgtgccaggagctggcgctcatcacgcaggcagtccagagtgagatgctggagaccattccagaggaggcgggtatcaccatgagcccagggcctcaatgagcctggtccatgaagtgcccaccacatcgcagcacttttaccacgttttgtcctcagaccccgcccatgctgtgtggtctctgcatgtctccattcttctctgtctctgtcttgcatgtctcctaccatgtcactgtccctgggccacccagtgaaagcaaagcctgggaatctgctcattgttgtttgggctcaggtattgagcctgatggcccaggtattgagggcctcccctgctggtggccctgtcctgggatcctcagaagcctgactgtcctatgggcttctccagtgtccacaggggcttgggatggttgtggggggctggcccctctagcctttccggtccttcctgggcaaatctaagccttggccagggccgaagtttaggcccctgtcttgttcatgtagccgaggggcaggcgggggacctctacacctctgctgtgggcacggggctgctgagggtctgtggaactccagcagctctgcactgggtagagctgggcctagagctcagtcacaggcctgggcttcctggcctgagtgggtagacgcaggcggcagaggtgctggaccacatctccgccaagtcactgcccagcagccttctccgtcctgtccccagcccacgtgctccttgggtgtcagcttcctgtgcctctgtgggagagggcagctgccttgtgttatgtctggggccacagttgctgcaaagtcctggatctgccactcaaccccgggagtggtgttcccagtgtggctcccagagctttgaccagattgtgatcccagctggcccctatgttgtgttctggactgaggcctttgctgtgaactgcagtgtttcatacgaaccatctttcctagtgcatgagaaataaagattatttaagtaatgagaaaaaaaaaaaaaaaaaaaaaaaaaaaaa

SEQ ID NO: 64 - DNA, 3932 bp, Homo sapiens
gggtgctgggttttcacggagtatgcctgccctgccccgggaggactgtgtttgagcttggactcgctcgctgctgaattcctgtttgttattcttttttcttccaggctagctggaaggaccagctagcctggactttggcttctttgcccgggagccctggcatgatggggtgagggctcttggtgggttagtggagagctgggggctggcccttccccatcttcttttctacccaccccctccccgccccccgccaggcccagccaccatcagtcacgtcactcctgggactgaggaggcaggggagggataaggggcagagatggaggccccactccccgaggttgcctagacaacatgagaaatcgtggccagggcctcttccgcctgcggagccgctgcttcctgcatcagtcactcccgctgggggcggggcggaggaaggggttggatgtggcagagccaggccccagccggtgccgctcagactcccccgctgtcgccgccgtggtcccagccatggcatcctatccatctggctctggcaagcccaaggccaaatatccctttaagaagcgggccagcctgcaggcctccactgcagctccagaggctcggggtggtctgggggcccctccgctgcagtctgcccgatccctgccgggccccgccccctgcctcaagcacttcccgctcgacctgcgcacgtctatggatggcaaatgcaaggagatcgccgaggagctgttcacccgctcactggctgagagcgagctccgtagtgccccgtatgagttccccgaggagagccccattgaacagctggaggagcggcggcagcggctggagcggcagatcagccaggatgtcaagctggagccagacatcctgcttcgggccaagcaagatttcctgaagacggacagtgactcggacctacagctctacaaggaacagggtgaggggcagggtgaccggagcctgcgggagcgtgatgtgctggaacgggagtttcagcgggtcaccatctctggggaggagaagtgtggggtgccgttcacagacctgctggatgcagccaagagtgtggtgcgggcgctcttcatccgggagaagtacatggccctgtccctgcagagcttctgccccaccacccgccgctacctgcagcagctggctgaaaagcctctggagacccggacctatgaacagggccccgacacccctgtgtctgctgatgccccggtgcacccccctgcgctggagcagcacccgtatgagcactgtgagccaagcaccatgcctggggacctgggcttgggtctgcgcatggtgcggggtgtggtgcacgtctacacccgcagggaacccgacgagcattgctcagaggtggagctgccataccctgacctgcaggaatttgtggctgacgtcaatgtgctgatggccctgattatcaatggccccataaagtcattctgctaccgccggctgcagtacctgagctccaagttccagatgcatgtgctactcaatgagatgaaggagctggccgcccagaagaaagtgccacaccgagatttctacaacatccgcaaggtggacacccacatccatgcctcgtcctgcatgaaccagaagcatctgctgcgcttcatcaagcgggcaatgaagcggcacctggaggagatcgtgcacgtggagcagggccgtgaacagacgctgcgggaggtctttgagagcatgaatctcacggcctacgacctgagtgtggacacgctggatgtgcatgcggacaggaacactttccatcgctttgacaagtttaatgccaaatacaaccctattggggagtccgtcctccgagagatcttcatcaagacggacaacagggtatctgggaagtactttgctcacatcatcaaggaggtgatgtcagacctggaggagagcaaataccagaatgcagagctgcggctctccatttacgggcgctcgagggatgagtgggacaagctggcgcgctgggccgtcatgcaccgcgtgcactcccccaacgtgcgctggctggtgcaggtgccccgcctctttgatgtgtaccgtaccaagggccagctggccaacttccaggagatgctggagaacatcttcctgccactgttcgaggccactgtgcaccctgccagccacccggaactgcatctcttcttagagcacgtggatggttttgacagcgtggatgatgagtccaagcctgaaaaccatgtcttcaacctggagagccccctgcctgaggcgtgggtggaggaggacaacccaccctatgcctactacctgtactacacctttgccaacatggccatgttgaaccacctgcgcaggcagaggggcttccacacgtttgtgctgaggccacactgtggggaggctgggcccatccaccacctggtgtcagccttcatgctggctgagaacatttcccacgggctccttctgcgcaaggcccccgtcctgcagtacctgtactacctggcccagatcggcatcgccatgtctccgctcagcaacaacagcctcttcctcagctatcaccggaatccgctaccggagtacctgtcccgcggcctcatggtctccctgtccactgatgatcccttgcagttccacttcaccaaggagccgctgatggaggagtacagcatcgccacccaggtgtggaagctcagctcctgcgatatgtgtgagctggcccgcaacagcgtgctcatgagcggcttctcgcacaaggtaaagagccactggctgggacccaactataccaaggaaggccctgaggggaatgacatccgccggaccaatgtgccagacatccgcgtgggctaccgctacgagaccctgtgccaggagctggcgctcatcacgcaggcagtccagagtgagatgctggagaccattccagaggaggcgggtatcaccatgagcccagggcctcaatgagcctggtccatgaagtgcccaccacatcgcagcacttttaccacgttttgtcctcagaccccgcccatgctgtgtggtctctgcatgtctccattcttctctgtctctgtcttgcatgtctcctaccatgtcactgtccctgggccacccagtgaaagcaaagcctgggaatctgctcattgttgtttgggctcaggtattgagcctgatggcccaggtattgagggcctcccctgctggtggccctgtcctgggatcctcagaagcctgactgtcctatgggcttctccagtgtccacaggggcttgggatggttgtggggggctggcccctctagcctttccggtccttcctgggcaaatctaagccttggccagggccgaagtttaggcccctgtcttgttcatgtagccgaggggcaggcgggggacctctacacctctgctgtgggcacggggctgctgagggtctgtggaactccagcagctctgcactgggtagagctgggcctagagctcagtcacaggcctgggcttcctggcctgagtgggtagacgcaggcggcagaggtgctggaccacatctccgccaagtcactgcccagcagccttctccgtcctgtccccagcccacgtgctccttgggtgtcagcttcctgtgcctctgtgggagagggcagctgccttgtgttatgtctggggccacagttgctgcaaagtcctggatctgccactcaaccccgggagtggtgttcccagtgtggctcccagagctttgaccagattgtgatcccagctggcccctatgttgtgttctggactgaggcctttgctgtgaactgcagtgtttcatacgaaccatctttcctagtgcatgagaaataaagattatttaagtaatgagaaaaaaaaaaaaaaaaaaaaaaaaaaaaa

SEQ ID NO: 65 - DNA, 4371 bp, Homo sapiens
cccctgctgctctcaagtttcccgttggcggcgcggcccgggcgcttcaggtagcctctcggctctctctgctccgctccgcgcccaggtagggcaccgacgggggctgcacgcggctggccggcttcctccctgctgaggcggccctccctcctcccgcggggccctcctggccggggatccgcagcgctgcgccctctgaacgcccggcccccgcgcctgctgcggggcgcggcctggccgggccctggccccggctggcctcagtgcccagcagccccgctccgctctgcccagcgcgtcccctttgctccagccctgcggccgtccctttcggccggcggcatggccctgtcgtccgaacccgctgagatgccgcggcagtttcccaagctgaacatctctgaagtggatgagcaagtccggctcctggcggagaaggtgtttgctaaagtgctccgagaagaggacagcaaagatgccctgtccctgttcactgtcccagaggactgccccatcgggcaaaaggaagccaaggagagggagctgcagaaggagctggcagagcagaagtctgtggagaccgcaaaaagaaagaaaagtttcaagatgattcggtcccagtccctgtctctgcaaatgccgccacagcaagattggaagggccccccggcagccagtccggccatgtctcccacaacccctgtggtcactggagccacttccctgcccacgccagcaccctatgccatgcctgagttccagcgggtcaccatcagcggagattactgtgccgggatcactttggaggactatgagcaggcagccaagagtctggccaaggccctaatgatccgggagaagtatgcgcggctcgcctaccaccgcttcccgcggatcacatcccagtacctgggtcatccgcgggcggatactgcacctccggaagagggccttccagacttccaccctcctccactgccccaggaagacccctactgcctggatgatgcaccccccaacctggattacttggtccacatgcaggggggcatcctctttgtgtatgataacaagaagatgctggagcaccaggagccgcacagcctaccctaccccgacctggagacctacacggtggacatgagccacatcctggctctcatcaccgatggccccacgaaaacctattgtcaccggcgactgaactttctggaatccaagttcagccttcatgagatgttaaacgaaatgtccgagttcaaagagttgaagagtaacccccaccgggacttctataacgtgagaaaggtggacacacacatccatgcggccgcctgcatgaaccaaaagcatctgctgcgcttcatcaagcacacataccagacggagcctgacaggactgtggcagagaagcggggccggaagatcaccctgcggcaggtgtttgacggcctgcacatggacccctacgacctcactgtggactcactggatgtccacgcgggccggcagacattccaccgctttgacaagttcaactccaaatacaaccctgtgggggccagtgagctgcgtgacctgtatttgaaaactgaaaactatctgggaggagagtactttgctcggatggtcaaggaggttgcccgggagctggaggagagcaagtaccagtactcagagccacggctctccatctacggccgcagtcctgaggagtggcccaacctggcctactggttcatccagcacaaggtctactctcccaacatgcgctggatcatccaggtgccccggatttatgacatatttaggtcaaagaagctgctgccaaactttgggaagatgctggagaacatcttcctgccccttttcaaggccactatcaacccccaagatcatcgagagcttcacctcttccttaaatatgtgacggggtttgacagcgtggatgatgagtccaagcacagcgaccacatgttttccgacaagagcccaaacccggacgtctggaccagtgagcagaacccaccctacagctactacctgtactacatgtatgccaacatcatggtgctcaacaacctccgcagggagcgcggcctgagcacgttcctgttccggccgcactgtggggaagccggctccatcacccacctggtgtctgccttcctcactgctgacaacatttcccacgggctgctcctcaagaagagtccggtattgcagtatctctactaccttgctcagatccccattgccatgtctcctcttagcaacaacagtttgttcctcgaatattccaagaaccctctgagggaattcctacacaagggactgcatgtttctctttccaccgatgaccccatgcagttccactacacgaaggaagcacttatggaagaatatgccattgcagctcaagtgtggaagctgagcacctgcgacctgtgtgagatcgccaggaacagcgtgctgcagagcggcctctcgcatcaggaaaagcaaaagtttctgggacaaaattattataaagaaggacctgaaggaaatgatattcgaaagacaaatgtggctcagatccggatggcattccgatatgagaccttatgcaatgagctcagcttcctgtctgatgctatgaaatcagaagagatcaccgccttgaccaactaggtccagcatttgacatgcattttaactttttggttcaatttcaagtctgctgtggctaatagtggtcaagattccgaactaggactttcctctgtgaagaggatgcctctgaagaaattttaaactggtgattttggttgcactgctcactttaagagttaacatgctcacttgttagtatttctgagtaacaagatggtgacttctccttggggatctgggagctgagcacttgtctatacttgttcctaattttccaagtatttctcttgaaactgccagtgcctgaactgttggggccaggattttccctggtcagatgccaagtaacatgtggttttctgccatacttttctccattggcccaggtaggctaattggtagttgttcatttcagcctctggatggctggctgccttaaacacaatcaatttcaaagctccatttcataaaggggctactttgaaggagttaagatggaagacttccttcttgacaaattgtgtttttagtgaatttcttaaaccgttttatttagccctccttccctctttctagttggaagccaaatgtactcatgaaaacagccactcctattctgagtcttggtttcttcacctagaaagtgagggtttggactagatgagtggctttcagggtgttctgtgaatctcctcatgaatactttagggtaggggagggaagggagtgagtgatgctcaggggctgtcaaagtgactgcgttcatcagttttacactggggctgctacataatattttcatttgaacgaagaacttcaaaaagcacaggactagatgatctctgttccttttggctctaatatgctacaactgtaggccaattatcactttaccaattaagagttaggccagataagtgaaatttaacttaagggcacacagctaataagtaataggcctaaactggatttccttattccaaatcctgtcttttccccactattccattagaccccacaaatgttagttgtgtgtgtgtgtgtgtgtgtttttaatcactgtaaccggatgcatttttttaaggcaaaatttctcccttatctactatgatgacttcagaagatacaatggtcccaggggccaagtagaaagcatttttaaagattaatctgaattaagctttatcagtgtactctttatctgtgttactagtgcctggtatgtagtaggtgctcaataaatgcatattgaataactaagtgaatttcttttggcaactttttaaggacatgtgctcttagtacttaagaggctgctcaaggaccttcctatctatttctgtggtcaaattcagactacaggaggtctttttgaatcattatagttagaagaagaatccagtttctgcctgtgaacttatttgactttagattgtctcatcttgtgactttataatgcctgtcccctccactggtcaattcagcatatggaagtataaatgcagtctttttactaggcagatatatatgctatcttacagctaattatgaaattgaatgaaaatccattgttatcttagggattagttttgaaaagcccccgtttatatacatttgccctaacataggaagtattgtgtagtttctcattgtcattttatctgtatcaagtatctttttttaaattgttaaataaagtcagctaggactgtg

SEQ ID NO: 66 - DNA, 6329 bp, Homo sapiens
cgcgtccatttgaacgtctcgcacgccttcctgccattagcactcgagcccgctgctgttgcccgttcttcctccagaataggggagggagagggaatgagaagctgctgcggcccaagagtcactgtgaaggaccccgccgctgccctcgggcctcctcggcccctgcgcctccggggagcagccggggctcgccgcgcctgacgcgtcccgagttatacagaaataatgttgatatttggaacccatgtcgaacttctatgaagaaaggacaacgatgattgcagcaagggatttgcaggaatttgttccttttggtcgagaccactgcaagcaccaccctaatgctttgaaccttcaacttcgccagctgcagccagcttctgaattatggtcttctgatggtgctgctggcttggtgggatcccttcaggaggttacaatccacgagaaacagaaggaaagctggcagttaaggaaaggagtaagtgaaattggagaagatgtggactatgatgaggaactctatgttgctggaaatatggtgatatggagcaaaggaagtaaaagccaggcattggcagtttataaagcatttacagttgacagtcctgttcagcaggcattgtggtgtgacttcattatatcacaggataagtctgaaaaggcctacagtagcaatgaagtagaaaaatgcatatgtatattgcaaagctcatgtattaacatgcatagcatagaaggaaaggattacatagcttcattaccatttcaggttgcaaatgtttggcccactaaatatggattgctgtttgaacgaagcgcttcttcacatgaagtacctccaggttcacccagagaacctttacctactatgttcagcatgctgcacccactagatgaaataactccacttgtttgtaaatctggaagtctttttggttcatcacgggtgcaatatgttgtagatcatgcaatgaaaattgttttcctcaatactgacccctctattgtaatgacttatgatgctgttcaaaatgtgcattctgtgtggactctccggagagtcaaatcagaggaagagaatgttgttttaaagttctctgaacaggggggaaccccacagaatgtggccactagcagctccctcacagcacatctcagaagcctctccaaaggagattcccctgtgacttcacctttccagaattactcctccattcacagccagagtcgctcaacctcatcacccagtctacattctcgctcaccttctatttccaacatggcagctctaagtcgtgctcattctcctgcgttaggagtgcactctttttcaggggtgcaaaggttcaacatttcaagccataatcagtctccaaagagacatagtatttctcattctccaaatagtaattctaatggctcctttcttgcaccagaaacggagccaattgttcctgaactgtgtattgaccatttgtggacagaaacgattactaatataagagagaaaaattcacaagcctcaaaagtgtttattacatctgacctatgtgggcaaaagttcctgtgctttttagtagagtcccagctccagttacgctgtgtaaagtttcaagagagtaatgataaaacccagctcatctttggttcagtgaccaacataccagcaaaggatgcagcaccagtggagaaaatagacaccatgctggtcttggaaggcagtggaaacctggtgctatacacaggagtggttcgggtgggaaaggtttttattcctggactgccagctccctctctgacgatgtccaacacaatgcctcggcccagtactccactagatggcgttagtactccaaagcctcttagtaaactccttggatcattggacgaggttgttctgttgtccccagttccagaactgagggattcttcaaaacttcatgattctctctataatgaggattgtactttccaacagcttggaacttacattcattctatcagagatcctgtccataacagagtcaccctggaactgagtaatggctccatggttaggatcactattcctgaaattgccacctctgagttagtacaaacgtgtttgcaagcaattaagtttatcctgccaaaagaaatagcagttcagatgcttgtcaagtggtacaatgtccacagtgctccaggaggacccagttatcactcagagtggaatttatttgtgacttgtctcatgaacatgatgggttataacacagaccgcttagcatggactagaaattttgactttgaaggatcactttctcctgtcattgcgcccaaaaaagcaaggccttccgagactggatctgatgatgactgggaatatttactaaattcagactaccaccagaatgttgagtctcatcttttgaacagatctttatgtctgagtccttcagaagcttcacagatgaaggatgaggatttttcacagaatctcagtctggattcttctacacttctctttactcacatacctgcaatttttttcgttcttcaccttgtgtatgaggagcttaagttgaatactctaatgggagaaggaatttgttcacttgttgaacttctcgttcagttggcaagggacttaaaattggggccttatgtagatcattactatagagactacccaacgcttgtcagaactactggacaagtgtgcacaattgatccaggtcaaacaggatttatgcatcatccatcattttttacgtctgagccaccaagtatttatcagtgggtgagttcttgtctgaagggtgaaggaatgccaccttatccttacctccctggaatctgtgaaagaagcagacttgtagtcttgagtattgcactgtacatacttggtgatgagagcttggtttctgatgaatcctcacagtatttaaccagaataactatagccccccagaagttgcaagtagaacaagaggaaaacaggtttagtttcaggcattctacatctgtttctagtctagctgaaagattggttgtctggatgactaatgtaggattcactttaagagatttggaaactcttccctttggaattgctcttcccatcagagatgcaatttatcactgtcgtgagcagcctgcctcagactggccagaagctgtctgtctcttgattggacgtcaggatctttccaagcaggcctgcgaaggaaacttacccaaagggaagtctgtgctctcatcagatgttccttcaggaacagaaactgaggaggaagatgacggcatgaatgacatgaatcacgaggtcatgtcattaatatggagtgaagatttaagggtgcaggatgtgcgaaggcttcttcagagtgcgcatcctgtccgtgtcaacgtagtgcagtacccagagctcagtgaccacgagttcatcgaggaaaaggaaaacagattgctccaattgtgtcagcgaactatggctcttcctgtaggacgaggaatgtttaccttgttttcgtaccatcctgttccaacagagccattgcctattcctaaattgaatctgactgggcgtgcccctcctcggaacacaacagtagaccttaatagtggaaacatcgatgtgcctcccaacatgacaagctgggccagctttcataatggtgtggctgctggcctgaagatagctcctgcctcccagatcgactcagcttggattgtttacaataagcccaagcatgctgagttggccaatgagtatgctggctttctcatggctctgggtttgaatgggcaccttaccaagctggcgactctcaatatccatgactacttgaccaagggccatgaaatgacaagcattggactgctacttggtgtttctgctgcaaaactaggcaccatggatatgtctattactcggcttcttagcattcacattcctgctctcttacccccaacgtccacagagctggatgttcctcacaatgtccaagtggctgcagtggttggcattggccttgtatatcaagggacagctcacagacatactgcagaagtcctgttggctgagataggacggcctcctggtcctgaaatggaatactgcactgacagagagtcatactccttagctgctggcttggccctgggcatggtctgcttggggcatggcagcaatttgataggtatgtctgatctcaatgtgcctgagcagctctatcagtacatggttggaggacataggcgctttcaaacaggaatgcatagggagaaacataaatcaccaagttatcaaatcaaagaaggagataccataaatgtggatgtgacttgtccaggtgctactctagctttggctatgatctacttaaaaaccaataacagatctattgcagattggctccgagcccctgacaccatgtatttgttggactttgtgaagccagaatttctcttgcttaggacacttgctcgatgcctgattttgtgggatgatattttaccaaattccaagtgggttgacagcaatgttcctcaaattataagagaaaatagtatctctctcagtgaaatcgaattgccgtgctcagaggatttgaatttggaaactttgtcccaagcacatgtctacataattgcaggagcctgcttgtctctgggttttcgatttgctggctcagaaaacttatcagcatttaactgtttgcataaatttgccaaagattttatgacttatttgtccgcacctaatgcttctgttacaggtcctcataacctagaaacttgtctgagcgtggtgctgctgtctctcgccatggtcatggctggctcaggaaacctaaaggttttgcagctttgtcgcttcttacacatgaaaacgggtggtgaaatgaactatggttttcacttagcccaccacatggcccttggacttctatttttgggaggaggaaggtactctttgagcacatcaaattcttccattgccgctcttctctgtgccctttatccgcacttcccagctcacagcactgacaaccggtatcatctccaggctctccggcacctctatgtgctggccgcggagcccaggcttctagtgcctgtggatgtggacacaaacacgccctgctatgccctcttagaagttacctacaagggcactcagtggtatgaacaaaccaaagaagaattgatggctcctacccttcttccagaactccatcttttaaagcagattaaagtaaaaggcccaagatactgggaactgctcatagatttaagcaaaggaacacaacacttgaagtccatcctttccaaggatggggttttatatgttaaactccgggcgggtcagctctcctacaaagaagatccaatgggatggcaaagtttgttggctcagactgttgctaacaggaactctgaagcccgggctttcaagccagaaacaatctcagcattcacttctgatccagcacttctgtcatttgctgaatatttctgcaagccaactgtgaacatgggtcagaaacaggaaattctggatctcttttcttcagtactctatgaatgtgttacccaggagaccccagagatgttgcctgcatacatagcaatggatcaggctataagaagacttgggagaagagaaatgtctgagacttctgaactttggcagataaagttggtgttagagtttttcagctcccgaagccatcaggagcggctgcagaaccaccctaagcgggggctctttatgaactcggaattcctccctgttgtgaagtgcaccattgataataccctggaccagtggctacaagtcgggggtgatatgtgtgtgcacgcctacctcagcgggcagcccttggaggaatcacagctgagcatgctggcctgcttcctcgtctaccactctgtgccagctccacagcacctgccacctataggactagaagggagcacaagctttgctgaactgctcttcaaatttaagcagctaaaaatgccagtgcgagctttgctgagattggctcctttgcttcttggaaatccacagccaatggtgatgtgaccgtgtctggcggtgaacctaccctgaaacgtgacttctgcacaacaaacgtgaccaaacatcaaagctaaagcaatgtttataaagttttatggtataactagggggaaatgagctgcacaaacctcaatgtattttaaatctgttgctgtcatcattaacggtatatgacatataaaagcaagttaaaatttacttttgtaaataaagtttttggtttgtttccaaaaaaaaaaaaaaaaaaaaa

SEQ ID NO: 67 - DNA, 5466 bp, Homo sapiens
tcatggctgcgcgtgcagacgtgcgtcatcgccgcgcgccgcgccgagcgaatctcggagtcggtgggtgcagatggcggcggcagttgtggtggcggagggggacagcgactcccggcccggacaggagttgttagtggcctggaacaccgtgagcaccggcctggtgccgccggctgcgctggggctggtgtcttcccggaccagcggtgcagtcccgccaaaggaagaggagctccgggcggcggtggaggttctgaggggccacgggctacactcggtcctggaggagtggttcgtggaggtgctgcagaacgatctgcaggccaacatctcccctgagttctggaatgccatctcccaatgcgagaactctgcggatgagccccagtgccttttgctactccttgacgcttttggcctgctggagagccgcctggatccctacctgcgtagcctagagctgctggagaaatggactcgcctgggcttgctgatgggcactggtgctcaggggctgcgagaagaagtccacactatgttgcgcggagtcttgttctttagcacccccagaaccttccaagagatgatccagcgtctgtatgggtgcttcttgagagtctatatgcagagtaagaggaagggggaagggggcacagacccggaactggaaggggagctggacagccggtatgcccgtcgccggtactaccggctcctgcagagcccgctgtgtgcagggtgcagcagtgacaagcaacagtgctggtgtcgccaggctctggagcagttccatcagctcagccaggtcttacacaggctcagtctgctggagcgggtcagtgccgaggctgtgaccaccaccctgcaccaggtgacccgggagaggatggaggaccgttgccggggcgagtacgagcgctccttcctgcgtgagttccacaagtggatcgagcgggtggtcggctggctcggcaaggtgttcctgcaggacggccccgccaggcccgcatctcccgaggccggcaacaccctgcgccgctggcgctgccacgtgcaaaggttcttctaccgcatctacgccagcctgcgcatcgaggagctcttcagcatcgtccgagacttcccagactcccggccagccatcgaggacctcaagtactgcctggagaggacggaccagaggcagcagctgctcgtgtccctcaaggctgccctggagactcggctcctgcatccaggcgtcaacacgtgtgacatcatcaccctctatatctctgccatcaaggcgctgcgcgtgctggacccttccatggtcatcctggaggtggcctgtgagcctatccgccgctacctgaggacgcgggaggacacagtgcggcagattgtggctgggctgacgggggactcggacgggacaggggacctggctgttgagctgtccaagaccgacccggcgagcctggagacaggccaggacagtgaggatgactcaggcgagccagaggactgggtcccggaccctgtggatgccgatccagggaagtcgagctccaagcggcgttcatcggacatcatcagcctgctggtcagcatctacggcagcaaggacctcttcatcaatgagtaccgctcgctgctggccgaccgcctgctgcaccagttcagcttcagccccgagcgggagatccgcaacgtggagctgctgaagctgcgctttggcgaggccccaatgcacttctgtgaagtcatgctgaaggacatggcggactcccgccgcatcaatgccaacatccgggaggaggatgagaagcggccagcagaggagcagccaccgttcggggtctacgctgtcatcctgtccagtgagttctggccgcccttcaaggacgagaagctggaggtccccgaggatatcagggcagccctggaggcttactgcaagaagtatgagcagctcaaggccatgcggaccctcagttggaagcacaccctgggcctggtgaccatggacgtggagctggccgaccgcacgctgtctgtggcggtcaccccagtacaggcggtgatcttgctgtattttcaggaccaagccagctggaccctggaggaactgagcaaggcggtgaagatgcccgtggcgctgctgcggcggcggatgtccgtgtggctgcagcagggtgtgctgcgtgaggagccccccggcaccttctctgtcattgaggaggagcggcctcaggaccgggacaacatggtgctcattgacagtgacgacgagagcgactccggcatggcctcccaggccgaccagaaggaggaggagctgctgctcttctggacgtacatccaggccatgctgaccaacctggagagcctctcactggatcgtatctacaacatgctccgcatgtttgtggtgactgggcctgcactggccgagattgacctgcaggagctgcagggctacctgcagaagaaggtgcgggaccagcagctcgtctactcggccggcgtctaccgcctgcccaagaactgcagctgacacatcgcccgcccgcccgcccgcccgccaggcgctgccctgcaggtgctctcgtcctcccgtgccagcccccgcccgcccgtgtcccagaatgcactgctgaggagcatgcccacccccacccccgcagtgtgcagattaaagcaagtcagatcatcaaaaaaaaaaaaaaaaaaaaaaaaaaaaaaaaatcatggctgcgcgtgcagacgtgcgtcatcgccgcgcgccgcgccgagcgaatctcggagtcggtgggtgcagatggcggcggcagttgtggtggcggagggggacagcgactcccggcccggacaggagttgttagtggcctggaacaccgtgagcaccggcctggtgccgccggctgcgctggggctggtgtcttcccggaccagcggtgcagtcccgccaaaggaagaggagctccgggcggcggtggaggttctgaggggccacgggctacactcggtcctggaggagtggttcgtggaggtgctgcagaacgatctgcaggccaacatctcccctgagttctggaatgccatctcccaatgcgagaactctgcggatgagccccagtgccttttgctactccttgacgcttttggcctgctggagagccgcctggatccctacctgcgtagcctagagctgctggagaaatggactcgcctgggcttgctgatgggcactggtgctcaggggctgcgagaagaagtccacactatgttgcgcggagtcttgttctttagcacccccagaaccttccaagagatgatccagcgtctgtatgggtgcttcttgagagtctatatgcagagtaagaggaagggggaagggggcacagacccggaactggaaggggagctggacagccggtatgcccgtcgccggtactaccggctcctgcagagcccgctgtgtgcagggtgcagcagtgacaagcaacagtgctggtgtcgccaggctctggagcagttccatcagctcagccaggtcttacacaggctcagtctgctggagcgggtcagtgccgaggctgtgaccaccaccctgcaccaggtgacccgggagaggatggaggaccgttgccggggcgagtacgagcgctccttcctgcgtgagttccacaagtggatcgagcgggtggtcggctggctcggcaaggtgttcctgcaggacggccccgccaggcccgcatctcccgaggccggcaacaccctgcgccgctggcgctgccacgtgcaaaggttcttctaccgcatctacgccagcctgcgcatcgaggagctcttcagcatcgtccgagacttcccagactcccggccagccatcgaggacctcaagtactgcctggagaggacggaccagaggcagcagctgctcgtgtccctcaaggctgccctggagactcggctcctgcatccaggcgtcaacacgtgtgacatcatcaccctctatatctctgccatcaaggcgctgcgcgtgctggacccttccatggtcatcctggaggtggcctgtgagcctatccgccgctacctgaggacgcgggaggacacagtgcggcagattgtggctgggctgacgggggactcggacgggacaggggacctggctgttgagctgtccaagaccgacccggcgagcctggagacaggccaggacagtgaggatgactcaggcgagccagaggactgggtcccggaccctgtggatgccgatccagggaagtcgagctccaagcggcgttcatcggacatcatcagcctgctggtcagcatctacggcagcaaggacctcttcatcaatgagtaccgctcgctgctggccgaccgcctgctgcaccagttcagcttcagccccgagcgggagatccgcaacgtggagctgctgaagctgcgctttggcgaggccccaatgcacttctgtgaagtcatgctgaaggacatggcggactcccgccgcatcaatgccaacatccgggaggaggatgagaagcggccagcagaggagcagccaccgttcggggtctacgctgtcatcctgtccagtgagttctggccgcccttcaaggacgagaagctggaggtccccgaggatatcagggcagccctggaggcttactgcaagaagtatgagcagctcaaggccatgcggaccctcagttggaagcacaccctgggcctggtgaccatggacgtggagctggccgaccgcacgctgtctgtggcggtcaccccagtacaggcggtgatcttgctgtattttcaggaccaagccagctggaccctggaggaactgagcaaggcggtgaagatgcccgtggcgctgctgcggcggcggatgtccgtgtggctgcagcagggtgtgctgcgtgaggagccccccggcaccttctctgtcattgaggaggagcggcctcaggaccgggacaacatggtgctcattgacagtgacgacgagagcgactccggcatggcctcccaggccgaccagaaggaggaggagctgctgctcttctggacgtacatccaggccatgctgaccaacctggagagcctctcactggatcgtatctacaacatgctccgcatgtttgtggtgactgggcctgcactggccgagattgacctgcaggagctgcagggctacctgcagaagaaggtgcgggaccagcagctcgtctactcggccggcgtctaccgcctgcccaagaactgcagctgacacatcgcccgcccgcccgcccgcccgccaggcgctgccctgcaggtgctctcgtcctcccgtgccagcccccgcccgcccgtgtcccagaatgcactgctgaggagcatgcccacccccacccccgcagtgtgcagattaaagcaagtcagatcatcaaaaaaaaaaaaaaaaaaaaaaaaaaaaaaaaa

SEQ ID NO: 68 - DNA, 885 bp, Homo sapiens
gtcattgagctgcgacccttgttcaacgccgttggcgaagccagctgctggaggtgccgagaatctgagtttcggcaagcagccagaatattttaaaaatgactacaccaaacaagacacctcctggtgctgaccccaagcagttggaaaggactggaacagtacgggaaattgggtcacaagctgtttggtcactctcatcttgcaaaccaggatttggagtggatcagttacgagatgacaatctagaaacttattggcaatcagatggttcccagcctcatttagtgaacatccaattcagaagaaaaacaacagtgaagacattatgtatttatgcagactacaaatctgatgaaagctatactccaagcaagatctcagtcagagtaggaaataattttcacaaccttcaagaaattcggcaacttgagttggtggaaccaagtggctggattcatgttcccttaactgacaatcataagaagccaactcgtacattcatgatacagattgctgttctagccaatcaccagaatggaagagacacccatatgagacaaattaaaatatacacaccagtagaagagagctccattggtaaatttcctagatgtacaactatagatttcatgatgtatcgttcaataaggtgactttaaaatgagacgaaaatcattaaacgtatctttgttttatcctgtatttaaataatatatcatgtacctttattgaacaaggcatccgttatatctaattttgtatatgtttaaaaatattttattgtaactttgacaaataaatttggggtcatattatctttattttctttaacatgtaataaagctcacatattttacattactaaaaaaaaaaaaaaaaaaa

SEQ ID NO: 69 - DNA, 870 bp, Homo sapiens
gtgcgcactggcgtgcgagactcggcgggcgctgttgagggagtcgggccgcgactgtggtcgtttttataccttcccgcgcggacgccggcgctgccaacggaagggcgggtagggcgagacggagtttcgtcatgttggccaggcccatttgagatctttgaagatatcctcaacgtgaggctctgctgccatgaaggtgaagattaagtgctggaacggcgtggccacttggctctgggtggccaacgatgagaactgtggcatctgcaggatggcatttaacggatgctgccctgactgcaaggtgcccggcgacgactgcccgctggtgtggggccagtgctcccactgcttccacatgcattgcatcctcaagtggctgcacgcacagcaggtgcagcagcactgccccatgtgccgccaggaatggaagttcaaggagtgaggcccgacctggctctcgctggaggggcatcctgagactccttcctcatgctggcgccgatggctgctggggacagcgcccctgagctgcaacaaggtggaaacaagggctggagctgcgtttgttttgccatcactatgttgacacttttatccaataagtgaaaactcattaaactactcaaatcttgctggaggcctctgggtgcctgtgttctcggcatatagatgtggtctcggtgtgttttgatatgaaaactctcatgaataaacatctccgtgaaacgccaaggccctcgtcaaaccctgagtcatgactgggaggagaaggagcaggatcagacggtagagcctggggcatgctcttcaggcatgctcttgcctgctggattgccggcggcggccctgggaccctccctcagg

SEQ ID NO: 70 - DNA, 1130 bp, Homo sapiens
gtgcgcactggcgtgcgagactcggcgggcgctgttgagggagtcgggccgcgactgtggtcgtttttataccttcccgcgcggacgccggcgctgccaacggaagggcgggtagggcggtgcgtgattaggttggcgaaggctctgctgccatgaaggtgaagattaagtgctggaacggcgtggccacttggctctgggtggccaacgatgagaactgtggcatctgcaggatggcatttaacggatgctgccctgactgtcctctccatggagaaagcatttctaggtgtttgggctggtgcccgcagcctgtgcctgtcctgggaggcagggcccatccacaggtgcccatcaacacagcttccccaacgcctgggcagcacaccggatccctgatgtctagggaagagtcttctaggtccccagaccccacccctcctgcccttgatcaagagaccagttcactactcagatgcacgtctccttggtgccttgaccattcatgtgacctttttggcatcacagatcaagtgtctgcagatgggcccagggcctgtaggcaaggtgcccggcgacgactgcccgctggtgtggggccagtgctcccactgcttccacatgcattgcatcctcaagtggctgcacgcacagcaggtgcagcagcactgccccatgtgccgccaggaatggaagttcaaggagtgaggcccgacctggctctcgctggaggggcatcctgagactccttcctcatgctggcgccgatggctgctggggacagcgcccctgagctgcaacaaggtggaaacaagggctggagctgcgtttgttttgccatcactatgttgacacttttatccaataagtgaaaactcattaaactactcaaatcttgctggaggcctctgggtgcctgtgttctcggcatatagatgtggtctcggtgtgttttgatatgaaaactctcatgaataaacatctccgtgaaacgccaaggccctcgtcaaaccctgagtcatgactgggaggagaaggagcaggatcagacggtagagcctggggcatgctcttcaggcatgctcttgcctgctggattgccggcggcggccctgggaccctccctcagg

SEQ ID NO: 71 - DNA, 3555 bp, Homo sapiens
ggtactgtatatacaatctgggtcagctgcagctggttactgcatttctccatgtggcagacagagcaaagccacaacgctttctctgctggattaaagacggcccacagaccagaacttccactatactacttaaaattacataggtggcttgtcaaattcaattgattagtattgtaaaaggaaaaagaagttccttcttacagcttggattcaacggtccaaaacaaaaatgcagctgccattaaagtcacagatgaacaaacttctacactgatttttaaaatcaagaataagggcagcaagtttctggattcactgaatcaacagacacaaaaagctggcaatatagcaactatgaagagaaaagctactaataaaattaacccaacgcatagaagacttttttttctcttctaaaaacaactaagtaaagacttaaatttaaacacatcattttacaacctcatttcaaaatgaagacttttacctggaccctaggtgtgctattcttcctactagtggacactggacattgcagaggtggacaattcaaaattaaaaaaataaaccagagaagataccctcgtgccacagatggtaaagaggaagcaaagaaatgtgcatacacattcctggtacctgaacaaagaataacagggccaatctgtgtcaacaccaaggggcaagatgcaagtaccattaaagacatgatcaccaggatggaccttgaaaacctgaaggatgtgctctccaggcagaagcgggagatagatgttctgcaactggtggtggatgtagatggaaacattgtgaatgaggtaaagctgctgagaaaggaaagccgtaacatgaactctcgtgttactcaactctatatgcaattattacatgagattatccgtaagagggataattcacttgaactttcccaactggaaaacaaaatcctcaatgtcaccacagaaatgttgaagatggcaacaagatacagggaactagaggtgaaatacgcttccttgactgatcttgtcaataaccaatctgtgatgatcactttgttggaagaacagtgcttgaggatattttcccgacaagacacccatgtgtctcccccacttgtccaggtggtgccacaacatattcctaacagccaacagtatactcctggtctgctgggaggtaacgagattcagagggatccaggttatcccagagatttaatgccaccacctgatctggcaacttctcccaccaaaagccctttcaagataccaccggtaactttcatcaatgaaggaccattcaaagactgtcagcaagcaaaagaagctgggcattcggtcagtgggatttatatgattaaacctgaaaacagcaatggaccaatgcagttatggtgtgaaaacagtttggaccctgggggttggactgttattcagaaaagaacagacggctctgtcaacttcttcagaaattgggaaaattataagaaagggtttggaaacattgacggagaatactggcttggactggaaaatatctatatgcttagcaatcaagataattacaagttattgattgaattagaagactggagtgataaaaaagtctatgcagaatacagcagctttcgtctggaacctgaaagtgaattctatagactgcgcctgggaacttaccagggaaatgcaggggattctatgatgtggcataatggtaaacaattcaccacactggacagagataaagatatgtatgcaggaaactgcgcccactttcataaaggaggctggtggtacaatgcctgtgcacattctaacctaaatggagtatggtacagaggaggccattacagaagcaagcaccaagatggaattttctgggccgaatacagaggcgggtcatactccttaagagcagttcagatgatgatcaagcctattgactgaagagagacactcgccaatttaaatgacacagaactttgtacttttcagctcttaaaaatgtaaatgttacatgtatattacttggcacaatttatttctacacagaaagtttttaaaatgaattttaccgtaactataaaagggaacctataaatgtagtttcatctgtcgtcaattactgcagaaaattatgtgtatccacaacctagttattttaaaaattatgttgactaaatacaaagtttgttttctaaaatgtaaatatttgccacaatgtaaagcaaatcttagctatattttaaatcataaataacatgttcaagatacttaacaatttatttaaaatctaagattgctctaacgtctagtgaaaaaaatatttttaaaatttcagccaaataatgcattttatttataaaaatacagacagaaaattagggagaaacctctagttttgccaatagaaaatgcttcttccattgaataaaagttatttcaaattgaatttgtgcctttcacacgtaatgattaaatctgaattcttaataatatatcctatgctgattttcccaaaacatgacccatagtattaaatacatatcatttttaaaaataaaaaaaaacccaaaaataatgcatgcataatttaaatggtcaatttataaagacaaatctatgaatgaatttttcagtgttatcttcatatgatatgctgaacaccaaaatctccagaaatgcattttatgtagttctaaaatcagcaaaatattggtattacaaaaatgcagaatatttagtgtgctacagatctgaattatagttctaatttattattactttttttctaatttactgatcttactactacaaagaaaaaaaaacccaaccaatctgcaattcaaatcagaaagtttggacagctttacaagtattagtgcatgctcagaacaggtgggactaaaacaaactcaaggaactgttggctgttttcccgatactgagaattcaacagctccagagcagaagccacaggggcatagcttagtccaaactgctaatttcattttacagtgtatgtaacgcttagtctcacagtgtctttaactcatctttgcaatcaacaactttactagtgactttctggaacaatttcctttcaggaatacatattcactgcttagaggtgaccttgccttaatatatttgtgaagttaaaattttaaagatagctcatgaaacttttgcttaagcaaaaagaaaacctcgaattgaaatgtgtgaggcaaactatgcatgggaatagcttaatgtgaagataatcatttggacaactcaaatccatcaacatgaccaatgtttttcatctgccacatctcaaaataaaacttctggtgaaacaaattaaacaaaatatccaaacctcatagtggtattattctttgttttacctgtggtcatcttaaactggtttttcagtccctctccacttccttcagaaccaaagaatctgttataagattcctggaaggaactgggcatctaactgttacaccaaatcttaagtgaataaaactttaccaaggcttctcagttaaaaaaaaaa

SEQ ID NO: 72 - DNA, 8224 bp, Homo sapiens
agagcgcttataatggagccgctgtcagcagaaccttctgccgccgccgccgccgccgccgtccctcctcttttttttcccggcagatctttgttgtgtgggagggcagcagggatggacttgagcttgcggatcccctgctagagcagccgcgctcggagaaggcgccgcagccgcgaggaggagccgccgccgccgcgcccgaggccccgccgcccgcggcctctgtcggcccgcgccccgctcgccccgtcgccccgtcgcccctcgcctccccgcagagtcccctcgcggcagcagatgtgtgtggggtcagcccacggcggggactatggtgaaattcccggcgctcacgcactactggcccctgatccggttcttggtgcccctgggcatcaccaacatagccatcgacttcggggagcaggccttgaaccggggcattgctgctgtcaaggaggatgcagtcgagatgctggccagctacgggctggcgtactccctcatgaagttcttcacgggtcccatgagtgacttcaaaaatgtgggcctggtgtttgtgaacagcaagagagacaggaccaaagccgtcctgtgtatggtggtggcaggggccatcgctgccgtctttcacacactgatagcttatagtgatttaggatactacattatcaataaactgcaccatgtggacgagtcggtggggagcaagacgagaagggccttcctgtacctcgccgcctttcctttcatggacgcaatggcatggacccatgctggcattctcttaaaacacaaatacagtttcctggtgggatgtgcctcaatctcagatgtcatagctcaggttgtttttgtagccattttgcttcacagtcacctggaatgccgggagcccctgctcatcccgatcctctccttgtacatgggcgcacttgtgcgctgcaccaccctgtgcctgggctactacaagaacattcacgacatcatccctgacagaagtggcccggagctggggggagatgcaacaataagaaagatgctgagcttctggtggcctttggctctaattctggccacacagagaatcagtcggcctattgtcaacctctttgtttcccgggaccttggtggcagttctgcagccacagaggcagtggcgattttgacagccacataccctgtgggtcacatgccatacggctggttgacggaaatccgtgctgtgtatcctgctttcgacaagaataaccccagcaacaaactggtgagcacgagcaacacagtcacggcagcccacatcaagaagttcaccttcgtctgcatggctctgtcactcacgctctgtttcgtgatgttttggacacccaacgtgtctgagaaaatcttgatagacatcatcggagtggactttgcctttgcagaactctgtgttgttcctttgcggatcttctccttcttcccagttccagtcacagtgagggcgcatctcaccgggtggctgatgacactgaagaaaaccttcgtccttgcccccagctctgtgctgcggatcatcgtcctcatcgccagcctcgtggtcctaccctacctgggggtgcacggtgcgaccctgggcgtgggctccctcctggcgggctttgtgggagaatccaccatggtcgccatcgctgcgtgctatgtctaccggaagcagaaaaagaagatggagaatgagtcggccacggagggggaagactctgccatgacagacatgcctccgacagaggaggtgacagacatcgtggaaatgagagaggagaatgaataaggcacgggacgccatgggcactgcagggacagtcagtcaggatgacacttcggcatcatctcttccctctcccatcgtattttgttcccttttttttgttttgttttggtaatgaaagaggccttgatttaaaggtttcgtgtcaattctctagcatactgggtatgctcacactgacggggggacctagtgaatggtctttactgttgctatgtaaaaacaaacgaaacaactgacttcatacccctgcctcacgaaaacccaaaagacacagctgcctcacggttgacgttgtgtcctcctcccctggacaatctcctcttggaaccaaaggactgcagctgtgccatcgcgcctcggtcaccctgcacagcaggccacagactctcctgtcccccttcatcgctcttaagaatcaacaggttaaaactcggcttcctttgatttgcttcccagtcacatggccgtacaaagagatggagccccggtggcctcttaaatttcccttccgccacggagttcgaaaccatctactccacacatgcaggaggcgggtggcacgctgcagcccggagtccccgttcacactgaggaacggagacctgtgaccacagcaggctgacagatggacagaatctcccgtagaaaggtttggtttgaaatgccccgggggcagcaaactgacatggttgaatgatagcatttcactctgcgttctcctagatctgagcaagctgtcagttctcacccccaccgtgtatatacatgagctaacttttttaaattgtcacaaaagcgcatctccagattccagaccctgccgcatgacttttcctgaaggcttgcttttccctcgcctttcctgaaggtcgcattagagcgagtcacatggagcatcctaactttgcattttagtttttacagtgaactgaagctttaagtctcatccagcattctaatgccaggttgctgtagggtaacttttgaagtagatatattacctggttctgctatccttagtcataactctgcggtacaggtaattgagaatgtactacggtacttccctcccacaccatacgataaagcaagacattttataacgataccagagtcactatgtggtcctccctgaaataacgcattcgaaatccatgcagtgcagtatatttttctaagttttggaaagcaggttttttcctttaaaaaaattatagacacggttcactaaattgatttagtcagaattcctagactgaaagaacctaaaaaaaaaaatattttaaagatataaatatatgctgtatatgttatgtaatttattttaggctataatacatttcctattttcgcattttcaataaaatgtctctaatacaatacggtgattgcttgtgtgctcaacatacctgcagttgaaacgtattgtatcaatgaacattgtaccttattggcagcagttttataaagtccgtcatttgcatttgaatgtaaggctcagtaaatgacagaactatttttcattatgggtaactggggaataaatgggtcactggagtaggaatagaagtgcaagctggaaaggcaaaaatgagaaagaaaaaggcaggccctttgtgtctaccgttttcagtgctgtgtgatcatattgttcctcacagcaaaaaagaatgcaagggcataatgttagctgtgaacatgccagggttgcattcacattcctgggtacccagtgctgatggggtgtgcccacgtggggacatgtccttggcgtgcttcctcagagtggcttttcctccattaatacatatatgagtactgaaaaattaagttgcatagctgctttgcagtggtttcagaggcagatctgagaagattaaaaaaaaatctcaatgtatcagctttttttaaaggacattactagaaaattaaacagtattttttaacatgtgtgactttcatgcttctggggttggagcttaaagatccaaactgagaaagcaggccgggcatggtggctcatgcctgtaatcccaacactttgggaggccaaggagggtggatcacttaaggtcaggagtttgagaccagcctggccaacatggcaaaaccctgtctctactaaaaacataaaaattagctgggggtggtagcacatacctgtaatcccagctactcaggaggctgaggcaggagaatttgcttgatcctgggaggcagaggttgtagtgagccgagatcgcgccatcgcactccagcctgggtgacaagagcaaaactccatctcaaaaaaaaaaaaaatcctttccctctaaatccaggaaggatcagcaagggcctcctcattatgagatgaggaaatacaactccagagattccttcagtgatcaagatcagtgggccataatatttggttagagtttctgagaacacaggaagcaatgccacactcaggccaccacaatggagctgatttggcaggacttgttcaaacctttcaccttaaagcacgtgatccttcttcgtacattttcttcacttgggctgcttaagtcacagcctaacaactttgaggcaaaactgagaactggcatattctcctgcgtttcttctaatcgagtcccatcatccagctagacatgagagatcaaaccagggagggtgacctttctccttcccacttttcagagtcattggggcaactttttgacttttgtgaccaaagaaacattcccccaaaacatttatttttcattgtagggcattcagctgacagctgcattttagaaagttaccatgcctgtgagattctcatgtcaaagaccagggaaagaccaggtgtgactttctccaaaactgagtgattgcttgtggatgaatacaatctaaaaatacaaggccatgaagtagtttttcatttagatgctgagaaataataggtttgggcagctcaaagcataggaaatagtaagggttttctagagctcctcctttggtggcctgtttgagtagcacaagggacgtcatcctaaatgtgcagttgccatttgttctgtagtgacttacagggatctcagtggcaaagggcgtcagtgagacaacaactgagcaaaaagaactagacgaggcttgcgcttggaaagtcacggtaggattggacctgccggccacatggctcagggagtattgacggatttgcacattggcaggaaactctcccgtttgggattctttaaatggggcacagaaggccacttgtttgcatttctgggtaaaaaacagtcatcccccatgactgcctgcatcgggtttgtcttgtgccaaagttactcttcctttgtttttactttgccttgatttttagcattagctggtagtttggcttggaaatgtcctggatagccgattccctaagaaactgaaacatttaatattggcttaggatgtatcagatggggccaaataaagcttctttacaatagtaaaagcactttatacttcactctctgagtcttcccaataaataaccttgggaggtgcagggggtggggggcccaggatggggaggcctgggagctcccagggtagtgacagagttgggctgagttctccagacgccaggatgcgtcgcagcggggccagctcaggagtgctcactcccagccctctggatctctctcctggttggaataatcattacatatcgtaactctcaaaatttattcacttatattttcagaataagaagtgtgaaatgttaacagctctctgctctcttacttgttccccatttggggatcttctggagggaaggggcagggggagagtaacttttctatatccttggtttctaggaacacatcgatttgaagactcagtagctgactggtttttttttttcccccttcaaactgaagtgcgagtgtgcgtgtgttccacaaaatagcaagtatttatagtgttgtaattacatttccttgagaaatattttcttgtatttaaaaatctttctacttcagtaactcccagcagaacagtgcccaggacagcatgtgccggttagtaccagctttgcaggtgagctgacttctaaacttaggacgacgtcttcatcaatcaaactagtgcacagtccagaaaaaggggtcctttatcttctaagttctgctcctcacctttctttggaaccaaaattgcagtggagtgtgaggaagagctttgaaagacgtggagtgttgagatgtctgcattgcacattcagccggttcaaagccagcagctcctgcctgcattctgtagacatcgccctcacacacagtcctctgatggctctcatataaagcactcaaaccgtaggaaagcatgtttttgagcaacgtgtctgggatactcctctgtgtggttattttgaatctctatttctgtcattgaagcagcaaaaaacatcatgtgactcatcaactgatctaatcacacttaaaacaggatgtagagaaaaatctgatgagaaacgtaaaagggcctgttgcctgcccttttaaaggcaaaatgtctaaaatcatgcaaatgttcaaaatgagagaaattgcattgtggaatcaaaataacccaaactccactcagaaaagtcacaaatatatagtatactatctgatctcaaaagggaaaaacgagatgataagaccttaagtttagactttattttcttctcaagagtggacattaaatctattaacttgcaactttctgctgggaagagcatcaaaggtgggcctcctaaatcatttttgaaaaacctctgtcaagtccaagtggttccaggagaattatagccagtatcttttaaaatatttcattttagtgataatgtttttctctgcttcatttgcaatcaaccaggatctctaaaagactgcataagatatatgcacttttataggtggctgtcagctacacatagattcagcaaattttttttatatagtacctgtttttaagttaggctacataacttaaagtgcactttactaacaagacttgacattagcgtctacaatatgtatatgtaaacaaaagcacacaagaactaggcaccctttctctctccaagagtttaagtggtttccttaggttaaagaaggggacagaccagctaaaaatggttgtaccactcactgtacaacctcatggaaattctcactataagatttagaggcaatgttccctagctataagccagggcaagaaatggcgcctctggagttggggaacattaggggaacattacaaccgggtagatgctggttccctgaagtgtggggccatgaacatgcagggacccacggtttgaatgaaacagctactgaaagctaagttcaaaccacccttgcgtaacaaaggagtacagggtacacatcaacaccaatcacccagcaccccacagcgatggtcatgtcaccgtgcagcaggtcccttaccccagggctgccacatccacaagccttgcagtggcaaatacgctgctccttggatttaatgagatattttggttgcttaatgatgtactgatcagggaactgtctaaagctagtagggccaaggagttaatcaaagggcttcgggaaagtggacaagagccacacacgtgattctgttccatgccgacactcattcatttaagaagtgtattcaagctggaggcttccatatcactcacgcttcttggcctcaccttgctcatctgtccaatgggaggcttgagccattattgctaaggccccttcctgatctaacattctgtttatgatctaggatttagaacgtcgtatgagatcctacaatggaagaataaaatcacctcattcttcatttcagatctgaacattagcagtgatctagatttttttttttttaaacaaaattaagtgtgcttagagtcattcctctacatgggctgtggctgtcagcccataggtttgtcagtttcacatcaaaactgtgggtataaactgttgaaaccaatcacattaaaatatttagctgggcacagtggtgtgcatctgtagtcccagctacttgggaggctgaggcaggaggatcgcttaagcacaggagttggaatccagcctgagcaacagagcaaaaccccgtctctaaaatacaaataaaatatttgtgtagtttttgattaaaattgactacagcggtcagtataaaatacatgtcgcttttaaggaagtgctctttatgtatctaacagatggaagtttttgcattggtaagagcatttatatatgctttgtttcagggtttatggatttgtattcatatattgtcaaataggtttcatactctaattttactttaagtaaagcttaaacacttggcatacaactgaaaaaaaaaaaaaaaaaa

SEQ ID NO: 73 - DNA, 1462 bp, Homo sapiens
aaccagtcccaagtgctcaggacagaggctggacgggctccttcctgcacccctgctcttgggacacagtgccctccggctctaataggccaggagttgggggggcaactggctctgctccctggccctggctccccctgctccctggggctgcccgaggtgaaggtgacaggtgggggaggcaggtggagaattgggccagtgagctcatggcaaaggcgcccagctgggcaggggtgggtgctctggcctataaagcccccgaggccctgtggcctgcagaggcggttatggacggcaccatggaggactccgaggcggtgcagagggccacagcgctcatcgagcagcggctggcacaggaggaggagaatgagaaactccgaggagacgcacgccagaagctgcccatggacttgctggtgctggaggatgagaagcaccacggggctcagagtgcagccctgcagaaggtgaagggccaagagcgcgtgcgcaagacgtccctggacctgcggcgggagatcatcgatgtgggcgggatccagaacctcatcgagctgcggaagaaacgcaagcagaagaagcgggacgctctggccgcctcgcatgagccgcccccagagcccgaggagatcactggccctgtggatgaggagaccttcctgaaagctgcggtggaggggaaaatgaaggtcattgagaagttcctggctgacggggggtcagccgacacgtgcgaccagttccgtcggacagcactgcaccgagcttccctggaaggccacatggaaatcctggagaagcttctagataatggggccactgtggacttccaggatcggctggactgcacagccatgcattgggcctgccgcgggggccacttagaggtggtgaaacttctgcaaagccatggagcagacaccaatgtgagggataagctgctgagcaccccgctgcacgtggcagtccggacagggcaggtggagattgtggagcactttctatccctgggcctggaaatcaatgccagagacagggaaggggatactgccctgcatgacgctgtgaggctcaaccgctacaaaatcatcaaactgctgctcctgcatggggctgacatgatgaccaagaacctggcaggaaagaccccgacggacctggtgcagctctggcaggctgatacccggcacgccctggagcatcctgagccgggggctgagcataacgggctggaggggcctaatgatagtgggcgagagacccctcagcctgtgccagcccagtgaatgcgtgccccagcccagccagctacccagcccctctctgtgtgcagccggagggtcctaagaatggctcccggagctaactgagggcccagccttttttctgcatgatccaggagcacataccacaaactaccacaataaaaaagctgtttttgctaaaaaaaaaaaaa

SEQ ID NO: 74 - DNA, 2291 bp, Homo sapiens
gggtgcggcggctgctgccgggccgggcggcgggagcgcgcggcgtcggaggccgcccctctgcggaacgccgagagccccgggagagtgaagggccggggaggacaaggcgccccgggcccaaagcgcgccggctcccgctcgggcggccgcggacatgtgcaggatgtccttcaagaaggaaactccacttgccaatgctgcattctgggcagccaggagaggaaacctggcgctgctgaagctgctgttgaacagcggccgggtggacgtggactgcagagacagccatggcaccacactcctgatggttgctgcctacgctggccacatagactgtgtgagggaactggttctgcaaggagcagacatcaatctccagagagagtcaggtacaactgccctattctttgccgcccagcaaggccataatgatgtcgtgagatttctctttggatttggagcatccactgaatttaggaccaaagacgggggcaccgccctgttggctgccagtcagtacgggcacatgcaggtggtggagaccttgctgaagcacggagcaaacatccatgaccaactttatgatggagccactgccctcttcctagctgcccaaggtggttacttggatgttattcgattactgctggcttcaggagcaaaagtcaaccagccaaggcaggacgggacagcgcccctgtggatcgcgtcccagatgggccacagcgaggtggtgcgggtgatgctgctgcgcggagccgaccgcgacgctgcgcggaacgatggcacaacagcattattgaaagcagccaacaaagggtataatgatgtcataaaagagttgcttaaattctcacccactcttggtattttgaagaatgggacatcagcgctccatgcagcagtgctcagtggaaacattaaaacagttgcgctgctcctagaagcaggggcagacccatccctgagaaacaaggccaatgaacttccggcagaactaaccaaaaatgaacgtatattgcgtctcctgagaagtaaagaaggtcccagaaagagctaacttagctccatatttgacagaaagatagaaagcttaaccacattgtccaaaaagaaattgcatttcaagcagtgttggaaattcttttatgaaaaaaaaagatgcccagaatgcccatcctgtgggtccctgacaaagaagagctacgctctgtgcacgaagtcaagaaccaaacagctcagggaccctcttgccccttcaccatggacttctcatggtgtcctgtaactcatctcccggggggcctggcatgttcacagattccacagaaactcattttcaacaatgctaacttggacctgtcagttaaactctaaggtggacagggttctcagtactaagcaaggagacagaatgctttgttcctttaaaagactgaaaagctgaccttcaatggattgaggcacttttgcttttgtgttaaatgtagatgtgctaaaatatatagatctatcatattttacctacatatgtatgtcattccagtataaaacattctcctctacccaagaaccatagccatgattgttataaatcaatgaagtgtaaacatacattattaaaaaaccacttctgacattccattatgtgctattcaaagatggactattgaactatagaaaagacagactgtgcatttgttcgttgatcctcatcttattcctgacatgtaaaaatcaattttacgtagagtcaacattgtaggtaggttaaaataccagtggcaaatttggaaattcagaaacttataaaccacgagaaatatataggcttgtctctttggtcttttattttggctctattgttgggaatctatttcctattctataagtaagtatacctaacatgctgtggaatcttgagtttccaacaccgtgctgcttgatagaatgactttgaggtccttggataaaatgtgatatatgcaagtacagtatgttgctattactattgcaggaatataaataataaaagactgttattagcacttagtaagtcttcatctatgcatgtttttgagttgactgattccaagaatgaaatatgaggtttattgaattattcctttgaaagggatcaaaacttatattcaatgcactttataattaatggtgtctaaatgcctcagtcagtgcctaactgcacatacaaaaataaaaccttctttctgtaatctaccaaaataaacgcaatggtatttctgctatttaaaaaaaaaaaaaaaaaa

SEQ ID NO: 75 - DNA, 6355 bp, Homo sapiens
gcgctcgtggggaaaaggcagggagggggtggtgtccccagccggtttggggggtgcgttgcccggagacggaaagtttgggagcccgagcaggctcggctgcagcctcggggagggggtccagcgggtggcggccctggggatggggaaggagcaggagctgctggaggcggcccgcaccgggcacctcccggcggtggagaagctgctgtccgggaagcggctctcctcaggctttgggggcggcggcggcggtggctctgggggcggcggcggcggcagcggcggcggcggcggcggcctcggctcttccagccaccccctctccagtctgctcagcatgtggagagggccaaatgtgaactgtgttgacagcactggctacacacccctgcaccatgctgctttgaatggccataaggatgtggtcgaggttcttctgaggaacgatgcgctgaccaacgtggctgactcaaaaggctgctaccctctgcatttggcagcctggaaaggagatgcccagatagtgcggttgctcatccatcaagggccttcacacaccagagtcaatgaacagaacaatgacaacgagacagccctgcattgtgcagcgcagtatggccacacagaggtggtgaaggtgctcttagaggagctgacggaccccaccatgcgcaacaacaaattcgagacccctttggacctggcagcactgtacgggcgactggaggtggtgaaaatgctccttaatgcacaccccaacctcctgagctgcaacactaagaagcacacccctctgcacttggcagcaaggaatggccacaaagccgtggtccaggtcctcctcgatgctggcatggacagcaactaccagacggagatgggcagtgctttgcatgaggctgctttgtttggcaagaccgatgtggtgcaaatcctgctggctgcaggaactgacgtcaacataaaagataaccatggactgactgccctagacactgttcgggaactgccttctcaaaagagccagcaaatagcagcattaattgaagatcacatgactggaaaaagaagtacaaaagaagtagataaaacccccccaccccagccacctctcatctccagtatggactccatatcacagaagtctcagggtgacgtggagaaagcagtgactgaactgattatagattttgatgcaaatgctgaagaagagggtccctacgaagctctgtataatgccatctcctgccattcgttggacagcatggccagcgggcgatcatctgaccaagactccacgaacaaggaggctgaggcagcaggagtgaaacctgctggagtgaggcctagggaacgtccaccacctccagcaaagccaccgcccgatgaagaggaagaagaccacatagataagaagtattttcccttgacagcttctgaggttctgtccatgagacctaggattcatgggagtgcagcccgggaagaagacgaacacccttatgaactgttgttaacagcagagacaaagaaagtggtgttggtggatggaaaaacaaaagaccacaggcggagcagcagcagccggagccaggactctgcggaggggcaggacgggcaggtcccagagcagttctcaggcctcctccacggctcctccccggtgtgcgaggtggggcaggaccctttccagctgctctgtaccgctggccagagccatccagacgggtccccccagcagggcgcctgccacaaggccagcatgcagctggaggagacgggtgtgcatgctcctggagcctcccagcccagtgccctggaccagagcaagagagtgggctacctcacaggcctgcccaccaccaacagccgctcgcaccctgaaactttgactcacacagcatctccgcaccctggtggtgctgaggaaggagaccggagtggggccaggagccgagcgcctcccactagcaaacccaaagctgaactcaaactcagccgcagcttgtccaagtctgactctgatctcctgacctgctcacccacagaggacgctaccatggggagtcggagtgagtccttatccaactgcagcattgggaagaaaaggctagagaagtcaccctccttcgcctcggagtgggatgagattgagaaaatcatgagttctattggagaagggattgacttttctcaggaacggcagaagatctcaggtttacggacgctggagcagagtgtcggggagtggctggagtcgattgggctgcagcagtatgagagcaagttgcttctgaatggctttgacgatgtccacttcctggggtctaatgtgatggaagagcaggacctgcgggacatcggcatcagcgacccacagcaccggcggaagctgctccaggcggcacgctccctacccaaggtgaaggctctgggttatgacgggaacagcccccctagcgtgccctcctggctggactccctggggctgcaggactacgtccattccttcttgtcaagtggttacagctccattgacaccgtgaagaacctctgggagctagagctcgtcaatgtcctgaaggtccagctgctcggccatcgcaagcgcatcatcgcctccctcgcagacagaccgtacgaggagccgccccagaagccccccagattctcccagctgaggtgccaagatttgctctcccagacgtcatccccactgagtcagaatgattcctgcactgggcggtcggcagatctgctgctgcctccaggggacacaggcaggaggcgccatgacagtctccatgaccctgcggcaccctcccgagcggagcgcttcaggatccaggaggagcaccgtgaggccaagctgaccctgcggcccccgagcctggcagccccctacgccccagtgcagagttggcaacaccagccagagaaactcatcttcgagtcctgtggttatgaagccaattatctgggctccatgctgatcaaagatctgcgagggacagaatccacgcaagacgcctgtgccaagatgcggaaatctacggagcacatgaagaagatccccaccatcatcctgtccatcacatacaaaggtgtcaagttcatcgatgcctccaacaagaacgtcattgcagagcacgagatccggaacatttcctgtgcggcccaggacccggaggacctctgtacctttgcctacatcaccaaggacctgcagaccagccaccactattgccatgtgttcagcaccgtggatgtgaacctgacctacgagatcatcctgacgctggggcaggccttcgaagtggcctatcagttggccctgcaggcccagaagtccagggcgacgggcgcctctgcagctgagatgattgaaacaaaatcttccaaaccggtgcctaagcctcgggtcggcgtgaggaaatccgcactggaaccacctgatatggaccaagatgcccaatcccatgccagtgtctcctgggttgtggaccccaaaccagactctaagcggagcctcagcaccaactgagccactgaggaaccacactgtgctgcggaaacatagacgtgggggcataggctcccactgccaccaccgccatcgcctcacctgcagctctgaagacccaggcctcacctccgcctgcaggacctcctcttggccacttggcctgggcctgccaccaccacgtcctgcagaacgagccctgccttggctgtggagaagcactccaggccgctagcagatgggactggcattccagagggtcaagaagtgacttgttcagaacacattgtttttaacagaaaaaaaatctttttataaaatgaacttttaacacttggctcaaacctctaggtcatactgccaatctttagacaaatggccatggggcagaggacaggggagctgaggttggttcagaggccagcctgcatagcctctgtcctcaggacggaacttgggtgcagctcagtgggtcggaagagaaggcggtggcctgtgggtgaggggaacggagcaggctcaggcagaattgagtacggtgcgtctgcttttcaaacccaaccatatcagctgctgctctttatgaactgcccaacttcctgtccctttcaggggctagacacaggcttctcgtaagaacacagccttagaggcacctgagcaactcaaaggtttccggtccatttctggggttcccgatgggaaggttcagtggccaaatgaagataagtgtgcagtttctagtgctgggaagtcttagccagcaccagagcgccaggcctctccctggcctcttacctgtcagtgatcggagcactgccctgggctggccggcgccgtactgcctgcgttgtgtcagagaataggaaaagcagctttgtttggggcattaatgcttggagtggggtcagctaaggttgctacttgccaatttgtgatttgtctaatcagcctgtgtgattggggctcattttgattctctgaattatcggtttgacggttacacttggctgctgggcccatccctggcccccggtgtggaaaaggctaaataaggtgacagtgcatcgatgctcccccgcgtggcctttggggcaggctggcatcccggtgcgcctctgcttcttaagctttcctgctgctcgctttgtttttaaaagtaacttgggttgcattcttccctctggactagagtagaaatgcaggggaaactgctgtggatttgagaggcaaagttggctcagctgtgtgcccagttcctcctgtgggcactttagcaggctccgagctttcctggcataggtcaatcaggtcccaggatgaataatccaggcttcagcaacactcctctttcccagccagcaaaggctgtgaatttgaattctttgttggtatgtatgtgcagggagtactgttaggcacattcttaacccatgtggttggccagaaatcagaagtggggctgtgtctctgactggctagaggccaggccttgtgggtttctatctgctaagcacccagcaggttggggcctgggactcagctctctctgcggtagaggcaggccctcctccacttcttggtactaaacgaagatctcgacaccttgcagttttacttcatttcctgcccctttcagggcctgtgaggatgcccatgagctaccgctgtacagttctcggccccggctttcttccaagagttgaccaggaaccctaaagcatccagagtagactgcgctgccactgcgcacatgctggtgcccgtcttcctcctaaggggccaggccacatccaagtgggcctctgtcgggggcggggcggtaggtccgaaagaaaccgcagacactacgatgcactcctcaagctgtcttttgtgcttagatcatccataggtgtttcttctgcttgaagctgctatatcatctttatttattcagggtattttcatattggaagccttggctagtctgctctagctctgggttctgtttagagattggtttatttctgaatattcaagaaaggaaaatgactgggcctttctttcttttcttctcctctgggatgggtagtctccctttcctagaaaggttattataactttaaggacaggcttcaagtgggaaggcccctacttttgcacttctccaagtgcaggtcacaccaggggcagaccctgtcgctgcgtttctgaactgtgaaggagcccattcgggtgggagacttcagatgggctcagtacctgtcccagccacaggcttcttgtccacctcttctcccctgcccaccagctgctcagcgcataagaccttcccgacaggctctgcgtgtgcagctctctgcgtccctcctgggccctccagcgtcagacactaatgggagttcccgagatgctcgggtttgagcagggagcaggcagagctgcagtcagagacattagaaaaccagtctgaattgggtctgtctttgagatgcccaggccagcagaaagcagctcagaagtattgttgctcatggtgtggcaatggactgaactgtaatgaaaatgttatttaatctttgtctctgtattttgatacttgaatgactttcccttttgttttactgtatataaaattgttaatctgtctgattttgtctgaattataaacactttgaggtaccaaacataaccaatctgtgcaacaacatagactgacctcagtacccaagagagtgtaaatatttctgggcttccagctttggttttgttattttcataactgtacacaacttagaacagactgaattaataaatgagaagcgacatgaacgcagccttaaaaaa

SEQ ID NO: 76 - DNA, 4786 bp, Homo sapiens
ctcggcgctgaaattcaaatttgaacggctgcagaggccgagtccgtcactggaagccgagaggagaggacagctggttgtgggagagttcccccgcctcagactcctggttttttccaggagacacactgagctgagactcacttttctcttcctgaatttgaaccaccgtttccatcgtctcgtagtccgacgcctggggcgatggatccgtttacggagaaactgctggagcgaacccgtgccaggcgagagaatcttcagagaaaaatggctgagaggcccacagcagctccaaggtctatgactcatgctaagcgagctagacagccactttcagaagcaagtaaccagcagcccctctctggtggtgaagagaaatcttgtacaaaaccatcgccatcaaaaaaacgctgttctgacaacactgaagtagaagtttctaacttggaaaataaacaaccagttgagtcgacatctgcaaaatcttgttctccaagtcctgtgtctcctcaggtgcagccacaagcagcagataccatcagtgattctgttgctgtcccggcatcactgctgggcatgaggagagggctgaactcaagattggaagcaactgcagcctcctcagttaaaacacgtatgcaaaaacttgcagagcaacggcgccgttgggataatgatgatatgacagatgacattcctgaaagctcactcttctcaccaatgccatcagaggaaaaggctgcttcccctcccagacctctgctttcaaatgcctcggcaactccagttggcagaaggggccgtctggccaatcttgctgcaactatttgctcctgggaagatgatgtaaatcactcatttgcaaaacaaaacagtgtacaagaacagcctggtaccgcttgtttatccaaattttcctctgcaagtggagcatctgctaggatcaatagcagcagtgttaagcaggaagctacattctgttcccaaagggatggcgatgcctctttgaataaagccctatcctcaagtgctgatgatgcgtctttggttaatgcctcaatttccagctctgtgaaagctacttctccagtgaaatctactacatctatcactgatgctaaaagttgtgagggacaaaatcctgagctacttccaaaaactcctattagtcctctgaaaacgggggtatcgaaaccaattgtgaagtcaactttatcccagacagttccatccaagggagaattaagtagagaaatttgtctgcaatctcaatctaaagacaaatctacgacaccaggaggaacaggaattaagcctttcctggaacgctttggagagcgttgtcaagaacatagcaaagaaagtccagctcgtagcacaccccacagaacccccattattactccaaatacaaaggccatccaagaaagattattcaagcaagacacatcttcatctactacccatttagcacaacagctcaagcaggaacgtcaaaaagaactagcatgtcttcgtggccgatttgacaagggcaatatatggagtgcagaaaaaggcggaaactcaaaaagcaaacaactagaaaccaaacaggaaactcactgtcagagcactcccctcaaaaaacaccaaggtgtttcaaaaactcagtcacttccagtaacagaaaaggtgaccgaaaaccagataccagccaaaaattctagtacagaacctaaaggtttcactgaatgcgaaatgacgaaatctagccctttgaaaataacattgtttttagaagaggacaaatccttaaaagtaacatcagacccaaaggttgagcagaaaattgaagtgatacgtgaaattgagatgagtgtggatgatgatgatatcaatagttcgaaagtaattaatgacctcttcagtgatgtcctagaggaaggtgaactagatatggagaagagccaagaggagatggatcaagcattagcagaaagcagcgaagaacaggaagatgcactgaatatctcctcaatgtctttacttgcaccattggcacaaacagttggtgtggtaagtccagagagtttagtgtccacacctagactggaattgaaagacaccagcagaagtgatgaaagtccaaaaccaggaaaattccaaagaactcgtgtccctcgagctgaatctggtgatagccttggttctgaagatcgtgatcttctttacagcattgatgcatatagatctcaaagattcaaagaaacagaacgtccatcaataaagcaggtgattgttcggaaggaagatgttacttcaaaactggatgaaaaaaataatgcctttccttgtcaagttaatatcaaacagaaaatgcaggaactcaataacgaaataaatatgcaacagacagtgatctatcaagctagccaggctcttaactgctgtgttgatgaagaacatggaaaagggtccctagaagaagctgaagcagaaagacttcttctaattgcaactgggaagagaacacttttgattgatgaattgaataaattgaagaacgaaggacctcagaggaagaataaggctagtccccaaagtgaatttatgccatccaaaggatcagttactttgtcagaaatccgcttgcctctaaaagcagattttgtctgcagtacggttcagaaaccagatgcagcaaattactattacttaattatactaaaagcaggagctgaaaatatggtagccacaccattagcaagtacttcaaactctcttaacggtgatgctctgacattcactactacatttactctgcaagatgtatccaatgactttgaaataaatattgaagtttacagcttggtgcaaaagaaagatccctcaggccttgataagaagaaaaaaacatccaagtccaaggctattactccaaagcgactcctcacatctataaccacaaaaagcaacattcattcttcagtcatggccagtccaggaggtcttagtgctgtgcgaaccagcaacttcgcccttgttggatcttacacattatcattgtcttcagtaggaaatactaagtttgttctggacaaggtcccctttttatcttctttggaaggtcatatttatttaaaaataaaatgtcaagtgaattccagtgttgaagaaagaggttttctaaccatatttgaagatgttagtggttttggtgcctggcatcgaagatggtgtgttctttctggaaactgtatatcttattggacttatccagatgatgagaaacgcaagaatcccataggaaggataaatctggctaattgtaccagtcgtcagatagaaccagccaacagagaattttgtgcaagacgcaacacttttgaattaattactgtccgaccacaaagagaagatgaccgagagactcttgtcagccaatgcagggacacactctgtgttaccaagaactggctgtctgcagatactaaagaagagcgggatctctggatgcaaaaactcaatcaagttcttgttgatattcgcctctggcaacctgatgcttgctacaaacctattggaaagccttaaaccgggaaatttccatgctatctagaggtttttgatgtcatcttaagaaacacacttaagagcatcagatttactgattgcattttatgctttaagtacgaaagggtttgtgccaatattcactacgtattatgcagtatttatatcttttgtatgtaaaactttaactgatttctgtcattcatcaatgagtagaagtaaatacattatagttgattttgctaaatcttaatttaaaagcctcattttcctagaaatctaattattcagttattcatgacaatatttttttaaaagtaagaaattctgagttgtcttcttggagctgtaggtcttgaagcagcaacgtctttcaggggttggagacagaaacccattctccaatctcagtagttttttcgaaaggctgtgatcatttattgatcgtgatatgacttgttactagggtactgaaaaaaatgtctaaggcctttacagaaacatttttagtaatgaggatgagaactttttcaaatagcaaatatatattggcttaaagcatgaggctgtcttcagaaaagtgatgtggacataggaggcaatgtgtgagacttgggggttcaatattttatatagaagagttaataagcacatggtttacatttactcagctactatatatgcagtgtggtgcacattttcacagaattctggcttcattaagatcattatttttgctgcgtagcttacagacttagcatattagttttttctactcctacaagtgtaaattgaaaaatctttatattaaaaaagtaaactgttatgaagctgctatgtactaataatactttgcttgccaaagtgtttgggttttgttgttgtttgtttgtttgtttgtttttggttcatgaacaacagtgtctagaaacccattttgaaagtggaaaattattaagtcacctatcacctttaaacgcctttttttaaaattataaaatattgtaaagcagggtctcaacttttaaatacactttgaacttcttctctgaattattaaagttctttatgacctcatttataaacactaaattctgtcacctcctgtcattttattttttattcattcaaatgtattttttcttgtgcatattataaaaatatattttatgagctcttactcaaataaatacctgtaaatgtctaaaggaaaaaaaaaaaaaaaaaa

SEQ ID NO: 77 - DNA, 1630 bp, Homo sapiens
agggccggggtggggcgctggcgtttccgttgcttggatcagtctaggtgcagctgcggatccttcagcgtctgcatctcggcgtcgccccgcgtaccgtcgcccggctctccgccgctctcccgggggttcggggcacttgggtcccacagtctggtcctgcttcaccttcccctgacctgagtagtcgccatggcacaggttctcagaggcactgtgactgacttccctggatttgatgagcgggctgatgcagaaactcttcggaaggctatgaaaggcttgggcacagatgaggagagcatcctgactctgttgacatcccgaagtaatgctcagcgccaggaaatctctgcagcttttaagactctgtttggcagggatcttctggatgacctgaaatcagaactaactggaaaatttgaaaaattaattgtggctctgatgaaaccctctcggctttatgatgcttatgaactgaaacatgccttgaagggagctggaacaaatgaaaaagtactgacagaaattattgcttcaaggacacctgaagaactgagagccatcaaacaagtttatgaagaagaatatggctcaagcctggaagatgacgtggtgggggacacttcagggtactaccagcggatgttggtggttctccttcaggctaacagagaccctgatgctggaattgatgaagctcaagttgaacaagatgctcaggctttatttcaggctggagaacttaaatgggggacagatgaagaaaagtttatcaccatctttggaacacgaagtgtgtctcatttgagaaaggtgtttgacaagtacatgactatatcaggatttcaaattgaggaaaccattgaccgcgagacttctggcaatttagagcaactactccttgctgttgtgaaatctattcgaagtatacctgcctaccttgcagagaccctctattatgctatgaagggagctgggacagatgatcataccctcatcagagtcatggtttccaggagtgagattgatctgtttaacatcaggaaggagtttaggaagaattttgccacctctctttattccatgattaagggagatacatctggggactataagaaagctcttctgctgctctgtggagaagatgactaacgtgtcacggggaagagctccctgctgtgtgcctgcaccaccccactgccttccttcagcacctttagctgcatttgtatgccagtgcttaacacattgccttattcatactagcatgctcatgaccaacacatacacgtcatagaagaaaatagtggtgcttctttctgatctctagtggagatctctttgactgctgtagtactaaagtgtacttaatgttactaagtttaatgcctggccattttccatttatatatattttttaagaggctagagtgcttttagccttttttaaaaactccatttatattacatttgtaaccatgatactttaattagaagcttagccttgaaattgtgaactcttggaaatgttattagtgaagttcgcaactaaactaaacctgtaaaattatgatgattgtattcaaaagattaatgaaaaataaacatttctgtccccctgaattat

SEQ ID NO: 78 - DNA, 6841 bp, Homo sapiens
gctctgccaggagcagtcgcctcctccttggcaaatagtcctcggcagggtccgagttcttggataattcgagagaaaaggcacgataagttgcagtacgaggacacggaaacgaccaggagaggaggacagggagcgaagtttcctcaatagtgtgtgaagttagttaaaaactccctccttcctcaggatccctccgcctgcggtagcggtggtgaggccgagggagccgccattttggatgttcggttcctgctgccactgctgccgccgcccccggagctgctggtttcattcgaggtttcgggccgaggatgccagcccccatcagattgcgggagctgatccggaccatccggacagcccgaacccaagctgaagaacgagaaatgatccagaaagaatgtgctgcaatccggtcatcttttagagaagaagacaatacataccgatgtcggaatgtggcaaaattactgtatatgcacatgctgggctaccctgctcactttggacagttggagtgcctcaagcttattgcctctcaaaaatttacagacaaacgcattggctatttaggggcaatgctgctgttagatgaaagacaagatgtccatcttctcatgaccaactgtatcaagaatgatcttaatcatagcacgcaattcgtacaggggttagcactttgtaccctcggctgcatgggctcctcagagatgtgcagagatcttgcaggagaggtagagaagctcctgaaaacctccaactcttacttaagaaaaaaggcagcactgtgtgctgttcatgtcatcaggaaagttcctgaacttatggagatgtttttaccagcaacaaaaaatttattgaatgagaagaaccatggtgtcctccacacatctgtagtcctcctcacagaaatgtgtgagcgaagcccagacatgcttgcgcatttcagaaagcttgtgccccaattagttcgtattttaaagaacctcatcatgtccggatattcaccagaacatgatgtttctggtatcagtgacccctttttgcaggtacgaattttgcggttattaagaattttaggacgaaatgatgatgattcaagtgaagctatgaatgatatattagcacaggttgccactaatactgagactagtaaaaatgtaggaaatgctattctttatgaaacggttttgactatcatggatattaagtcagagagtggattgcgagtcctagccataaatatcctgggtcgtttcttattgaacaatgacaagaatattagatatgtggctctgacatctttgttgaagactgtacagacagatcataatgcagtacagaggcacagaagcacaattgtggactgtcttaaagatttggatgtctcaataaaacggcgtgcaatggaattgagttttgccctggtaaatgggaataatatccgaggcatgatgaaagaattactttattttctggattcgtgtgagccagaatttaaagcagactgtgcatctggaatctttcttgctgcagaaaagtatgcaccttccaaacgatggcatatagacacaattatgcgtgttttgacaacggcaggaagttatgttcgtgatgatgcagtccccaatttaatccagttaataactaatagtgtggagatgcatgcctatactgtccagcgcctgtacaaagcaattcttggtgattattctcaacaacctttggtacaagtggctgcatggtgtataggtgaatatggtgatcttcttgtatctggccagtgtgaagaggaagagcctattcaggtaacagaggatgaagtgttggatattttagaaagtgtcctaatctctaatatgtccacctctgtgacacgaggttatgccctcactgccattatgaagctttccactcgattcacttgtactgtaaaccgaattaagaaagtggtttccatctacggaagcagcattgatgtggaactccagcagagggcagtagaatataatgcacttttcaagaaatatgaccacatgaggtctgccctacttgagagaatgcctgtcatggaaaaagtgaccacaaatggccctactgagattgtgcagacaaatggagagacagaaccagctccactagagaccaaaccgccaccctctgggccacagcccaccagccaggccaatgatttattggatttgttgggaggaaatgacataacacctgttattccaactgcgcctacaagcaaaccatcttctgctggtggagaacttcttgatttgctgggagacatcaaccttacaggtgctccagctgctgctcctgcccctgcctcagtcccacagatatcccagccccccttcttgttggatgggctttcatcacagcctctcttcaatgatattgctgcaggcatcccctccatcacagcatacagtaagaatggcttgaagatagaattcacctttgaacggtcaaataccaaccccagtgtaacagtgataacgatacaggcctccaacagcacagagctagatatgacggactttgttttccaagctgcagtaccaaagacattccagctgcagctcttgtctcctagcagcagcattgtcccagcatttaacacggggaccatcacacaagtcattaaagttctgaaccctcagaagcaacagctgcgaatgcggatcaagcttacatataatcacaagggctcagcaatgcaagatctagcagaggtgaacaactttccccctcagtcctggcaatgagggtttggcaccattctcattctttatcccactcaatcaaaggaactctgggaaggaggttgtgattgctggcaagtcccccccaactgtaccacgggcatgaggagctgaagagaactgctgaggaggattttcctaaagttactgctgaccttgaagcattgttaaagactaatgtcctctcctccactgttgaggctggctgcttctggaggctactttgcactcttcctcttctcctttttccgcacttctccacccctcccacatttacagccagaatcaacattccctgggcccctgaggaaataagcagctggtctggaggagaggactgcaatccatggcgaaaaaacactcactttgtctctgcagcaaagagttgccccttctttctactgttgtttctctgtggactgggcaaggtggggtatttattcctcactagctgggttaccatcttcaggcacttttaacatctggcattcggaatggaaatgtaataatggacattagggagccctgcctttttctactggttcccccaatgtttgaaagaggcattaggctcctggtagccttttctgtgcattgctgtatacacacagacacacacatgtatgtttgttaccaagaactggtcagaccttgcgagtttatttgtaaacactggacagatggagttaaaaagagcttttgttgagatttggcatgaaggatatggtgctctatttgtaatagaaacttccaaggctcttccagctcccctttctcgccattctttagctgtagtcatgaatagtctccatgattttcaaaattgattccctttaaagtgcaaaatggtcaccttctaaaagatatattcatagttattaatgaccctattcccaccacaaattttaaagtgctcctaagcccataacttgcctgtttgaactatggtaatgggtggaagaggagttcaccagtttcaaagatcagactctgtatcaaaagtacctttgcccttaggaagagtgagtattggagtcatcttatctattactccaaacctccctttttatttcttgagcctggcttggaccttggcattccgtttgaattccttctaactggaacatttgtgttgtatctgtaacactggcactgaaataaagaccacacggttaaagaaatctttccatattgtactttatggtgttggagtgaagccttgtagcttccatacccctatgtcagaggaggtcttacggacaccatagggtaggaatagcctttcctcagtctgagaaattggtctcttttaaaagacgaatctcatgaatattcacatcaaagacttgagctttttaaactagtgagagtgccaagtgctttttagaaaggacccatatgttatcaaactttgaaattgagttgctggaatgaagtagaggtgactctctctgtggtacacattgaatgtactatgtatgttcaagtattcaggcgccatgtcttatatactgaagaaagaaaaagtgaggcccaccttgctcttacaatgtttgcaattgttactgtattgaatacagtataatgactactatggcttcaatcttaaacctggaaacaaatatccctttttttccccttcatttcaccaagcctttacttaaaatcttcagtgtcttgtcaaatctagctctgtatcagatgctggaatattcctaacatttgacaaactggagttgaactaaaggctccacgggaaagtttctggtcttactagtgtgtatgagcaagatctgctaaaacttactccactgggtaaatggttgactgagtcaagaacaggataatatctcctgcatagttttcagtaatgtaagtgtggactagtgcatatttcagacaactgctctgcctgtgcaatgaaaaatagcctttaagggtttctttgcagactgatttcattggatggatacttaatgctgtgaaacatgataggattaacataatgttggtggatttcttgaatagaatttgtcttaacattcctctttgtgtagaggctttattttctctcttatatttgtagctaaccagctcaggtttttttatttgaactgggttgaatctctgaagaaatctgttcaagaccatgctataagacactgtcagctaatggagctgggaagggtctactctgctgacagagcatttccttgggtgatcatagtttcgaggtagagtttatgatcattcatagctttgtctagaaggagtaaaatatcatggccttaacacaaagggtgctgcgtagaatatgaattgattttggaatcagaacacaagcaccatactgaaggactagcagccaaataactgcctaggatactgatggttgtgaagactgtttcaaatgattggatctttgaaagcttcagcgtgccttagtttctaggatcagaattagttttcctctcacttggccttgcagctaaatggagaaatgtttcaatttctttgaatacttgcacatttcaataattcctttcccgagtataaccactcaagggggagcaaatttggatggatttacgacttcacaggcattgtgaggaaagagcattttccaaggctgttttgataaccctggggtgataagcagtgagccctcacacacttactttgacaatttcacatgcacttgtacttcattatttccctcttcaagagtcgtttctattctagtttctgccccatcccggggaatcctaaaggagaattaattcatctaagtaatctcaaaaaactgtaggaagggtgctctccctgagaagcttctcccacagtgctttggtgctgttaccttgaggtggtttggacagtcacggaagttttaggctgtgcatagtgatcatctgttaattttaaggtctttatcatttaaagaaacattcctcagtgtaacatttgggaggggattctttcctcttgctagtttaaaggtgtgatttgtactccttgtttgtcccattcatatatgaaaatagacttttaaaactgtccaacactaatggtttatataacatgcttcccattttttttatgtcgtagaaattggaagttagggagtactgctttcaaggttcaacttcattatcttctgcattggaaaatatttgggccatgagaactaggggaaaggagtttgaatgtgtctatttttttctagtgaatgtattttaaccacagtgtcctaaactgagaaaactagagaggaaaaagtgggtgttcatgaactttgtagttgggagagtggttttacatgtctgtgtattcatgactttgggagtgggtaggatcattggagagagaattgcacagaaagtcctgaagtttaaaacacttttgaccagctttggctcgggagagtggggctgcttgtagaactggaagtgaataactttttcaagcaatatcagtgagtgggtcccatcgacagggttccaggacctggaacactttaacagaaggaaatgccgaagcagcttgcacagttgctttacagacttccaagaggctgattctggcttcaagatggagccttggagttggtttttttttttttttttttcttccctcaaagaacctgcggttgcgctttgtgtgttttgtttttgttttccatttgggggccccatgggaaagagcttctgaactctttcctttatgaactcccactgtgttcctataaaggcccttttctttcttagtgttgtaagttacattttcattatgccccatcacatcttctttactgtaaaaatattaaaaagctgtttccaagtgggacagctaatgaagctctaattattgcagacatatttttgagatgtaaaaaaaaaaatttaaagttaaatgataagtcttagaggcgagtgaggaataaaatggatgtaaacatttacatgggatgcattagaattctgctgtgtgtactgtcttttggttgaaacaaattatgaacagtgactaataataaaaagtcaatacccaatgatttaaaa

SEQ ID NO: 79 - DNA, 1749 bp, Homo sapiens
ggcgcttccgcaggaagaaggaagcggcgccgccatcgcctcccggcgctccctccccgactcctaagtccttcggccgccaccatgtccgcctcggctgtcttcattctggacgttaagggcaagccattgatcagccgcaactacaagggcgatgtggccatgagcaagattgagcacttcatgcctttgctggtacagcgggaggaggaaggcgccctggccccgctgctgagccacggccaggtccacttcctatggatcaaacacagcaacctctacttggtggccaccacatcgaagaatgccaatgcctccctggtgtactccttcctgtataagacaatagaggtattctgcgaatacttcaaggagctggaggaggagagcatccgggacaactttgtcatcgtctacgagttgctggacgagctcatggactttggcttcccgcagaccaccgacagcaagatcctgcaggagtacatcactcagcagagcaacaagctggagacgggcaagtcacgggtgccacccactgtcaccaacgctgtgtcctggcgctccgagggtatcaagtataagaagaacgaggtcttcattgatgtcatagagtctgtcaacctgctggtcaatgccaacggcagcgtccttctgagcgaaatcgtcggtaccatcaagctcaaggtgtttctgtcaggaatgccagagctgcggctgggcctcaatgaccgcgtgctcttcgagctcactggccgcagcaagaacaaatcagtagagctggaggatgtaaaattccaccagtgcgtgcggctctctcgctttgacaacgaccgcaccatctccttcatcccgcctgatggtgactttgagctcatgtcataccgcctcagcacccaggtcaagccactgatctggattgagtctgtcattgagaagttctcccacagccgcgtggagatcatggtcaaggccaaggggcagtttaagaaacagtcagtggccaacggtgtggagatatctgtgcctgtacccagcgatgccgactcccccagattcaagaccagtgtgggcagcgccaagtatgtgccggagagaaacgtcgtgatttggagtattaagtctttcccggggggcaaggagtacttgatgcgagcccactttggcctccccagtgtggaaaaggaagaggtggagggccggccccccatcggggtcaagtttgagatcccctacttcaccgtctctgggatccaggtccgatacatgaagatcattgagaaaagtggttaccaggccctgccctgggttcgctacatcacccagagtggcgattaccaacttcgtaccagctagaagggagaagagatgggggcttgaacacggggcttccttacagccccggatgcagattttagagggagggcaggtgcgggctgtgtgtgtctgtgtgagggcaggtcctggacttggcagtttcttgctcccagcacccgccccttcctcacctcttccttattccataggctgggagagaaactctctgcttccctcgcccttggagctttccccatccccctgattttatatgaagaaatagaagaggggcttgaagtccccctcgcgagtgccttcttgcaattacctgccttagcgggtgttgcgggtccctccttcacagccgctgagcccagaggtcccgctggcccctcctctgaattttaggatgtcattaaaaagatgaatcta

SEQ ID NO: 80 - DNA, 1297 bp, Homo sapiens
ggggcggggcttcgggcgagagggagggcagcaggagaaaggataagaaagggagtgggactggcgcctacggtggccgaagtgggacgcgccgagccggaggctgcaggatgatgcggttcatgctattattcagccggcagggaaaactgcggctgcaaaaatggtacctggccacttcggacaaggaacggaagaagatggtgcgcgagctcatgcaggttgtcctggctcgaaagcccaagatgtgcagcttcctggagtggagggacctcaaagttgtctataagagatatgccagcctctacttctgctgcgccatcgagggccaagacaatgagctcatcacactggagctgatccaccgatacgtggagctcttagacaaatactttggcagtgtgtgcgagctggacatcatcttcaactttgagaaggcctacttcatcctggatgagtttttgatggggggggatgtccaggacacctccaagaagagtgtgctgaaagccatcgagcaggctgacctactgcaagaggaggatgagtcgccacggagtgtgctggaggagatgggtttggcatagcccctgctgggccggggtgtggcgatggggtcctggcagcgtggcgggaacggctgcttctcctctgcccagggccctgttcttggtgggactcggctgcccctcctctgctgcctcacctttcggagtgagctgtgggctcaggcccttcaaacattccctccctccaccccctacctccactttccccttttcccactgaaggttttagaagctaggaggcaggaaaatgtgacccagatgggggtgctatttggcttttattccctgcctttgcagaactgatgtcaccccagatgtccttccctccctaataactgtaaatatataaatatgtcaggttaaagggaaaaggtgttcagggcacttcttgtcctctctgtcccataacctacctccaccctccccctagccagccaggcagcttctctgcctgggaggggagcctggacccccctctttctccttggctgcagtggggcctttatccagtgccagggaggaacaacatagttaatttttttctaaccttgccactttgagggaaggaagggttgggggaagggcaagctttatgggaccctggtcctggccctggcctttcactccagttctgggtgaggcaggagctgggaggggtggggagggggagggggaagtgtctgcctttatgtcctttcttctgaaataaaagtaaaagcatttctgga

SEQ ID NO: 81 - DNA, 3746 bp, Homo sapiens
ccctgattgagaaatccgcgcgcagcctccgccgctgcacactgcagcctctgctgaacccctgccgcgccgccgccttcgccagcccggaccggaccggcccgccttcccttcctccgctccagccggcctccggccccgcaacctcctcctcggcgaagtctccctggccgccccatgtcggccgcccccgcctacagcgaagacaagggcggctccgctggccccggggagcccgagtacggccacgaccccgcgagcggcggcatcttctcctccgactacaagcggcatgatgacctgaaggagatgctggacaccaacaaggattctctcaagctggaggccatgaagaggattgtggcgatgattgcccgaggaaagaatgcttcagacctgtttcccgcggtggtgaagaacgtggcctgtaagaacatagaggtgaagaagcttgtctatgtgtacctggtacgctacgctgaggagcagcaagacctggccctgctgtccatctccaccttccaacgtggcctaaaggatcccaaccagctgattcgtgccagtgccctccgtgtcctctctagcatccgtgtgcccatcatagtgcccatcatgatgctagctatcaaggaagccgcctcggacatgtcaccctatgtgcggaaaacagctgcccacgccatccctaaactctacagtttggactctgaccagaaggatcagctgatagaagtcattgagaagcttctggctgacaagaccacgctggtggcgggcagtgtggtgatggcctttgaggaggtctgcccggagcgcatcgacctgattcacaaaaactaccggaaactctgtaacctgctgatcgacgtggaggagtggggccaggtggtcatcatcagcatgctcacccgctacgcccgcacgcagttcctgagccccacccagaacgaatccctactagaggagaacgcggaaaaagccttctacggctcagaggaggacgaggccaagggcgcggggtctgaggagacggccgccgcggccgccccctcccgaaagccctatgtcatggaccccgaccaccggctgctgctgcgcaacaccaaacccctgctgcagagccgcagcgccgcggtggtgatggcggtggcgcagctctacttccacctggcgcccaaggcggaagtgggcgtcatcgccaaggcgctggtgcgcctgctgcgcagccacagtgaggtgcagtacgttgtgctccagaacgtggccaccatgtccatcaagcgccggggtatgtttgagccctacctgaagagcttctacatcaggtccaccgaccccacccagattaagatcctgaagctggaagtgctgaccaacctggccaatgagaccaacattcctactgtcctacgggaattccagacctatattcgcagcatggacaaggactttgtggcagccacaatccaggccattggacgctgtgcaactaacatcggccgagtccgtgacacctgcctcaatggcctggtgcagctgctgtccaaccgtgatgagcttgtggttgcagagtcagtggtcgtcattaagaaattgctacagatgcagccagcacaacatggagagatcatcaaacacttggcaaagcttacagacaacatccaggtgcccatggcccgagccagcatcctgtggctcatcggagagtactgtgagcatgtccccaggattgcacctgatgtcttaagaaaaatggccaagtcattcacagcagaggaggatattgtcaagctgcaggtcatcaacctggcagccaagctctacctgaccaactctaaacagaccaagctgctgacccagtatgtgctgagtctggccaaatatgaccagaactatgatattcgcgaccgggcgcgcttcacccggcagctcatcgtcccttccgagcagggtggggccctcagccgccatgccaagaagctcttcctggcacccaaaccagctccagtcttggagtcatccttcaaagaccgggaccacttccagctgggctcactgtcccacctgcttaatgccaaggccacaggctaccaggagctcccagactggccggaggaagccccagacccatctgtgcgcaacgtggaggtacctgaatggaccaagtgctcaaatcgggagaagagaaaggagaaggaaaaacccttctactcggactctgagggggagtcaggccccacggagtccgcagacagtgaccctgagtctgagagtgaatcggacagtaagagcagcagtgagagcggctctggggagtccagcagtgagtccgacaatgaagaccaggatgaggatgaggagaaagggagaggcagtgagagtgaacagagtgaggaggatggtaagaggaagacaaagaagaaggtgccagagagaaaaggagaagcgtcatcctctgatgagggcagcgattccagcagtagctcatcagagtccgagatgacatcggagtccgaggaggagcagttagaacctgcctcctggagcaggaaaacacctcccagcagcaaaagtgctcctgcaaccaaggagatctccctgcttgatctagaggatttcacccctcccagtgtccagcctgtgtctcccccagcaattgtgtctaccagtctggctgctgacctggagggcctgacactcacagactccaccctggtaccgtcgcttctgagtccagtatcgggtgttgggcggcaggagctgctgcaccgggtagctggcgaggggctggctgtggactacaccttcagccgccaacctttctccggggatccccacatggtgtccgtgcacatccacttctccaacagctctgatacccccatcaagggcctgcatgtgggcactcccaaactgcctgctggcatcagcatccaagaatttcccgaaattgagtccctggcacctggagaatctgccactgctgtaatgggcattaatttctgtgactcaacccaggcagccaacttccagctgtgcacccagacccgacagttctacgtctccattcagccacctgttggggagctgatggcccctgtgttcatgagtgaaaatgagtttaagaaggaacagggaaagctgatgggcatgaatgagatcacagagaaactcatgctgccagacacctgtcggagtgaccacattgtggtgcagaaagtgactgccactgccaacctgggtcgtgttccttgtgggacatctgatgagtacaggtttgcagggaggacactgactggtggaagcctcgttctgctgaccctggatgcccggccagctggagctgcccagctgactgtcaacagcgagaaaatggtgattggcaccatgctggtaaaggatgtgatacaggctctgacccagtgacttccaaatgctgtgacctgtttggctcccatctatacctccccatgacacctaggctgtcagtctctctcatctttctctctctctctcatcatcctcctcatgccagatagcattcagggtgtcctctctccctctggaggaccaagccctcccctaatgccctccccatggattccttagtgatctgtgcagagagagatggcagccactcccttcagtcctcccagatttctgtagctatttatgtagcaggctcaataaaatgtcttctctctaaaaaaaaaaaaaaaaaaaaaaaaaaaaaaaaaaaaaaaaaa

SEQ ID NO: 82 - DNA, 6682 bp, Homo sapiens
gcggcggcggcatcgcgggcggcggcggcgatgagcgacatagtggagaagacgctgacggcgctgccgggactctttctgcagaaccagcccggtggtgggcccgcggccgccaaggcgtccttctcctcgaggctgggcagccttgtccgcggcatcacagccctcacctccaagcacgaagaagaaaaattaatccagcaggaactgagtagtctgaaagcgactgtttctgctcctactacaacactgaaaatgatgaaggaatgtatggtgagacttatatattgtgaaatgcttggatatgatgcttcctttggctatattcatgcaatcaagttagcccaacaaggaaacctcttagaaaaaagagtaggttatttggctgtttccttatttctacatgaaagtcatgaattattgcttctccttgtgaatacagttgtaaaggatctgcagagcactaacctagtagaagtgtgtatggcactgactgttgttagccagattttcccctgcgaaatgattccagctgttcttccattaatagaagataaacttcaacattctaaggagattgtacgaagaaaagctgttctggcattatacaaattccatctcattgctcctaatcaagtacaacatattcatattaagtttcggaaagcactttgtgacagagatgttggggtcatggctgcctccttgcatatatatcttagaatgattaaggagaattcatctggatataaagacttgactgggagttttgtaaccattttgaagcaagtagttggaggaaagctcccagtagaattcaattaccacagtgtgccagcaccatggttacaaattcagctcttgagaatactgggacttctaggaaaagatgatcaaaggacaagtgaattaatgtatgatgttcttgatgaatccttacgaagagctgagttaaatcacaatgtcacatatgctattttgtttgaatgtgtgcatacagtctattctatttatcctaaatcggaattacttgagaaggctgccaagtgcattggaaaatttgttctgtcacctaaaataaatctaaaatatttaggactgaaggctcttacctatgttatccaacaggatcctactctggctcttcaacaccagatgacaataattgaatgtttagatcatcctgatcccattattaaaagagagactctggaacttctttacagaattactaatgcacagaatataacagttattgtccagaaaatgcttgaatatttacatcagagcaaagaagagtatgtcatcgtcaatttggtcggcaaaatagcagagctggctgagaaatatgctcctgataatgcatggtttattcagacaatgaatgctgtgttttcagtaggaggagatgtaatgcatcctgatattcccaataactttctgagactactagcggaaggttttgatgatgaaacagaagatcagcaattaagactctatgcagttcagtcttatctcactttactggatatggaaaatgtgttctatccacagagatttcttcaagttatgagttgggtattaggggaatattcctacctcttagataaggaaacgccagaggaagttatagctaagctctacaagttacttatgaatgactctgtgtcttcagaaacaaaagcctggttaattgctgctgtgaccaaattgacatctcaggcgcactcttctaatacagttgagagattaatccatgaatttaccatatctttggatacttgtatgagacaacatgcatttgaattaaaacatttgcatgagaatgtggaacttatgaagagcttgcttccagttgacaggagttgtgaagacttggtggtagatgcttctttatcttttctggatggttttgtggctgaaggactcagtcagggtgcagcgccttacaaacctccccatcaacgccaggaggaaaagctttctcaggaaaaagttctcaattttgaaccatatggactctccttttcttcatctggcttcactggacgacagtctcctgctggcatttctcttggttcagatgtatctgggaatagtgctgagacaggactgaaagagacaaatagcttgaagctggaaggtataaagaaattgtgggggaaagaaggctatcttcccaagaaggaaagcaaaactggtgatgaaagtggagctctgcctgttcctcaagagagtataatggagaatgtagatcaagctataactaaaaaggatcaatctcaagttcttacccaatctaaagaggagaaagaaaagcagctgctggcatcatcattatttgttggtctaggatcagaaagtacaatcaacctgctgggaaaagcagatactgtctctcacaagttcagaaggaaatcaaaagtcaaagaagctaaaagtggcgaaacaaccagtactcataatatgacctgttcttcctttagttctttgtcaaatgtggcatatgaagatgattattattcgaatactttgcacgatacaggagacaaggaattaaagaaattttctctcacttcagaacttttggattctgagtcactcacagaactgcccttggttgagaaattctcatattgtagtctgtctacaccttcattgtttgctaataacaacatggaaatttttcaccctcctcaatctactgcagcctcagttgccaaggaaagctctttagcttcatcttttttggaagaaactactgaatacatacactcaaatgctatggaagtctgtaataatgaaactatatcagtgtcttcttataaaatttggaaagatgattgtttattgatggtctggtcagtcactaataagagtggtttggaattgaaaagtgctgacttagaaatttttcctgcagaaaatttcaaggtgactgagcaacctggatgctgtttgcctgtaatggaagcagaaagcaccaaaagctttcaatatagtgtgcagatagaaaaaccttttacagaaggaaatcttactggttttattagttatcatatgatggatactcattctgctcagctggaattttctgtaaacttatcactattagatttcattagaccattaaaaatctcaagtgacgactttgggaaactctggttatccttcgcaaatgatgtgaaacaaaatgtaaaaatgtcagaatctcaagctgcacttccttctgcactaaagactctgcaacagaaactaagactccatattattgagattataggcaatgaagggctattggcctgtcagctgctcccatccatcccctgcttactgcattgccgagttcatgcagatgtattagccctgtggttcagatcctcctgttctactcttcctgactatttactgtatcagtgtcaaaaggtgatggagggatcctagcagaagccctgctaaattttactccatcaagatcaatggtttacatagataaacttatttaccaaagtaaaaagaactcatggtacttctaatgaaaatggggattattacaagtgtggtttatatgttttctttgtgattcctggtcaagaaagatccccaaaactgtatccctaacctttaactcaggattgtacagtatgtttaggtccctcaaaaagtgacctaagctaatgttataaactgctaatgatttatatatcacttagtgtgtagagggactgaaaatatttattttgttataaataattttatagcacgtttactctagtgctagctaatttgtaataaagccaagtctcagttttctgcattaaatggaagggagacatgaaattgataatctcaaacttaattcatatttggctttggaatgtagtgtatggtttttggtagggaagtcaatattttcgattatgttttgcttagatcagtgttgaactaagttggcatagcacacactaacagttgtaggagatccatgagcatgctggatattgaggggatccaatctgtgatctattttttattatagataactgttacacataatttcagatcgtttggctgtaaaatttgtctgttttccacttggagttattttaaaattcaaagtaaatcactctattcttattttgaaaactcagagccattttatatagaaacaaaacccataagagcacacagtaacaaagcaaacagatacaaaaatgactttttagttatgacaaatattttagttggttactacttaggtccttttggcaaatgaaaatttgtgattagagtataaatggcaaaactatcttttcctggcctttgaatccactagtacttaatggatatagctgaagcagagactaagtataacatacaggttcttcagtaaaatatatcattttcatgttatagttatgcctgtgtggcctctgtcagaactattatcagtaaaagaggttaagcctatatatgaatgatggaccaaaaccttgaggttgtacattaactgaaatagtattttataaaatcttatggtgctgtggaaaatatttattatttcaccttttctgacacttcaccatggagactattcaggtaatacaattttaagtcattgcagttaatactctggttaattggtactgttaatcacccaggtcaggaattctgattttaggttatctcattaatcatggctgataaagaagctaaggggattctccagatctaatagatttcattagtcatttgtgtcgagtattcctccctaaaaacaaaagcagtattttctttctcaattaatttttaagttattcattaaaaaatatataacatcttaattttattcttttaaaaacatacagtgaagccttgctacaagagtcataagtgactggaatttcttgcataataggttcctccttttgaatagatcagattcatccccaggctctcagcagtgtcatgatgaaatgagtgtgctgacttcaggggtgtggtggacactggtagctagccttatcagctccctccttattcctacctctgtcagcagcatgcctcgccccttacctaattctgctgtgactctgacagagaggaagtgccttctcactttgcaaaggaatgcagcatgtcacaaaggaggtgctccaattttttgtgtccttacttccctatgtttgcctagttactgaggctaggtcgagtgtgaagcaataggtgtaagatgctgagagcacatggacagctaccagggagatctgttgcttggttacagggtgtattcatgagtggtagctgcagttgtcgtgagagacatgcttggcatacagagctgtctaatgggtgggagacatgtaatggtagatttagggctgggagcatgattttgggtctgcccaaaggaacatggtgtcacttttgttctttctgacccactaaataaaaagtagtgtaacagggtttcactggaatgtttattagaaagtttacactttttatatttttatgattttaaaaacaaacaataatagaaaaacagattttaaggaacttcagagcagtatatattctgtctaaactcactgaatattttaagttgtaaatcaggtgtccaccaacctttatttttgcattgcaggagatgtgactgtaaagtagggagtttttttttttgagacagagtttcacccttgttgcccaggctagagtgtaatggtgcaatctccgctcactgcaacctctgcctcccaggttcaagcgattctcctgcctcagcctccctagtagctgggattacaggcatgcaccaccacacccggctaatttttttatatttttagtagagacaaggtttctccatgttggtcaggctggtctcgaactcccgacctcaggtgatctgcccgcctcagcctcccaaagtgctgggattacaggcgtgagccactgcgcccggccaaattatttttgtgggtagattcattctctttacctaatagtcataatttagtcagtgaagggacaacatctggggtaagagctatggaggaggtgctcagctttgtgagttttgtgccaggcatctttgctgaaaatggagatggcagcaagtgtgaatctgggggaatataagggaagacagaaaagccttaagagtagacggaggaagaagggtaccagaatagtccctgtggaggcaggcagatcagagctcagggtttgaaagtgggcctgagtaagggtcctgctagagaaactgcagatggaagctgagcagttaccaactgctaatgtgccaagtataccaagcacagcatgtgtcctgtagaggagcattattttaaacaatgttctactatcatctaccaaaataattgtggtaaaagtgtagtattttattttttccttttatgtcagcaatattttaaaatattgatctgtttatcttatatttttatggataaatgtagtatttgcctcatgattgtgagccactgagagtgcactgaacctattcacatgtctttaagatgttttgctgtgttaaaattttaggagagaaaaatacaagtgaataattatttaataggcatttattactttattttggagttgaattctgtcatttgaaaaagttcagtaatgtaataaatacaaagtgatctgcactgtt

SEQ ID NO: 83 - DNA, 1587 bp, Homo sapiens
cgcgtagccagtgaaggttggggagcaagcttatgcgggaaagagggagggggactccaggaaaagccgttgagaggaccatcacaacctgagcagcacaggttccagttacagccatcccttgtcataacttttgaactgtatttggaaaaatactggccaggaaagaaaaatgataaaatttttcctcatggtgaataaacaagggcagactcgactttctaagtactatgaacatgtggatattaataagcgtacacttctggaaacagaagtcataaagagctgtctctctcgatccaatgaacaatgctctttcattgaatataaggattttaagctgatatatcggcagtatgcagctctcttcattgtggttggagttaatgacactgagaacgagatggctatttatgaattcattcataactttgtggaagttttagatgagtatttcagccgagtgagtgaattagatgtatcctttttcaatactgttttccacagtacttggcaaatgcactctggtccttatcaggaaccaattgatgaacttcccaaaatatgctcagccctggagccccagcagacttgcttttctccagacagttcatcattcaaaggagctgcctccaccacccccatctactgaatagccaggggagggcaccaatgaacagcacagtatgggagacacaccaactactcttcaaatcagtgcgtacctgctctacgcgtgaaggtacagaaaacctccacggccttttcagtatttggtgcctttaaagaggcctaaggacttagtttatttgggctagactggaatgcagcagtactgccttcaggcctggacagccaggggctcctcgggccctgtgctctagaaggcccattctatgtctgcttcgccagcaccctttccccatcatggggcagatgcccaccagccctcactatctactgcttgaccatcctctgacttcctgggcccctagaatttataaggtccctagatatcccagaacctgccaccatggcctctgcaagcctctcctccaccttcaccccaagactaggggcaggaatgataagaaggctgggtggtagctgggatgtcccacctacgtgcctggggagagaagcaagagcaggctggagtctctactttgtattcttgtgaggcacaaatataggctagaatccaggccccacaaatataggctagaatccggaatgttttcttgatttaaagacatctttagaccgggcacagtggctcacgccagtaatcccagcactttggagggctgaagcaggaggattgcttgaggccgggagtttgagaccagcctgggcaacatggggagacccagtctctacaaaaaaatttaaaaagccaggcattggtggtgtgtgcctatagtcccaactactagggaggctgaggtgggaggatcacttgagcctgggggactgaggctgcagtgagccatgattgtgctactgcactccaatctggcaacagagcgagaccttgtctttaaaaataaaaataaaaacatctttacaacaaaaaaaaaaaaaaaa

SEQ ID NO: 84 - DNA, 2359 bp, Homo sapiens
cgaccgagcacagacacgttgcccaccgctcctctcccgaggtctgtagtcgcggagaaacacatgttgcgttactaacgttcagaggtctgcgacagcttcgatttgaatgactagccgggaacaccaagtttcactgtgtaattgcgtccccctactccggcgcctcctttgcgacgctccctggagaaaagcacgcccactgcacgcgctcagtcgctacttccgctctcgagtgtctccaagcaagatggcggaggagccgcagtctgtgttgcagcttcctacttcaattgctgctggaggggaaggacttacggatgtctccccagaaacaaccaccccggagcccccgtcttccgctgcagtttccccgggaacagaggaacctgctggcgacaccaagaaaaaaattgacattttgctaaaggctgtgggagacactcctattatgaaaacaaagaagtgggcagtagagcgaacacgaaccatccaaggactcattgacttcatcaaaaagtttcttaaacttgtggcctcagaacagttgtttatttatgtgaatcagtcctttgctccttccccagaccaagaagttggaactctctatgagtgttttggcagtgatggtaaactggttttacattactgcaagtctcaggcgtggggatgaaccacaaagaaaatcaacttgctactacatgaaatggattttcacggaagagacagctctgaaaagttttgatgcttgtggcaagagacttaacagatgtgatctatttagtatgtgtctactctatgtttatgcataagaaaacatccatagcatgaatggactcagaaaaatgtgatttgtattaatgcaccagtcatcataaaagatggtcatgatagtacacccattgctcctacttgttactattattgctgcagatctgcctccaaggttgaaaaggagactaagactgtataaacatcttcattgtcagttctcaaaatgactgaaattgttttcatggtaaaagttaatatactaaagggttcctttttttttaatgtttacatttatctctatgtttacctttttagtcacattgacctgctggctgaatacctcaaatagtccagtagagggcagtccaccaggcagaaaaggttaggcgttttggtttcacatctttgctggggaataataggggaaatggctgtttttgctaatttttagctaatatctagccaggagagcaagcacataggacagactgaaagactgtaattttacacaatacacatggcttaattattttattgggatacagaaaaatataaattctggacaaataagtcatatacctgttttcagtcctaacatttaaggattcttgagtcccaatcacataactgtggtgttactctgtcatttatatggtgtcaaaagcacttgatgagtaaacccagtagcatctttttgagtgtttcataatgcattttccaacttgaaaacaataattgaaaaatagccttattgtatattttatgccatgactaaaagtgccatttttactgatgctattagactgataatttcttgaagtgaaatttaacctttttttctctttagtattatgtttataatgccatatttttagaaagcattccagatcaggcatggtggcttacacctgtaatcccagcactttggaaggctgaggtgtggggattgcgtgaagccacaagtttgagaccagcctggttagcaaggcaagatccccaactctacaaaaaaataaaaattaaaaaaaaattattaggctgcagaggcaagaggatcccctgagcccagaagttcaagggtatagtgagtcgtgattgtaccactgcattcctgctgagcaacagagtgagaccccatctcaaaaaagaaaaaaaaaggcattctagtaaatcgaatgtaatgtgaatggaatttcaaaacaggatctaagatggtatgtagtagaattcaaagtaatatcattttaaagttaaatgagtatggaaaaggtctgttctctagttttgtccagttcagtttactgaaggaatatatttaattatattcatatatttaacaaataaaaatatgttgaattttcgtattgtttgccactgagggttcagatgatagacctcaaaaaatcgaaaatactggttgaaatttgtagcatccatttagttattctttttgacctaaataacttaatagtttattaaatctaaggttagctaaatatgtagctaaccttatttgttttctttcctaacaactctgaagaatacataggactttgcactttttttttttttttttttttttaaa

SEQ ID NO: 85 - DNA, 3727 bp, Homo sapiens
gtcgcggtgtgctaagcgaggagtccgagtgtgtgagcttgagagccgcgcgctagagcgacccggcgagggatggcggccaccgggaccgcggccgccgcagccacgggcaggctcctgcttctgctgctggtggggctcacggcgcctgccttggcgctggccggctacatcgaggctcttgcagccaatgccggaacaggatttgctgttgctgagcctcaaatcgcaatgttttgtgggaagttaaatatgcatgtgaacattcagactgggaaatgggaacctgatccaacaggcaccaagagctgctttgaaacaaaagaagaagttcttcagtactgtcaggagatgtatccagagctacagatcacaaatgtgatggaggcaaaccagcgggttagtattgacaactggtgccggagggacaaaaagcaatgcaagagtcgctttgttacacctttcaagtgtctcgtgggtgaatttgtaagtgatgtcctgctagttccagaaaagtgccagtttttccacaaagagcggatggaggtgtgtgagaatcaccagcactggcacacggtagtcaaagaggcatgtctgactcagggaatgaccttatatagctacggcatgctgctcccatgtggggtagaccagttccatggcactgaatatgtgtgctgccctcagacaaagattattggatctgtgtcaaaagaagaggaagaggaagatgaagaggaagaggaagaggaagatgaagaggaagactatgatgtttataaaagtgaatttcctactgaagcagatctggaagacttcacagaagcagctgtggatgaggatgatgaggatgaggaagaaggggaggaagtggtggaggaccgagattactactatgacaccttcaaaggagatgactacaatgaggagaatcctactgaacccggcagcgacggcaccatgtcagacaaggaaattactcatgatgtcaaagctgtctgctcccaggaggcgatgacggggccctgccgggccgtgatgcctcgttggtacttcgacctctccaagggaaagtgcgtgcgctttatatatggtggctgcggcggcaacaggaacaattttgagtctgaggattattgtatggctgtgtgtaaagcgatgattcctccaactcctctgccaaccaatgatgttgatgtgtatttcgagacctctgcagatgataatgagcatgctcgcttccagaaggctaaggagcagctggagattcggcaccgcaaccgaatggacagggtaaagaaggaatgggaagaggcagagcttcaagctaagaacctccccaaagcagagaggcagactctgattcagcacttccaagccatggttaaagctttagagaaggaagcagccagtgagaagcagcagctggtggagacccacctggcccgagtggaagctatgctgaatgaccgccgtcggatggctctggagaactacctggctgccttgcagtctgacccgccacggcctcatcgcattctccaggccttacggcgttatgtccgtgctgagaacaaagatcgcttacataccatccgtcattaccagcatgtgttggctgttgacccagaaaaggcggcccagatgaaatcccaggtgatgacacatctccacgtgattgaagaaaggaggaaccaaagcctctctctgctctacaaagtaccttatgtagcccaagaaattcaagaggaaattgatgagctccttcaggagcagcgtgcagatatggaccagttcactgcctcaatctcagagacccctgtggacgtccgggtgagctctgaggagagtgaggagatcccaccgttccaccccttccaccccttcccagccctacctgagaacgaagacactcagccggagttgtaccacccaatgaaaaaaggatctggagtgggagagcaggatgggggactgatcggtgccgaagagaaagtgattaacagtaagaataaagtggatgaaaacatggtcattgacgagactctggatgttaaggaaatgattttcaatgccgagagagttggaggcctcgaggaagagcgggaatccgtgggcccactgcgggaggacttcagtctgagtagcagtgctctcattggcctgctggtcatcgcagtggccattgccacggtcatcgtcatcagcctggtgatgctgaggaagaggcagtatggcaccatcagccacgggatcgtggaggttgatccaatgctcaccccagaagagcgtcacctgaacaagatgcagaaccatggctatgagaaccccacctacaaatacctggagcagatgcagatttaggtggcagggagcgcggcagccctggcggagggatgcaggtgggccggaagatcccacgattccgatcgactgccaagcagcagccgctgccaggggctgcgtctgacatcctgacctcctggactgtaggactatataaagtactactgtagaactgcaatttccattcttttaaatgggtgaaaaatggtaatataacaatatatgatatataaaccttaaatgaaaaaaatgatctattgcagatatttgatgtagttttcttttttaaattaatcagaaaccccacttccattgtattgtctgacacatgctctcaatatataataaatgggaaatgtcgattttcaataatagacttatatgcaggctgtcgttccggttatgttgtgtaagtcaactcttcagcctcattcactgtcctggcttttatttaaagaaaaaaaaggcagtattccctttttaaatgagctttcaggaagttgctgagaaatggggtggaatagggaactgtaatggccactgaagcacgtgagagaccctcgcaaaatgatgtgaaaggaccagtttcttgaagtccagtgtttccacggctggatacctgtgtgtctccataaaagtcctgtcaccaaggacgttaaaggcattttattccagcgtcttctagagagcttagtgtatacagatgagggtgtccgctgctgctttccttcggaatccagtgcttccacagagattagcctgtagcttatatttgacattcttcactgtctgttgtttacctaccgtagctttttaccgttcacttccccttccaactatgtccagatgtgcaggctcctcctctctggactttctccaaaggcactgaccctcggcctctactttgtcccctcacctccaccccctcctgtcaccggccttgtgacattcactcagagaagaccacaccaaggaggggccgcggctggcccaggagagaacacggggaggtttgtttgtgtgaaaggaaagtagtccaggctgtccctgaaactgagtctgtggacactgtggaaagctttgaacaattgtgttttcgtcacaggagtctttgtaatgcttgtacagttgatgtcgatgctcactgcttctgctttttctttctttttattttaaaaaatctgaaggttctggtaacctgtggtgtatttttattttcctgtgactgtttttgttttgtttttttcctttttcctcccctttagccctattcatgtctctacccactatgcacagattaaacttcacctacaaactccttaatatgatctgtggagaatgtacacagtttaaacacatcaataaatactttaacttccaa

SEQ ID NO: 86 - DNA, 14121 bp, Homo sapiens
attcccaccgggacctgcggggctgagtgcccttctcggttgctgccgctgaggagcccgcccagccagccagggccgcgaggccgaggccaggccgcagcccaggagccgccccaccgcagctggcgatggacccgccgaggcccgcgctgctggcgctgctggcgctgcctgcgctgctgctgctgctgctggcgggcgccagggccgaagaggaaatgctggaaaatgtcagcctggtctgtccaaaagatgcgacccgattcaagcacctccggaagtacacatacaactatgaggctgagagttccagtggagtccctgggactgctgattcaagaagtgccaccaggatcaactgcaaggttgagctggaggttccccagctctgcagcttcatcctgaagaccagccagtgcaccctgaaagaggtgtatggcttcaaccctgagggcaaagccttgctgaagaaaaccaagaactctgaggagtttgctgcagccatgtccaggtatgagctcaagctggccattccagaagggaagcaggttttcctttacccggagaaagatgaacctacttacatcctgaacatcaagaggggcatcatttctgccctcctggttcccccagagacagaagaagccaagcaagtgttgtttctggataccgtgtatggaaactgctccactcactttaccgtcaagacgaggaagggcaatgtggcaacagaaatatccactgaaagagacctggggcagtgtgatcgcttcaagcccatccgcacaggcatcagcccacttgctctcatcaaaggcatgacccgccccttgtcaactctgatcagcagcagccagtcctgtcagtacacactggacgctaagaggaagcatgtggcagaagccatctgcaaggagcaacacctcttcctgcctttctcctacaagaataagtatgggatggtagcacaagtgacacagactttgaaacttgaagacacaccaaagatcaacagccgcttctttggtgaaggtactaagaagatgggcctcgcatttgagagcaccaaatccacatcacctccaaagcaggccgaagctgttttgaagactctccaggaactgaaaaaactaaccatctctgagcaaaatatccagagagctaatctcttcaataagctggttactgagctgagaggcctcagtgatgaagcagtcacatctctcttgccacagctgattgaggtgtccagccccatcactttacaagccttggttcagtgtggacagcctcagtgctccactcacatcctccagtggctgaaacgtgtgcatgccaacccccttctgatagatgtggtcacctacctggtggccctgatccccgagccctcagcacagcagctgcgagagatcttcaacatggcgagggatcagcgcagccgagccaccttgtatgcgctgagccacgcggtcaacaactatcataagacaaaccctacagggacccaggagctgctggacattgctaattacctgatggaacagattcaagatgactgcactggggatgaagattacacctatttgattctgcgggtcattggaaatatgggccaaaccatggagcagttaactccagaactcaagtcttcaatcctgaaatgtgtccaaagtacaaagccatcactgatgatccagaaagctgccatccaggctctgcggaaaatggagcctaaagacaaggaccaggaggttcttcttcagactttccttgatgatgcttctccgggagataagcgactggctgcctatcttatgttgatgaggagtccttcacaggcagatattaacaaaattgtccaaattctaccatgggaacagaatgagcaagtgaagaactttgtggcttcccatattgccaatatcttgaactcagaagaattggatatccaagatctgaaaaagttagtgaaagaagctctgaaagaatctcaacttccaactgtcatggacttcagaaaattctctcggaactatcaactctacaaatctgtttctcttccatcacttgacccagcctcagccaaaatagaagggaatcttatatttgatccaaataactaccttcctaaagaaagcatgctgaaaactaccctcactgcctttggatttgcttcagctgacctcatcgagattggcttggaaggaaaaggctttgagccaacattggaagctctttttgggaagcaaggatttttcccagacagtgtcaacaaagctttgtactgggttaatggtcaagttcctgatggtgtctctaaggtcttagtggaccactttggctataccaaagatgataaacatgagcaggatatggtaaatggaataatgctcagtgttgagaagctgattaaagatttgaaatccaaagaagtcccggaagccagagcctacctccgcatcttgggagaggagcttggttttgccagtctccatgacctccagctcctgggaaagctgcttctgatgggtgcccgcactctgcaggggatcccccagatgattggagaggtcatcaggaagggctcaaagaatgacttttttcttcactacatcttcatggagaatgcctttgaactccccactggagctggattacagttgcaaatatcttcatctggagtcattgctcccggagccaaggctggagtaaaactggaagtagccaacatgcaggctgaactggtggcaaaaccctccgtgtctgtggagtttgtgacaaatatgggcatcatcattccggacttcgctaggagtggggtccagatgaacaccaacttcttccacgagtcgggtctggaggctcatgttgccctaaaagctgggaagctgaagtttatcattccttccccaaagagaccagtcaagctgctcagtggaggcaacacattacatttggtctctaccaccaaaacggaggtgatcccacctctcattgagaacaggcagtcctggtcagtttgcaagcaagtctttcctggcctgaattactgcacctcaggcgcttactccaacgccagctccacagactccgcctcctactatccgctgaccggggacaccagattagagctggaactgaggcctacaggagagattgagcagtattctgtcagcgcaacctatgagctccagagagaggacagagccttggtggataccctgaagtttgtaactcaagcagaaggtgcgaagcagactgaggctaccatgacattcaaatataatcggcagagtatgaccttgtccagtgaagtccaaattccggattttgatgttgacctcggaacaatcctcagagttaatgatgaatctactgagggcaaaacgtcttacagactcaccctggacattcagaacaagaaaattactgaggtcgccctcatgggccacctaagttgtgacacaaaggaagaaagaaaaatcaagggtgttatttccataccccgtttgcaagcagaagccagaagtgagatcctcgcccactggtcgcctgccaaactgcttctccaaatggactcatctgctacagcttatggctccacagtttccaagagggtggcatggcattatgatgaagagaagattgaatttgaatggaacacaggcaccaatgtagataccaaaaaaatgacttccaatttccctgtggatctctccgattatcctaagagcttgcatatgtatgctaatagactcctggatcacagagtccctcaaacagacatgactttccggcacgtgggttccaaattaatagttgcaatgagctcatggcttcagaaggcatctgggagtcttccttatacccagactttgcaagaccacctcaatagcctgaaggagttcaacctccagaacatgggattgccagacttccacatcccagaaaacctcttcttaaaaagcgatggccgggtcaaatataccttgaacaagaacagtttgaaaattgagattcctttgccttttggtggcaaatcctccagagatctaaagatgttagagactgttaggacaccagccctccacttcaagtctgtgggattccatctgccatctcgagagttccaagtccctacttttaccattcccaagttgtatcaactgcaagtgcctctcctgggtgttctagacctctccacgaatgtctacagcaacttgtacaactggtccgcctcctacagtggtggcaacaccagcacagaccatttcagccttcgggctcgttaccacatgaaggctgactctgtggttgacctgctttcctacaatgtgcaaggatctggagaaacaacatatgaccacaagaatacgttcacactatcatgtgatgggtctctacgccacaaatttctagattcgaatatcaaattcagtcatgtagaaaaacttggaaacaacccagtctcaaaaggtttactaatattcgatgcatctagttcctggggaccacagatgtctgcttcagttcatttggactccaaaaagaaacagcatttgtttgtcaaagaagtcaagattgatgggcagttcagagtctcttcgttctatgctaaaggcacatatggcctgtcttgtcagagggatcctaacactggccggctcaatggagagtccaacctgaggtttaactcctcctacctccaaggcaccaaccagataacaggaagatatgaagatggaaccctctccctcacctccacctctgatctgcaaagtggcatcattaaaaatactgcttccctaaagtatgagaactacgagctgactttaaaatctgacaccaatgggaagtataagaactttgccacttctaacaagatggatatgaccttctctaagcaaaatgcactgctgcgttctgaatatcaggctgattacgagtcattgaggttcttcagcctgctttctggatcactaaattcccatggtcttgagttaaatgctgacatcttaggcactgacaaaattaatagtggtgctcacaaggcgacactaaggattggccaagatggaatatctaccagtgcaacgaccaacttgaagtgtagtctcctggtgctggagaatgagctgaatgcagagcttggcctctctggggcatctatgaaattaacaacaaatggccgcttcagggaacacaatgcaaaattcagtctggatgggaaagccgccctcacagagctatcactgggaagtgcttatcaggccatgattctgggtgtcgacagcaaaaacattttcaacttcaaggtcagtcaagaaggacttaagctctcaaatgacatgatgggctcatatgctgaaatgaaatttgaccacacaaacagtctgaacattgcaggcttatcactggacttctcttcaaaacttgacaacatttacagctctgacaagttttataagcaaactgttaatttacagctacagccctattctctggtaactactttaaacagtgacctgaaatacaatgctctggatctcaccaacaatgggaaactacggctagaacccctgaagctgcatgtggctggtaacctaaaaggagcctaccaaaataatgaaataaaacacatctatgccatctcttctgctgccttatcagcaagctataaagcagacactgttgctaaggttcagggtgtggagtttagccatcggctcaacacagacatcgctgggctggcttcagccattgacatgagcacaaactataattcagactcactgcatttcagcaatgtcttccgttctgtaatggccccgtttaccatgaccatcgatgcacatacaaatggcaatgggaaactcgctctctggggagaacatactgggcagctgtatagcaaattcctgttgaaagcagaacctctggcatttactttctctcatgattacaaaggctccacaagtcatcatctcgtgtctaggaaaagcatcagtgcagctcttgaacacaaagtcagtgccctgcttactccagctgagcagacaggcacctggaaactcaagacccaatttaacaacaatgaatacagccaggacttggatgcttacaacactaaagataaaattggcgtggagcttactggacgaactctggctgacctaactctactagactccccaattaaagtgccacttttactcagtgagcccatcaatatcattgatgctttagagatgagagatgccgttgagaagccccaagaatttacaattgttgcttttgtaaagtatgataaaaaccaagatgttcactccattaacctcccattttttgagaccttgcaagaatattttgagaggaatcgacaaaccattatagttgtactggaaaacgtacagagaaacctgaagcacatcaatattgatcaatttgtaagaaaatacagagcagccctgggaaaactcccacagcaagctaatgattatctgaattcattcaattgggagagacaagtttcacatgccaaggagaaactgactgctctcacaaaaaagtatagaattacagaaaatgatatacaaattgcattagatgatgccaaaatcaactttaatgaaaaactatctcaactgcagacatatatgatacaatttgatcagtatattaaagatagttatgatttacatgatttgaaaatagctattgctaatattattgatgaaatcattgaaaaattaaaaagtcttgatgagcactatcatatccgtgtaaatttagtaaaaacaatccatgatctacatttgtttattgaaaatattgattttaacaaaagtggaagtagtactgcatcctggattcaaaatgtggatactaagtaccaaatcagaatccagatacaagaaaaactgcagcagcttaagagacacatacagaatatagacatccagcacctagctggaaagttaaaacaacacattgaggctattgatgttagagtgcttttagatcaattgggaactacaatttcatttgaaagaataaatgacgttcttgagcatgtcaaacactttgttataaatcttattggggattttgaagtagctgagaaaatcaatgccttcagagccaaagtccatgagttaatcgagaggtatgaagtagaccaacaaatccaggttttaatggataaattagtagagttggcccaccaatacaagttgaaggagactattcagaagctaagcaatgtcctacaacaagttaagataaaagattactttgagaaattggttggatttattgatgatgctgtcaagaagcttaatgaattatcttttaaaacattcattgaagatgttaacaaattccttgacatgttgataaagaaattaaagtcatttgattaccaccagtttgtagatgaaaccaatgacaaaatccgtgaggtgactcagagactcaatggtgaaattcaggctctggaactaccacaaaaagctgaagcattaaaactgtttttagaggaaaccaaggccacagttgcagtgtatctggaaagcctacaggacaccaaaataaccttaatcatcaattggttacaggaggctttaagttcagcatctttggctcacatgaaggccaaattccgagagaccctagaagatacacgagaccgaatgtatcaaatggacattcagcaggaacttcaacgatacctgtctctggtaggccaggtttatagcacacttgtcacctacatttctgattggtggactcttgctgctaagaaccttactgactttgcagagcaatattctatccaagattgggctaaacgtatgaaagcattggtagagcaagggttcactgttcctgaaatcaagaccatccttgggaccatgcctgcctttgaagtcagtcttcaggctcttcagaaagctaccttccagacacctgattttatagtccccctaacagatttgaggattccatcagttcagataaacttcaaagacttaaaaaatataaaaatcccatccaggttttccacaccagaatttaccatccttaacaccttccacattccttcctttacaattgactttgtagaaatgaaagtaaagatcatcagaaccattgaccagatgctgaacagtgagctgcagtggcccgttccagatatatatctcagggatctgaaggtggaggacattcctctagcgagaatcaccctgccagacttccgtttaccagaaatcgcaattccagaattcataatcccaactctcaaccttaatgattttcaagttcctgaccttcacataccagaattccagcttccccacatctcacacacaattgaagtacctacttttggcaagctatacagtattctgaaaatccaatctcctcttttcacattagatgcaaatgctgacatagggaatggaaccacctcagcaaacgaagcaggtatcgcagcttccatcactgccaaaggagagtccaaattagaagttctcaattttgattttcaagcaaatgcacaactctcaaaccctaagattaatccgctggctctgaaggagtcagtgaagttctccagcaagtacctgagaacggagcatgggagtgaaatgctgttttttggaaatgctattgagggaaaatcaaacacagtggcaagtttacacacagaaaaaaatacactggagcttagtaatggagtgattgtcaagataaacaatcagcttaccctggatagcaacactaaatacttccacaaattgaacatccccaaactggacttctctagtcaggctgacctgcgcaacgagatcaagacactgttgaaagctggccacatagcatggacttcttctggaaaagggtcatggaaatgggcctgccccagattctcagatgagggaacacatgaatcacaaattagtttcaccatagaaggacccctcacttcctttggactgtccaataagatcaatagcaaacacctaagagtaaaccaaaacttggtttatgaatctggctccctcaacttttctaaacttgaaattcaatcacaagtcgattcccagcatgtgggccacagtgttctaactgctaaaggcatggcactgtttggagaagggaaggcagagtttactgggaggcatgatgctcatttaaatggaaaggttattggaactttgaaaaattctcttttcttttcagcccagccatttgagatcacggcatccacaaacaatgaagggaatttgaaagttcgttttccattaaggttaacagggaagatagacttcctgaataactatgcactgtttctgagtcccagtgcccagcaagcaagttggcaagtaagtgctaggttcaatcagtataagtacaaccaaaatttctctgctggaaacaacgagaacattatggaggcccatgtaggaataaatggagaagcaaatctggatttcttaaacattcctttaacaattcctgaaatgcgtctaccttacacaataatcacaactcctccactgaaagatttctctctatgggaaaaaacaggcttgaaggaattcttgaaaacgacaaagcaatcatttgatttaagtgtaaaagctcagtataagaaaaacaaacacaggcattccatcacaaatcctttggctgtgctttgtgagtttatcagtcagagcatcaaatcctttgacaggcattttgaaaaaaacagaaacaatgcattagattttgtcaccaaatcctataatgaaacaaaaattaagtttgataagtacaaagctgaaaaatctcacgacgagctccccaggacctttcaaattcctggatacactgttccagttgtcaatgttgaagtgtctccattcaccatagagatgtcggcattcggctatgtgttcccaaaagcagtcagcatgcctagtttctccatcctaggttctgacgtccgtgtgccttcatacacattaatcctgccatcattagagctgccagtccttcatgtccctagaaatctcaagctttctcttccagatttcaaggaattgtgtaccataagccatatttttattcctgccatgggcaatattacctatgatttctcctttaaatcaagtgtcatcacactgaataccaatgctgaactttttaaccagtcagatattgttgctcatctcctttcttcatcttcatctgtcattgatgcactgcagtacaaattagagggcaccacaagattgacaagaaaaaggggattgaagttagccacagctctgtctctgagcaacaaatttgtggagggtagtcataacagtactgtgagcttaaccacgaaaaatatggaagtgtcagtggcaacaaccacaaaagcccaaattccaattttgagaatgaatttcaagcaagaacttaatggaaataccaagtcaaaacctactgtctcttcctccatggaatttaagtatgatttcaattcttcaatgctgtactctaccgctaaaggagcagttgaccacaagcttagcttggaaagcctcacctcttacttttccattgagtcatctaccaaaggagatgtcaagggttcggttctttctcgggaatattcaggaactattgctagtgaggccaacacttacttgaattccaagagcacacggtcttcagtgaagctgcagggcacttccaaaattgatgatatctggaaccttgaagtaaaagaaaattttgctggagaagccacactccaacgcatatattccctctgggagcacagtacgaaaaaccacttacagctagagggcctctttttcaccaacggagaacatacaagcaaagccaccctggaactctctccatggcaaatgtcagctcttgttcaggtccatgcaagtcagcccagttccttccatgatttccctgaccttggccaggaagtggccctgaatgctaacactaagaaccagaagatcagatggaaaaatgaagtccggattcattctgggtctttccagagccaggtcgagctttccaatgaccaagaaaaggcacaccttgacattgcaggatccttagaaggacacctaaggttcctcaaaaatatcatcctaccagtctatgacaagagcttatgggatttcctaaagctggatgtaaccaccagcattggtaggagacagcatcttcgtgtttcaactgcctttgtgtacaccaaaaaccccaatggctattcattctccatccctgtaaaagttttggctgataaattcattattcctgggctgaaactaaatgatctaaattcagttcttgtcatgcctacgttccatgtcccatttacagatcttcaggttccatcgtgcaaacttgacttcagagaaatacaaatctataagaagctgagaacttcatcatttgccctcaacctaccaacactccccgaggtaaaattccctgaagttgatgtgttaacaaaatattctcaaccagaagactccttgattcccttttttgagataaccgtgcctgaatctcagttaactgtgtcccagttcacgcttccaaaaagtgtttcagatggcattgctgctttggatctaaatgcagtagccaacaagatcgcagactttgagttgcccaccatcatcgtgcctgagcagaccattgagattccctccattaagttctctgtacctgctggaattgtcattccttcctttcaagcactgactgcacgctttgaggtagactctcccgtgtataatgccacttggagtgccagtttgaaaaacaaagcagattatgttgaaacagtcctggattccacatgcagctcaaccgtacagttcctagaatatgaactaaatgttttgggaacacacaaaatcgaagatggtacgttagcctctaagactaaaggaacatttgcacaccgtgacttcagtgcagaatatgaagaagatggcaaatatgaaggacttcaggaatgggaaggaaaagcgcacctcaatatcaaaagcccagcgttcaccgatctccatctgcgctaccagaaagacaagaaaggcatctccacctcagcagcctccccagccgtaggcaccgtgggcatggatatggatgaagatgacgacttttctaaatggaacttctactacagccctcagtcctctccagataaaaaactcaccatattcaaaactgagttgagggtccgggaatctgatgaggaaactcagatcaaagttaattgggaagaagaggcagcttctggcttgctaacctctctgaaagacaacgtgcccaaggccacaggggtcctttatgattatgtcaacaagtaccactgggaacacacagggctcaccctgagagaagtgtcttcaaagctgagaagaaatctgcagaacaatgctgagtgggtttatcaaggggccattaggcaaattgatgatatcgacgtgaggttccagaaagcagccagtggcaccactgggacctaccaagagtggaaggacaaggcccagaatctgtaccaggaactgttgactcaggaaggccaagccagtttccagggactcaaggataacgtgtttgatggcttggtacgagttactcaagaattccatatgaaagtcaagcatctgattgactcactcattgattttctgaacttccccagattccagtttccggggaaacctgggatatacactagggaggaactttgcactatgttcataagggaggtagggacggtactgtcccaggtatattcgaaagtccataatggttcagaaatactgttttcctatttccaagacctagtgattacacttcctttcgagttaaggaaacataaactaatagatgtaatctcgatgtatagggaactgttgaaagatttatcaaaagaagcccaagaggtatttaaagccattcagtctctcaagaccacagaggtgctacgtaatcttcaggaccttttacaattcattttccaactaatagaagataacattaaacagctgaaagagatgaaatttacttatcttattaattatatccaagatgagatcaacacaatcttcagtgattatatcccatatgtttttaaattgttgaaagaaaacctatgccttaatcttcataagttcaatgaatttattcaaaacgagcttcaggaagcttctcaagagttacagcagatccatcaatacattatggcccttcgtgaagaatattttgatccaagtatagttggctggacagtgaaatattatgaacttgaagaaaagatagtcagtctgatcaagaacctgttagttgctcttaaggacttccattctgaatatattgtcagtgcctctaactttacttcccaactctcaagtcaagttgagcaatttctgcacagaaatattcaggaatatcttagcatccttaccgatccagatggaaaagggaaagagaagattgcagagctttctgccactgctcaggaaataattaaaagccaggccattgcgacgaagaaaataatttctgattaccaccagcagtttagatataaactgcaagatttttcagaccaactctctgattactatgaaaaatttattgctgaatccaaaagattgattgacctgtccattcaaaactaccacacatttctgatatacatcacggagttactgaaaaagctgcaatcaaccacagtcatgaacccctacatgaagcttgctccaggagaacttactatcatcctctaattttttaaaagaaatcttcatttattcttcttttccaattgaactttcacatagcacagaaaaaattcaaactgcctatattgataaaaccatacagtgagccagccttgcagtaggcagtagactataagcagaagcacatatgaactggacctgcaccaaagctggcaccagggctcggaaggtctctgaactcagaaggatggcattttttgcaagttaaagaaaatcaggatctgagttattttgctaaacttgggggaggaggaacaaataaatggagtctttattgtgtatcata

SEQ ID NO: 87 - DNA, 3010 bp, Homo sapiens
actttccctttcgaattcctcggtatatcttggggactggaggacctgtctggttattatacagacgcataactggaggtgggatccacacagctcagaacagctggatcttgctcagtctctgccaggggaagattccttgacttctggggtgatggagaagaaacaggctgtgctgtgtccctaatgggaaacgtggctgagacaggggagtgagaagggtgcgttgcagaatggtgcctgtggcatgatgccagctttgcaatcatgagattcaaaagccacactgtggaattgaggaggccctgcagcgacatggagggagctgctttgctgagagtctctgtcctctgcatctggatgagtgcacttttccttggtgtgggagtgagggcagaggaagctggagcgagggtgcaacaaaacgttccaagtgggacagatactggagatcctcaaagtaagcccctcggtgactgggctgctggcaccatggacccagagagcagtatctttattgaggatgccattaagtatttcaaggaaaaagtgagcacacagaatctgctactcctgctgactgataatgaggcctggaacggattcgtggctgctgctgaactgcccaggaatgaggcagatgagctccgtaaagctctggacaaccttgcaagacaaatgatcatgaaagacaaaaactggcacgataaaggccagcagtacagaaactggtttctgaaagagtttcctcggttgaaaagtgagcttgaggataacataagaaggctccgtgcccttgcagatggggttcagaaggtccacaaaggcaccaccatcgccaatgtggtgtctggctctctcagcatttcctctggcatcctgaccctcgtcggcatgggtctggcacccttcacagagggaggcagccttgtactcttggaacctgggatggagttgggaatcacagccgctttgaccgggattaccagcagtaccatggactacggaaagaagtggtggacacaagcccaagcccacgacctggtcatcaaaagccttgacaaattgaaggaggtgagggagtttttgggtgagaacatatccaactttctttccttagctggcaatacttaccaactcacacgaggcattgggaaggacatccgtgccctcagacgagccagagccaatcttcagtcagtaccgcatgcctcagcctcacgcccccgggtcactgagccaatctcagctgaaagcggtgaacaggtggagagggttaatgaacccagcatcctggaaatgagcagaggagtcaagctcacggatgtggcccctgtaagcttctttcttgtgctggatgtagtctacctcgtgtacgaatcaaagcacttacatgagggggcaaagtcagagacagctgaggagctgaagaaggtggctcaggagctggaggagaagctaaacattctcaacaataattataagattctgcaggcggaccaagaactgtgaccacagggcagggcagccaccaggagagatatgcctggcaggggccaggacaaaatgcaaacttttttttttttctgagacagagtcttgctctgtcgccaagttggagtgcaatggtgcgatctcagctcactgcaagctctgcctcccgtgttcaagcgattctcctgccttggcctcccaagtagctgggactacaggcgcctaccaccatgcccagctaatttttgtatttttaatagagatggggtttcaccatgttggccaggatggtctcgatctcctgacctcttgatctgcccaccttggcctcccaaagtgctgggattacaggcgtgagccatcgcttttgacccaaatgcaaacattttattagggggataaagagggtgaggtaaagtttatggaactgagtgttagggactttggcatttccatagctgagcacagcaggggaggggttaatgcagatggcagtgcagcaaggagaaggcaggaacattggagcctgcaataagggaaaaatgggaactggagagtgtggggaatgggaagaagcagtttactttagactaaagaatatattggggggccgggtgtagtggctcatgcctgtaatccgagcactttgggaggccaaggcgggcggatcacgaggtcaggagatcgagaccatcctggctaacacagtgaaaccccgtctctactaaaaatacaaaaaattagccgggcatggtggcgggcgcctgtagttccagctaactgggcggctgaggcaggagaatggcgtgaacctgggaggtggagcttgcagtgagccgagatatcgccactgcactccagcctgggtgacagagcgagactccatctcaaaaaaaaaaaaaaaaagaatatattgacggaagaatagagaggaggcttgaaggaaccagcaatgagaaggccaggaaaagaaagagctgaaaatggagaaagcccaagagttagaacagttggatacaggagaagaaacagcggctccactacagacccagccccaggttcaatgtcctccgaagaatgaagtctttccctggtgatggtcccctgccctgtctttccagcatccactctcccttgtcctcctgggggcatatctcagtcaggcagcggcttcctgatgatggtcattggggtggttgtcatgtgatgggtcccctccaggttactaaagggtgcatgtcccctgcttgaacactgaagggcaggtggtgggccatggccatggtccccagctgaggagcaggtgtccctgagaacccaaacttcccagagagtatgtgagaaccaaccaatgaaaacagtcccatcgctcttacccggtaagtaaacagtcagaaaattagcatgaaagcagtttagcattgggaggaagctcagatctctagagctgtcttgtcgccgcccaggattgacctgtgtgtaagtcccaataaactcacctactcatcaagctgga

SEQ ID NO: 88 - DNA, 1300 bp, Homo sapiens
atgcggtgttccatcaggaaatgcttcatactctcagtgggcatcgtattcctgtggcccttcatcactttgaaaatccccaaggaaactgaagatgatcaaaatgtgatgactgtcaaaggccaatggggaatctcatcagtgcagcaaggggatggaagcagcctcttgtacacattggtctccctgttccgtgtttcttctaaggctgagcagaaacgtctcacggtgctggtccacctggcagattctgacctcacctggctcagagaaactcttgcccatatttcaagcctcttcagcccacagatcttgaaagggcagttgctactgatccatgcttcatccgatgcctaccccactgtggagagcatcagggatgaggcctttcatggcgaattctactccaagcagaacgtagatcatgccttcctcatgagctttgccacaaagttctctgattacttcctgttaatagaggacaatgtcttttttgcccccaactttgtcacccacattcattcaagggtgaccaccatgaagtccaactcgtgggtgctaatggagttctccaatatgggcttccttggcaaactcttccacagcagggacctcccactcctggcccatttcctccttctcttctacaaggagaaaccccttgacagcctgatttctcatttccatacgctcctggtccaggaaagcccaatcctctgcagacctttcctattctactgcagggtctcctacactgcctttgatcacaagcagaaggccacagcacttcagaaaaagaatgccgatggtcccaacaacccgcctggagctgtcttcactgatatgcaggtttccgatgtgcatttcccctgggaggcctacactctggatgagtcattcttttggacacacaacattagtataggaaaccacctgacagtgattctgaaccatccagcaaacctgagcagggtgcaagtgatgacgggctccattgtggaatgggaggtacgccctggagaaggggcaggtggagctgggctaccaacctgagggggtgccgcagcactgcaccagcttcgccttgctgggacatctttcggaggggcagatggatcagaagatacttctgaaaggtatggggtaccacgtgagctgtgtgaggctggtggtgaaagctggtcaggctggggggctcatgatcaggcatatctacctctgggagaaaaatgacaaatagcaagtggatcaatgctgaagataaatcagtagggggatgaaaaattaaaatcttaaagcc

SEQ ID NO: 89 - DNA, 1300 bp, Homo sapiens; identical to SEQ ID NO: 88

SEQ ID NO: 90 - DNA, 1258 bp, Homo sapiens
ggctctggactggggacacagggatagctgagccccagctgggggtggaagctgagccagggacagtcacggaggaacaagatcaagatgcgctgtaactgagaagcccccaaggcggaggctgagaatcagagacatttcagcagacatctacaaatctgaaagacaaaacatggttcaagcatccgggcacaggcggtccacccgtggctccaaaatggtctcctggtccgtgatagcaaagatccaggaaatactgcagaggaagatggtgcgagagttcctggccgagttcatgagcacatatgtcatgatggtattcggccttggttccgtggcccatatggttctaaataaaaaatatgggagctaccttggtgtcaacttgggttttggcttcggagtcaccatgggagtgcacgtggcaggccgcatctctggagcccacatgaacgcagctgtgacctttgctaactgtgcgctgggccgcgtgccctggaggaagtttccggtctatgtgctggggcagttcctgggctccttcctggcggctgccaccatctacagtctcttctacacggccattctccacttttcgggtggacagctgatggtgaccggtcccgtcgctacagctggcatttttgccacctaccttcctgatcacatgacattgtggcggggcttcctgaatgaggcgtggctgaccgggatgctccagctgtgtctcttcgccatcacggaccaggagaacaacccagcactgccaggaacagaggcgctggtgataggcatcctcgtggtcatcatcggggtgtcccttggcatgaacacaggatatgccatcaacccgtcccgggacctgcccccccgcatcttcaccttcattgctggttggggcaaacaggtcttcagcaatggggagaactggtggtgggtgccagtggtggcaccacttctgggtgcctatctaggtggcatcatctacctggtcttcattggctccaccatcccacgggagcccctgaaattggaggattctgtggcgtatgaagaccacgggataaccgtattgcccaagatgggatctcatgaacccacgatctctcccctcacccccgtctctgtgagccctgccaacagatcttcagtccaccctgccccacccttacatgaatccatggccctagagcacttctaagcagagattatttgtgatcccatccattccccaataaagcaaggcttgtccgacaaa

SEQ ID NO: 91 - DNA, 2442 bp, Homo sapiens
aggaggcggactctgtgaggaaacaagaagagaggcccaagatggagacggcggcggctgtagcggcgtgacaggagccccatggcacctgcccagccccacctcagcccatcttgacaaaatctaaggctccatggagccaccacggggcccccctgccaatggggccgagccatcccgggcagtgggcaccgtcaaagtatacctgcccaacaagcaacgcacggtggtgactgtccgggatggcatgagtgtctacgactctctagacaaggccctgaaggtgcggggtctaaatcaggactgctgtgtggtctaccgactcatcaagggacgaaagacggtcactgcctgggacacagccattgctcccctggatggcgaggagctcattgtcgaggtccttgaagatgtcccgctgaccatgcacaattttgtacggaagaccttcttcagcctggcgttctgtgacttctgccttaagtttctgttccatggcttccgttgccaaacctgtggctacaagttccaccagcattgttcctccaaggtccccacagtctgtgttgacatgagtaccaaccgccaacagttctaccacagtgtccaggatttgtccggaggctccagacagcatgaggctccctcgaaccgccccctgaatgagttgctaaccccccagggtcccagcccccgcacccagcactgtgacccggagcacttccccttccctgccccagccaatgcccccctacagcgcatccgctccacgtccactcccaacgtccatatggtcagcaccacggcccccatggactccaacctcatccagctcactggccagagtttcagcactgatgctgccggtagtagaggaggtagtgatggaaccccccgggggagccccagcccagccagcgtgtcctcggggaggaagtccccacattccaagtcaccagcagagcagcgcgagcggaagtccttggccgatgacaagaagaaagtgaagaacctggggtaccgggactcaggctattactgggaggtaccacccagtgaggtgcagctgctgaagaggatcgggacgggctcgtttggcaccgtgtttcgagggcggtggcatggcgatgtggccgtgaaggtgctcaaggtgtcccagcccacagctgagcaggcccaggctttcaagaatgagatgcaggtgctcaggaagacgcgacatgtcaacatcttgctgtttatgggcttcatgacccggccgggatttgccatcatcacacagtggtgtgagggctccagcctctaccatcacctgcatgtggccgacacacgcttcgacatggtccagctcatcgacgtggcccggcagactgcccagggcatggactacctccatgccaagaacatcatccaccgagatctcaagtctaacaacatcttcctacatgaggggctcacggtgaagatcggtgactttggcttggccacagtgaagactcgatggagcggggcccagcccttggagcagccctcaggatctgtgctgtggatggcagctgaggtgatccgtatgcaggacccgaacccctacagcttccagtcagacgtctatgcctacggggttgtgctctacgagcttatgactggctcactgccttacagccacattggctgccgtgaccagattatctttatggtgggccgtggctatctgtccccggacctcagcaaaatctccagcaactgccccaaggccatgcggcgcctgctgtctgactgcctcaagttccagcgggaggagcggcccctcttcccccagatcctggccacaattgagctgctgcaacggtcactccccaagattgagcggagtgcctcggaaccctccttgcaccgcacccaggccgatgagttgcctgcctgcctactcagcgcagcccgccttgtgccttaggccccgcccaagccaccagggagccaatctcagccctccacgccaaggagccttgcccaccagccaatcaatgttcgtctctgccctgatgctgcctcaggatcccccattccccaccctgggagatgagggggtccccatgtgcttttccagttcttctggaattgggggacccccgccaaagactgagccccctgtctcctccatcatttggtttcctcttggctttggggatacttctaaattttgggagctcctccatctccaatggctgggatttgtggcagggattccactcagaacctctctggaatttgtgcctgatgtgccttccactggattttggggttcccagcaccccatgtggattttggggggtcccttttgtgtctcccccgccattcaaggactcctctctttcttcaccaagaagcacagaattctgctgggcctttgcttgtttaaaaaaaaaaaaaaaaaaaaaaaaa

SEQ ID NO: 92 - DNA, 3916 bp, Homo sapiens
gcttggggccgccatcttggcaagaggcgaagcggcagcggttcctgtcaagggggcagcaggtccagagctgctggtgctcccgttccccagaccctacccctatccccagtggagccggagtgcgggcgcgccccaccaccgccctcaccatggtgctgttggcagcagcggtctgcacaaaagcaggaaaggctattgtttctcgacagtttgtggaaatgacccgaactcggattgagggcttattagcagcttttccaaagctcatgaacactggaaaacaacatacgtttgttgaaacagagagtgtaagatatgtctaccagcctatggagaaactgtatatggtactgatcactaccaaaaacagcaacattttagaagatttggagaccctaaggctcttctcaagagtgatccctgaatattgccgagccttagaagagaatgaaatatctgagcactgttttgatttgatttttgcttttgatgaaattgtcgcactgggataccgggagaatgttaacttggcacagatcagaaccttcacagaaatggattctcatgaggagaaggtgttcagagccgtcagagagactcaagaacgtgaagctaaggctgagatgcgtcgtaaagcaaaggaattacaacaggcccgaagagatgcagagagacagggcaaaaaagcaccaggatttggcggatttggcagctctgcagtatctggaggcagcacagctgccatgatcacagagaccatcattgaaactgataaaccaaaagtggcacctgcaccagccaggccttcaggccccagcaaggctttaaaacttggagccaaaggaaaggaagtagataactttgtggacaaattaaaatctgaaggtgaaaccatcatgtcctctagtatgggcaagcgtacttctgaagcaaccaaaatgcatgctccacccattaatatggaaagtgtacatatgaagattgaagaaaagataacattaacctgtggacgagacggaggattacagaatatggagttgcatggcatgatcatgcttaggatctcagatgacaagtatggccgaattcgtcttcatgtggaaaatgaagataagaaaggggtgcagctacagacccatccaaatgtggataaaaaacttttcactgcagagtctctaattggcctgaagaatccagagaagtcatttccagtcaacagtgacgtaggggtgctaaagtggagactacaaaccacagaggaatcttttattccactgacaattaattgctggccctcggagagtggaaatggctgtgatgtcaacatagaatatgagctacaagaagataatttagaactgaatgatgtggttatcaccatcccactcccgtctggtgtcggcgcgcctgttatcggtgagatcgatggggagtatcgacatgacagtcgacgaaataccctggagtggtgcctgcctgtgattgatgccaaaaataagagtggcagcctggagtttagcattgctgggcagcccaatgacttcttccctgttcaagtttcctttgtctccaagaaaaattactgtaacatacaggttaccaaagtgacccaggtagatggaaacagccccgtcaggttttccacagagaccactttcctagtggataagtatgaaattctgtaataccaagaagagggagctgaaaaggaaaattttcagattaataaagaagacgccaatgatggctgaagagtttttcccagatttacaagccactggagaccccttttttctgatacaatgcacgattctctgcgcgcaaggaccctcgactcacccccatgtttcagtgtcacagagacattctttgataaggaaatggcacaaacataaagggaaaggctgctaattttctttggcagattgtattggccagcaggaaagcaagctctccagagaatgcccccagttaaatacctcctctacctttacctaagttgctcctttatttttattttattattattattattattattattttttgagatggagtctcactttgtaacccaggctggaatgcaatggcatgatctcagctcactgcaacctccgcctcctgggttcaagcaagtctcctgcctcagcctccgagtagctgggactacaggtgcacgccaccacgcctggctaattttttgtattttagtagagacggggtttcaccgtgttgcccaggctggtcgcgaactcctgagctcaggcaatccgcccacctcagcctcccaaagtgttgggattacaggcatgagccaccatgcccagctgctcctttattttaatccctaaatataatccctaaatatagttatatttcatacttagtttgtttttaaaaagttttctctgtagaaaattttaatcattcataccctttacctttaggtttttctttctatacattcagtcaggcactgggatcatctgtttacaggcattatatttatttggcactcctggaacaagtatatctaacccattcttgatttttggactattcaggtgaactatttgaggggtatggggtctagaagttaaaagatacgcatgtcttctgttcttttcccgtatcaattcattccttcatctctttgccaagttgttttcctttcagggcctgtccttccagtttagaacagtaccatgaatcccacttgtgtcaatattaaagatagctgagaagcacctttcaaatggcacagtccctcttcaagatgtctaaaagaatggttatgtctgtccagttagggatttcacatccacatgtaatcatgtctgctgctgttgctacccaaattttcatttctccacattttgggtacttaagctaaaacgtaatggccacagtctgtaatccattcacattcctcagtttcaccacctccctcttccagactgcactctctgtcatcagtcccctcctttctaacagaaatggggttatgattttgaaggctgtgggttcagggagtctttgccaatcctgttggccctaaactatcaaggaggctccatttcaccatttgattttttgcatttcaggaggcaactgattgtttcgatatgtacatattactcacgtataccccatttccttccagtcagcccaacattttccaccagtctgtccccatctctgaaatccttccttctctttccccctaagtcttttgagtgtcatcatgtactggtggtttctcggttccatctcatccatttccttttcaatggagactacagcgtcagccagctcagccttggcttttaactcaatattccagtccataggggtggttaaaagttgctgcaaggctgcaggcactggcagtgggaagaggcagacgactagatgacttctgcacttttagctggttgaaaagtaccactcccactctgaacatctggccgtccctgcaaagagtgtactgtgcttgaagcagagcactcacacataaatggctgtgtgtggaattgcttgccaaagaagtttctagcctttccctttcccctaactgcatcagggaagaattcttatctctagcttggtttccacatgaggtttttctgagaagggcttgggacaagaagtctgtcatgttagttaagcaggcaagaaatcctactaatccagttttgtttgaaagttgtttgtccgtatgattttttaaaagtcaagtttaatttcaaaaaaccttttttttctgagattacttttggggtaatatttaaaatgagagacattttgtaaccctgtaaaatacatagggaatataacattccagtgtatacaaagaaggcaaattctttaatcaaataaagcgtattataaaatgagaaaaaaaaaaaaaaaa

SEQ ID NO: 93 - DNA, 916 bp, Homo sapiens
agcgagcccagctccggtcccagccccggccgtcccggcgtcgcttcggagcgcggcggcagctgactgcgccttcacgatccgctgggacccgcgagccccgccgccgttatgaacatccgcaatgcgaggccagaggacctaatgaacatgcagcactgcaacctcctctgcctgcccgagaactaccagatgaaatactacttctaccatggcctttcctggccccagctctcttacattgctgaggacgagaatgggaagattgtggggtatgtcctggccaaaatggaagaggacccagatgatgtgccccatggacatatcacctcattggctgtgaagcgttcccaccggcgcctcggtctggctcagaaactgatggaccaggcctctcgagccatgatagagaacttcaatgccaaatatgtctccctgcatgtcaggaagagtaaccgggccgccctgcacctctattccaacaccctcaactttcagatcagtgaagtggagcccaaatactatgcagatggggaggacgcctatgccatgaagcgggacctcactcagatggccgacgagctgaggcggcacctggagctgaaagagaagggcaggcacgtggtgctgggtgccatcgagaacaaggtggagagcaaaggcaattcacctccgagctcaggagaggcctgtcgcgaggagaagggcctggctgccgaggatagtggtggggacagcaaggacctcagcgaggtcagcgagaccacagagagcacagatgtcaaggacagctcagaggcctccgactcagcctcctagagcctgccccatcccctcctcaccccacgagctttcacaataaatttgctccgtggcactgggaaaaaaaaaaaaaaaaaaaaaaaaaaaaaaaaaa

SEQ ID NO: 94 - DNA, 1610 bp, Homo sapiens
ccgcgccagtcgcctagcaggtcctctaccggcttattcctgtgccggatcttcatcggcacaggggccactgagacgtttctgcctccctctttcttcctccgctctttctcttccctctcgtttagtttgcctggagcttgaaaggagaaagcacggggtcgccccaaaccccttctgcttctgcccatcacaagtgccactaccgccatgggcctcactatctcctccctcttctcccgactatttggcaagaagcagatgcgcattttgatggttggattggatgctgctggcaagacaaccattctgtataaactgaagttaggggagatagtcaccaccattcctaccattggttttaatgtggaaacagtagaatataagaacatttgtttcacagtatgggatgttggtggtcaagatagaattaggcctctctggaagcattacttccagaatacccagggtcttatttttgtggtagatagcaacgatcgtgaaagaattcaggaagtagcagatgagctgcagaaaatgcttctggtagatgaattgagagatgcagtgctgctactttttgcaaacaaacaggatttgccaaatgctatggccatcagtgaaatgacagataaactagggcttcagtctcttcgtaacagaacatggtatgttcaagccacttgtgcaacacaaggaactggtctgtatgaaggacttgactggctgtcaaatgagctttcaaaacgttaaatgaaattggatatctaaccaaggacatgtttgataaaattggtctaggcttgttacaacaaaattagtttgtatcttggttattaaacagtatctgggactggtttgggcagaatattaaacttattttgttgccaattattgtttaccgagtataatgttgctatttagcaatgtgcttggttttaaagaaattctccttgggaaaaaagtatcctcttttaattttacttcccataagcgtaaatgcctggacatagctcttgtgaacctttaaataaattgtttgagtgtttttgagccccagacaaataatgttttaaagttatcccttgctactttactgatacctttatcattcctgagacagtttgctaatttaaaaatgtagcattccatttgtatttatttctctcccttgccaaaaagattttctaatactgcttgtaccagccagagaaagatccaaaacactactcagctctcttgcactgaggaaatttttccccctacattgactcctggcctacatcagccaaacttaaccttggtggggtttggatttgatagccaattagttctgtgctggttgcaaagaattgatatttagatggtttttaatactcagcagattgtcttcccatattgtgtcttttttatgttgcatgttgcttttgttatcagcctgattttttgctcagtatatgatagttctgctgatgttttgtttattgggcagacatatcttcattaagagtttttggaaaactcatcaaattcgatgaatacattttcttcataacccatttggaattattcctaataaaatgataaaatacgtaaaaaaaaaggaattc

SEQ ID NO: 95 - DNA, 3250 bp, Homo sapiens
ggaagctggtggcggctggtgggcgaccgggcgcatcctcattgcagtgcggcggccctacctcggccctggcctgaccccggcggccctgcccgcccctccctccagcatcatggccagcccaagaaccaggaaggttcttaaagaagtcagggtgcaggatgagaacaacgtttgttttgagtgtggcgcgttcaatcctcagtgggtcagtgtgacctacggcatctggatctgcctggagtgctcggggagacaccgcgggcttggggttcacctcagctttgtgcgctctgttactatggacaagtggaaggacattgagcttgagaagatgaaagctggtgggaatgctaagttccgagagttcctggagtctcaggaggattacgatccttgctggtccttgcaggagaagtacaacagcagagccgcggccctctttagggataaggtggtcgctctggccgaaggcagagagtggtctctggagtcatcacctgcccagaactggaccccacctcagcccaggacgctgccgtccatggtgcaccgagtctctggccagccgcagagtgtgaccgcctcctcggacaaggcttttgaagactggctgaatgatgacctcggctcctatcaaggggcccaggggaatcgctacgtggggtttgggaacacgccaccgcctcagaagaaagaagatgacttcctcaacaacgccatgtcctccctgtactcgggctggagcagcttcaccactggagccagccggtttgcctcggcagccaaggagggcgctacaaagtttggatcccaagcgagtcagaaggcgtccgagctgggccacagcctgaacgagaacgtcctcaagcctgcgcaggagaaggtgaaggagggaaagatttttgatgatgtctccagtggggtctctcagttggcgtccaaggtccagggagtcggtagtaagggatggcgggacgtcaccacctttttttcggggaaagcagagggccccttggacagcccctcggagggccacagttatcagaacagcggtctggaccacttccaaaacagcaacatagaccagagcttctgggagacctttggaagtgctgagcccaccaagacccgcaagtccccgagcagcgacagctggacgtgcgcggacacctccaccgagaggaggagctcggacagctgggaggtgtggggctcggcctccaccaacaggaacagcaacagcgacggcggggagggcggggagggcaccaagaaggcagtgccgccggccgtgcccactgatgatggctgggacaaccagaactggtagggcccactgcgcccccgtccccagcgcccccgggcgacttcgtgtttgcactctgccctcgtcgttcctcctccttccatttgacccaagaatcagcaactgcagtgtgaggacagcgtctcgggaggcaggaccctagggagacccgggtgtgcgccgcctgcgcgtggggagtcttcggtgcgtgggggcggcttgctgtccagcctgtgtgggggccgtcccgtcccacactcccctgggcattcttggactcaaggccggggctctgcgtggcttgctgggaggtgggctgcagcacagaggcctgtgactgcgttccagcggccagttcactacgcagtatctctggggcctgggaccagccacgtgccgagctgtcagcgacgtgaggtgtcccttctcgttgagatatttaactttggttttgctctagttctttctttttgaagagagtgactggagtggtaaagatggaaatgctggaaatgatactggcgctcacgctgccatccgaccaccctcggctcccgagtccacgcctgcctgggcctgtgctgtcagacccgcgtcggtcgtaaccctctgtggctcccctgcatcagcaccgtcccaccaccaagttcaccaggttcaccagacacggcctccacaatagccacacccacacctgagctgttctcagtgctggaacttgaccatcctggaacaccctggaagaaaaaggagcgcagggtgggccctcggccctgatgcaggagggtgcgatagcggacgtggccaggcaggaggggccgggttcaggagctgagcaggggatgcctgtgcgtggtgcctgggtctagggaagctccagccccaggatggggctgccctgcacaccggtgcccgccacatgccaaccctcacctccccgaggactggatgatgtgctgccacgtgtgactcgtctcccttgtctgccctgtgtgaccctcagtcttggccagccatgcatgcgcccgaagctcgtgcagtttgtacgtgaggtgctctcctccctgccaccatgctcatcactctggccttggccatgctccctggtcaccccacttcccggtcgccgtctgcagcactcctggagcagcctgggcccttcagcccctgtgctcgtcccaccctagggactcagccacttgcagaacaggatgggaccgagatttcagcgagccctcctggcgcccggtcctccctgtgggcaccagccctcttggtagctggtgtggagggccggtgtccttggctgccacggagggatttgatcaccgaagcagccacctgctgtagttggacctgaggtcagaggcggggcatcagaggctcaaggtgctgagaagccaccgggaaagcagccagcacaaagggcccaggaagccagcccccgagagctgagcgtgggggtctttgagtgtctttctccaagctgagacgtgggcggccgcgtggtatctcccgagggctgcttggaccctggtgggctgagtgctccgaggaggggtggactccaccttggacagtgggatgtggtgttccacatgtgcctgtttccacgccagcaccttgacttggcagcatggagccaaggtctgtccccgcccaggagggtgccttcctcgggggtagggggacggcccactctgccccagggagtcccttttgatgggaagtgcagtcagcagcgtggaggtgtctgggccaccttcagaaggtggatgtggtggccgagaccccgtccacggagggtgatggcctttcccttctgcaggtgcgggcaggtgggcctgggaccggtgctggggcctctccttgctgtgtgtgagggcccaggtggaaggcgcggacctgacagcattccaataaagcatacgggaacatgca

SEQ ID NO: 96 - DNA, 3274 bp, Homo sapiens
ggaagctggtggcggctggtgggcgaccgggcgcatcctcattgcagtgcggcggccctacctcggccctggcctgaccccggcggccctgcccgcccctccctccagcatcatggccagcccaagaaccaggaaggttcttaaagaagtcagggtgcaggatgagaacaacgtttgttttgagtgtggcgcgttcaatcctcagtgggtcagtgtgacctacggcatctggatctgcctggagtgctcggggagacaccgcgggcttggggttcacctcagctttgtgcgctctgttactatggacaagtggaaggacattgagcttgagaagatgaaagctggtgggaatgctaagttccgagagttcctggagtctcaggaggattacgatccttgctggtccttgcaggagaagtacaacagcagagccgcggccctctttagggataaggtggtcgctctggccgaaggcagagagtggtctctggagtcatcacctgcccagaactggaccccacctcagcccaggacgctgccgtccatggtgcaccgagtctctggccagccgcagagtgtgaccgcctcctcggacaaggcttttgaagactggctgaatgatgacctcggctcctatcaaggggcccaggggaatcgctacgtggggtttgggaacacgccaccgcctcagaagaaagaagatgacttcctcaacaacgccatgtcctccctgtactcgggctggagcagcttcaccactggagccagccggtttgcctcggcagccaaggagggcgctacaaagtttggatcccaagcgagtcagaagttttggggtcacaagcagcagccggagccggcgtccgagctgggccacagcctgaacgagaacgtcctcaagcctgcgcaggagaaggtgaaggagggaaagatttttgatgatgtctccagtggggtctctcagttggcgtccaagggagtcggtagtaagggatggcgggacgtcaccacctttttttcggggaaagcagagggccccttggacagcccctcggagggccacagttatcagaacagcggtctggaccacttccaaaacagcaacatagaccagagcttctgggagacctttggaagtgctgagcccaccaagacccgcaagtccccgagcagcgacagctggacgtgcgcggacacctccaccgagaggaggagctcggacagctgggaggtgtggggctcggcctccaccaacaggaacagcaacagcgacggcggggagggcggggagggcaccaagaaggcagtgccgccggccgtgcccactgatgatggctgggacaaccagaactggtagggcccactgcgcccccgtccccagcgcccccgggcgacttcgtgtttgcactctgccctcgtcgttcctcctccttccatttgacccaagaatcagcaactgcagtgtgaggacagcgtctcgggaggcaggaccctagggagacccgggtgtgcgccgcctgcgcgtggggagtcttcggtgcgtgggggcggcttgctgtccagcctgtgtgggggccgtcccgtcccacactcccctgggcattcttggactcaaggccggggctctgcgtggcttgctgggaggtgggctgcagcacagaggcctgtgactgcgttccagcggccagttcactacgcagtatctctggggcctgggaccagccacgtgccgagctgtcagcgacgtgaggtgtcccttctcgttgagatatttaactttggttttgctctagttctttctttttgaagagagtgactggagtggtaaagatggaaatgctggaaatgatactggcgctcacgctgccatccgaccaccctcggctcccgagtccacgcctgcctgggcctgtgctgtcagacccgcgtcggtcgtaaccctctgtggctcccctgcatcagcaccgtcccaccaccaagttcaccaggttcaccagacacggcctccacaatagccacacccacacctgagctgttctcagtgctggaacttgaccatcctggaacaccctggaagaaaaaggagcgcagggtgggccctcggccctgatgcaggagggtgcgatagcggacgtggccaggcaggaggggccgggttcaggagctgagcaggggatgcctgtgcgtggtgcctgggtctagggaagctccagccccaggatggggctgccctgcacaccggtgcccgccacatgccaaccctcacctccccgaggactggatgatgtgctgccacgtgtgactcgtctcccttgtctgccctgtgtgaccctcagtcttggccagccatgcatgcgcccgaagctcgtgcagtttgtacgtgaggtgctctcctccctgccaccatgctcatcactctggccttggccatgctccctggtcaccccacttcccggtcgccgtctgcagcactcctggagcagcctgggcccttcagcccctgtgctcgtcccaccctagggactcagccacttgcagaacaggatgggaccgagatttcagcgagccctcctggcgcccggtcctccctgtgggcaccagccctcttggtagctggtgtggagggccggtgtccttggctgccacggagggatttgatcaccgaagcagccacctgctgtagttggacctgaggtcagaggcggggcatcagaggctcaaggtgctgagaagccaccgggaaagcagccagcacaaagggcccaggaagccagcccccgagagctgagcgtgggggtctttgagtgtctttctccaagctgagacgtgggcggccgcgtggtatctcccgagggctgcttggaccctggtgggctgagtgctccgaggaggggtggactccaccttggacagtgggatgtggtgttccacatgtgcctgtttccacgccagcaccttgacttggcagcatggagccaaggtctgtccccgcccaggagggtgccttcctcgggggtagggggacggcccactctgccccagggagtcccttttgatgggaagtgcagtcagcagcgtggaggtgtctgggccaccttcagaaggtggatgtggtggccgagaccccgtccacggagggtgatggcctttcccttctgcaggtgcgggcaggtgggcctgggaccggtgctggggcctctccttgctgtgtgtgagggcccaggtggaaggcgcggacctgacagcattccaataaagcatacgggaacatgca

SEQ ID NO: 97 - DNA, 3372 bp, Homo sapiens
gggagcagtgcccgagcgcggtttctcttaaggttctgcagggcaaggctgtctgggacaggcttggccatggatccgctctcagagctgcaggatgatctgaccttggatgacaccagcgaggctctgaaccagctgaagctggcctccatcgatgagaagaactggccctcggatgaaatgcctgacttccccaagtcagatgactccaaaagcagctccccggaacttgtcacacacctgaagtgggatgacccatactatgacatcgcccggcaccagatcgtggaggtggcaggagatgacaagtatgggcggaagatcattgtgtttagtgcctgtcgaatgccccccagccaccagctcgaccacagcaagctcctggggtacctgaagcacaccctggaccagtacgtggagagtgactacacacttctgtatctgcaccacggcctgaccagcgacaacaagccctccctcagctggctccgtgatgcctaccgggagtttgaccgcaagtacaagaagaacatcaaggccttgtacatcgtgcatccaaccatgttcatcaaaactctgctcatcctcttcaagcccctcatcagcttcaagttcgggcagaagatcttctatgtgaattacctgagcgagctgagcgagcacgtgaagctggagcagctggggatccctcgccaagtgctcaaatatgacgacttcctgaaatccacacagaagagccccgcgacagcccccaagcccatgcccccacggccccccctgcccaaccagcagtttggagtctcgctgcagcacctccaggagaagaatccagagcaggagcccattcccattgtactcagggagactgttgcctacttacaggcccacgctctcaccaccgagggcatcttccggaggtcggccaacacccaagtggtccgggaagtgcagcagaagtacaacatggggctgcctgtggatttcgaccagtacaatgagctgcacctgccagcagtcatcctcaagaccttcctccgggagcttcctgagcccctgctcacctttgacctctacccccatgtggtgggcttcctcaacattgatgaaagccagagggtgccagcgacactgcaggtcctccagacgctgcccgaggagaactaccaggtgcttcgtttcctgactgctttcctggtgcagatttctgcacacagtgaccagaacaagatgaccaacactaacctggctgttgttttcggccctaacctgctgtgggccaaggatgcggccatcaccctcaaggccattaatcccatcaacaccttcaccaagttccttctggatcaccaaggggagctgttcccaagcccggaccccagcgggctctgaacctggcccctgccccaccagccccttctctggtagcccgggtttggactcttcctcctggcatcaggggccatgaagccccctggagagagatgttggagccacccatcaggcatgctctcccccacctctgtccagcccgcctcacggccctggcggcctcgctgttaccagaagacgtttttctctgccttacacttctcactgcctctctggacaccgggcttttgctgggctctccagagctgggcttggctcttccagctggagaaggactgagccccagtaacccctttcctgctttttcctgcctctgtttccctagcaagtgtggatgaatcaaatgactgccggctgggctggtagcaggggccagtcctcccctcttgattgctgggaatgagcagctgagctctttggtgtggacaccgccccaagctgaggtgcctccctatctggtaggctgccctgctttgcagaagccccactgcatgaaggcctgagtgcaagcacccttgctcctgtactgcccccagcagcgcagtctggggtatttcccctgctgaggagtgacagggctggagactgtgtctgctttctgcctcctcttccacacatcctgggtcagcctttcccaagtgatactgcccctggggtgtcctaaccccttggttgtgcagggactggtagcttggatgacatggctcagagtcccagcatccacttgaaacctccctctccacctccccgcccccgagagctacagcgtgtgatggaatcagtgaccggccaggttagcctctcccctcttggcctcctttcccacacgggcagatcatcagccttcatgttcttgtggacctgtctgttacggagtcacactggcccctgccccagccagaggtgactcagtgcctcaggatcttatggctccttcctccagctgggggactcttaaaggggctggggtagagactaagagtgcccgtaggaggggcagagattgtgctgataggtcagtccagataggtgggttctagcaatttccccaggggattaaggggctctagggccacctttttttttttttttctgagatggagtctcgctctgtcaccaggctggagtgcagtggcgcgatctcggcacacctccgccttctgggttcaagcaattctcctgcctcagcctcctgagtagctgggactataggtgcatgccaccatgcccagctaatttttgtatttttagtagagacggggtttcaccatgttggccaggatggtctcgatctcctgacctcatgatccacccacctcggcctcccaaagtgctgggattccaggcgtgagccactgcgcccggccagccctgttgtctttcaaagaacctcggccccagtgatggctgatctcactcccactgtctcgtagaattacactccttcctggggatccctcttcctgcagccttgtccttggggagtacagggaagtacctgcagtgaccctgcccccatgaccttggccaggcaggatgattccagagcccgtactgtggggatcctcactgaccagcccagccccatccgcaagccaggctgggcctgggcataacttcgctgggctctcccaagaccatcagcagtgcatccagccccctggggcctgggctgctgctggttcttcatcagtcccttggtctctagcctcggccagggctgctctgctctccgccctcctttgtgtatcaagtgtcgctcacagccccattcactggggagcctttcggatctatttggtctttctcatgtcccccactggtctgtaccccagggagcgggtgcttgtactgtgtgaatccagtgttcacattcacacttaatgacttccttggcaccaatcatgtatttcaccgtttgcactttttgtatttcaataaaaatgttgatgcaaaaaaaaaaaaaaaaaaaaaaaaaaaaaa

SEQ ID NO: 98 - DNA, 6207 bp, Homo sapiens
gaggcgcgtgtccgtgcactagaggcccccgtgcgtgacacaggccgatgagctcctgcgggctgcacccacgcggagtcacagaccgaaaagcccgcggtgtcgagcgcaggcggaggtacatggccccgacgggaggcgcgcggcgagcacccggagctcggctccctgcctgagcacggcagccgcgcctccgcccgcgcgtcctcgcccctccggccggcagcccgcggacatgatcgtgtagcctcctcctgggctgggatttgtttgaagattttcttcatggaagcgatgtccccccagcaggagactctagggggacagccggggcgctcctcttccctgacaggagtgtctcggctcgcgggaggcagctgcaccaagaagaaaatgaaaacactagcagaaaggaggaggagcgctccatctcttatcctggataaagccctacaaaaacggcctactaccagggacagtccttctgctagtgttgacacatgcacatttctgtcatcattagtgtgctccaataggactctgctgattgatggccgggcagaactcaaaagaggcctccagaggcaggagcggcatcttttcctattcaatgatctgtttgttgtggccaaaatcaaatataacaataactttaagataaaaaataaaattaaattaactgatatgtggacagcaagctgtgtggatgaagtgggagaaggcaacaccaatgccatgaaatcctttgttttgggctggcccacagtgaactttgtggccactttcagttctccagaacaaaaggacaaatggctctctctccttcagagatacatcaatctagagaaagaaaaggactacccgaagagcattcccctcaaaatcttcgccaaggacattgggaattgtgcctactctaaaactataacagtaatgaattcagatacagcgaatgaagttatcaacatgtcattaccaatgctagggataactggctctgagagagattaccagttgtgggtcaattctggcaaagaagaggctccatacccactcattgggcatgaatatccatatggaattaaaatgagccatcttcgagactctgcactcctgacaccgggatcaaaggactctaccacccctttcaacctccaggagcccttccttatggaacagctcccccgagagatgcagtgccagttcatcctgaagcccagccgcctggctgcagcccagcaactgagtgattcaggtcataagacatttaaaaggagaagatctatcataaactgggccttctggcgaggttctagcactcacctggacaacttgccctcatcgccaacatcacctatgccaggacagctctttggaatttctctgccaaatatttgtgagaatgacaatctgcccaaacctgtcttggatatgcttttctttcttaatcaaaaaggacctctcaccaaaggtatcttcaggcaatcagccaatgtgaaatcctgcagagaactaaaagagaaattgaattctggagtcgaagtacacctagactgtgaatctatttttgtgatagcatctgtcttaaaggattttctgcgaaatattccaggaagtattttttcatcagatctctatgatcactgggtctctgtaatggatcaaggaaatgatgaagagaaaataaatactgttcaaaggctattagaccagcttccgagagccaatgttgttctcctaaggtatctttttggggtgttacacaacattgagcaacattcctcatccaatcagatgactgcatttaatttagctgtgtgtgtcgctccaagtattctttggcctcctgcttcctccagcccagaactagaaaacgaatttacaaaaaaggtttccctgcttatacaatttctgattgagaattgccttaggatatttggagaagaaatcacttccctcttcagagaggtttcagtgagatgtgacactagagagaatgcctcagatatttcttgctttcaactgaatgactcctcctatgacagcttggaaaatgagctaaatgaggatgttgatgcaccatgcagtgacttggtaaagaaacttggccaggggagcagaagcatggactctgtcttaaccctcagtgactatgatcttgaccagcccgaggtggaaggccttttaaccctaagcgactttgacttggcccattctaaagatgaagatgttcaaatgaaacggcctcttgaatccaagccggtgaacattttagtgtacacaaagatcccactgcgggatcatgccagggccccatctgccatgtgcacacccagctacctgtccacagctgcagcaaatgctgcaaaaagcctgaggcgacaccggcgttgctcagagcccagcatcgactatctggattcaaagctttcctacctcagggagttttatcagaaaaagctacgcaagtccagctgtgatgcaattctttctcaaaaagatgaagactatctgaagcagaatcaacccctccaggaggaaggaaagacatgttttaaacagagtttagtcacaggcactgatgtcagcaagaaaaatgccactactcaaaacactaagaagaaaagcttgtctggtagtgaaggaaatcacgtgaaacttttccctaagtctaagccagtggccatttctgtggcatcttatagtcctatgtcctcacaggatcattccaagaaccagccctttgatgtgaatacatctggatactccccaccacacacagcagatgccctcaagggtccaaggacacatcggcgctgctcagagcccaacatagaagaccagaaccgcaagctgacctatctcaggggaatttattcaaagaaacaacataaaaccagctgtgaagctggtctcttgcatggagaggaggattatctcaaacggcataagtctttgcaaatggaggggcagaagctcattaatcagagtttagtcatggggattgaggtgggcaagagtagtgccacaaaccaaaacactgagaaggttttacccccaagattaaacctttgcccaaggaccagctattccagcttatcctccccaggcacttccccatccggctcatcagtaagctcccaagacagtgctttttctcagatttctgaacactctgtgtttacacccactgagacttcctctccaatagattgcacttttcaggctcagagaaaacgggaagacctttctcctgactttagcaatgccagccatgtttccggaatgcccggtccctcatcagggcaggcttgcagccgcccagcctatacaaagaaggacaccatggagtggcattcacaaatgcattctgtaactcttcatcccagcacatggttgagaaatggtgtggccagtttgaaaaactggtccctcaaaaagaaagcaaaggcagccagaccagaggaagagaaaatagcttctccaaaaggacccttagagccacccccacatgcttctggtgttccagaagccaactcactgcaagaggaacaaaaagacttgcccttaagggcagctgaaggactgtcccctgtgcagtcagcccaaaggtgtagttcttctcccttccaggactcagagagacactgtagctctccattcagcctggtggagagcagacttaagctgtgcatgaagtcacatgaggaaatagagcctggtagtcagagctcttctggttctctgccttgggaaagagcctcagccagctcttggactctagaggatgcgaccagcccagactcagggcctacagtggtctgcgacattgaggacaggtatttaaccaaagacatttaagcatagtaagaatctgatgtccacaagaacaggaactgggttaataataatagacaataattattatgacccctttgtataagatacctgggagaggtagcataaggattatcattgctaatacttaggacaacgaaataattctctttattgagactacttgacaaatactttatgctaaaaattttgtcacctaagtgtttgggaggctttttcttattaaaggttggtattggtcctgtcatgtggttttagagatactaacagagggctagagaaagcatcttctgcagaggaagcacttatgggaacagtctgtgagattgatgtcctgagaagaccaagatatcaggaatgaggaataggggcctgaggagagaggggaagggtacagagaaaccatctacattccatggaatgtttttaataagtaggcaagaaaaatgccactaatcaaagcattaagtgtgtccagtaataaagaacatcatataaaatctttccctaaatctaagccagtggccatttttgtgggatcttactaatcacgtgtccttacagaatcattccaagaaccagcccattgctacagctagagtggagaaaaacagagtgactcaaaagccatgggtaccatgatatcagttttgttggttgtatttgtcggtttgttttttcattcatgttgaagtgctttgcaaggcttcaggaaacagagttgtgaggagaaagaagaaaatggctgcccatttcagtaccctttcaaaggtatctctgcctaggaacattcttcagaaatgcaacttcttctatttagaaggtgacctcctgacagcgttcactctcaatatggaggaaaagaccacaacaactgtcctttctcaattacacaaatgctgttaaaatgtgatcaaaccatggcatcactttgctgaaatgtttctgcacagtcctgcctcttagattacagtcagccagaaaaacatacttataaatcatcccttttctgatttttgtagtttggcaattgagagagcaatattgaggttggccggttataaggagtcccacaatagaatacccaacaaagtggctgccaggccttctcagacagccatttgctttgggttttgcttccagacgttgttccatatttttgccccaaatgtttcatggcttataccccattggtttattttatatccatggacctttctttctctgctttcttgacttaaaggttgcagcagtacatctcgtcacctaggaatagattatcaggccttgccaactagtatgcagggatggcactaaaaatggatgtgcatcttctttcacattaactactaacctataagaagttgctctgagcccatttatttaaactctttagttcaccatcagatggacctttctctcacaagctagcttattccaaattatttgtcttattaatcaccagaaaatggtcatatcaaatgttctttcttttttgttctaaaggttgcattttcagttataggggaaaaaatattttctctaagatagaagaagttatttcagtattagctataggtgctacctacctcttggggacatggccctgtttgcgctaaccattacaatgatcttttagaactctgtatccaaagagctacttcgtgacactggccatctgagtcacagatgtgaagtcgatttcactttataactaaccagtcctacatattaagacttctaagtgtccatatgcctcttttttggtataatatataaagtcagcagggactcccctttcccttagggcatactactgtcagtcagaactgcaagatgtgaatgaagctcttaacggcttggagtgtctttctggaagaaattgccttttttttttttttcatgttagcaggtaaaaaatcattcacccaatttgaagcatagaagaaaatagttgctgaggttttttaataaccattcctactatctgtgttcccttagatactcctgtaattcttaatgtgaatagtttgttaatattgctgtaaagtattatattgtatgatttgaagacagactatatgtcattttattatactccatcaatctataatatattagactgatgctttatctaaaatgctttgagtttgtataatatatcttgacaaattttactaccatatgttatgtaataaatgtgtatttttgtacttgcagaaactgctgctaacttttaaagttgtttggttttcaaggcactgataatggatatgtatgaagtccatgctgtctgttaaataaaatgccattctgcagaattaaccatccaaaaaaaaaaaaaaaaaa

SEQ ID NO: 99 - DNA, 3044 bp, Homo sapiens
ctgacatgctgacatcgccccctgaggacttggctgcaaccccagagcccccagggtgtcccggagccctggaccgtgctggcagctggacggagctccctggctgagggccaggtgggtggcagagcaaaagaggaatggactgtgggccacctgctaccctccagccccacctgactgggccacctggcactgcccaccaccctgtagcagtgtgccagcaggagagtctgtcctttgcagagctgcccgccctgaagcccccgagcccagtgtgtctggaccttttccctgttgccccagaggagcttcgggctcctggcagccgctggtccctggggacccctgcccctctccaagggttgctatggccattatccccaggaggctcagatacagagatcaccagcggggggatgcggcccagcagggctggcagctggccacactgtcctggtgcccagcccccagctctggagggaccctggagtccccgacacacacagccacagcgccgggccagccacggctcggagaagaagtctgcctggcgcaagatgcgggtgtaccagcgtgaagaggtccccggctgccccgaggcccacgctgtcttcctagagcctggccaggtagtgcaagagcaggccctgagcacagaggagcccagggtggagttgtctgggtccacccgagtgagcctcgaaggtcctgagcggaggcgcttctcggcatcggagctgatgacccggctgcactcttctctgcgcctggggcggaattcagcagcccgggcactcatctctgggtcaggcaccggagcagcccgggaagggaaagcatctggaatggaggctcgaagtgtagagatgagcggggaccgggtgtcgcggccagcccctggtgactcacgagagggcgattggtccgagcccaggctagacacacaggaagagccgcctttggggtccaggagcaccaacgagcggcgccagtctcgattcctccttaactccgtcctctatcaggaatacagcgacgtggccagcgcccgcgaactgcggcggcagcagcgcgaggaggagggcccgggggacgaggccgagggcgcagaggaggggccggggccgccgcgggccaacctctcccccagcagctccttccgggcgcagcgctcggcgcgaggctccaccttctcgctgtggcaggatatccccgacgtacgcggcagcggcgtcctggccacgctgagcctgcgggactgcaagctgcaggaggccaagtttgagctgatcacctccgaggcctcctacatccacagcctgtcggtggctgtgggccacttcttaggctctgccgagctgagcgagtgtctgggggcgcaggacaagcagtggctgttttccaaactgcccgaggtcaagagcaccagcgagaggttcctgcaggacctggagcagcggctggaggcagatgtgctgcgcttcagcgtgtgcgacgtggtgctggaccactgcccggccttccgcagagtctacctgccctatgtcaccaaccaggcctaccaggagcgcacctaccagcgcctgctcctggagaaccccaggttccctggcatcctggctcgcctggaggagtctcctgtgtgccagcgtctgccccttacctccttccttatcctgcccttccagaggatcacccgcctcaagatgttggtggagaacatcctgaagcggacagcacagggctctgaagacgaagacatggccaccaaggccttcaatgcgctcaaggagctggtgcaggagtgcaatgctagtgtacagtccatgaagaggacagaggaactcatccacctgagcaagaagatccactttgagggcaagattttcccgctgatctctcaggcccgctggctggttcggcatggagagttggtagagctggcaccactgcctgcagcaccccctgccaagctgaagctgtccagcaaggcagtctacctccacctcttcaatgactgcttgctgctctctcggcggaaggagctagggaagtttgccgttttcgtccatgccaagatggctgagctgcaggtgcgggacctgagcctgaagctgcagggcatccccggccacgtgttcctcctccagctcctccacgggcagcacatgaagcaccagttcctgctgcgggcccggacggaaagtgagaagcagcgatggatctcagccttgtgcccctccagcccccaggaggacaaggaggtcatcagtgagggggaagattgcccccaggttcagtgtgttaggacatacaaggcactgcacccagatgagctgaccttggagaagactgacatcctgtcagtgaggacctggaccagtgacggctggctggaaggggtccgcctggcagatggtgagaaggggtgggtgccccaggcctatgtggaagagatcagcagcctcagcgcccgcctccgaaacctccgggagaataagcgagtcacaagtgccaccagcaaactgggggaggctcctgtgtgatgggcagccatggcctaggaccccacctccatgcctggctcctggatggtcctggaggggcctgcagtgtctccattccccaagctgctcctgctggcacttcgcttctgtggccttggcattgagggcacaggctggacacaggaatgggggcgcctccagagggtctctccgtcctcatgctcctcagtgtccacacttcaaggccaaggatagtttcttcctctgacatggggaccataacaggtgatcactgatacctggcaaagactggggccctctcctttctatgtcctcaatcctgcctgactcttggtccttctggcagggacctggctggggaacgttctggtgctgatggtgctgggacctatatgtatatttatatatatctggggtcttgtctaccacctcccctggtcagagcctgagtgggtgctggttgctgtgtcttgtctgtaaataaactcctatcatgccttttaaaaaaaaaaaaaa

SEQ ID NO: 100 - DNA, 3561 bp, Homo sapiens
ccggctgtcggtctccgtgtcgccgccgccgcccggcatcgtggagctggggcccccttttgcctgggagttttgtagtcgcctagggtcagcggtgacatcccaaagggcaggcccggcagccgccatggtggccaaggattaccccttctacctcacggtcaagagagcgaactgcagcctggagctacctccggccagcggtccggccaaggacgctgaggagcctagtaataaacgggtcaaacccctttcccgagtcacgtcgctagcaaacctcatcccgcccgtgaaggccacgccattaaagcgcttcagtcaaaccctgcagcgctccattagcttccgcagtgagagccgccctgacatcctcgccccccgaccctggtccagaaatgccgccccctcgagcacgaaacggagagatagcaagctgtggagtgagaccttcgatgtgtgcgtcaatcagatgcttacatccaaggaaatcaaacgtcaggaggcgatctttgagctttcccaaggagaagaagacttgatagaagacttgaaattagcaaaaaaggcctatcatgaccccatgctgaaactctccataatgacagaacaagagttgaatcaaatttttggaacactggactctctaattcctctacatgaagagctccttagtcagcttcgagatgttaggaagcctgatggctcgactgaacatgttggtcccatcctcgtgggctggctcccttgcctcagctcctatgatagctactgcagcaatcaagtagccgccaaagctctgctggaccacaaaaagcaagatcaccgagtccaggatttcctacagcgatgtttagaatccccctttagccgcaaactagatctctggaatttcctcgatattccaagaagccgcctggtaaaataccctctgcttctccgagaaatcttgaggcacacaccaaatgataatccagatcagcagcacttggaagaagctataaatatcattcagggaattgtggcagaaatcaacaccaagactggtgaatctgaatgccgctattataaagagcggcttctttacttggaagaaggccagaaagactccctgatcgacagctctcgagtcttgtgttgtcatggtgaactgaagaacaatcggggcgtgaaactgcatgttttcctgttccaagaagtgcttgtgatcactcgagccgtcacccacaatgagcagctttgctaccagctgtaccgtcagccaatccccgtgaaagacctcctgctggaagacctccaggatggagaagtgaggctgggtggctccctgcgaggggcattcagcaacaatgagagaattaaaaacttcttcagagtcagtttcaaaaatggatcccaaagtcagacccactcgctacaagccaatgacactttcaacaaacagcagtggcttaactgtattcgtcaagccaaagaaacagttttgtgtgctgccgggcaagctggggtgcttgactccgagggatcgttcctaaatcccaccaccgggagcagagagctacagggagaaacaaaacttgagcagatggaccaatcggacagtgagtcagactgtagtatggacacgagtgaggtcagcctcgactgtgagcgcatggaacagacagactcttcctgtggaaacagcaggcacggtgaaagtaacgtctgacagaagcatgtgcacttcgggaagcaggcctgcatcttacctgtacagtatttgcattccacagatggaacggtttggagaagcactttttcatacttttgtgaaagtatacatgttggcccagtctctcgtatctgtacctttgtccctagtactgtaactgccaatctgtctgtgtaagctggaatctgtggcaactattaccctgtgttgtatttcccaagtgtctggatggatggagaggtactcaaacaagttactttcagttgtcctgctggattttaaaaaaatagaaaaagaatctcaaaactactgttttacatagattgtttgaagagtccttcctcttgtgcttctgtaccactttcccagctcttagatgtggtagctaaaggcacggaatttagacggccttgtaaatagggcatgaggaactcatctgtgtattgggatggtattagagagagaatcaggaaagaccaactcatgaagtgaacttggtttgatcttactcaactagaaagcttgaaaacatccctggggattctgaaggcttaattttgcaaaggaggatgcattgtctgaactttgcaacttcatccagtgcaagtttgatgcaagaatgtattaggacataaaatagaggctgaccttaaaagggccaggacagaagcggctgccagctctgaatctttaactgaaatgcacatggcaccaggaggtgtctctcatagttggttgctagcctaaaacatcagaatagaacccaaagggcttaggaaggcctgccaggataacaagaaggccctgtattcattgtgtttcatctgcctaggcctactcattattttagagaatgaatgaagcaacaaggaagagagaacatgactctatcgatgacactgtttatagaaacacaggagaggaagaatttggaatgaaaagcacttcgtcagaaccttctgtgggagccattgagagaaaagcatggtccagtgccttctgagaaaggccagagctttgggctttcctgctctgcttttgggtcgtcaatttgccatctctggttctgtgctataatcagaattgtaattatgttctccagaggccaatttcattaactctgattaattagaatcagctagccagattagtaacctctttgtccagccttgatttacagtgcagggtaaagtgcagaccttaaaaacagctaagtacctagaagagctccctgcaagtgtaaatattaaggatgacctgtgcaaaattatacccacaccagcactagtggtaattattctaaattattgccaaaaagttttttttaatctgtctttcaagtttacagaaaagaaagcagtaaatgcattgatgtcattttattatgtacatatatcatgtgcattcaagctgtgtgacaagatatatcaatataaaaacaaggtatatactttattattttttgaaaacaaggatattgtgatcaattttaccctgtaaaacatatttctgtatttataggtcttaaacatgatgaattttttctattacaagtttatttaaaactgctttctcaagtcgttattgatacagcaagtgaacctgctgcagacagaagcagaggaaagccaagaacagcctttattggtgaagaaaagaatgaatgattctttgtaggcgccatcagccacttttagaagccatcagccagtgtgttgggaaaagaggtttgtcaagtgttggcctatgggaaggtggtcaatgaatgttttgatgaaatgaatgtttttgtataatggccttaaacttttctggaagtatttcaaataaattacattattaagtcatca

SEQ ID NO: 101 - DNA, 5377 bp, Homo sapiens
gcgggtggggcggccgggcctgcgctggggacggctctggggactgcggccggcgccgggacctggaggggacgctggggccgaagcagcatgtgacaccgaccaggattcagccctgatggaggctgaggaggcccagcgtggagcctctcctcccatctctgccatagaggaattcagcattatccctgaggctcccatgaggagcagccaggtctctgccttggggcttgaagctcaagaagatgaggacccatcctataagtggagagaggaacacagactctcagcaactcagcagagtgagttaagggatgtgtgtgactatgcgattgagacgatgccctcttttcccaaggaaggttctgcagatgtggagcccaatcaggaaagccttgtggctgaggcctgtgacactccggaacactgggaggcagtaccccagagcctagcaggccgacaagcaaggactctagctcccccagagctctgggcctgccccattcagagtgagcatctagacatggccccattttccagtgacctgggaagcgaagaagaggaggtggaattttggccaggacttacttctttgacattgggatctggacaggcagaagaagaagaggaaacctcttcagataactctggtcagaccagatattattctccctgcgaagagcatcctgcagagaccaaccagaatgaaggctctgaaagtgggactatcaggcagggggaagagctgccacctgaggagctgcaggaaagtcaagggctcttgcatccccaggaggtccaagttctggaggagcagggacagcaggaagcaggatttcggggggaaggaactctgagggaggatgtttgtgccgatgggctattaggggaggaacagatgatagagcaggttaatgatgaaaagggagaacagaagcaaaaacaggaacaggtacaagatgtgatgcttgggagacaaggagaaagaatggggctcactggggagccagagggtctgaatgacggtgagtgggagcaggaggatatggagaggaaggctcagggtcagggaggtccagaacagggagaagagaggaagagggagctgcaggtgccagaagagaatagggcggactctcaggacgaaaagagtcaaacctttttgggaaaatcagaggaagtaactggaaagcaagaagatcatggtataaaggagaaaggggtgccagtcagcgggcaggaggcgaaagagccagagagttgggatgggggcaggctgggggcagtgggaagagcgaggagcagggaagaggagaatgagcatcatgggccttcaatgcccgctctgatagcccctgaggactctcctcactgtgacctgtttccaggtgcctcatatctcatgactcagattcccgggactcagacagagtccagggctgaggaactgtcccccgcagctctgtctccctcgctagagcccatcaggtgctctcaccagcccatttctctactgggctcctttttgactgaggagtcacctgacaaggaaatagatcaaaacagccagcaagaggaatccaggctgaggaagggaacagtgtccagccaagggactgaggtggtctttgccagtgcatctgtgactcctccaaggacaccagattcagctcctcccagtcctgctgaagcctaccccatcacacctgcctcggtatctgccaggcccccagttgcctttcccaggagggaaacctcttgtgctgcacgtgctccagaaactgccagtgcccctctctcaatggatgacccatctccctgtgggacttctgagatgtgcccggctgccctctatggcttcccctccaccgggaccagccctccgaggcccccagccaactccacaggcaccgtccagcacttacggagtgactccttccctggttctcacaggacagagcagactccagacctggtgggaatgttgctttcctactcccactcagagctgccccagaggccccccaaacctgccatctacagctctgtgaccccaagaagggacagaaggagtggtagggactacagcaccgtttcagcatcccctactgccttatccacgctgaagcaggactctcaagaatccatctcaaatctagagagacccagcagtcctcccagcatccagccctgggtctccccacataatccagcctttgccacagagtctcccgcctacggttcttccccatcctttgtctccatggaggatgtgaggatccacgaacctctgccccctcctcccccacagaggagggacacccatccctccgtggtggagacagatggccatgctcgtgtagtggttcccacgctgaagcagcatagccaccctcctccattggccctaggttcagggctgcatgccccccataaaggcccacttccccaagcctctgaccccgctgtggccaggcagcaccgacctctgccatctaccccagacagctcccaccatgctcaggccacccccaggtggagatacaacaagccgctaccccctacccctgatttgccgcagccccaccttcctcccatttctgctcctggtagctcaaggatctacaggcctctacccccactacccatcatagaccctcccaccgaaccacccccattgcccccaaagtccagggggaggagcaggagcactcggggaggacatatgaactcagggggtcatgccaaaacaagacctgcttgtcaagactggacagtccccctccctgcctctgctggacgcacctcctggcccccggccacagctagatcaacagagtctttcacttccaccagcaggagtaagagcgaagtgtcccctggcatggctttcagcaacatgacaaacttcctatgcccctcttcccctaccactccctggactccggagctccagggacccacctctaaggatgaagcaggggtctcagaacaccctgaggcccctgcgagagaacctttgagaaggacaacccctcagcaaggagccagtggcccagggaggtcacctgtgggccaacaagcacaagggctggagccggcagggcctgcgcagaccttccatcttgcctgagggctcttcagattcaagaggtccagccgtggagaaacatccgggaccctcagacactgttgtttttcgggagaaaaaaccaaaggaggtgatgggaggcttttcaagacgctgctccaaactcatcaactcctcccagctgctttaccaggagtatagtgatgttgtcctgaataaggagatccagagccagcagcggctggagagcctgtccgagacacccgggcctagctctccgcggcagcctcggaaggccctggtctcctccgagtcgtacctgcagcggctctccatggcctccagcggctccctctggcaggaaatccccgtggtgcgcaacagcaccgtgctgctctccatgacccatgaagaccaaaagctgcaagaggtcaaatttgagctgattgtgtcagaggcctcctacctgcgcagtctaaacatagctgtggatcatttccaactttcaacttcactccgggccacactttccaaccaggagcaccaatggctcttctctcgtttacaggatgtgcgagacgtcagcgccacgttcctttcagacctggaagagaactttgagaacaatatcttctccttccaagtatgtgacgtagtcctgaaccacgccccagacttccgccgggtctacctgccttatgtcaccaaccagacctatcaggaacgcaccttccagagcctgatgaatagcaacagcaatttccgggaggtcttggagaagctggagagcgaccccgtctgccagcgcctttccctcaagtcctttctgattctgcccttccaacgcatcacccgcctcaaactgctgctccagaacattctgaagagaacacagcctggctcctcggaggaggcagaggccacgaaggcacaccacgccctggagcagctgatccgggactgcaataacaatgtccagagtatgcgacggacagaggaactaatctacctgagccagaagattgagtttgagtgcaaaatattcccgctcatttctcagtcacgctggctggtgaaaagtggggagctgacagccttggagttcagtgcttccccagggctacgaaggaagctgaacacgcgtccagtccacctgcacctcttcaatgactgtctgctgctgtctcggccccgagagggtagccgattcctggtatttgaccatgctcccttctcctccattcggggggaaaagtgtgaaatgaagctacatggacctcacaaaaacctgttccgactctttctgcggcagaacactcagggcgcccaggccgagttcctcttccgcacggagactcaaagtgaaaagcttcggtggatctcagccttggccatgccaagagaggagttggaccttctggagtgttacaactccccccaggtacagtgccttcgagcctacaagccccgagagaatgatgaattggcactggagaaagccgacgtggtgatggtgactcagcagagcagtgacggctggctggagggcgtgaggctctcagacggggagcgaggctggtttcctgtgcagcaggtggagttcatttccaacccagaggtccgtgcacagaacctgaaggaagctcatcgagtcaagactgccaaactacagctggtggaacagcaagcctaagtcttctctgagaggagtttcgtgagctgaagaacaagctgctcatggcaagggctggccccagaaccctgcaagagaggccttctgtggatggagaactaggccttctcaaagctcaaggacaaaatccagctaacccagtccctcggcccaggcctcctttcgtgctttgtgcttggtgggggggatttcgagggactttgcactggactctgggaacctttcatcattaaaaaaagggggaccattggggcctgagccaaggaactttccttctactgccttatagtgcttaaacattctccgcctccagggtgcagattcagagctggccagagtttcagtgatagccgtatgttaaacagaatctcacctcagtctcctggagggagatgtttaagaggggttaacacatcagatgggagggtcagcccggtgacctctaaggtatcttctaacctagaaattcaccataattatggtgcaaggtcagtgtgtctctgagatctatgtctgttggtggcaatgtgagggtgatactctctcactctaataaacttggcacttctccgagtaaaaaaaaaaaaaaaaaa

SEQ ID NO: 102 - DNA, 5505 bp, Homo sapiens
gcgggtggggcggccgggcctgcgctggggacggctctggggactgcggccggcgccgggacctggaggggacgctggggccgaagcagcatgtgacaccgaccaggattcagccctgatggaggctgaggaggcccagcgtggagcctctcctcccatctctgccatagaggaattcagcattatccctgaggctcccatgaggagcagccaggtctctgccttggggcttgaagctcaagaagatgaggacccatcctataagtggagagaggaacacagactctcagcaactcagcagagtgagttaagggatgtgtgtgactatgcgattgagacgatgccctcttttcccaaggaaggttctgcagatgtggagcccaatcaggaaagccttgtggctgaggcctgtgacactccggaacactgggaggcagtaccccagagcctagcaggccgacaagcaaggactctagctcccccagagctctgggcctgccccattcagagtgagcatctagacatggccccattttccagtgacctgggaagcgaagaagaggaggtggaattttggccaggacttacttctttgacattgggatctggacaggcagaagaagaagaggaaacctcttcagataactctggtcagaccagatattattctccctgcgaagagcatcctgcagagaccaaccagaatgaaggctctgaaagtgggactatcaggcagggggaagagctgccacctgaggagctgcaggaaagtcaagggctcttgcatccccaggaggtccaagttctggaggagcagggacagcaggaagcaggatttcggggggaaggaactctgagggaggatgtttgtgccgatgggctattaggggaggaacagatgatagagcaggttaatgatgaaaagggagaacagaagcaaaaacaggaacaggtacaagatgtgatgcttgggagacaaggagaaagaatggggctcactggggagccagagggtctgaatgacggtgagtgggagcaggaggatatggagaggaaggctcagggtcagggaggtccagaacagggagaagagaggaagagggagctgcaggtgccagaagagaatagggcggactctcaggacgaaaagagtcaaacctttttgggaaaatcagaggaagtaactggaaagcaagaagatcatggtataaaggagaaaggggtgccagtcagcgggcaggaggcgaaagagccagagagttgggatgggggcaggctgggggcagtgggaagagcgaggagcagggaagaggagaatgagcatcatgggccttcaatgcccgctctgatagcccctgaggactctcctcactgtgacctgtttccaggtgcctcatatctcatgactcagattcccgggactcagacagagtccagggctgaggaactgtcccccgcagctctgtctccctcgctagagcccatcaggtgctctcaccagcccatttctctactgggctcctttttgactgaggagtcacctgacaaggaaatagatcaaaacagccagcaagaggaatccaggctgaggaagggaacagtgtccagccaagggactgaggtggtctttgccagtgcatctgtgactcctccaaggacaccagattcagctcctcccagtcctgctgaagcctaccccatcacacctgcctcggtatctgccaggcccccagttgcctttcccaggagggaaacctcttgtgctgcacgtgctccagaaactgccagtgcccctctctcaatggatgacccatctccctgtgggacttctgagatgtgcccggctgccctctatggcttcccctccaccgggaccagccctccgaggcccccagccaactccacaggcaccgtccagcacttacggagtgactccttccctggttctcacaggacagagcagactccagacctggtgggaatgttgctttcctactcccactcagagctgccccagaggccccccaaacctgccatctacagctctgtgaccccaagaagggacagaaggagtggtagggactacagcaccgtttcagcatcccctactgccttatccacgctgaagcaggactctcaagaatccatctcaaatctagagagacccagcagtcctcccagcatccagccctgggtctccccacataatccagcctttgccacagagtctcccgcctacggttcttccccatcctttgtctccatggaggatgtgaggatccacgaacctctgccccctcctcccccacagaggagggacacccatccctccgtggtggagacagatggccatgctcgtgtagtggttcccacgctgaagcagcatagccaccctcctccattggccctaggttcagggctgcatgccccccataaaggcccacttccccaagcctctgaccccgctgtggccaggcagcaccgacctctgccatctaccccagacagctcccaccatgctcaggccacccccaggtggagatacaacaagccgctaccccctacccctgatttgccgcagccccaccttcctcccatttctgctcctggtagctcaaggatctacaggcctctacccccactacccatcatagaccctcccaccgaaccacccccattgcccccaaagtccagggggaggagcaggagcactcggggaggacatatgaactcagggggtcatgccaaaacaagacctgcttgtcaagactggacagtccccctccctgcctctgctggacgcacctcctggcccccggccacagctagatcaacagagtctttcacttccaccagcaggagtaagagcgaagtgtcccctggcatggctttcagcaacatgacaaacttcctatgcccctcttcccctaccactccctggactccggagctccagggacccacctctaaggatgaagcaggggtctcagaacaccctgaggcccctgcgagagaacctttgagaaggacaacccctcagcaaggagccagtggcccagggaggtcacctgtgggccaagcaaggcagccagaaaaacccagccatctgcacctggagaaggcgtccagctggccccacaggcgggactcagggaggccaccaggggacagcagtggacaggctgtggctcctagtgagggggccaacaagcacaagggctggagccggcagggcctgcgcagaccttccatcttgcctgagggctcttcagattcaagaggtccagccgtggagaaacatccgggaccctcagacactgttgtttttcgggagaaaaaaccaaaggaggtgatgggaggcttttcaagacgctgctccaaactcatcaactcctcccagctgctttaccaggagtatagtgatgttgtcctgaataaggagatccagagccagcagcggctggagagcctgtccgagacacccgggcctagctctccgcggcagcctcggaaggccctggtctcctccgagtcgtacctgcagcggctctccatggcctccagcggctccctctggcaggaaatccccgtggtgcgcaacagcaccgtgctgctctccatgacccatgaagaccaaaagctgcaagaggtcaaatttgagctgattgtgtcagaggcctcctacctgcgcagtctaaacatagctgtggatcatttccaactttcaacttcactccgggccacactttccaaccaggagcaccaatggctcttctctcgtttacaggatgtgcgagacgtcagcgccacgttcctttcagacctggaagagaactttgagaacaatatcttctccttccaagtatgtgacgtagtcctgaaccacgccccagacttccgccgggtctacctgccttatgtcaccaaccagacctatcaggaacgcaccttccagagcctgatgaatagcaacagcaatttccgggaggtcttggagaagctggagagcgaccccgtctgccagcgcctttccctcaagtcctttctgattctgcccttccaacgcatcacccgcctcaaactgctgctccagaacattctgaagagaacacagcctggctcctcggaggaggcagaggccacgaaggcacaccacgccctggagcagctgatccgggactgcaataacaatgtccagagtatgcgacggacagaggaactaatctacctgagccagaagattgagtttgagtgcaaaatattcccgctcatttctcagtcacgctggctggtgaaaagtggggagctgacagccttggagttcagtgcttccccagggctacgaaggaagctgaacacgcgtccagtccacctgcacctcttcaatgactgtctgctgctgtctcggccccgagagggtagccgattcctggtatttgaccatgctcccttctcctccattcggggggaaaagtgtgaaatgaagctacatggacctcacaaaaacctgttccgactctttctgcggcagaacactcagggcgcccaggccgagttcctcttccgcacggagactcaaagtgaaaagcttcggtggatctcagccttggccatgccaagagaggagttggaccttctggagtgttacaactccccccaggtacagtgccttcgagcctacaagccccgagagaatgatgaattggcactggagaaagccgacgtggtgatggtgactcagcagagcagtgacggctggctggagggcgtgaggctctcagacggggagcgaggctggtttcctgtgcagcaggtggagttcatttccaacccagaggtccgtgcacagaacctgaaggaagctcatcgagtcaagactgccaaactacagctggtggaacagcaagcctaagtcttctctgagaggagtttcgtgagctgaagaacaagctgctcatggcaagggctggccccagaaccctgcaagagaggccttctgtggatggagaactaggccttctcaaagctcaaggacaaaatccagctaacccagtccctcggcccaggcctcctttcgtgctttgtgcttggtgggggggatttcgagggactttgcactggactctgggaacctttcatcattaaaaaaagggggaccattggggcctgagccaaggaactttccttctactgccttatagtgcttaaacattctccgcctccagggtgcagattcagagctggccagagtttcagtgatagccgtatgttaaacagaatctcacctcagtctcctggagggagatgtttaagaggggttaacacatcagatgggagggtcagcccggtgacctctaaggtatcttctaacctagaaattcaccataattatggtgcaaggtcagtgtgtctctgagatctatgtctgttggtggcaatgtgagggtgatactctctcactctaataaacttggcacttctccgagtaaaaaaaaaaaaaaaaaa

SEQ ID NO: 103 - DNA, 895 bp, Homo sapiens
atggggaatggactatcagaccagacttctatcctgtccagtctgccttcatttcaatccttccacattgttatgctgggtttggactgtgctggaaagacaactgtcttatacaggctgcagttcaatgaatttgtaaataccgtacctaccaaagcatttaacactgagaaaattaaggtaaacttgagaaattctaaaacagtcacttttcacttcggggatgtaggtggtcaggagaaattaatgccactatggaagtcatataccagatgcacagatggcattttatttcttatggactctgttgatatcgaaaggatggaagaagccaaaactgaacttcacaaaataactaggttatcagaaaatcaaggagtccctgtacttacagttgctaataaacaagacttggagaactcattatctctttcaggaattgagaaattgttagcaacaggtgaactgagctcatcaactccttggcatttgcagcctacctgcgcaatcataggagatggcctaaaggaaggacttgagaaactgcatgatatgatcattaaagaaaagatgaatatcaatacctattatatctgtgtggaggaggttttctctggtctgattttgacaaatggaaaagtgtctacagcctggtttgcctgtctgccctcctggatgctattaaagctttgtattgttcaatgatcagatgcctaactctgttgatttgtagaggatgagtaaatgcatgcttcttaaagtggtatcttctccctatcccacaaatcttttggtactaccatttggggaagccaagcaaggatagtaaattgaccagaacacagttgtagaaatttgacctgaagttagtgaaataaaactctaaagagtgaaa

SEQ ID NO: 104 - DNA, 3162 bp, Homo sapiens
gcagcctggcggcgacctgaccgcccgaggctccccttcacctgcagcggctgctcggctccctctgggaacgccgccttttctaacttaagggcaacaggtggtgccggtggaccgagagagagctcagctccgccgcgctgggagcggcagttaccctcaccaattagggagcgggggcgggagttgcatggcttccctgatgcgggtgaccaatgggatttgggatcatgagtggaccgggaggagtgggcgtggtcggagtctgagtccaaggtttctcgtgcggcaactgccagagctgcttggagagctaagctggaagggtgcttatccctgcgtagaaacgcctgccaatgctttctcatttggacccagactccagatcgggagcagtcttatagctggatcagctaccaagagaagttgtaaaccaagaagagaaaagcatttcaatttgggacatttatttgcacctggaaatggggaatgggctgtcagaccagacttctatcctgtccaacctgccttcatttcagtctttccacattgttattctgggtttggactgtgctggaaagacaactgtcttatacaggctgcagttcaatgaatttgtaaataccgtacctaccaaaggatttaacactgagaaaattaaggtaaccttgggaaattctaaaacagtcacttttcacttctgggatgtaggtggtcaggagaaattaaggccactgtggaagtcatataccagatgcacagatggcattgtatttgttgtggactctgttgatgtcgaaaggatggaagaagccaaaactgaacttcacaaaataactaggatatcagaaaatcagggagtccctgtacttatagttgctaacaaacaagatttgaggaactcattgtcactttcagaaattgagaaattgttagcaatgggtgaactgagctcatcaactccttggcatttgcagcctacctgtgcaatcataggagatggcctaaaggaaggacttgagaaactacatgatatgatcattaaaagaagaaaaatgttgcggcaacagaaaaagaaaagatgaatatcaatacctattatatctgtgtggagtaggttttctctggtctgattttgacaaatagaagagtgtctacagcgtggtttgcctgtctgccctcctggatgctattaaagctttgttttgttgaacaatcagatgcccaactctgttgccttgtggaagatgagtaaatgcagtgcttcttaaagtggtctcttctccctaccccacaaatcttttggtactaccatttggggaagccaagcaaggatagtaaattgaccagaacacagttgtgggaatttggtctgaagttagtgaaataaaactttaaagagtgtctgcctagtgttttgtgcttacatctttcggggggaagcctttgcaagaaaattgcatacaaggctttgtaacgatcaagtgctaatcgatggaaatgttaaggtagattaacatatatgcagttatattgatcacattggtccaaccagtccttttttgaagtaagggacaaggagtaagtattttcttttttaagtttctgccaaatgatttttgacgctttctggaatcaagtaatttaatagtatagcttaattctagacaatgtttaagttggtctacctttattaaaaataagatatttggggtatattcaagtgcatggattagttttcctgacaaagcatgttttggtgtgtagtcttactttttagaaatagctatgcatcgttctacacaggtttaaaacaacttttttggggatttagggctattataggaatagtttgttgtcagaagcactttcacttgaagaacctaaaatgattgactcattcatagtaaatatgggcatgtaaactaataaatatgcactggatacatatatggatttatgaagaaggcgatttagtcaagaggatgtaattaaaatatgtggtctctaaaatattccagttacaagatatttgttttattaatatttgctggctaaaaacaaatgtggtttttatatatttttgtagtgtgttgagaagagcaaaagctttataaatatacctgatgcgctgtagaatgaaaatgtaaaagataacctgtatgtgttccgagctttaattttttgtttacaaattgaacagtgttacatgggctgtccagtcctgattatagagaggaagaaatggtaacagtatggcagataagaattacaattatagaaaatgaggggaaaataacaaacctgttttatgaaaattcactggtgctgtttacattggaataaaaagctctataaggaggaaaggcctttatctaattcttatctacagacacttacttccagtgaccatattttactaaatcagcttattttttatgtctaaagcaacagctgttctgaaaaatcaccaaaagaaatgcactttgctagcaggatttgttttggctttgggttttgtttttttgttttttttttttttcagtggcataacagtttttggaaccttgattcttgtgtcacacaaaatgaatgaagtagcttgatgtggagccttcatatgttaaatattcctgcactagtgatggtcacttagaatgtttatagaaatgtggataataactaccaataaactacttgaggcactaggagaacagtatttgactttgaattttaatgtatttccacttttgctgaagcttttaatcagatgtgtaaaaacaattgaccagctaggctatttagtcccatagtagttcagatctgcttagatgtgacaggcattgaaggctgtttttttttttttctcccttcactgatactgaaatcatggtatctgctgcaaacatgagtagatccatgatggattaataaagcttgctgaaaaaaaaaatctgtgtatcagttagatttaccagtttgcctgtactttctgtctacctactatgtaaaatagtgctgtttttaagtatttcaaaagcttgtgtgttgaccctttgtagcctaagtacgtaaacaaattaatgttatctaagtttttcatatttcatggacaacaaaagagaaaatggtatgaacactgtacaaactttgatttataaa

SEQ ID NO: 105 - DNA, 1330 bp, Homo sapiens
gcgcgggtggcggaggcgattgaagctgctggcccagcatgtggtgcgcgagcccagttgctgtggtggccttttgcgccgggcttttggtctctcacccggtgctgacgcagggccaggaggccggggggcggccaggggccgactgtgaagtatgtaaagaattcttgaaccgattctacaagtcactgatagacagaggagttaacttttcgctggacactatagagaaagaattgatcagtttttgcttggacaccaaaggaaaagaaaaccgcctgtgctattatctaggagccacaaaagacgcagccacaaagatcctaagtgaagtcactcgcccaatgagtgtgcatatgcctgcaatgaagatttgtgagaagctgaagaagttggatagccagatctgtgagctgaaatatgaaaaaacactggacttggcatcagttgacctgcggaagatgagagtggcagagctgaagcagatcctgcatagctggggggaggagtgcagggcctgtgcagaaaaaactgactatgtgaatctcattcaagagctggcccccaagtatgcagcgacacaccccaaaacagagctctgatctccaatgccagcacatttgtgacttgtaattagagagaaaagtgactctctaggatatggacatgttgattaaggataactgggaatgcatcatatttggtctcatgctttttgtgttggtattattcctcagaattttgttacgtgggtttatgagtgaaactaatactactgataacttacatttgcagtgtaccaaaagctaaaagttcctttctcataagtttcttggaatgactatgccagttttcattgcctgtctcctaaaagtgacctactgacaaattgatggagtaaattgattccaagaaagaagaaggcattcagagactcctctctggatgcaattttaaaatatattggactaaaacaaaagacacaacagtcagcttatctaatgcacaacttcaatcccaaatacagaatcaaaagtttttttcaagtgaattttctgttttcactctatattgtagctctctttggtatcagaaatggtcaggcaggagtactcgtttttcccattggaagaaaacccacttaaacctacttaaagaaaatagagagatcaagaaaccgtataagtatagccaatgtttggcaattatatcaacatttacattgttaattgaaccaagctcaaggtctttttcattccttacagtcacatatcagacaagtttttgatggaagattaaagcatattaaaaacactcataggcaacttgg

SEQ ID NO: 106 - DNA, 2413 bp, Homo sapiens
aacagattttaactctgaaaagccatttccagtgtctatagactattgtgagcctggagaagtagcatttagttgggatagcttcactagagctgcctgccaaagacttccttccacaggatcttgtcgcaccagcaactgacaggagcttgggagctcgggagcttgggagagggcttatgtttttaataatgtagctgtcagttcgaagcctggaaatgttgaccctcaaagggcataaaatcttgttattttaatttgcatctgggagaatgtctgagcaaggagacctgaatcaggcaatagcagaggaaggagggactgagcaggagacggccactccagagaacggcattgttaaatcagaaagtctggatgaagaggagaaactggaactgcagaggcggctggaggctcagaatcaagaaagaagaaaatccaagtcaggagcaggaaaaggtaaactgactcgcagccttgctgtctgtgaggaatcttctgccagaccaggaggtgaaagtcttcaggatcagactctctgaaaactgcaaatggaaaggaattcaaaagaatttagattaaaagttaaataaaaagtaggcacagtagtgctgaattttcctcaaaggctctcttttgataaggctgaaccaaatataatcccaagtatcctctctccttccttgttggagatgtcttacctctcagctccccaaaatgcacttgcctataagaaacacaattgctggttcatatgaaacttaggaaatagtgaataaggtgcatttaactttggagaaatacttttatggctttggtggagatttctcaatactgcaaaagttgtccagaaatgaatctgagctgatggtgactttaagttaatattattaatatatcactgcatatttttacccttatttttgctccttacagcaagattagtaggttataaaaatttaaatttaaacaaaattatttcatgacaaaatgggaaacttcacatcatacttatttttgtttgcctttcaggcatcatattagcttttataaaaaatggtcttgctgctgaaattgtacttattttatcagaggctgggtgcagtcaagacaaaagtaaaatggtttacctgagcccaggggagggaaaattgattaagatatcattatttttgtttggtttggttttgcttttttcctcttactttaattgaaatactctgaattcccctcatggaaacagagagcattgagagcactttctttaaaaggaccaaaaataaattcctaatagattttgtcctaagagagtgtttttttttctagcatcattttctttacatgccactcatgtcataaggcatggacaggctatctttcagtggccattactatgtttcgtacacatgctttattttacttgggctctgagaaatgtgtggctttccttcagcattttatttgtgcttctctttttaatggagattgaaaagggagaataatgtgaatatcacggcttatattattaaatgttgattgatggcttgtaatgtactgcacacaatatatgttaactctgcagaatgacagaccctgggagaagtaatgccccagttgtcccccactcctaatgccaggcagagaaggacagcctttatagacttaatctgctttttgtcccatttgacaaggtaccaggaggaaattttttaagggatcaactgtatcacagtgcccactctggacctaagtctagtgtatccatacaattggtgcagagaaataaggtgtaaatggtgctttgttcctgctggttccaagctcagaaaccaagactagctttgtaggagagaatgagagcctgcaagcctctctttggattggctgaggagtggtgggagcagggggttgatagaaaacatccagacacacatataagcaagtggccgtgctacctttttagagaataaagaaacagacttttgagtttatatgcaatgccttcattaggtaccaccggcacttacaaaatgtgcggactgaatcccagagaacactggcagatgtatacagtatatggattgtatcgcttccccaatgtttgtaaattcacagtatttggaaaactgccttcattttccagtgtgggaaaaactcttgctacctgtattacttgatctcagacccatacctgatggttcagtctgtccttaagttaaaagaattttgcttttctaatgttatactatttacctgtcagtgtattactgcaacttgaatcactcttttactgttgttggatataaacttatcctgtaccaatgtatttattaacacttgtattttattattgagcatatcaataaaaatattaaaaaataacagattgttttttaccaaaaaaaaaaaaaaa

SEQ ID NO: 107 - DNA, 3241 bp, Homo sapiens
ggaagacagagcagtgcatggttatggatactggacaaggatatttggaaaggttgacgatgtgtcacactgtgtaagggaatcgcatggagatgggcattccgaactgttaatggggacatgggactccagttgtctctgatcacttgtgtggattttcctggcgtagaacgacagaagccgctagtaagtcgccaagacctacagcaggaattctgcaccaaagggcataaaatcttgttattttaatttgcatctgggagaatgtctgagcaaggagacctgaatcaggcaatagcagaggaaggagggactgagcaggagacggccactccagagaacggcattgttaaatcagaaagtctggatgaagaggagaaactggaactgcagaggcggctggaggctcagaatcaagaaagaagaaaatccaagtcaggagcaggaaaaggtaaactgactcgcagccttgctgtctgtgaggaatcttctgccagaccaggaggtgaaagtcttcaggatcaggaatcaattcatttacagctttccagtttttccagcctgcaagaggaggataaatctaggaaagatgactctgaaagagaaaaagaaaaggataaaaacaaagataaaacctctgaaaaacccaagatcagaatgttatcaaaagattgcagccaagaatacacggattctacaggcatagacttacacgagtttctgattaacacattaaagaataattccagggacaggatgatacttttgaaaatggagcaggaaattattgatttcattgctgacaacaataatcattataaaaagttccctcagatgtcatcgtatcagaggatgcttgtccatcgagtggcagcttattttggattggatcacaatgtggatcaaacaggaaaatctgttatcatcaacaagaccagcagcaccagaataccagagcaaaggttttgtgaacatttaaaagatgaaaaaggtgaagaatcccagaagcggtttatcttgaagcgagataactctagtattgataaagaagacaatcagcaaaacagaatgcatccatttagagatgacagacgaagtaaatcaattgaagagagagaagaggaatatcagagagtgagggagagaatatttgcacacgattcagtttgctcccaggaaagcctttttgtggaaaacagtaggctcttggaagacagtaacatatgcaatgagacctataagaaaagacagctctttcggggcaacagagatggctcagggagaacatctgggagtcgacagagcagctcagaaaatgaactcaagtggtctgaccaccaaagggcctggagcagcacagactccgacagttccaaccgcaatctaaagcccgccatgaccaagacggcgagttttgggggcatcacggtgctgaccaggggtgacagcacttccagtactaggagtaccgggaagctgtccaaagcaggttccgagtcttccagcagtgcaggctcctcaggatcgctgtcccgcacccatccacctctccagagcacacccctagtctcaggtgtggcagctggctctccaggctgtgtgccttatccagagaatggaatagggggccaggttgctcccagcagcaccagctacatcctccttccacttgaagctgcaacaggcatcccgcctggaagcatccttcttaatccacacacaggccagccctttgtgaatcccgatggaactcctgcaatatacaacccacccaccagtcagcagcccctgcgaagcgccatggtggggcagtcccaacagcagccaccacagcagcagccctccccgcagccccaacagcaggtccagccaccgcagccacagatggcaggccctctggtcactcagagagatgatgtggcaacacagtttggccagatgaccctgagccggcagtcctcgggggagactcctgaacccccatcaggtcctgtctacccatcctcccttatgccacagccggcccagcagcccagctatgtaatcgcctctacaggccagcagcttcctacaggaggattctcaggctctggccctcccatctcccagcaggtcctccagccccctccctcaccacagggatttgtgcaacagcctccgcctgcacagatgcctgtatattattacccatctggtcagtaccctacctcaaccacgcaacagtaccggcccatggccccggttcagtacaacgctcagaggagtcaacagatgccacaggcagcacagcaagcaggttaccagccagtcttgtctggtcaacagggattccaaggcctaataggagtgcagcagccacctcagagtcagaacgtgataaataaccaacaaggaactccggtgcaaagcgtgatggtttcctacccaacaatgtcttcttatcaggtgccaatgacccagggttctcaaggactgccccagcagtcataccaacagccaatcatgctacctaaccaggcaggtcaagggtcactcccagccactggaatgcctgtttactgtaatgtcacaccgcccacccctcagaacaaccttaggctgattggcccacactgcccctccagcactgtcccagtgatgtcagctagctgcagaacaaactgtgcaagtatgagcaatgctggttggcaggtcaaattctgagagctctggctgtggtacatttcttcagatatttctcatggcctttgatggaagaggaacaaggtgggaaaactggctgaggacttaagtattcactcaacactcaaatgattgctgctggtattctgtaaaaaataaacaaagactaatatacacgttagctggttaatggtgcatatttctgtcatgtctgctaggtatgcctttatagcttagctagtgacatgaattcatcaaggtaagattttctcctaccactgaataccactgtgtagattataatatccctaatttggattagttttgtactttgtgttgagtttgtgatgctaaaagtatttaaaaattatatactaaatcacattgtaccaaagctgtaatggaaaagcaaagaagaattgatgaattgaaggaataatttatatacattatagagttttcttttttaatggatatatactgtattgtagtgtttaatcaaaataaaactatttgaccttatggaggaaggtcatgtttttaccaccagtttggttca

SEQ ID NO: 108 - DNA, 2994 bp, Homo sapiens
gcctcggaggcgtgggtgacgcaggcgcagcgcgggctgcgcgcgctactgcccatccccggttgtcccacttttgttcgcctctcttcggccctctactcaagagctccgtctccgtctcgccctcctcgaagtcctcgtcgcgcgcccgcgacccaggtcgccctgaaatctagcccgtccgagcgcgagtccaacgccgcggccgcaccaaggccccctcagaccgtgccatgggtgacagtgatgacgagtacgatcgaaggcgcagggacaagttcagaagagagcgcagcgactacgaccgttcccgcgagagagatgaaagacgtcgaggggacgattggaatgacagagagtgggaccgtggccgtgagcgccgtagtcggggtgaatatcgggactatgaccggaatcggcgagagcgcttctcgccacctcgccacgaactcagcccgccacagaagcgcatgaggagagactgggatgagcacagctctgacccataccacagtggctatgagatgccctatgctggggggggtgggggcccaacttatggcccccctcagccctggggccaccctgacgtccacatcatgcagcaccatgtcctgcctatccaggccaggctgggcagcattgcagagattgacctgggtgtgccgccgcccgtgatgaagaccttcaaggagtttctcctctccctggatgactcggtggatgagacggaggccgtcaagcgctataatgactacaagctggatttccggaggcaacagatgcaggatttcttcctggcgcacaaagatgaggagtggtttcggtctaagtaccacccagatgaggtggggaagcgtcggcaggaggcccggggggccctgcaaaaccgactgagggtcttcctgtccctcatggagactggctggtttgataaccttctcctggacatagacaaagctgatgccattgtcaagatgctggatgcagccgtgattaagatggaaggaggcacggagaatgatcttcgcatcctggagcaggaggaggaggaggagcaggcaggaaagcctggggagcccagcaagaaagaagaaggacgggctggagcaggcctaggggacggggagcgcaaaaccaacgacaaggatgagaagaaggaagacggcaagcaggctgagaatgacagttctaatgatgacaaaacaaagaagtcggagggtgatggggacaaggaagagaagaaagaagactccgagaaggaagccaaaaagagtagcaagaagcggaaccggaagcacagtggtgacgacagctttgacgagggcagcgtgtcagagtctgagtcggagtcagagagcggccaggctgaggaggagaaggaggaggccgaagaagcgctcaaggagaaggagaagcccaaggaagaagaatgggagaagcccaaggacgccgcggggctggagtgcaagccgcggccgctgcataagacctgctccctcttcatgcgcaacatcgcgcccaacatctcccgggccgagatcatctccctttgtaaaaggtacccaggctttatgcgggtggcgctctcagagccccagccagagaggaggtttttccgtcgtggctgggtgaccttcgaccgcagtgttaacattaaagagatctgttggaacctgcagaacatccgtctccgggagtgtgagctgagccctggtgtgaacagggacctgacccggcgcgttcgcaacatcaacggcatcacccagcacaagcagattgtgcgcaacgacatcaagctggcggccaagctgatccacacgctggatgacaggacacagctttgggcctcagaaccagggacgcctcccctgcccacgagcctgccctcgcaaaacccgatcttgaagaatatcaccgactacctgatcgaggaagtaagcgccgaggaggaggagctgctggggagcagcgggggcgctcctcctgaggagcctcctaaggaagggaacccggcagagatcaacgtggagcgggatgagaagttgattaaggtcttggacaagctcctcctttacctgcgcatcgtgcattccttggattattacaacacctgtgagtaccccaacgaggacgagatgcccaatcgctgtgggatcatccacgttcgggggcccatgccacccaaccgcatcagtcacggggaagtgctggagtggcagaagacttttgaggagaagctcacgccgttgctgagtgtgcgggagtcactctcagaggaagaggcccagaagatggggcgcaaagacccagagcaggaagtggagaagttcgtcacctccaacacgcaggaactgggcaaggataagtggctgtgtcctctcagtggcaagaaattcaagggtcctgagtttgtgcgcaaacatatcttcaacaagcatgcagagaaaattgaggaagtgaaaaaggaagtcgcgttttttaacaacttcctcactgatgctaagcgcccagctctgcctgagatcaagccagcccagccacctggccccgcccagatactccccccaggtttgaccccaggactcccctacccacaccagactccccagggcctgatgccctatggtcagccccggcccccgatcttgggctatggagctggtgctgtccgccctgcagtccccacaggaggccctccatacccccatgccccgtatggtgctggtcgagggaactatgatgccttccgaggccagggaggttatcctgggaaacctcgcaacaggatggttcgtggagacccaagggccattgtggaatatcgggacctggatgccccagacgatgttgatttcttttgagccgtcccccgttcctcagtcctgtatcatccatacttgtactaccttgtcctatgaagctctgagaattttttgtacgatcagccttactgctaataaaagcacttccacagggaaaaaaaaaaaaaaa

SEQ ID NO: 109 - DNA, 3065 bp, Homo sapiens
gcctcggaggcgtgggtgacgcaggcgcagcgcgggctgcgcgcgctactgcccatccccggttgtcccacttttgttcgcctctcttcggccctctactcaagagctccgtctccgtctcgccctcctcgaagtcctcgtcgcgcgcccgcgacccaggtcgccctgaaatctagcccgtccgagcgcgagtccaacgccgcggccgcaccaaggccccctcagaccgtgccatgggtgacagtgatgacgagtacgatcgaaggcgcagggacaagttcagaagagagcgcagcgactacgaccgttcccgcgagagagatgaaagacgtcgaggggacgattggaatgacagagacagggtctccctctgtcacccgggctgagtgcactggtgcagtcgaagcttgctgcagccgcgacctgcccagagtgggaccgtggccgtgagcgccgtagtcggggtgaatatcgggactatgaccggaatcggcgagagcgcttctcgccacctcgccacgaactcagcccgccacagaagcgcatgaggagagactgggatgagcacagctctgacccataccacagtggctatgagatgccctatgctggggggggtgggggcccaacttatggcccccctcagccctggggccaccctgacgtccacatcatgcagcaccatgtcctgcctatccaggccaggctgggcagcattgcagagattgacctgggtgtgccgccgcccgtgatgaagaccttcaaggagtttctcctctccctggatgactcggtggatgagacggaggccgtcaagcgctataatgactacaagctggatttccggaggcaacagatgcaggatttcttcctggcgcacaaagatgaggagtggtttcggtctaagtaccacccagatgaggtggggaagcgtcggcaggaggcccggggggccctgcaaaaccgactgagggtcttcctgtccctcatggagactggctggtttgataaccttctcctggacatagacaaagctgatgccattgtcaagatgctggatgcagccgtgattaagatggaaggaggcacggagaatgatcttcgcatcctggagcaggaggaggaggaggagcaggcaggaaagcctggggagcccagcaagaaagaagaaggacgggctggagcaggcctaggggacggggagcgcaaaaccaacgacaaggatgagaagaaggaagacggcaagcaggctgagaatgacagttctaatgatgacaaaacaaagaagtcggagggtgatggggacaaggaagagaagaaagaagactccgagaaggaagccaaaaagagtagcaagaagcggaaccggaagcacagtggtgacgacagctttgacgagggcagcgtgtcagagtctgagtcggagtcagagagcggccaggctgaggaggagaaggaggaggccgaagcgctcaaggagaaggagaagcccaaggaagaagaatgggagaagcccaaggacgccgcggggctggagtgcaagccgcggccgctgcataagacctgctccctcttcatgcgcaacatcgcgcccaacatctcccgggccgagatcatctccctttgtaaaaggtacccaggctttatgcgggtggcgctctcagagccccagccagagaggaggtttttccgtcgtggctgggtgaccttcgaccgcagtgttaacattaaagagatctgttggaacctgcagaacatccgtctccgggagtgtgagctgagccctggtgtgaacagggacctgacccggcgcgttcgcaacatcaacggcatcacccagcacaagcagattgtgcgcaacgacatcaagctggcggccaagctgatccacacgctggatgacaggacacagctttgggcctcagaaccagggacgcctcccctgcccacgagcctgccctcgcaaaacccgatcttgaagaatatcaccgactacctgatcgaggaagtaagcgccgaggaggaggagctgctggggagcagcgggggcgctcctcctgaggagcctcctaaggaagggaacccggcagagatcaacgtggagcgggatgagaagttgattaaggtcttggacaagctcctcctttacctgcgcatcgtgcattccttggattattacaacacctgtgagtaccccaacgaggacgagatgcccaatcgctgtgggatcatccacgttcgggggcccatgccacccaaccgcatcagtcacggggaagtgctggagtggcagaagacttttgaggagaagctcacgccgttgctgagtgtgcgggagtcactctcagaggaagaggcccagaagatggggcgcaaagacccagagcaggaagtggagaagttcgtcacctccaacacgcaggaactgggcaaggataagtggctgtgtcctctcagtggcaagaaattcaagggtcctgagtttgtgcgcaaacatatcttcaacaagcatgcagagaaaattgaggaagtgaaaaaggaagtcgcgttttttaacaacttcctcactgatgctaagcgcccagctctgcctgagatcaagccagcccagccacctggccccgcccagatactccccccaggtttgaccccaggactcccctacccacaccagactccccagggcctgatgccctatggtcagccccggcccccgatcttgggctatggagctggtgctgtccgccctgcagtccccacaggaggccctccatacccccatgccccgtatggtgctggtcgagggaactatgatgccttccgaggccagggaggttatcctgggaaacctcgcaacaggatggttcgtggagacccaagggccattgtggaatatcgggacctggatgccccagacgatgttgatttcttttgagccgtcccccgttcctcagtcctgtatcatccatacttgtactaccttgtcctatgaagctctgagaattttttgtacgatcagccttactgctaataaaagcacttccacagggaaaaaaaaaaaaaaa

SEQ ID NO: 110 - DNA, 2005 bp, Homo sapiens
gtctctcgttttcggacggctgcagcatcgcggtggggatcgaaagcgggggcttctgggacgcagctctggagacgcggcctcggaccagccatttcggtgtagaagtggcagcacggcagattcatctgaaaactacattaagatgaagacctttgaaggtttctgtgctttgcatctcgctgcaagtcaaggacattggaaaatcgtacagattcttttagaagctggggcagatcctaatgcaactactttagaagaaacgacaccattgtttttagctgttgaaaatggacagatagatgtgttaaggctgttgcttcaacacggagcaaatgttaatggatcccattctatgtgtggatggaactccttgcaccaggcttcttttcaggaaaatgctgagatcataaaattgcttcttagaaaaggagcaaacaaggaatgccaggatgactttggaatcacacctttatttgtggctgctcagtatggcaagctagaaagcttgagcatacttatttcatcgggtgcaaatgtcaattgtcaagccttggacaaagctacacccttgttcattgctgctcaagagggacacacaaaatgtgtggagcttttgctctccagtggggcagatcctgatctttactgtaatgaggacagttggcagttacctattcatgcagctgcacaaatgggccatacaaaaatcttggacttgttaataccacttactaaccgggcctgtgacactgggctaaacaaagtaagccctgtttactcagcagtgtttgggggacatgaagattgcctagaaatattactccggaatggctacagcccagacgcccaggcgtgccttgtttttggattcagttctcctgtgtgcatggctttccaaaaggactgtgagttctttggaattgtgaacattcttttgaaatatggagcccagataaatgaacttcatttggcatactgcctgaagtacgagaagttttcgatatttcgctactttttgaggaaaggttgctcattgggaccatggaaccatatatatgaatttgtaaatcatgcaattaaagcacaagcaaaatataaggagtggttgccacatcttctggttgctggatttgacccactgattctactgtgcaattcttggattgactcagtcagcattgacacccttatcttcactttggagtttactaattggaagacacttgcaccagctgttgaaaggatgctctctgctcgtgcctcaaacgcttggattctacagcaacatattgccactgttccatccctgacccatctttgtcgtttggaaattcggtccagtctaaaatcagaacgtctacggtctgacagttatattagtcagctgccacttcccagaagcctacataattatttgctctatgaagacgttctgaggatgtatgaagttccagaactggcagctattcaagatggataaatcagtgaaactacttaacacagctaatttttttctctgaaaaatcatcgagacaaaagagccacagagtacaagtttttatgattttatagtcaaaagatgattattgattgtgagataggttaggttttggggggccagtagttcagtgagaatgtttatgtttacaactagccttcccagtaaaaaaaaaaaaaaaaaaaaaaaaaattgtaaacatcacttatattactttattgcagcttcatcaccagtacattatatgttgtaatatttatttacctgatcattttgatcattttctgctttattttgctaataaactgtgatgttacttctagtgctaaacatggcatatttccacctatgattcgtgtttacctggtattaggagctcagaatggaatgcataaagcttcactggaagtgtatacaactgtggtgtagaatctgttattattatcattattattttatttagacttgactatctcttatgtttattaaagaacatgttttcct

SEQ ID NO: 111 - DNA, 2214 bp, Homo sapiens
gtctctcgttttcggacggctgcagcatcgcggtggggatcgaaagcgggggcttctgggacgcagctctggagacgcggcctcggaccagccatttcggtgtagaagtggcagcacggcagactggtcaaacaaatggattttacagaggcttacgcggacacgtgctctacagttggacttgctgccagggaaggcaatgttaaagtcttaaggaaactgctcaaaaagggccgaagtgtcgatgttgctgataacaggggatggatgccaattcatgaagcagcttatcacaactctgtagaatgtttgcaaatgttaattaatgcagattcatctgaaaactacattaagatgaagacctttgaaggtttctgtgctttgcatctcgctgcaagtcaaggacattggaaaatcgtacagattcttttagaagctggggcagatcctaatgcaactactttagaagaaacgacaccattgtttttagctgttgaaaatggacagatagatgtgttaaggctgttgcttcaacacggagcaaatgttaatggatcccattctatgtgtggatggaactccttgcaccaggcttcttttcaggaaaatgctgagatcataaaattgcttcttagaaaaggagcaaacaaggaatgccaggatgactttggaatcacacctttatttgtggctgctcagtatggcaagctagaaagcttgagcatacttatttcatcgggtgcaaatgtcaattgtcaagccttggacaaagctacacccttgttcattgctgctcaagagggacacacaaaatgtgtggagcttttgctctccagtggggcagatcctgatctttactgtaatgaggacagttggcagttacctattcatgcagctgcacaaatgggccatacaaaaatcttggacttgttaataccacttactaaccgggcctgtgacactgggctaaacaaagtaagccctgtttactcagcagtgtttgggggacatgaagattgcctagaaatattactccggaatggctacagcccagacgcccaggcgtgccttgtttttggattcagttctcctgtgtgcatggctttccaaaaggactgtgagttctttggaattgtgaacattcttttgaaatatggagcccagataaatgaacttcatttggcatactgcctgaagtacgagaagttttcgatatttcgctactttttgaggaaaggttgctcattgggaccatggaaccatatatatgaatttgtaaatcatgcaattaaagcacaagcaaaatataaggagtggttgccacatcttctggttgctggatttgacccactgattctactgtgcaattcttggattgactcagtcagcattgacacccttatcttcactttggagtttactaattggaagacacttgcaccagctgttgaaaggatgctctctgctcgtgcctcaaacgcttggattctacagcaacatattgccactgttccatccctgacccatctttgtcgtttggaaattcggtccagtctaaaatcagaacgtctacggtctgacagttatattagtcagctgccacttcccagaagcctacataattatttgctctatgaagacgttctgaggatgtatgaagttccagaactggcagctattcaagatggataaatcagtgaaactacttaacacagctaatttttttctctgaaaaatcatcgagacaaaagagccacagagtacaagtttttatgattttatagtcaaaagatgattattgattgtgagataggttaggttttggggggccagtagttcagtgagaatgtttatgtttacaactagccttcccagtaaaaaaaaaaaaaaaaaaaaaaaaaattgtaaacatcacttatattactttattgcagcttcatcaccagtacattatatgttgtaatatttatttacctgatcattttgatcattttctgctttattttgctaataaactgtgatgttacttctagtgctaaacatggcatatttccacctatgattcgtgtttacctggtattaggagctcagaatggaatgcataaagcttcactggaagtgtatacaactgtggtgtagaatctgttattattatcattattattttatttagacttgactatctcttatgtttattaaagaacatgttttcct

SEQ ID NO: 112 - DNA, 7598 bp, Homo sapiens
gtaggccggcgccagctccactctgtccctcctcgccgggtctgtgcgtctttgcgtctgtctgtctgactgatggtcctcacacgcggttccctgtgactgggcgcgaccccggcaagcgcggcttggagggcggacggggcgcggcgatacagctgcccgctcgcatctttggccctgcgctcagctcctcacccggcgtgggaagttaaagtaaaaccgaaagggaagaaggcgcggtggcaggagctgacagagtgatgggaaacgcgtgagccaggccgagagtttcaggtttcttgctgtatggatcactgattgaataatagatggctttacctcgtctcacaggagccttgcgttccttttcaaatgtcaccaagcaagataattataatgaagaagtggctgacttaaagataaagcgatctaaacttcatgaacaagttttagatttgggcctgacatggaagaagataataaaatttttgaatgaaaaactggagaagagtaaaatgcaaagtataaatgaagacttaaaagatatattacatgctgcaaagcagatagttggaactgataatgggagagaagcaattgaaagtggggctgcatttctcttcatgacatttcacttgaaggactctgttggtcacaaggaaacaaaggctatcaaacagatgtttggcccctttccttcatcatctgccactgcagcttgtaatgctactaatcgaattatttctcattttagtcaagatgatcttactgctcttgtgcagatgacagaaaaagaacatggcgatagggttttttttggtaaaaatttagcattttcatttgacatgcatgatttggaccactttgacgaactgccaataaatggtgaaactcagaaaactataagcctagattataagaagtttctgaatgaacatctccaggaggcttgcaccccagaactcaagcctgtggaaaaaacaaatggctcctttttgtggtgtgaagttgaaaagtacctaaattcaactttgaaggaaatgactgaagtgccaagagtagaagatctttgctgtactttatatgatatgcttgcttctattaaaagtggtgatgaacttcaggatgagctatttgaactgctgggacctgaaggacttgaacttattgagaaactcctccagaacagaattacaattgtggatagatttcttaattcttcaaatgatcataggtttcaggctcttcaagacaattgtaaaaaaattttaggagaaaatgctaaacccaattatggttgtcaagtcactattcagtctgaacaagaaaagcagttaatgaaacaatatcgacgtgaagaaaaaagaattgccagacgagaaaaaaaggctggagaagatttagaagtttcagaaggacttatgtgctttgatcctaaggaattgcggatacaaagagaacaggcacttctgaatgctagaagtgttccaattctgagcaggcagagagatgcagacgttgaaaaaatacattatccccatgtgtatgattcccaggctgaagccatgaaaacatcagcatttattgctggtgcaaagatgattttgccagaaggaatccaaagagagaataacaagctttatgaagaagtaaggattccctacagcgaaccaatgccactcagctttgaggaaaagccagtttatatccaagacttagatgagatcggacagctggcttttaaaggaatgaagagactcaatagaatccagtcaatagtgtttgagactgcctacaacaccaatgagaacatgctgatttgtgcccctacaggagctggaaaaaccaacattgcaatgctgacagtcttgcatgaaattcgccaacattttcaacaaggtgttatcaaaaagaatgaatttaagattgtatatgttgctccaatgaaagccttggcagctgaaatgacagattacttcagcagacgtctagagccactaggcatcattgtgaaagaattgactggtgacatgcagttgtccaaaagtgaaattttacgaactcagatgcttgtgaccacaccagaaaaatgggatgtagtgacaagaaagagtgttggggatgtagctctttcccagattgtaaggctccttattcttgatgaagttcatttgctgcatgaagatagaggaccagtattagaaagcatagttgcccgtactttacggcaggtggaatccacacagagtatgataaggattctcggactgtctgcaactttacctaactacctcgatgttgccacatttttacatgttaatccatacattggacttttcttctttgatggccgttttcgaccagtacctcttggacagacatttttggggattaaatgtgcaaataagatgcagcagttgaataacatggatgaagtatgttatgaaaatgttttgaagcaagtaaaggctggacaccaggtgatggtgtttgtacatgctcgaaatgccactgtaagaacagctatgtctctaatagaaagagcaaaaaattgtggccatattcccttcttttttcctacccaaggacatgactatgtacttgcagaaaaacaggtacaaaggtcgagaaataagcaagtacgagaattattcccagatggttttagtattcatcatgcaggaatgcttcggcaggacagaaatttagttgaaaacttgttttctaatgggcatatcaaagtcctagtgtgtacagctacgttagcctggggtgtcaatcttcccgcccatgctgttattattaagggaacacaaatatatgctgcaaaaagaggctcctttgttgaccttggaattttagatgtcatgcagatatttggtcgagctggacgaccacaatttgacaaatttggggaaggaataattataacaacgcatgataaactcagccattacctcactttgctcactcaacgaaacccaattgagagtcagtttctggaaagccttgcagataacctaaatgcagagattgctctgggaacagttactaatgtggaagaagcagtgaagtggataagttacacttatctttatgtacggatgagagcaaatccattagcatatggcatcagtcacaaggcttatcagattgacccaacattaagaaagcatcgagaacagttggtcattgaagttggacgaaaactagacaaagctcagatgattcgttttgaggagcgaactggatatttttcctcaactgatttgggtagaactgccagccattactatattaaatacaacaccattgagacctttaatgaactctttgatgctcacaaaacagaaggtgatatctttgccatagtctccaaagctgaagaatttgatcaaattaaggtcagagaagaggaaatagaggagttagataccttattaagcaatttttgtgaactctccactcctggaggtgtagagaatagttatgggaaaataaacatcttacttcaaacttatatcagccgaggagaaatggacagtttctcccttatatcagattctgcatatgttgcacagaatgcagctagaattgtccgtgctctttttgaaattgctctgaggaaacgttggcctaccatgacctacaggctcctgaatcttagtaaagtcattgacaagaggctttggggttgggctagccctttgagacaattttcaatcctaccaccacacatcctaacaagattagaagaaaaaaagcttactgtggataagctgaaagacatgaggaaagatgaaataggtcacattttacatcatgtgaatattggactgaaggtcaaacaatgtgttcatcagattccttctgttatgatggaagcatccattcagcctatcacaaggactgtcctccgagtgacactcagcatctatgctgatttcacttggaatgatcaggtacatgggacagtaggagaaccttggtggatttgggtagaagatcctacaaatgatcatatttatcattcagagtattttctagctctaaaaaaacaagtcattagtaaagaagcccaactactggtatttacaatccctatttttgagcctttgccttcccaatactacatccgagcagtgtctgatagatggttgggtgctgaggcagtatgtattatcaactttcaacatctaattctaccagagagacatcctcctcatacagaattactggatcttcagcctttaccaatcacagctttgggatgtaaagcatatgaagccctgtacaacttcagccactttaaccctgtacagacacaaatatttcatacattgtatcacacggattgtaatgtcctacttggagcacctactggatcgggaaagactgttgcagctgaattagccattttcagagtcttcaacaaataccctacttcaaaggcggtatatattgcacccctaaaagccctagtacgtgaaagaatggatgattggaaagttagaatagaagaaaaacttggtaaaaaagttattgaactaacaggggatgtgactcctgatatgaaatccattgccaaggctgaccttatcgtcactacgccagagaagtgggatggagtcagcagaagctggcaaaataggaactatgttcagcaagtcactattctcatcatagatgagatccatctgcttggggaggaaagaggccctgttctagaggtcattgtatctcgaacaaattttatctcatcacacacagaaaagcctgttagaatagttggactatctactgcattagctaatgccagagaccttgctgattggctcaatattaagcagatgggcttgtttaacttccgaccatcagtacgcccagttccactggaagttcacattcaaggctttccaggtcaacattactgtcctcgtatggctagtatgaacaagcctgcatttcaggcaattagaagccattctccagccaaacctgttttgatatttgtctcatcaagacgtcaaactcgtcttactgctttggaattgatcgccttcctggctactgaagaagatccaaagcagtggttaaacatggatgaaagagagatggagaacatcattgcaacagtaagagattccaacctcaagctgacccttgctttcgggataggaatgcatcatgctggactacatgagagggaccgaaaaacagtagaggaactatttgtaaactgtaaagttcaggttcttattgctacaagcacattagcctggggtgtaaactttccagctcatttagtaattattaagggaacagaatactatgatggaaaaacaagacgttatgtggattttcccattacagatgtcctccagatgatggggcgtgctgggaggccgcagttcgatgaccaaggcaaagctgtaattctagttcatgacataaagaaagacttttataaaaaatttctttatgaacctttcccagtagaatcaagtttattaggagtgctctctgaccacttaaatgcagagattgctggtggtacaattacatctaagcaagatgcattggattatatcacctggacttactttttccgacgtcttatcatgaatcccagctattacaatttgggtgatgtgagccatgattctgtgaacaagtttctgtcccatctgattgagaagtccctgattgaattggaactttcctactgtattgaaattggagaggataatcgcagcattgaacctctaacttatggccgaattgcctcctattactatttgaagcatcaaacagttaaaatgttcaaggaccgcttgaagcctgaatgcagtactgaagaactgctttcaattctaagtgatgcagaagaatatacagatttgccagtgagacacaatgaagatcatatgaatagtgaactggcaaaatgtcttcccattgaatcaaatcctcattcatttgacagccctcacaccaaagcacatctcctgctacaggcacatctcagccgagccatgctaccctgcccagattatgacactgataccaaaacagtcttggaccaagctctcagagtatgtcaggcaatgctggacgtggctgcaaaccagggctggctggtgactgtcctgaatatcaccaacctgattcagatggtgatccagggtcggtggttaaaggactcttctcttcttacactaccaaacatagaaaaccatcatcttcaccttttcaagaaatggaagccgattatgaagggcccacatgctaggggtcggacctccatcgagtcccttcctgaactgatccatgcctgtggagggaaagaccatgtatttagctccatggtagaaagtgagctacatgctgcaaaaacgaaacaggcatggaatttcttatctcacttgccagtgataaatgttggcataagtgttaaaggctcgtgggatgacttagttgaaggacataatgaactctctgtctcaactctgactgcagacaaacgagatgacaacaaatggatcaaattgcatgctgaccaagagtatgtgcttcaagtgagcttgcagagagtccactttgggttccacaagggaaagccagagagctgtgcagttactcctcgatttcccaaatcaaaagacgaaggatggtttttgatattaggagaagtggataagagagaacttattgctttgaaaagagtaggatatattcgaaatcatcatgttgcttccctttctttttatacccctgaaatacctggaaggtatatctacacattatatttcatgagtgactgctaccttggcctggaccagcagtatgacatctatctcaacgttacacaagcgagtctttctgcacaggtcaacaccaaggtctctgattccctgactgacctggcattaaagtaacttgacctgaacaatccatttgaaaggagtggctaagaattctctctgttcagtcatctagacaaatcgaattacttgatgtttgccttgaaagaatcaacttctaacctcaaccatccaggaaattgacagtggctgcagtattgactccagtgacataaagttaaccacagtggccttttaacaaatgttgccttttataatgttatctttatgagtttcttgatatgtaagatgaaaaagcatttagaataatcttttaatttgtgtatatttgggatgatatttaggagctatcaatcaaattttacatctcacaatgtactgtttacatggatattggctgctttttttaaggaaaaccacattgagatgtgacaagtgttaggacttgtcacagatttctaactctgccgcataaactataaatctgtaaggtggtacacagcgtgtcttgttagcaaaatttatactttgatatgatcacatgtagaagtagcttcaagaatttcttgtagtcataaatgtttaataatatatgatgtaaaattatattatggagcctaatgatgataacaaagaaaacaatatactgatcttagaaaatgtagacatggttaactgggaaataaaatatagagtggcacttcaagaaaaaaa

SEQ ID NO: 113 - DNA, 1285 bp, Homo sapiens
ggggcccagggccctcctatggaccctgcccgctcccctcccattgtccacggctgtccgcccacccccattctccaagcttcagccccctccttagttcggcatctgcacagcactgaagaacctgggaatcagaccctgagaccctgagcaatcccaggtccagcgccagccctatcatgaccaaggagtatcaagaccttcagcatctggacaatgaggagagtgaccaccatcagctcagaaaagggccacctcctccccagcccctcctgcagcgtctctgctccggacctcgcctcctcctgctctccctgggcctcagcctcctgctgcttgtggttgtctgtgtgatcggatcccaaaactcccagctgcaggaggagctgcggggcctgagagagacgttcagcaacttcacagcgagcacggaggcccaggtcaagggcttgagcacccagggaggcaatgtgggaagaaagatgaagtcgctagagtcccagctggagaaacagcagaaggacctgagtgaagatcactccagcctgctgctccacgtgaagcagttcgtgtctgacctgcggagcctgagctgtcagatggcggcgctccagggcaatggctcagaaaggacctgctgcccggtcaactgggtggagcacgagcgcagctgctactggttctctcgctccgggaaggcctgggctgacgccgacaactactgccggctggaggacgcgcacctggtggtggtcacgtcctgggaggagcagaaatttgtccagcaccacataggccctgtgaacacctggatgggcctccacgaccaaaacgggccctggaagtgggtggacgggacggactacgagacgggcttcaagaactggaggccggagcagccggacgactggtacggccacgggctcggaggaggcgaggactgtgcccacttcaccgacgacggccgctggaacgacgacgtctgccagaggccctaccgctgggtctgcgagacagagctggacaaggccagccaggagccacctctcctttaatttatttcttcaatgcctcgacctgccgcaggggtccgggattgggaatccgcccatctgggggcctcttctgctttctcgggaattttcatctaggattttaagggaaggggaaggatagggtgatgttccgaaggtgaggagcttgaaacccgtggcgctttctgcagtttgcaggttatcattgtgaactttttttttttttaagagtaaaaagaaatatacctaaa

SEQ ID NO: 114 - DNA, 3923 bp, Homo sapiens
ctctctgaggctgcgccaagacctgaagcggcggaccgagagcccgggtctgagactgagagagcaacggaatggaggcggggtagaggcggaaacacaacctgcagggccagagcgaggcgcgagaaggacggcggcgtgagggggcggggcgcgcagcgcgagaaggcaggcacgaggggcgagcgcgaggcggggcacggcgcgtggcgtgagacggggcggggcgcgcgtatcggcgccgcggccgcgtgacgcgttttcaaatcttcaaccgccgcagcccactcgtttgtgctttgcgccttcctcctccgcgccttggagccggatccggccccggaaacccgacctgcagacgcggtacctctactgcgtagaggccgtagctggcggaaggagagaggcggccgtcctgtcaacaggccgggggaagccgtgctttcgcggctgcccggtgcgacactttctccggacccagcatgtaggtgccgggcgactgccatgaactccggagccatgaggatccacagtaaaggacatttccagggtggaatccaagtcaaaaatgaaaaaaacagaccatctctgaaatctctgaaaactgataacaggccagaaaaatccaaatgtaagccactttggggaaaagtattttaccttgacttaccttctgtcaccatatctgaaaaacttcaaaaggacattaaggatctgggagggcgagttgaagaatttctcagcaaagatatcagttatcttatttcaaataagaaggaagctaaatttgcacaaaccttgggtcgaatttctcctgtaccaagtccagaatctgcatatactgcagaaaccacttcacctcatcccagccatgatggaagttcatttaagtcaccagacacagtgtgtttaagcagaggaaaattattagttgaaaaagctatcaaggaccatgattttattccttcaaatagtatattatcaaatgccttgtcatggggagtaaaaattcttcatattgatgacattagatactacattgaacaaaagaaaaaagagttgtatttactcaagaaatcaagtacttcagtaagagatgggggcaaaagagttggtagtggtgcacaaaaaacaagaacaggaagactcaaaaagccttttgtaaaggtggaagatatgagccaactttataggccattttatcttcagctgaccaatatgccttttataaattattctattcagaagccctgcagtccatttgatgtagacaagccatctagtatgcaaaagcaaactcaggttaaactaagaatccaaacagatggcgataagtatggtggaacctcaattcaactccagttgaaagagaagaagaaaaaaggatattgtgaatgttgcttgcagaaatatgaagatctagaaactcaccttctaagtgagcaacacagaaactttgcacagagtaaccagtatcaagttgttgatgatattgtatctaagttagtttttgactttgtggaatatgaaaaggacacacctaaaaagaaaagaataaaatacagtgttggatccctttctcctgtttctgcaagtgtcctgaaaaagactgaacaaaaggaaaaagtggaattgcaacatatttctcagaaagattgccaggaagatgatacaacagtgaaggagcagaatttcctgtataaagagacccaggaaactgaaaaaaagctcctgtttatttcagagcccatcccccacccttcaaatgaattgagagggcttaatgagaaaatgagtaataaatgttccatgttaagtacagctgaagatgacataagacagaattttacacagctacctctacataaaaacaaacaggaatgcattcttgacatttccgaacacacattaagtgaaaatgacttagaagaactaagggtagatcactataaatgtaacatacaggcatctgtacatgtttctgatttcagtacagataatagtggatctcaaccaaaacagaagtcagatactgtgctttttccagcaaaggatctcaaggaaaaggaccttcattcaatatttactcatgattctggtctgataacaataaacagttcacaagagcacctaactgttcaggcaaaggctccattccatactcctcctgaggaacccaatgaatgtgacttcaagaatatggatagtttaccttctggtaaaatacatcgaaaagtgaaaataatattaggacgaaatagaaaagaaaatctggaaccaaatgctgaatttgataaaagaactgaatttattacacaagaagaaaacagaatttgtagttcaccggtacagtctttactagacttgtttcagactagtgaagagaaatcagaatttttgggtttcacaagctacacagaaaagagtggtatatgcaatgttttagatatttgggaagaggaaaattcagataatctgttaacagcgtttttctcgtccccttcaacttctacatttactggcttttagaatttaaaaaatgcatacttttcagaagtgataaggatcatattcttgaaatttttataaatatgtatggaaattcttaggatttttttaccagctttgtttacagacccaaatgtaaatattaaaaataaatatttgcaattttctacagaattgaatacctgttaaagaaaaattacagaataaacttgtgactggtcttgttttacattatatatatgttcgtaattgtttcctgagaattacaatgaataataatttgctttgtcactgaaaaccaccagtgaagtgcaatttggggaatatcaaacttagcattatacatttggatattctagttgtattgtaaattttaaaagattatcaggataacatgaccttgccttgaaaaacctaaatttcatacagaaaggaaaaatacatttctatgcttgaattctggaaatcatcagaaatattgacacttgagggtcactggtggaccatgctagtattttggtgctgagtaattagattatgtataggggtaactggaagccatgaaggaaggacttaaccaggctaccaagtggaatataatttatctgctatttttaattacttaccttgtaaataactttaataatattcaaaagttgactctcctgtggctcatgccacaggatcccagcactttgggaggccgaggcaggctgatcacgaggtcagaagatcaagaccatcctggccaacatggtgaaaccttgtctactaaaaatacaaaaaattagctgggcatggcggcatgcgcctgtagtcccagctactccctccagaggctgagaattgcttgaacctgggaagtgcaggttgcagtgagccaagattgtgccactgtattccagactgggtgacagagtgagactccatctcaaaaaaaaaaaagttgactctaccccctaatttggtaggagatgaaggagaaaaggatggcattgaattatagatacagttttgggatatatacaaggattgccttgatctggcacttactgatacaagcatttggagaagagaaaattcaaatataagaaatttcaatttgaatctgtggatataaggcatttgcctttgagtatgttcttgtaggagtaagactaccaccagtgacattcaattggttctattgcatagtacatgaatctattgtcactaaaaattaggttactaatcttaatttttttgaaatatatgattctcagtacaggactaattcatatgcttttcctgcatacattattttgatcatttggataacatcaatgaacactggctttttaacacctttgtttttcataccagtacctgaagtaggctcaataaaagagtctttacagtgaaaaaaaaaaaaaaaa

SEQ ID NO: 115 - DNA, 2439 bp, Homo sapiens
agttttgcccccctcccctcccccgcccccgcccccgcccccaggcttgtgtagatcatgccgccagtagcggccctgactgccgaggaaacggtagcttaggacagttggctgttaagtgacactgattctccccgccccgcctgacccccgagaaggaggcttgtcccccgctgcgtgagggggtggggaagtgggtagtgaattcggatctacctgggaggggggagtggaagttcccgccccggagagcggcgaggcggcagccacagttgattatggaagattcccacaagagtaccacgtcagagacagcacctcaacctggttcagcagttcagggagctcacatttctcatattgctcaacaggtatcatctttatcagaaagtgaggagtcccaggactcatccgacagcataggctcctcacagaaagcccacgggatcctagcacggcgcccatcttacagaaaaattttgaaagacttatcttctgaagatacacggggcagaaaaggagacggagaaaattctggagtttctgctgctgtcacttctatgtctgttccaactcccatctatcagactagcagcggacagtacattgccattgccccaaatggagccttacagttggcaagtccaggcacagatggagtacagggacttcagacattaaccatgacaaattcaggcagtactcagcaaggtacaactattcttcagtatgcacagacctctgatggacagcagatacttgtgcccagcaatcaggtggtcgtacaaactgcatcaggagatatgcaaacatatcagatccgaactacaccttcagctacttctctgccacaaactgtggtgatgacatctcctgtgactctcacctctcagacaactaagacagatgacccccaattgaaaagagaaataaggttaatgaaaaacagagaagctgctcgagaatgtcgcagaaagaagaaagaatatgtgaaatgcctggaaaaccgagttgcagtcctggaaaatcaaaataaaactctaatagaagagttaaaaactttgaaggatctttattccaataaaagtgtttgattcctaagaaagaaaatatttttgtggacatgcataaaaattaaatggatttcctagtggagttttataaattaaaaggtcaaaactgaagctttttatttaggcttttccaaatcaaggataaatatcttacgcacgatatctagtgacagaggagaaagtggaaaatgacctcaaggaagctacgggcacaactggaagctttgtagaaattaaacatattcaaggagcaagaaatgaactttcagcagtctaaattttctaaataaccaatagttgccaatctaaaatggcagagaagatgaaatttgataaactgaattttttttaaaaatccatttaccctacaggtttgcatttgtttgctgaaatttacctttttttagttatatatatgtgtgtgtgtgtgtgtaatttctgccaataaattctaaattacaaaggtaagagaaaacctagtacattactaaatatataaagtatatgttctgattatgtatacttgttctagtgtcaagtctttttaagtgggtttttaaaagtttgttattggacttgaatggatttttgagactaggttaattatttttgaggtcttatcctaaaaggcatctaaggtacatgaatggagtatggtgattttataacattttttatcagaatggaaaaagaactgtttaaaagtttgatacttttaaatagttggtttttttgcttactctggtaatgattttctacaaatacataataaattgtttttttgagtctatattctgtatgcagttgaatatccattacttattctgctgtgctttaatagaatggaatgtttacaggcccttaaaatattatttttaaaaaaccttctgaagatacataccaaagtttttccaagaagattttataatcaatttaataatgtaaggtttatcagattctataatagtatagttattaaggcaattttatgttagagactattttgtaatgtagtgagtggtacctttataagaaaagtgactgccaatatatttttatagctgatctttataaattctaatgttgagtttttaatgattattttaaatgtttatatagtttagtaaaatttgcatctcaaagtatcatttttatattatgggacgttttcagattggctaatatttgcattgtaaattttgtatgcagtttatctaaaattcaaaaatactgtcagtacaccagcgtttaacatctatattccaatttgtatacagtttaaaattgtactgcaaaactattgtgtgctcttacacagtatgcatcatattgttgtctgtgaaattaaaggacatttgatagtcta

SEQ ID NO: 116 - DNA, 2758 bp, Homo sapiens
gaattcaggggggaaaggaggagctggagacagattgtaggaccgagcgcgggcaggcgggaggcaacggagctaccagccgctcctctctgctatatgaaatatgggagacgacagaccgtttgtgtgcaatgccccgggctgtggacagagatttacaaacgaggaccacctggcagttcataaacacaagcatgagatgacattgaaatttggcccagcccgaactgactcagtcatcattgcagatcaaacgcctactccaactagattcctgaagaactgtgaggaggtgggactcttcaatgaactagctagctcctttgaacatgaattcaagaaagctgcagatgaggatgagaaaaaggctgctgctgggccccttgacatgtctctgccttccacaccagacatcaaaatcaaagaagaagagccagtggaggtagactcatccccacctgatagccctgcctctagtccctgttccccaccactgaaggagaaggaggttaccccaaagcctgttctgatctctacccccacacccaccattgtacgtcctggctccctgcctctccacttgggctatgatccacttcatccaacccttccctccccaacctctgtcatcacacaggctccaccatccaacaggcaaatggggtctcccactggctccctccctcttgtcatgcatcttgctaatggacagaccatgcctgtgttgccagggcctccagtacagatgccgtctgttatatcgctggccagacctgtgtccatggtgcccaacattcctggtatccctggcccaccagttaacagtagtggctccatttctccctctggccaccctataccatcagaagccaagatgagactgaaagccaccctaactcaccaagtctcctcaatcaatggtggttgtggaatggtggtgggtactgccagcaccatggtgacagcccgcccagagcagagccagattctcatccagcaccctgatgccccatcccctgcccagccacaggtctcaccagctcagcccacccctagtactggggggcgacggcggcgcacagtagatgaagatccagatgagcgacggcagcgctttctggagcgcaaccgggctgcagcctcccgctgccgccaaaagcgaaagctgtgggtgtcctccctagagaagaaggccgaagaactcacttctcagaacattcagctgagtaatgaagtcacattactacgcaatgaggtggcccagttgaaacagctactgttagctcataaagactgcccagtcactgcactacagaaaaagactcaaggctatttagaaagccccaaggaaagctcagagccaacgggttctccagcccctgtgattcagcacagctcagcaacagcccctagcaatggcctcagtgttcgctctgcagctgaagctgtggccacctcggtcctcactcagatggccagccaaaggacagaactgagcatgccgatacaatcgcatgtaatcatgaccccacagtcccagtctgcgggcagatgatgcctcctctggtggagaggtcctcagccagagctcgcccgcccaagagccaagagagatgtcatcttatcccctcccatctgccttggacatggcaatatgggtggggggaattgtgtgttgtgagtaatggacagatatggggctttttagccatgtggtcatgtacgtttgacacctgtgctgggggcctcccagccccggagcctcatagatcatcccccagggtggggtttctgatgcatccacagccaaaggcctttccagatggtccgaacaatcacccctgccccatgcacgtgtatctgtctcttttaacactaacccttggcacttctaggtttggggtttctcagttccctctcttcccactaagccgtggctgttacctttttgttccttaccagcatgccacttcctgccagatagagggaggctagatttgatgacatattacccgctgacccagccccagccaccccatggactcaggactcaggtctcccatagctgcttatttacccgtttcctttttcctcttccttaattctagttaaaacattcacttacggagaatgtaaggttacctttgatgtatgaagtagcagtattttccagtttttccataagctttattccttctctctacctgccaccaaaaagaaagaaaccctcaagagttctaattctttttcatctatttgcacagctatttgggtacctcattttgtcccttgactttagtgtagtggtggggtctttcccaccaccccactaagccttggcaacctcattttgtggccttattattaaagattgcttggtagtgaaaagggaagggcccagaatctgactggctgattctgtctcctcccctccctccttctttagtttaaccatcagggcagacaggaacaaagtatttcaaagcttgttccatcaagttagggattaatcgattcctttatgttttataagagtttaccggccaaagcatattgtcatctttggtcatttttctgctcctgcttctctctcttcattggggtatcaacattaccgcccctgtctctcttcattcccctatcaacattaccgcccctgtctcttctgtaactacttcagactcagccctcctggaggctgtcatgtaggggactctcgaggttcctttgttctaccccatctctcccccccgaattc

SEQ ID NO: 117 - DNA, 3609 bp, Homo sapiens
gaatcctgctttttttttttctttgagacacggtctcgctctgtcacccttgctggagtgcagtggtgcaatcacagatcacggcagtgtctaattcctgggctcaagtgaaccttttgcatcagcctcctgaatagctgagaccacaggatatgaaagatggcaagtccagatagaagtaaacggaagatattaaaagccaaaaagacaatgcccctaagttgccggaagcaagtagagatgctgaataagtcaaggaatgttgaagcgctgaaaacagcaattgggagtaatgttccaagcggtaatcagagtttcagtcctagtgtcataactaggacgactgaaataaccaaatgtagcccttctgaaaatggtgcatcctcattggactctaataaaaattcaatatcagagaaaagtaaagtattctctcagaattgcataaaaccagtagaagaaattgttcattcagaaacaaaattggaacaagttgtttgttcgtaccaaaagccaagtagaacaacagaatcccccagcagagtcttcacagaagaggcaaaagattcactgaacacttctgaaaacgattctgagcatcagacaaatgtaacaagatccctttttgagcatgagggggcttgtagtctaaagtccagttgctgtccacccagtgtattgagtggtgttgttcagatgccagagtctacagtaaccagtaccgtgggtgacaagaaaactgaccagatggttttccatttagaaacaaactccaattcagaatcacatgataaaaggcaaagtgacaacattttatgttcagaagactcaggttttgtgcctgttgagaaaacacctaatttggtgaattcagtcacttctaacaactgtgctgatgacattttgaaaactgatgagtgtagtagaaccagtatttcaaattgtgaaagtgcagactcaacatggcagtcatcacttgacactaataacaacagccattatcaaaagaagaggatgttttcagaaaacgaggaaaatgttaaacgcatgaaaacttcagagcaaattaatgaaaatatttgtgtaagtttggaaaggcaaacagcattcctggaacaggtcagacatttgattcagcaggagatctatagcataaattatgaactatttgataagaaactgaaagaattgaaccaacgcattgggaagacagagtgcagaaataagcatgaaggaatagctgataaacttttggcaaaaatagcaaaacttcaaagacgtattaaaacagtattattatttcaaaggaattgtttgaaaccaaacatgttatccagtaatggagcctctaaggttgcaaattcagaggctatgattttggataagaatcttgagtcagttaatagtccaattgaaaagtcttctgtgaattatgagccttctaacccttccgaaaaaggaagtaaaaaaattaatttgtcatcagatcaaaataagtctgtttctgaaagtaacaatgatgatgttatgttgatttctgtggaaagtcctaatttgacaactccaattacatcaaatccaacagataccagaaaaattacatcaggaaattctagcaattctcccaatgctgaagttatggctgtacagaagaaacttgattctataattgatttgacaaaagaaggcctatccaactgcaatacagaaagtccagtatcccccctggagtcacattcgaaagctgcttcaaactcaaaggaaacaaccccattggcacaaaatgcagtccaggttcctgagtcctttgagcacctgccacctctcccagaaccaccagcaccactacctgaattagtagacaaaacccgagacacacttcctccccagaagcctgagctcaaagtgaaacgggttttcagacccaatggcattgccctgacttggaatataaccaaaatcaatcccaagtgtgctcctgtagaaagctaccacctcttcctgtgtcatgagaactctaataataagttgatttggaagaagattggagaaattaaagctttaccactccccatggcctgtactttatctcagtttttagcttccaacagatactattttactgtccaatcaaaagatatttttggacgatatggaccattctgtgatataaaatctatccctgggttttctgaaaatcttacgtaaaaggtgtttaataatgatatactactttttttttcatatttgtttgtttgcaatgttactgtaatactatttgccattgtaaaaggccagctcagattgtgagccctttctattgggacagtcctcttctatatgttttaagtggccagtaatttaatgaatttctggtttgtattaaatatgtccttccaatggataagttctaaaacatacgctatcattggcccatgttgctgaggtgcattgtgaacaatacctttagtgactgtggaactgctgcttctatcagaagacctaggatacaagcagccactgtttcctccgttaacaatcagcttttagtaacctgctgtggtcagcatagctacaggaaaagtcagcccttgactgagggccagatcatccctggagtgcacctctactaagattttatgaaaagatgacatgttgggctgcatgataaaagttaattataaaaattaaaagatttttttttttgagatggaatattgctctgttgcccaggctggagtacagtggtcactgcaacctccatctccctggttcaagcaattctcctatgtcagcctcccaagtagctgggactatagtcacttgccaccatgcccggctaatttatttttagtagagatgaggtttcaccttgttggtcaggctggtctcaaactcctgacctcaggggatccacccgcctcggcctcccgaagtgctgggattataggcgtaagccaccatgcctggccaaaaattaaaagattttatgaaacgaaatggcttcccattctttctattcagcttctaagtgggctattcatttgtgctctcctcttttttgttttgttttgcactttgtcaatcatttggggaaatagcctggaggtctttcctgaatctgtttgtagacataataaaatttgtgtgctgtgtacacaaaaacataatgtatcttatgaaagcattacccaacctgtttgagttgagaatgcatttgtccacctttgatttgaggctttagtttgctgatttcctaaatgctaccctttgatcatttcctggccaccatcacaatactaaggggctcagatgtgtcttgtgcccacctcttcctgagaagagatggaagtggagctgtgactagtacaagcagcccaagaaactctgaacggggcccaatggaggcaaacttgagcaaataattgggatgataagaaacaaaaataatcccaactgtttgaaagttcgaaagaggggcattcttttctggtacatggtgagagttcaggctccagagactcaaaacggaatggttttccttggcattttgtaaatgctctcacatctgtagcaataaagctgttattttctgcaaaaaaaaaaaaa

SEQ ID NO: 118 - DNA, 7582 bp, Homo sapiens
tctttcactcttgggcctagcgaggcagcttatttttcctttttctttcattggtcacagttatttcttttcagtgtgtcatcttctctaagtttctgagggagtgttagcttgaggccttgccttgacataatcagatataatcagaaaaatgaaaaattccataggaaagagaactattttagccaaggtgtgcgagagaaataccgccactttcaagcactgttttcttctactggagtctgctcaatagggacgtcagctttgctggggcttcctttgacaagagaatcagaaccgactggtgacatttgtttcaatgaaagcaacagtgtgaagagtaagtagtttttcctattattcatctcactcagtggagataatgaactcctctccactgccaagatgagaaactaccatttcttacacatggacacaaagatgagaacaataaacactgagacttcaaaaaggagggaaggagaaagaggaacaagacttgaaatctacctatcagaacttgcaatttattctgatcaacaatttgcccagctaaagtactacatctgccccctcttcctgtggctgtaggggcacagcaaaggtcactggtctaacctccttaaagggactccgctaacagaaaccaccaaatggagtggagaaaaagaaaagggatcccctatccccaactccagccatctagattaagaaaagccagctgactggacagtagcacagcccagtcacctcatggacaaatttcctaggaaagaacctctcccatctattctacttatcactctcctttgaggttccggccacagatcttcgcctgctgctggaaatggccctctcagtggactcatcgtggcatcggtggcagtggagagtcagagatggcttcccccattgtccatcggaaaccacaccgctgctctctccagagaaagggagacagagctacaacttgacacagcagcgggtcgtgttccccaacaacagcatattccatcaagattgggaagaggtctccaggagataccctggcaacagaacctgcacaaccaaatacaccctcttcaccttcctgccccggaatctctttgagcaatttcatagatgggctaacctctatttcctgttcctggtgattttgaactggatgccctccatggaagtcttccacagagaaatcaccatgttaccattggccattgtcctgttcgtcatcatgatcaaggatggcatggaggacttcaagagacaccgctttgataaagcaataaactgctccaacattcgaatttatgaaagaaaagagcagacctatgtgcagaagtgctggaaggatgtgcgcgtgggagacttcatccaaatgaaatgcaatgagattgtcccagcagacatactcctccttttttcctctgaccccaatgggatatgccatctggaaactgccagcttggatggagagacaaacctcaagcaaagatgtgtcgtgaagggcttctcacagcaggaggtacagttcgaaccagagcttttccacaataccatcgtgtgtgagaaacccaacaaccacctcaacaaatttaagggttatatggagcatcctgaccagaccaggactggctttggctgtgagagtcttctgcttcgaggctgcaccatcagaaacaccgagatggctgttggcattgtcatctatgcaggccatgagacgaaagccatgctgaacaacagtggcccccggtacaaacgcagcaagattgagcggcgcatgaatatagacatcttcttctgcattgggatcctcatcctcatgtgccttattggagctgtaggtcacagcatctggaatgggacctttgaagaacaccctcccttcgatgtgccagatgccaatggcagcttccttcccagtgcccttgggggcttctacatgttcctcacaatgatcatcctgctccaggtgctgatccccatctctttgtatgtctccattgagctggtgaagctcgggcaagtgttcttcttgagcaatgaccttgacctgtatgatgaagagaccgatttatccattcaatgtcgagccctcaacatcgcagaggacttgggccagatccagtacatcttctccgataagacggggaccctgacagagaacaagatggtgttccgacgttgcaccatcatgggcagcgagtattctcaccaagaaaatgctaagcgactggagaccccaaaggagctggactcagatggtgaagagtggacccaataccaatgcctgtccttctcggctagatgggcccaggatccagcaactatgagaagccaaaaaggtgctcagcctctgaggaggagccagagtgcccgggtgcccatccagggccactaccggcaaaggtctatggggcaccgtgaaagctcacagcctcctgtggccttcagcagctccatagaaaaagatgtaactccagataaaaacctactgaccaaggttcgagatgctgccctgtggttggagaccttgtcagacagcagacctgccaaggcttccctctccaccacctcctccattgctgatttcttccttgccttaaccatctgcaactctgtcatggtgtccacaaccaccgagcccaggcagagggtcaccatcaaaccctcaagcaaggctctggggacgtccctggagaagattcagcagctcttccagaagttgaagctattgagcctcagccagtcattctcatccactgcaccctctgacacagacctcggggagagcttaggggccaacgtggccaccacagactcggatgagagagatgatgcatctgtgtgcagtggaggtgactccactgatgacggtggctacaggagcagcatgtgggaccagggcgacatcctggagtctgggtcaggcacttccttggaggaggcattggaggccccagccacagacctggccaggcctgagttctgttacgaggctgagagccctgatgaggccgccctggtgcacgctgcccatgcctacagcttcacactagtgtcccggacacctgagcaggtgactgtgcgcctgccccagggcacctgcctcaccttcagcctcctctgcaccctgggctttgactctgtcaggaagagaatgtctgtggttgtgaggcacccactgactggcgagattgttgtctacaccaagggtgctgactcggtcatcatggacctgctggaagacccagcctgcgtacctgacattaatatggaaaagaagctgagaaaaatccgagcccggacccaaaagcatctagacttgtatgcaagagatggcctgcgcacactatgcattgccaagaaggttgtaagcgaagaggacttccggagatgggccagtttccggcgtgaggctgaggcatccctcgacaaccgagatgagcttctcatggaaactgcacagcatctggagaatcaactcaccttacttggagccactgggatcgaagaccggctgcaggaaggagttccagatacgattgccactctgcgggaggctgggatccagctctgggtcctgactggagataagcaggagacagcggtcaacattgcccattcctgcagactgttaaatcagaccgacactgtttataccatcaatacagagaatcaggagacctgtgaatccatcctcaattgtgcattggaagagctaaagcaatttcgtgaactacagaagccagaccgcaagctctttggattccgcttaccttccaagacaccatccatcacctcagaagctgtggttccagaagctggattggtcatcgatgggaagacattgaatgccatcttccagggaaagctagagaagaagtttctggaattgacccagtattgtcggtccgtcctgtgctgccgctccacgccactccagaagagtatgatagtcaagctggtgcgagacaagttgcgcgtcatgaccctttccataggtgatggagcaaatgatgtaagcatgattcaagctgctgatattggaattggaatatctggacaggaaggcatgcaggctgtcatgtccagcgactttgccatcacccgctttaagcatctcaagaagttgctgctcgtgcatggccactggtgttactcgcgcctggccaggatggtggtgtactacctctacaagaacgtgtgctacgtcaacctgctcttctggtatcagttcttctgtggtttctccagctccaccatgattgattactggcagatgatattcttcaatctcttctttacctccttgcctcctcttgtctttggagtccttgacaaagacatctctgcagaaacactcctggcattgcctgagctatacaagagtggccagaactctgagtgctataacctgtcgactttctggatttctatggtggatgcattctaccagagcctcatctgtttctttatcccttacctggcctataagggctctgatatagatgtctttacctttgggacaccaatcaacaccatctccctcaccacaatccttttgcaccaggcaatggaaatgaagacatggaccattttccacggagtcgtgctcctcggcagcttcctgatgtactttctggtatccctcctgtacaatgccacctgcgtcatctgcaacagccccaccaatccctattgggtgatggaaggccagctctcaaaccccactttctacctcgtctgctttctcacaccagttgttgctcttctcccaagatactttttcctgtctctgcaaggaacttgtgggaagtctctaatctcaaaagctcagaaaattgacaaactccccccagacaaaagaaacctggaaatccagagttggagaagcagacagaggcctgcccctgtccccgaagtggctcgaccaactcaccacccagtgtcatctatcacaggacaggacttcagtgccagcaccccaaagagctctaaccctcccaagaggaagcatgtggaagagtcagtactccacgaacagagatgtggcacggagtgcatgagggatgactcatgctcaggggactcctcagctcaactctcatccggggagcacctgctgggacctaacaggataatggcctactcaagaggacagactgatatgtgccggtgctcaaagaggagcagccatcgccgatcccagagttcactgaccatatgaggagctgcagaaatctgtacaaactcaacagaggccacctagtcactggtccacataacccttgaccccttcttcttcatagaggaaacaatgtgccagtcttattcttttcttcaacaaccttgacttccatggaggaagtgctggccccaaggggtctgacacaaagacgggaaacccagtcggcctctagttttctgctgctctcaggcagcacatcttgcaaacagtttggagaaggaggctgtttttgttgaatcgagttctcaaatcggtttagaccaaagccattcttctgaccctctagataagcgtagcctacaacccagtgccgtaagtttccaagattcaagaagtgtatcaacccaggcaatatctcaggatatggaagtttctgggtttatttacccctcagtgcccagagttaaagtttcagaagagacttgtgcacataagggcttcatctcaagtgtattgcagtaatggctgaatcggggttaacatcccttccaggcacagcgagttggttctgctttttgcctgtaagccaaagaaaagccacatctaaaaagctactactaaaagccagaaagaaaagtggatttgaactcagtgtcacagactcttctgagtgttttagggtcacagctagtgtaagaggcatgaagaatagacatgcaaaagggaacgggtgcaccagagacccctgttttggctgacagaccatatgtcccaccagctggggaatctgacaagaggacataggtggcactctttttttaaagctatttattgtatctatttttaaataaaattgcccatcctcattcagctcttagaacaaaagcaaaaaaccctgtaaatcaggagatataagcacatctgcacccagaataggcccatatgatagggcaaccctgagcttaaacaatgacatcttcaagggtagaactaatctgaaaccccattcagcctattccagaatggggataggctgaaacccccttccagcctctggaagacactggcctgcatcagttagagtcagagcaagtgtcacttcacagggaaaagaaggattatatagacttcctatccctagagtttataaatgtcaactatataaaaaaagctcaaaacagtgttaaaggaatgaacagtagaattttaataggctgtccaaagaagccaggtctgctgtgggcaagtatagcctaaccctagtcttgtaaaataagccagaaagggttactgagccaccttaagctagtacctatatagtaggcaaaaagtacagaaatagatgcaataagtgtggtgagtctttgagcctacgagtcatgccaccagccataagttgacctatcacttgagaacctcctcagcaaagatgccagaaaacattcaatcaagttggcaaatgacacagggagctggccctctgaccatcttcctggcaaacctggactggaagggccatttgcagcactgtcctggagctaatacactgtttcactgcctctgccatataatgatgccagcactagccagctggtgggtatttggaggaatcctgcatgaggattgcccaataaggggcaggtacacatacctggcaaagtgatgatgatgtgaattgtttccagtgaggggattgagtcaaaacttggatctcaggtacctcaatttttcccccaatttctggctactactaaaagccagaaagaacagaacagtggcctcaggagatctgagtttgaatccttgctctctaggatgcaggtggcttgaagcagaatgccacacctgcaagttgattagaactgcctttcttcccaggcttgacataggtattaagtcaaaattacatgaaacccagtggtaaaaaagcctctgaaagctgtaacaccctcagtaataacaaaagggatttttatttcacagctaaagggaaaataggtggagaagttaaaaaataatgtctgatcctgttcctaagttccaaactatagccaacactctgatgctgctctttttcttgtaggaccaaccgtcccagtttgcctgggactttctcatttttacagagtcccaaatcctaggaaactggagcaactggtacaactggtcacctactcttgcccctctgtaaatcaagccaactgtgaccatccaatgtgccatcttacagggaaaagttataaccactattcccctataacataatgctaatgattgtacttagtacatttttatacttttatgatattttactgattggaaatgtcatcctttattaaaaataaacatggttttccatagttgcctgccaaaaaaaaaaaaaaaaaa

SEQ ID NO: 119 - DNA, 5468 bp, Homo sapiens
tctctgtctgccagggtctccgactgtcccagacgggctggtgtgggcttgggatcctcctggtgacctctcccgctaaggtccctcagccactctgccccaagatgggccgtggggctggccgtgagtactcacctgccgccaccacggcagagaatgggggcggcaagaagaaacagaaggagaaggaactggatgagctgaagaaggaggtggcaatggatgaccacaagctgtccttggatgagctgggccgcaaataccaagtggacctgtccaagggcctcaccaaccagcgggctcaggacgttctggctcgagatgggcccaacgccctcacaccacctcccacaacccctgagtgggtcaagttctgccgtcagcttttcggggggttctccatcctgctgtggattggggctatcctctgcttcctggcctacggcatccaggctgccatggaggatgaaccatccaacgacaatctatatctgggtgtggtgctggcagctgtggtcattgtcactggctgcttctcctactaccaggaggccaagagctccaagatcatggattccttcaagaacatggtacctcagcaagcccttgtgatccgggagggagagaagatgcagatcaacgcagaggaagtggtggtgggagacctggtggaggtgaagggtggagaccgcgtccctgctgacctccggatcatctcttctcatggctgtaaggtggataactcatccttaacaggagagtcggagccccagacccgctcccccgagttcacccatgagaaccccctggagacccgcaatatctgtttcttctccaccaactgtgttgaaggcactgccaggggcattgtgattgccacaggagaccggacggtgatgggccgcatagctactctcgcctcaggcctggaggttgggcggacacccatagcaatggagattgaacacttcatccagctgatcacaggggtcgctgtattcctgggggtctccttcttcgtgctctccctcatcctgggctacagctggctggaggcagtcatcttcctcatcggcatcatagtggccaacgtgcctgaggggcttctggccactgtcactgtgtgcctgaccctgacagccaagcgcatggcacggaagaactgcctggtgaagaacctggaggcggtggagacgctgggctccacgtccaccatctgctcggacaagacgggcaccctcacccagaaccgcatgaccgtcgcccacatgtggttcgacaaccaaatccatgaggctgacaccaccgaagatcagtctggggccacttttgacaaacgatcccctacgtggacggccctgtctcgaattgctggtctctgcaaccgcgccgtcttcaaggcaggacaggagaacatctccgtgtctaagcgggacacagctggtgatgcctctgagtcagctctgctcaagtgcattgagctctcctgtggctcagtgaggaaaatgagagacagaaaccccaaggtggcagagattcctttcaactctaccaacaagtaccagctgtctatccacgagcgagaagacagcccccagagccacgtgctggtgatgaagggggccccagagcgcattctggaccggtgctccaccatcctggtgcagggcaaggagatcccgctcgacaaggagatgcaagatgcctttcaaaatgcctacatggagctggggggacttggggagcgtgtgctgggattctgtcaactgaatctgccatctggaaagtttcctcggggcttcaaattcgacacggatgagctgaactttcccacggagaagctttgctttgtggggctcatgtctatgattgaccctccccgggctgctgtgccagatgctgtgggcaagtgccgaagcgcaggcatcaaggtgatcatggtaaccggggatcaccctatcacagccaaggccattgccaaaggcgtgggcatcatatcagagggtaacgagactgtggaggacattgcagcccggctcaacattcccatgagtcaagtcaaccccagagaagccaaggcatgcgtggtgcacggctctgacctgaaggacatgacatcggagcagctcgatgagatcctcaagaaccacacagagatcgtctttgctcgaacgtctccccagcagaagctcatcattgtggagggatgtcagaggcagggagccattgtggccgtgacgggtgacggggtgaacgactcccctgcattgaagaaggctgacattggcattgccatgggcatctctggctctgacgtctctaagcaggcagccgacatgatcctgctggatgacaactttgcctccatcgtcacgggggtggaggagggccgcctgatctttgacaacttgaagaaatccatcgcctacaccctgaccagcaacatccccgagatcacccccttcctgctgttcatcattgccaacatccccctacctctgggcactgtgaccatcctttgcattgacctgggcacagatatggtccctgccatctccttggcctatgaggcagctgagagtgatatcatgaagcggcagccacgaaactcccagacggacaagctggtgaatgagaggctcatcagcatggcctacggacagatcgggatgatccaggcactgggtggcttcttcacctactttgtgatcctggcagagaacggtttcctgccatcacggctactgggaatccgcctcgactgggatgaccggaccatgaatgatctggaggacagctatggacaggagtggacctatgagcagcggaaggtggtggagttcacgtgccacacggcattctttgccagcatcgtggtggtgcagtgggctgacctcatcatctgcaagacccgccgcaactcagtcttccagcagggcatgaagaacaagatcctgatttttgggctcctggaggagacggcgttggctgcctttctctcttactgcccaggcatgggtgtagccctccgcatgtacccgctcaaagtcacctggtggttctgcgccttcccctacagcctcctcatcttcatctatgatgaggtccgaaagctcatcctgcggcggtatcctggtggctgggtggagaaggagacatactactgaccccattggaagaagaaccaggcatggaaagatggggagctctggaggtgttgtggggatggtgatggagagggatggaaataacgggtggcattgggtggcaacatttggggagagataatgaggcaactcagcaggctaagttgcggggtatataaattggggtgatgaccccatagacctaactgtgaacaatcagattagacactatgtgttagagtccccccgaccagatccttttccatcccactccactatgttgtctattttttctgaggaattaagggttaccccaccctgcccactcccatcccttcaaccccacttcctactgtaatagatcagcatccaaaagcaggaacccatctaaaccagaaggaagccctctcagatcaccccagcctcactccatttcccacttccacccccgttagcttcctgcaggactctatccctggcttccccttcagaccttgcaatcacaaaaggttcttctggtgagtgcaagagcctgagactggaaaaggtggacttgtctcccagtcgaggctggtaagggaccttcagggagagctgggcagacaggtgggagatggaggtagggctggctggaggaaggaaacaacaaaggaagtgaggtagtgccaatgacaggacatttgacatgagtctccagatagatgtcgtggactccagctctacgtcccacattttagaataccccaccagcagaacaaactcagatctcatcagggtagcagcagaggcaggaccagaaggcaatcaagagcttccagaaatgccacacttgtgtgccacagagttccccgctgacccttggttaggggtcctcttagtccacaaggtccggatgtcactcatgtacttaataacacttcaccttctgtaatactaagtcctcagagctccatgctgttctgaaagggatggccacaagttctttcccagcctcttccattccctttcttttcatgcccatcccgatgaacctgcatcattccccgacactgccaagccaaccctggaaaaggagttcgctggccattggctagaatcagggtggagaagttccctgaaccttcctgtctcccagggacatgtatgcttccagggacaagcttaggtcatgaacatggtcagaacctttggacaagaggaaaaatactaagagatttgctttttctgggtgcggtggctcatgcctgtaatcccagcactttgggaggccgaggcaggtggatcatgaggtcaggagttcgaggcgagcctggccaacatggtgaaaccctgtctctactaaaagtacaaaaaattagccagtcatggtggcacacgcctgtaatctcagctactcaggaggctgaggcaggagaattgcttgaacctgtgaggaagaggttgcagtgagctgagatcgtgccattacactccagcctgggcgaaagggtgagactccatctcaaaaaaaaaaaaaatgatttgcttttgacgtcttaggtggcagggctgttccctccaggcaaatgcccttcaaaccgacgatcattgtgcccacttaccctgggctggagagttggtttcaggttcctacaggagatagctttctttcccttactccctatctaacacttttgctctgcaggcagccttgcccattctctaagcctggcttagaaggcactgggaatgtcctgtagagagagacctagataggtcatgcaagtgagaaagacatctgaggaaaatggaagacctaaggcagacaggaaggaagcacaaaagacaagcattgggtcagacccataaaccacctcccaaaggctgtcatttcattgcactggaattttgctttatcagaagcaaggaagtaagggagtcattgccttgggcctgggaatctaagtgggagacaatattaatttggatccgattaattggagattactaactgtggacaaaagtttatctttgcacaatcaataaaaatggcatttttttagtaaattaagagcataaacaatattgctagaggtggcatgtttagtctaccaaaaacaatacttttcaggcactttagaaatatccttttagaagcagcgagtgcatgggctaattatcatcaatctttatgtatttgttaaagaaacatctacaggatctttattggtgaccttttgtaagacattagtttgaggtactacctatgtacttgaaaataataaagtggcatttctttatgaaaaaaaaaaaaaaaaaaaaaaaaaaaaaaaaaaaaaaaaa

SEQ ID NO: 120 - DNA, 3350 bp, Homo sapiens
ggagcggagcctccgcctggggggccccccatccctggctgtcccccagctgcgcgtccccgccccacccccgcggctgagccaccaccggtgcagtggtctccgcttggcggagcgagccttgagcttcgttccacagcttctttgcatcttggatttcggggcggccccctcccccacctctctctgcctttttgtaccccgctttttttctgcgttctgctcggtttttgtagccgtctgtttttgcaccccatttcgttttgtttctagacggtttggtggggggtgaagctgcattcataccccttcctcttgttattctcccctgctctgacagcaccccttttcatcgcagttggggggcctaggatcggtgcatcttccgccgcgctgccagcaccccgcagcgcgtggtcgtgcaccccggaatctgcagcagctgcatatctgaggggggtctcctttgcccgcgccgccttcgctccccgtgcttttgggtgtgtggagggcttcagcgcgcggcgcccccgcttctccgcaaccccccgccccgcgcccggactcgccccgcgccaccaagatggtcatccagaaagagaagaagagctgcgggcaggtggttgaggagtggaaggagttcgtgtggaacccgaggacgcaccagtttatgggccgcaccgggaccagctgggcctttatcctcctcttctacctcgttttttatgggttcctcaccgccatgttcaccctcaccatgtgggtgatgctgcagactgtctccgaccatacccccaagtaccaggaccgactggccacaccgggcttgatgattcgccccaagactgagaaccttgatgtcattgtcaatgtcagtgacactgaaagctgggaccagcatgttcagaagctcaacaagttcttggagccttacaacgactctatccaagcccaaaagaatgatgtctgccgccctgggcgctattacgaacagccagataatggagtcctcaactaccccaaacgtgcctgccaattcaaccggacccagctgggcaactgctccggcattggggactccacccactatggttacagcactgggcagccctgtgtcttcatcaagatgaaccgggtcatcaacttctatgcaggagcaaaccagagcatgaatgttacctgtgctgggaagcgagatgaagatgctgagaatctcggcaacttcgtcatgttccccgccaacggcaacatcgacctcatgtacttcccctactatggcaaaaagttccacgtgaactacacacagcccctggtggctgtgaagttcctgaatgtgacccccaacgtggaggtgaatgtagaatgtcgcatcaacgccgccaacatcgccacagacgatgagcgagacaagttcgccggccgcgtggccttcaaactccgcatcaacaaaacctgaggccccttcctcccaccccatctctctcctgtggatgctcctggaatgtccctgaccctgcctgatccctccctcacccaccccaaaggtatttttgataacagagctatgacttgtctgagcctcacatccttttccttgacttctcaacccagcctgaagtccattgcggttccgtcactcgcctttcccaccaacttctcccaacctcagatcagtcagacagggagctgggctaagatggccacggaggagttaggagcctttctagttctggtttagctgtgagagctatccactctcctgcctgcatatcccctgagagttataggaagtgcccactgacccacccacccacctacaccccccgccacacacacacacaaacgtgcacacgcgtctcatttgacccctttgcttccagagatgaatgtggcactccctccttccattcctaagctctagccaccgtcccttgatctctcatactttctccctgtctacacagtcgccatcttggtgactttgaatttatctggctcctgggcaggtcttctcctcctctccatccctattccctcctctgaaatgcacccctttgtaattgaggacaaggtggttctgtggccttttccctctttgctggcacgttctgcttctcaccctctggtgactctgtgagctgggaaatgagggactggaagtgaggcctgtgttgacccttcctgaaaatcctctagcagcccccgacttcagcagtttctttctttgtttttttgagatggagtttcgctcttgttgcccaggctggagtgcaatggtgcaatctcagctcactgcaacttccgcatcccaggttcaagcgattctcccgcctcaggttcccgagtagctgggactacaggcatgtgccaccatgcccggctaatttctttctttctttttttttttttttgcattttttagtagagatgggggtttctccttgttggtcaggctggtctcgaactcccgacctcaggtgatccacctgcctcggcctcccaaagtgttgggattacaggcgtgagccaccgcgcccggccttcagtttcttcctaggccgttctgtcacccaaatagctgctacccagaggggcggggttgacctaggctgaatatccactttgtttttatggatggctcccttcccccattcgccttcccagaatatccttcaagttccacttcccagggagctctgggggaggggcggccattctggctccgtccccagtggccaccttggaaacatcggctggctttgggactattccacctccttcccctgagcccagatctgcccccaccatcctttctctggcttcttttagcaagttatcaactaatcactaactccttccttttcctctgcatgccagcctgaaaattccaaatctagcctctgaatgtcttggctccatctcttcagacccctttgcctttaaaaaaaaaacaaaaacaaaaacaaaaaaacccataatgcccacagaatgtcaaatgaggggcctcctgcctcctgctctgaatattctgtagctgtagaggcattttaaccctttgtcctccagcatcccttcacttcctcatcctctctaacctcctttttctttttttaatgctgcagcctccacactccacccacaggtggacccttccctttttctctagctggatctgtgtttcttcccttcgggcccccatgttttcctgcacccgccctaccatggtctctctctgcagttatttaatgcctgtgtcagatctactgtaaaaagaggattaagtaaaataaaatgagagcaattatatatataaatatatatcatacacagagaaaaaaaaaaaaaaaaaa

SEQ ID NO: 121 - DNA, 3857 bp, Homo sapiens
ctccagaactctcacccgattgcctgcctctgctgcgtctttgcccactgaacagccatgagaaggcaactccggtccagaagggctccatcctttccttacagttatcgctacagactcgatgatccggatgaagcgaaccagaactacttagcagatgaagaggaggaagcagaagaagaggctcgggtgacggtggtgcccaaatcggaggaggaggaagaagaggaggagaaagaagaggaggaagaggaggaaaaggaggaggaagagggtcaaggtcagccaacaggcaatgcctggtggcagaaattgcagatcatgagtgaatacctgtgggatccagagagaaggatgtttctggcccgaacaggcctgatcttactcatttacttcttcttctatgcctccttggctgctgtgatcaccctctgcatgtacacactatttctgaccatcagtccctatataccaaccttcacggagcgggtaaagcctcctggagttatgatcagacccttcgcccatagccttaacttcaacttcaacgtttctgaacccgacacttggcagcattatgtgattagcctaaatggctttctccagggttataatgacagtcttcaagaggaaatgaatgtagattgtcccccggggcagtacttcatccaagatggcaatgaggatgaggacaagaaggcctgccaatttaagcgctccttcctaaagaactgctctggtctggaggacccaacttttggatactctactggacagccctgcatccttctaaagatgaaccggattgtaggctttcgtcctgagcttggagatcctgtgaaggtttcctgcaaagttcagagaggtgatgaaaatgacatccgatccatcagttactacccagagtcggcttcttttgacctccgctactacccttactacggcaaactgactcacgttaactacacatcccccttggtggcaatgcactttacagacgtggtgaagaaccaagcagtgcctgtgcagtgccaactgaagggcaaaggcgtcataaatgatgtcatcaatgatcgttttgtgggcagggtaatctttaccctgaacatagaaacttaagaacttcagggggccattcttaccagttctgtttctgttttatctcatggtatctctggtagcacctgaattctttttcttcaattaggacacagccagatggacatctaagacagccgatcatctttccttgcctatgacatgtgtataaaatgacattgtgggagctgttcgattttttaaaggtagtgtctcctgatgacaaacagagtatattaatttcctttccctccacttaaaactaaagcctgttcttgctgctggtaatctccctgtagcgtaaacatagtatctgataaaatttacaatagccacgcaatagccatcaaggagaatttctattatgattataaattcatcatgttttctaaaattctgttggttttagaggtcagattcctcccaaccaggctaataacctaacacatgtttaaaaaaaatctgcctaagccgggtgtggtggcatgcatctgtagtcccacctattcaggagattaaggcaggaggatcacttgagcccaggaggtcaaggctgcagtgagctgcactgcattccagcctgggtgacagagtgagatcctgtctctgaagaaaaaaaaaacctgcctggcaaggtccttccctgggaatcaccactcggtccaacctagacaaccaagaccgctatacctaaagacctctatatcctggtgcctaagaaacttctgcctcccacagacaactaagtgcttattcaaagactaggttattttcaactgggaaaaaagcagtgctaacaggatattgttctgggatagagatgaagaccgtccttgtgactttttaaagaggtggggctcactgcaactggggagaacacttagcatatggatatgattggtgtttgattccttgctctctggtgtaatcgtctaaaggcaaacattcctgcaaacaggtttttctcagcttcaggcagaggagacaacatggaagaagattcccaccagctaattcttcttgggctatttgtttgacagtagcatgatgttttttgagaccatcaggggtggttacatagaccagcagctacagctctggaaattgaaatcataatctgtcaatgaatacatgacaagacagaacgttccttgccaggccaggcaaaagccaaggcccattagccagtttagcatttactttaaaaatgacatgaggcagattcttatccaggatgtggatcagccaggtcactttgtcttatctttggtcacctgatcactcaactgcttcttaacacctccaccagggggaaggctggcacaaggagaaaaaaaaagcaagcatcagcgaatagtatagtgtctcagggtccgaagcaagtttaaatgccacctaggaggatccaaagtctgaatctcctctacaatgtttcctttctcccaaaaccagggaactgactgtctggtagtgaagacaagcaagtggagaagttatacgatatagtttaatgagagttaaaaaactagtatgtggaaagctatgggaatatgaggaaaaatatcttgagctaagaaagtagcagaggaaatttcacatgcaaagccacagtcatgaagagaccatggtgtgtctgggtaactgtgagcagtttatgtaactggaatgaaaagggctcagaggaatggcagggatggcaagagatccagctagagaggtattcagggatggaaagaggactttgagttttatccaataggtgaaaatgagtaattaaagcattttaatcagggaggctctgtgatcacatttgtgttttattttattttactttattatttatttgtttatttttgagatggagtttcgctgttgtcacccaggctggagtgcagtggtgtgatctcggctcactgcaacctccacctcccggattcaagtgattctccagcctcagcctcctgagtagctgggattacaggcacacaccaccatgcccagctaacttttgtatttttggcggagacagggtttcaccatgttggccaggctggtctcgaactcctgacctcaagtgatccgcctgcctcagcctcccacagtgctgggattacaggcgtgagccaccgcacccggcttgcaatttagaaagggcacttggcaaccactatgtgaagggtgattggagaaggacaagactgtggaatgggcaataaggaaggaggagtttggagaatgactccaaaggtttgagcttggctagaaccggtaagatggtgacattgttgatcaagactgggaatataagagagaagcagatttggagagatcaattttgaacattttagacatgattttctattggtcagacattgatgtggagatgtaaacacatgtagggttggtgagaaggaaagatgagaacaaaagcaacattgggttaagggaactcgcttaagaaattttaagctatttaatcttgggaactgaagccagtcatgtaaacatactataccaatctagtccctaacagtgttttttctcttgtggcagaaagaattgctgttcctctttggaatctccttcccagacaccttcaaagtcttattgacacagtaaagggaggccaaccactactaacaagttctagaagatataggatcttctatagtaggttaatggaaaatacaaaaacaaacaaacatacaatgaaactgcctcctctcaacccattttcttaacaaattcaattttcaaaa

SEQ ID NO: 122 - DNA, 2651 bp, Homo sapiens
cttcatccgggtgctgcggcgcgaataagagccggaccgcgcttgcgcattgagtcccactccttcgacctctgccgcagcccgtgccgccgccgcctcctgggaagagaggaagcgggagaggagcccacgtcgcctgtcacccaatatctccagccgcgcagtcccgaagagtgtaagatgttcgcctgcgccaagctcgcctgcaccccctctctgatccgagctggatccagagttgcatacagaccaatttctgcatcagtgttatctcgaccagaggctagtaggactggagagggctctacggtatttaatggggcccagaatggtgtgtctcagctaatccaaagggagtttcagaccagtgcaatcagcagagacattgatactgctgccaaatttattggtgcaggtgctgcaacagtaggagtggctggttctggtgctggtattggaacagtctttggcagccttatcattggttatgccagaaacccttcgctgaagcagcagctgttctcatatgctatcctgggatttgccttgtctgaagctatgggtctcttttgtttgatggttgctttcttgattttgtttgccatgtaacaaattactgcttgacatgttggcattcatattaattacggatgtaattctgtgtatcttactgtgactccgaaaactgtagtattggtgtcatgggaatgtacgttatttccaaagtcatttcattaaagatgaaaactttaatttcttctgtgatttgtacttacactaagtttagattatcacaaagaagaacgtgcattcaggcagatgctgtcccattcagaggaagctacagcagttgctccactgatgaaaaatattccaatgtaatttttatgggaattcttttatatagtgttctgcatattgtaattcatagggcttttgtttattcatataaaggataaatatttgggtgttttgagcttctataaaatatgattaattaaaggtagttaatactcaagatggtcttgagtttttaaggtctaacatcagttagaatacttcaaatcagaatcaccttccaagactgacttgacaggtggttctaaaaataaatcacgtcagctttttaggaaatgaagccttaagctagggggtaatgtgacttttgtttttcagtaagtctcacattaagcaattgtgtgcctctaatgaatcttccatgtcttttcagaacaggctcagtccaactagcagctagtttcttacttgaacaagactattaaaaaccaaatatcaaaaaactgaattggctagatttttacagccaaaaattgctgtaaggcagtgtgtatcactgttgctaacatgtttatagtgggagtcttggggatgatagctggttcaacagtattttgctgctaatactttatgttgcttcttggtcaaacttttcccattcaaaggaagaagatggtgctactatagacagtttttcccctagcaaatatattgtaccataatatctatcatccaagtttcagggttttttgaaagttgataattaggaaagtgacattttacttttcttagtgccctttgcctgtttgatttccattgagaaagagcagtcaccaaagttcctcaagtgtcggaagaccacctccatcagaatcagtgcttgtttaaaaaataaaaatccctaggttccagacctactgaattggactctttggacatgagactcagcaatctacatctttaaaaaggcttcccaggtggtttttgtgcatactgtttgagagtcactaagttatatatatatcctaccttctgtaaagtgaaatgaggccccaaaaagctaaagaggtagagctgctacctcgtttttagttgattcatcatctagtctatatcacccaaaagaattggaaataggtattcaaacaaaaacctgtatacaagtattcatagaagcactacttacaatagccgaaaggtagaaacaaccaaatgtctatcagctgatgaatggataagtaaaatacatccatataatggaatattcagccatgaaaaggaatgaggcactgatacataatgaatagatgtgagtgaaccctaagaaagcatgctaagtggaagaagccagccacatgattccatttatatgaaatatccaaaataggcaaatccacggtgacaaagccaattagtagttatcaggaactagggagggggtgaaaagggagtgactgcgtaatgcgtatggggattccttttaggatgatgaaaattggatgaattacagctggtctgatggtagtgggttatcagaacttattaacattagtgtcattaaagttggtatatagcccctcactgctaaatctggctcaaaaattaaaagattattaaaatttgatgaattagtggtgatggttgcacaacattgtaaatataataaatgtcactgaattgtacactttaaggtggttaaaatggcaaattttacatgtcttactgaaactactatttaatacaaagtacatagtataaaattttaaaagtgataggaaaatgcttagattaatattcacctattccaagtatattttaaataaaaacagtcttggtaaagaaaaaaaaaaaaa

SEQ ID NO: 123 - DNA, 368 bp, Homo sapiens
cgcctttgcctccaaggctttgctggcttgtgcggcatcctgctccgtctgcaggttgtgcttccggtgcggaggtcagggacaagatggtgccaccggtgcaggtctctccgctcatcaagctcggccgctactccgccctgttcctcggtgtggcctacggagccacgcgctacaattacctaaaacctcgggcagaagaggagaggaggatagcagcagaagagaagaagaagcaggatgaactgaaacggattgccagagaattggcagaagatgacagcatattaaagtgagtgaccctgcgacccactctttggaccagcagcggatgaataaagcttcctgtgttgtgtgataaaaaaaaa

SEQ ID NO: 124 - DNA, 3112 bp, Homo sapiens
agccggcagagcgctccggccccgcacccgccgcccgtcgcccgcagccccctaccgcgcggcccgcgccccgccggctcccgtcactgggtaagagaagactggaagcatgtcggagttttggttaatttctgcccctggcgataaggaaaatttgcaagctctggagaggatgaatactgtaacctccaagtccaacctgtcttataataccaaattcgctattcctgacttcaaggtggggaccttggattccctggttggcctctctgatgagttggggaaactcgacacctttgctgaaagcctcataaggagaatggctcagagcgtggtggaagtcatggaggactcaaaggggaaggtccaggagcacctcctggcaaacggagttgacttaacatcctttgtgacccactttgaatgggacatggccaaatatcctgtcaagcagccgctcgtgagtgtggtggacacaatagccaagcaactggcgcagatcgagatggacctgaagtcccgaacggccgcctacaacactctgaagacaaacctggagaacctggaaaagaaatccatggggaacctcttcacccggacactgagtgatattgtgagcaaagaggacttcgtgctggattctgaatatctcgtcacacttctggtcatcgtccccaaaccaaactactcacaatggcaaaaaacctacgaatctctctcagacatggtggtccctcgatcaaccaaactcattactgaggacaaggaagggggccttttcactgtgactctgtttcgaaaagtgattgaagatttcaaaaccaaggccaaagaaaacaagttcactgttcgtgaattttactatgatgagaaggaaattgaaagggaaagggaggagatggccagattgctgtctgataagaagcaacagtatggccccctgctgcgctggctcaaggtgaacttcagtgaagccttcattgcctggatccacatcaaggccctgagagtgtttgtggagtccgtgctcaggtatggactaccagtgaacttccaggcagtgctcctgcagccgcataagaagtcatccaccaagcgtttaagagaggttctaaactctgtcttccgacatctggatgaagtagccgctacaagtatactggatgcatctgtggagatcccgggactgcaactcaataaccaagactattttccttatgtctacttccatattgaccttagtcttcttgactagaaaggccagctggcacctctgtctcatgttcgtgcagattattacagacacctctttcctttagccagagaatggttcaaatgtcttacagaactaagatctttttcagagaaattgctcacaaaagttagtgacagttgtatttatttttttaagttacaataaaatgctctcaagtcctttgaatgttccaacaaattcaaaacttcattttctgaatgttttacataaatgcgaactacctgttcgcattggtaacctgctgctgtatttcatgtcttaacggctattttgaggttcattaacaacatagaaagccttgaactgtataaccagctagattccttaataattagtcactagagacagcccaaagacaaatattgggcaggaaatcagttctcactgagcccggtttccatgtaaaatctctgttgtggtgggcataggtggcaccatctaaagaaaagaggtcttgttttttgtttaaaaaagtttgtggggaggaaagacatctgtgtatcacttcaaaatattgatttactgctaaacatcactctgaatttatgatgtggatactaacttcatacatttatcggcattgtccaaaatattttattctttaatggaaaaagccattaatattcaaatgaagggatcacattaaaaaaaacccatacataagaaacagcctccaagaacattcaagcagcagtcagagagaaaaatgtttcgacagccaagttttcttcaaaatattatgtgacagaatacgactcaattcaccggctacaacaattcatagaatttttcaatgttttcttgagatgcaaaagttcactgttgcagtgttttcaaatgaccaatcaagtactacttcttggttaaaaggccactggtagagtcatctgagtgtagagaatgtcccttcactgctggaaaaatccactggctcccaagaaaagaaaatggtctgaagcctctgttgtggctctcacaactcatctttccctaagtcatcaagctccacatcactgaggtcaatgtcatcctccacgggaagctgggagacgacagaaagccactgttagatctgcagaaggggacaccctggaaggtcaacatctcattttatggaagagcgactctctggagctactcctgctacaatccaggttctcctcagtctgactcctaccctgaccttcgtacctatgattatacggatggaaaagctcagaactcaggtgaaacatttcaacatcacatcactcaccattttaacactggaagccacttgaacgtgtccttttgaggagggtgggacacaacagtacagaaataagtgctaatttcaaagctatcattttctatttttctaagataaagtaaatgaattccaggttaaatgttcactttaaggtaataatcaggaaagcaaccttactactgaaatgtatcttggctgtcaagagtatcaaatgccatgcagcacttaaacttgtgataaggaagatgaagggtcttcagagaagaacctcttaaaaggcccacgggtgcaccagggctgaggtctgatgggaaggacttgactccaggtgcagagatgcacaggctcaagagagtaaaccaggactgctgcccgcacagcttccctcccgggcactcacctcgccatccctgccgtcccaaggctctctctcaacgatggtagggaaagccccgcctcctacaggtgccgtggagccacgcccaaaagagagctcccttagggaaaaatgaccaaaacacacacacacatttacaatggactgctggtgcagaagaataaacaactttaaaaataaaaaaaaaaaa

SEQ ID NO: 125 - DNA, 1611 bp, Homo sapiens
gtgacaacgggggcgaagcgcaggcgcaaggagcaagcgcagattgtgggcggctgtgtcagctgacccaaggggccttcgaggtgccttaggccgcttgccttgctctcagaatcgctgccgccatggctagtcagtctcaggggattcagcagctgctgcaggccgagaagcgggcagccgagaaggtgtccgaggcccgcaaaagaaagaaccggaggctgaagcaggccaaagaagaagctcaggctgaaattgaacagtaccgcctgcagagggagaaagaattcaaggccaaggaagctgcggcattgggatcccgtggcagttgcagcactgaagtggagaaggagacccaggagaagatgaccatcctccagacatacttccggcagaacagggatgaagtcttggacaacctcttggcttttgtctgtgacattcggccagaaatccatgaaaactaccgcataaatggatagaagagagaagcacctgtgctgtggagtggcattttagatgccctcacgaatatgaagcttagcacagctctagttacattcttatgatatggcattaaattatttccatatattatataataggtccttccactttttggagagtagcaaatctagcttttttgtacagacttagaaattatctaaagatttcatctttttacctcatatttcttaggaatttaatggttatatgttgtctttttttcctatgtcttttggctcaagcaacatgtatatcagtgttgactttttctttcttagatctagtttaaaaaaaaaaaaaaccacataacaattctttgaagaaaggaagggattaaataatttttttccctaacactttcttgaaggtcaggggctttatctatgaaaaagtagtaaatagttctttgtaacctgtgtgaagcagcagccagccttaaagtagtccattcttgctaatggttagaacagtgaatactagtggaattgtttgggctgcttttagtttctcttaatcaaaattactagatgatagaattcaagaacttgttacatgtattacttggtgtatcgataatcatttaaaagtaaagactctgtcatgcatttttccccattcttttttttttccctgtctccgtgacaaccagtggttcttcatttttgatcatgcgaaatgcattttgacccagatggtctgcagaacttcacttaggacattagcacacaaatagcacacatatcacatacccatttatatacataattagaaaatgttcctgatacatgtgtcatgtgatttcttccaacaaatgttttggaaaacagcaagcaactagtctgtaggttgtcttttctctagagatccttgtcctgggacagcctggggcaagttattaagcatatttccttcctggtgggctagatgatgtgcattatacctgtagtaccttcatactagcccttacaagttaaatgtcctgtggccatcttagccgaaagtctttggttgcaaaatcttataggtaaaaacagttgaaagaacattatgggatttccttgcttgttctgatacaatacaactagatgaccttaaaaaccctca

SEQ ID NO: 126 - DNA, 1552 bp, Homo sapiens
gcggaagatggcggcgtccaagggaggttgagggctctgaggaggcgttgagaggtttccgtacagcccgaccgtgcggctttggggatcccatcgctctgtgtttcctgctccaggtttcgcgtctcgcatcttcccagaccctcgggcgcgatgtggaggagctgcctccggctgcgggacgggggacgccgtctcctgaatcggccggcgggtggccccagcgcttctatgagtccggggccaaccatcccgtctccagcccgggcttacgccccgccgacagaaaggaagaggttttatcagaatgtcagcatcacacagggtgaaggtggctttgagataaacctggaccacaggaagctgaaaactccccaagccaagctctttaccgtccccagcgaggccctggccattgcagtggctactgagtgggattcccagcaggataccatcaagtactacaccatgcacctgaccacattgtgcaacacatcattggacaacccaacccagagaaacaaggatcagctgatccgggcagccgtgaagtttctggacaccgacaccatctgctacagggtggaggagcccgagacattagtggaacttcaaaggaatgagtgggatccaatcatcgaatgggctgagaaaagatacggcgtggagatcagctcctccaccagcataatgggacccagcatccctgccaaaactcgggaggtgctcgtcagccacctggcatcttacaacacatgggctttacaagggattgagtttgtagctgcccagctcaagtccatggtgctaaccttgggcctgattgacctgcgcctgacagtggagcaggccgtgctgctgtcacgcctggaggaggagtaccagatccagaagtggggcaacattgagtgggcccatgactatgagctgcaggagctgcgggcccgcaccgccgccggcaccctcttcatccatctctgctccgagagcaccacagtcaagcacaagctcctgaaggagtgaggcctgggcagagcacactcagcaggatagaggcagtgcagccacagctcccccggccttcagggctccccagcctgtggggctggcttccttggcttttggggactcggcctcagcgtcaccctgagattccccccgagacacagtgcgctagtacggctgtccggaggtcagcctgatttcaacccaggtgcccctggcctggccagcagtgaatgtaggagatgaattgtgcaagtgactttctctcgactctgattttattaaatatttctccaccctggaaatgtgctgagccctgttttcacgtatgcctctgcacttctccattcttcctgttttgtctaggttccagagggttaaacagcttatctcccatggcgtgtttggatatctgctgcctgtggtcaggaaccttgcactggggaaacaatcatgtaatccacagacaactctatttgtgttcttcagcctcagcctgaaggcttttttttggctggcttttaatcaaacaatcttttgaaacaat

SEQ ID NO: 127 - DNA, 8843 bp, Homo sapiens
agccggcgagcggcagcagctccgggctcgagagcccgcgcccatgccagtgcccatgcggggccgccgccagtgacgccggagaggtgttccccccacactggggctcccactactgcgaggagtgacccacgaaggccacagagatggccggggcttcggtgaaggtggcggtgcgggtccgccccttcaattcccgggaaatgagccgtgactccaagtgcatcattcagatgtctggaagcaccaccaccattgttaaccccaaacagcccaaggagacgcccaaaagcttcagctttgactactcctactggtcgcacacctcacctgaggacatcaactacgcgtcgcagaagcaggtgtaccgggacatcggcgaggagatgctgcagcatgcctttgagggatacaacgtgtgcatcttcgcctatgggcagacgggtgccggcaagtcctacaccatgatgggcaagcaggagaaggaccagcagggcatcatcccacagctctgcgaggacctcttctctcggatcaacgacacgaccaacgacaacatgtcctactccgtggaggtcagctacatggagatttactgtgagcgcgtccgtgacctcctgaaccccaagaacaagggcaaccttcgcgtgagggagcacccactgctggggccctacgtggaggacctctccaagctggctgtcacctcctacaatgacatccaggacctcatggactcagggaacaaggccaggaccgtggcggccaccaacatgaatgagaccagcagtcgctcccacgccgtcttcaacatcatcttcacccagaagcgccatgacgcagagaccaatatcaccacggagaaggtgagcaaaatcagcctggtggacctggctgggagcgagcgggctgactccacgggagccaagggcacgcgcctcaaggagggggccaacatcaacaagtcgctgaccaccctgggcaaggtcatctccgccctggctgaaatggactccggacccaacaagaacaagaaaaagaagaagacagatttcattccgtaccgagattccgtgttgacctggctcctccgggaaaacctgggcggtaactcaaggacagctatggtggcagccttgagtcctgcagacatcaactacgatgagacccttagcacgctgaggtatgctgaccgggccaagcagatccgctgcaatgctgtcatcaatgaggaccccaacaacaagctgatccgcgagctgaaggatgaggtgacccggctgcgggaccttctgtacgcccagggtcttggcgacatcactgacatgaccaatgccctggtgggtatgagcccctcatcctcgctctcagccctgtccagccgcgcggcctccgtgtccagcctccacgagcgcatcttgtttgccccgggcagcgaggaggccattgaaagactgaaggaaacagagaagatcatagctgagctcaatgagacctgggaggagaagctgcggcggacagaagccatccggatggagagggaagccctgctggccgagatgggtgtggccatgagggaggatggcggcaccttgggcgtattctctcccaaaaagacaccacacctcgtcaacctgaacgaggacccgctgatgtctgagtgcctgctctactacatcaaggatgggatcaccagagtgggcagggaggatggcgagaggcggcaggacattgttctgagtgggcacttcatcaaggaggagcactgcgtcttccggagcgactccaggggaggcagcgaagctgtggtgaccttggagccctgtgagggggcagacacctacgtcaatggcaagaaagtcacagagcccagcatcctgcgttcaggaaaccgcatcatcatgggtaagagccatgtgttccggttcaaccaccccgagcaggcccggcaggagcgtgagcgcacgccttgtgcggagacgccagctgagcctgtggactgggccttcgcccagcgtgagctgctggagaagcagggcatcgacatgaagcaggagatggagcagaggctccaggaactggaggaccagtaccgccgcgagcgggaggaggccacctacctgctggagcagcagcggctggactatgagagcaagctggaggctctgcagaagcagatggactccaggtactacccggaggtgaacgaggaggaggaggagcccgaggatgaagtccagtggacagagcgggagtgtgagctggcgctctgggccttccggaagtggaagtggtaccagttcacgtctctgcgggacctgctgtggggcaacgccatcttcctcaaggaggccaatgccatcagcgtggagctgaaaaagaaggtacaattccagtttgtcctcctgacggacacactctactcccctctgccacccgacctgctgcccccagaggccgccaaagaccgagagacgcggcccttcccccgcaccattgtggccgtggaggtccaggaccagaagaacggggccacccactactggacgctggagaagctcaggcagcgtctggacctgatgcgggagatgtacgaccgcgctgcagaggtgccctccagtgtcatcgaggactgtgacaacgtggtgaccggcggagaccccttctatgaccgcttcccctggttccggctggtgggcagggccttcgtgtacctgagcaacctgctgtaccccgttcccctggtacaccgtgtggcaatcgtcagcgagaagggcgaggtgaagggcttcctccgcgtggccgtccaggccatctcagccgatgaagaggcccctgattatggctctggcgtccgccagtcgggaactgctaaaatctcctttgatgaccagcattttgaaaagttccagtccgagtcttgccccgtggtggggatgtcccgctcgggaacctcccaggaagagcttcgcatcgtggagggccagggccagggtgcagacgtggggccctcagccgatgaagtcaacaacaacacctgttcagcagtgcccccagaaggcctcctcctagacagctctgagaaagccgccctggatgggcccctggatgctgccctggaccacctccgcctgggcaacaccttcaccttccgtgtgacagtcctgcaggcgtccagcatctctgccgaatatgccgacatcttctgccagttcaacttcatccaccgccacgacgaggccttctccacagagcccctgaagaacacaggcagaggccccccacttggcttctaccacgtccagaacatcgcagtggaggtgaccaagtccttcattgagtacatcaagagccagcccattgttttcgaggtctttggccactaccagcagcacccgttcccgcccctctgcaaggacgtgctcagccccctgaggccctcgcgccgccacttccctcgggtcatgccactgtccaagccagtgcccgccaccaagctcagcacactgacgcggccctgtccgggaccctgccactgcaagtacgacctgctggtctacttcgagatctgtgagctggaggccaacggcgattacatcccggccgtggtggaccaccgtgggggcatgccatgcatggggaccttcctcctccaccagggcatccagcgacggattacggtgacactactgcatgagacaggcagccatatccgctggaaggaagtgcgcgagctggtcgtgggccgcatccgaaacactccagagaccgacgagtccctgatcgaccccaacatcttgtctctcaacatcctctcttccggatacatccacccagcccaagatgaccggaccttttaccaatttgaggctgcgtgggacagctccatgcacaactctctcctgctgaaccgggtcaccccttatcgagagaaaatctacatgacactctccgcttatatcgagatggagaactgcacccagccggctgttgtcaccaaggacttctgcatggtcttctattcccgtgatgccaagctgccagcctcgcgctccatccgcaacctctttggcagtgggagccttcgggcctcagagagtaaccgtgtgactggtgtgtacgagctcagcctgtgccacgtggctgacgcgggcagcccagggatgcagcgccggcgccgacgagtcctggacacatctgtggcctatgtccggggcgaggagaacctggcaggctggaggccccggagtgacagtctcattctggaccaccagtgggagctggagaagctgagcctcctgcaggaggtggagaagactaggcactacctgctcctgcgggagaagctggagaccgcccagcggcctgtcccggaggcactgtccccggccttcagcgaggactctgagtcccatggctcctccagcgcctcctccccgctctcggctgagggccgcccatcacccctggaggctcccaacgagaggcagcgggagctggccgtcaagtgcttgcgcctgctcacgcacacattcaacagagagtacacacacagccacgtctgcgtcagtgccagcgagagcaagctctccgagatgtctgtcaccctgctccgggacccgtcgatgtcccctctaggggtggccactctcaccccctcctccacttgcccctctctggttgaagggcggtacggtgccactgacctgaggaccccgcagccctgctcccggccagccagcccagagcccgagctgctgccagaggccgactccaagaagctcccttcccctgcccgggcaacagagacagacaaggagccccagcgcctgctggtccctgacatccaggagatccgagtcagcccgatcgtttccaagaaggggtacctgcacttcctggagccgcacacgtcaggctgggccaggcgcttcgtggtggtgcggcgcccctatgcctacatgtacaacagcgacaaggacaccgtggagcggttcgtgctcaacctggccactgcccaggtggagtacagtgaggaccagcaggctatgctcaagacacccaacacattcgcggtgtgcacggaacaccgcggcatcctgctgcaggccgccagcgacaaggacatgcatgactggctgtacgccttcaaccccctcctggccgggaccatacggtccaagctctccagaaggaggtctgcccagatgcgggtctgaacctgagccctcccgtgacagccggcaggcccagcccatcccctccctcatcctcgtctgtcctgtcacctgccgcccagcccctctcctgccagacagcccacgaccgggtcgaccccccaggggacgcccatgccaggcccggggacctgtgccacacgaccagctgtgctcccagcagaggctgtgcgtgtcagttcttcttgcagaatgtgctctggtggaacaagttgggagaggctgggggggccaagggcacaggttacgggggttcttgctgccgttctaatatttttttaagcatagacagacttataattaatatacgttagttagtgacattgaaacagtcaactcggaaattaactataagacttgttctatttataagtatttatttctaatgcctccacatagccctgtaatattcagatggaacccccaaccacctccaccctgtttgttcccacatgtgtctcccaagcctgctagggacaggcagggcagggacagccaccttggaaggccgcagtgaggagctgtctggaccagtggggcaccttggggctagcacacgggtgtatcgcctgggccccaggcttctccatggccacatgggtcctgggtgtatgtgtgggagagtgggggggtgtctttggtgcctgaagtctgcgcggcatggagggtggtgtgagttcctctggtgggagggagaacgcacatctcttctgggcggccacctgaggagtgactccaagaagagttccggcagctttccccaggaaagggtgaggggtgacactcggctctggctctgagatgaggcagacggcacccaggctgtgatctgtcctgggcggggaccaggagggagcggggtcgggatcacctgccagtgtgcagactctgggactgcgtgctgtctccggaccatcagggtagggtggtgggttgagaccaggaagtcagggaagatcggaattcagggcgacggtctaggtgtcgagggctgtggcgcagcctcttcagctgcggcgagaaatggagtgagtcaaggtagcttctgggaagaaatgctgccattagcaggtttcttgcaaagactttcctctctttgttcccagggcagagagtttctgtgagtcccactgagaaaatcccatggggtgggggtatcctggtcggtcggcaatggagggtggctggcttggtggttattgtcttcaaggagctcttcgctgctgcatctgcggtgtccctttgttcttgtcccatttcaccccctctgcagacaccaatgtccgagggccacccaggacaggacgggggtcagccccaagctgagagtctggtcataggagtcatgtccagaggcctagggaggttttagggccctccccacccacacccacaggtcgatttggtctctttttagctcaaggaaagacagtagccaagcaacagagcccctctcccgccgtggcccgtgggagcagttacatcgggtctggtgctccagacctagggcccagcactttcatcagatcctgcctcctggagtgggggaaacgcagcaccccactggttctgaggcccctaccctcccaggctgtcccacgtgatgctgacatgagcctcagagaccccaatcccatgcctgggggagagacagcggctcaggagtgggggagcacgggccttctacaccacatgggaaggctctggcatgaggttttcctttgggaaggttgtttgggcccctgaagttccatctccgagagtggtgtgcagggcaggccagggcccatgctggctgcagtctctgtggctgcctgcctgggccagcctgtttgggagctgggactgtgggctcgccttttcgtacctgggctcaggtgcggtgtggccaccgccaccctcatcccctgcctgggaggctctcccaggggctgatgggggggttctgtgagggagaatcagggctcgggaagccacgcctgggaaggcaggacacaggacacagcagctttctttggaaatctcccaggtgaggattcacatcccaaaataaaattcagaagccaggtggcctgtgctccccatgggtgacctctggaggcagtggaccaagatgcagcaaggagaggatgcagaacagcttcttgcagaagcacctgctccggcatccagcgctgcctggaggcaggaaggagaggcagggcaggacacgctggtctgagatgagggggagccccacgggccccaggcaggctagaggaggcacaggccctgccacggccaactcaggtcagccagcctgaggctgtggcctccaaagggtctgggcgcaccccccaggtcgcaggtgtctgaggccagccaacctgcagagcactcgcggcgtgggtgggctgagtggaggtgcctgggagctgcctaaattcagaagcctccactgccatggagactgcctggctgtgtcctctcagccaggtgccgtgttggccttggctaggacccagagccacactgcagcctccgccgactccctccttccgggcctgctctagtgaggagtgcctaagccaggacccagaaactcagagttgatggtgagaggaggccgcctgagtcaggacacctggcttcttgaaaagttcgctctgccagaaaccacctagggaccacgttagctgccttccttgagctccccaggagtcggtttccacatctgtgaggtggagggctggtgtggaggtgctcatggggtgcggtgcttgggagacagccaggcccagggtggctgctgcttcctgctaagtgggggaggtgagacagatctggaaagccgtctccctcagatggtttcatttaatgctttatactgccgagtctgggggcttgttttggtttgggggcagccatcctccaccagaaagggggagctccttccgctgcggctccagatagatggggatgccgggctccaggccgaccagcacttgggatctgatgggacacggccagtgcctaggggtgccaagtccaaggcctcccactgggagtcatcgctgagaagatgccaatgtttcatccaccggctgcacaggcacaaactcccccacccaggacggctgtgatgaggtggccctccctgtcaaccctggtccctggagtccccagcacctggggccctggtggggctgatgtcacaggtgtttactgtgctgctgcactggtcctatgccagcctcacccatgtggggaccacggaaggcacactcccttacccccggtgccgggccgtgcggtcccccagacggacagcagctgtggcgacctgcgtttctccctgggcctgtgcttcctgtagttagtccgtcccctggttcccctgtggctcagaggccgcgtccctggcttgtacatatgtgattgctgtgggcacaccccagaccccatgtcatagctgccgtcccgacgtcacgacgcctgtcccgatgtcttacacccgagtgttagccctaggctcctgtactgtgcgtgcacttgaggctctgtccaattaagaaataaatgtggctcttactcaacacaaaaaaaaaaaaaaaaaaaaaaaaaaaa

SEQ ID NO: 128 - DNA, 1253 bp, Homo sapiens
gggcggccgggagagtagcagtgccttggaccccagctctcctccccctttctctctaaggatggcccagaaggagaactcctacccctggccctacggccgacagacggctccatctggcctgagcaccctgccccagcgagtcctccggaaagagcctgtcaccccatctgcacttgtcctcatgagccgctccaatgtccagcccacagctgcccctggccagaaggtgatggagaatagcagtgggacacccgacatcttaacgcggcacttcacaattgatgactttgagattgggcgtcctctgggcaaaggcaagtttggaaacgtgtacttggctcgggagaagaaaagccatttcatcgtggcgctcaaggtcctcttcaagtcccagatagagaaggagggcgtggagcatcagctgcgcagagagatcgaaatccaggcccacctgcaccatcccaacatcctgcgtctctacaactatttttatgaccggaggaggatctacttgattctagagtatgccccccgcggggagctctacaaggagctgcagaagagctgcacatttgacgagcagcgaacagccacgatcatggaggagttggcagatgctctaatgtactgccatgggaagaaggtgattcacagagacataaagccagaaaatctgctcttagggctcaagggagagctgaagattgctgacttcggctggtctgtgcatgcgccctccctgaggaggaagacaatgtgtggcaccctggactacctgcccccagagatgattgaggggcgcatgcacaatgagaaggtggatctgtggtgcattggagtgctttgctatgagctgctggtggggaacccaccctttgagagtgcatcacacaacgagacctatcgccgcatcgtcaaggtggacctaaagttccccgcttccgtgcccatgggagcccaggacctcatctccaaactgctcaggcataacccctcggaacggctgcccctggcccaggtctcagcccacccttgggtccgggccaactctcggagggtgctgcctccctctgcccttcaatctgtcgcctgatggtccctgtcattcactcgggtgcgtgtgtttgtatgtctgtgtatgtataggggaaagaagggatccctaactgttcccttatctgttttctacctcctcctttgtttaataaaggctgaagctttttgtactcatgaaaaaaaaaaaaaaaaaa

SEQ ID NO: 129 - DNA, 4743 bp, Homo sapiens
gggaaggaggcaggggtgctgagaaggcggctgctgggcagagccggtggcaagggcctcccctgccgctgtgccaggcaggcagtgccaaatccggggagcctggagctggggggagggccggggacagcccggccctgccccctcccccgctgggagcccaacaacttctgaggaaagtttggcacccatggcgtggcggtgccccaggatgggcagggtcccgctggcctggtgcttggcgctgtgcggctgggcgtgcatggcccccaggggcacgcaggctgaagaaagtcccttcgtgggcaacccagggaatatcacaggtgcccggggactcacgggcacccttcggtgtcagctccaggttcagggagagccccccgaggtacattggcttcgggatggacagatcctggagctcgcggacagcacccagacccaggtgcccctgggtgaggatgaacaggatgactggatagtggtcagccagctcagaatcacctccctgcagctttccgacacgggacagtaccagtgtttggtgtttctgggacatcagaccttcgtgtcccagcctggctatgttgggctggagggcttgccttacttcctggaggagcccgaagacaggactgtggccgccaacacccccttcaacctgagctgccaagctcagggacccccagagcccgtggacctactctggctccaggatgctgtccccctggccacggctccaggtcacggcccccagcgcagcctgcatgttccagggctgaacaagacatcctctttctcctgcgaagcccataacgccaagggggtcaccacatcccgcacagccaccatcacagtgctcccccagcagccccgtaacctccacctggtctcccgccaacccacggagctggaggtggcttggactccaggcctgagcggcatctaccccctgacccactgcaccctgcaggctgtgctgtcagacgatgggatgggcatccaggcgggagaaccagaccccccagaggagcccctcacctcgcaagcatccgtgcccccccatcagcttcggctaggcagcctccatcctcacaccccttatcacatccgcgtggcatgcaccagcagccagggcccctcatcctggacccactggcttcctgtggagacgccggagggagtgcccctgggcccccctgagaacattagtgctacgcggaatgggagccaggccttcgtgcattggcaagagccccgggcgcccctgcagggtaccctgttagggtaccggctggcgtatcaaggccaggacaccccagaggtgctaatggacatagggctaaggcaagaggtgaccctggagctgcagggggacgggtctgtgtccaatctgacagtgtgtgtggcagcctacactgctgctggggatggaccctggagcctcccagtacccctggaggcctggcgcccagggcaagcacagccagtccaccagctggtgaaggaaccttcaactcctgccttctcgtggccctggtggtatgtactgctaggagcagtcgtggccgctgcctgtgtcctcatcttggctctcttccttgtccaccggcgaaagaaggagacccgttatggagaagtgtttgaaccaacagtggaaagaggtgaactggtagtcaggtaccgcgtgcgcaagtcctacagtcgtcggaccactgaagctaccttgaacagcctgggcatcagtgaagagctgaaggagaagctgcgggatgtgatggtggaccggcacaaggtggccctggggaagactctgggagagggagagtttggagctgtgatggaaggccagctcaaccaggacgactccatcctcaaggtggctgtgaagacgatgaagattgccatctgcacgaggtcagagctggaggatttcctgagtgaagcggtctgcatgaaggaatttgaccatcccaacgtcatgaggctcatcggtgtctgtttccagggttctgaacgagagagcttcccagcacctgtggtcatcttacctttcatgaaacatggagacctacacagcttcctcctctattcccggctcggggaccagccagtgtacctgcccactcagatgctagtgaagttcatggcagacatcgccagtggcatggagtatctgagtaccaagagattcatacaccgggacctggcggccaggaactgcatgctgaatgagaacatgtccgtgtgtgtggcggacttcgggctctccaagaagatctacaatggggactactaccgccagggacgtatcgccaagatgccagtcaagtggattgccattgagagtctagctgaccgtgtctacaccagcaagagcgatgtgtggtccttcggggtgacaatgtgggagattgccacaagaggccaaaccccatatccgggcgtggagaacagcgagatttatgactatctgcgccagggaaatcgcctgaagcagcctgcggactgtctggatggactgtatgccttgatgtcgcggtgctgggagctaaatccccaggaccggccaagttttacagagctgcgggaagatttggagaacacactgaaggccttgcctcctgcccaggagcctgacgaaatcctctatgtcaacatggatgagggtggaggttatcctgaaccccctggagctgcaggaggagctgaccccccaacccagccagaccctaaggattcctgtagctgcctcactgcggctgaggtccatcctgctggacgctatgtcctctgcccttccacaacccctagccccgctcagcctgctgataggggctccccagcagccccagggcaggaggatggtgcctgagacaaccctccacctggtactccctctcaggatccaagctaagcactgccactggggaaaactccaccttcccactttcccaccccacgccttatccccacttgcagccctgtcttcctacctatcccacctccatcccagacaggtccctccccttctctgtgcagtagcatcaccttgaaagcagtagcatcaccatctgtaaaaggaaggggttggattgcaatatctgaagccctcccaggtgttaacattccaagactctagagtccaaggtttaaagagtctagattcaaaggttctaggtttcaaagatgctgtgagtctttggttctaaggacctgaaattccaaagtctctaattctattaaagtgctaaggttctaaggcctactttttttttttttttttttttttttttttttgcgatagagtctcactgtgtcacccaggctggagtgcagtggtgcaatctcgcctcactgcaaccttcacctaccgagttcaagtgattttcctgccttggcctcccaagtagctgggattacaggtgtgtgccaccacacccggctaatttttatatttttagtagagacagggtttcaccatgttggccaggctggtctaaaactcctgacctcaagtgatctgcccacctcagcctcccaaagtgctgagattacaggcatgagccactgcactcaaccttaagacctactgttctaaagctctgacattatgtggttttagattttctggttctaacatttttgataaagcctcaaggttttaggttctaaagttctaagattctgattttaggagctaaggctctatgagtctagatgtttattcttctagagttcagagtccttaaaatgtaagattatagattctaaagattctatagttctagacatggaggttctaaggcctaggattctaaaatgtgatgttctaaggctctgagagtctagattctctggctgtaaggctctagatcataaggcttcaaaatgttatcttctcaagttctaagattctaatgatgatcaattatagtttctgaggctttatgataatagattctcttgtataagatcctagatcctaagggtcgaaagctctagaatctgcaattcaaaagttccaagagtctaaagatggagtttctaaggtccggtgttctaagatgtgatattctaagacttactctaagatcttagattctctgtgtctaagattctagatcagatgctccaagattctagatgattaaataagattctaacggtctgttctgtttcaaggcactctagattccattggtccaagattccggatcctaagcatctaagttataagactctcacactcagttgtgactaactagacaccaaagttctaataatttctaatgttggacacctttaggttctttgctgcattctgcctctctaggaccatggttaagagtccaagaatccacatttctaaaatcttatagttctaggcactgtagttctaagactcaaatgttctaagtttctaagattctaaaggtccacaggtctagactattaggtgcaatttcaaggttctaaccctatactgtagtattctttggggtgcccctctccttcttagctatcattgcttcctcctccccaactgtgggggtgtgcccccttcaagcctgtgcaatgcattagggatgcctcctttcccgcaggggatggacgatctcccacctttcgggccatgttgcccccgtgagccaatccctcaccttctgagtacagagtgtggactctggtgcctccagaggggctcaggtcacataaaactttgtatatcaacgaaaaaaa

SEQ ID NO: 130 - DNA, 4716 bp, Homo sapiens
gggaaggaggcaggggtgctgagaaggcggctgctgggcagagccggtggcaagggcctcccctgccgctgtgccaggcaggcagtgccaaatccggggagcctggagctggggggagggccggggacagcccggccctgccccctcccccgctgggagcccaacaacttctgaggaaagtttggcacccatggcgtggcggtgccccaggatgggcagggtcccgctggcctggtgcttggcgctgtgcggctgggcgtgcatggcccccaggggcacgcaggctgaagaaagtcccttcgtgggcaacccagggaatatcacaggtgcccggggactcacgggcacccttcggtgtcagctccaggttcagggagagccccccgaggtacattggcttcgggatggacagatcctggagctcgcggacagcacccagacccaggtgcccctgggtgaggatgaacaggatgactggatagtggtcagccagctcagaatcacctccctgcagctttccgacacgggacagtaccagtgtttggtgtttctgggacatcagaccttcgtgtcccagcctggctatgttgggctggagggcttgccttacttcctggaggagcccgaagacaggactgtggccgccaacacccccttcaacctgagctgccaagctcagggacccccagagcccgtggacctactctggctccaggatgctgtccccctggccacggctccaggtcacggcccccagcgcagcctgcatgttccagggctgaacaagacatcctctttctcctgcgaagcccataacgccaagggggtcaccacatcccgcacagccaccatcacagtgctcccccagcagccccgtaacctccacctggtctcccgccaacccacggagctggaggtggcttggactccaggcctgagcggcatctaccccctgacccactgcaccctgcaggctgtgctgtcagacgatgggatgggcatccaggcgggagaaccagaccccccagaggagcccctcacctcgcaagcatccgtgcccccccatcagcttcggctaggcagcctccatcctcacaccccttatcacatccgcgtggcatgcaccagcagccagggcccctcatcctggacccactggcttcctgtggagacgccggagggagtgcccctgggcccccctgagaacattagtgctacgcggaatgggagccaggccttcgtgcattggcaagagccccgggcgcccctgcagggtaccctgttagggtaccggctggcgtatcaaggccaggacaccccagaggtgctaatggacatagggctaaggcaagaggtgaccctggagctgcagggggacgggtctgtgtccaatctgacagtgtgtgtggcagcctacactgctgctggggatggaccctggagcctcccagtacccctggaggcctggcgcccagtgaaggaaccttcaactcctgccttctcgtggccctggtggtatgtactgctaggagcagtcgtggccgctgcctgtgtcctcatcttggctctcttccttgtccaccggcgaaagaaggagacccgttatggagaagtgtttgaaccaacagtggaaagaggtgaactggtagtcaggtaccgcgtgcgcaagtcctacagtcgtcggaccactgaagctaccttgaacagcctgggcatcagtgaagagctgaaggagaagctgcgggatgtgatggtggaccggcacaaggtggccctggggaagactctgggagagggagagtttggagctgtgatggaaggccagctcaaccaggacgactccatcctcaaggtggctgtgaagacgatgaagattgccatctgcacgaggtcagagctggaggatttcctgagtgaagcggtctgcatgaaggaatttgaccatcccaacgtcatgaggctcatcggtgtctgtttccagggttctgaacgagagagcttcccagcacctgtggtcatcttacctttcatgaaacatggagacctacacagcttcctcctctattcccggctcggggaccagccagtgtacctgcccactcagatgctagtgaagttcatggcagacatcgccagtggcatggagtatctgagtaccaagagattcatacaccgggacctggcggccaggaactgcatgctgaatgagaacatgtccgtgtgtgtggcggacttcgggctctccaagaagatctacaatggggactactaccgccagggacgtatcgccaagatgccagtcaagtggattgccattgagagtctagctgaccgtgtctacaccagcaagagcgatgtgtggtccttcggggtgacaatgtgggagattgccacaagaggccaaaccccatatccgggcgtggagaacagcgagatttatgactatctgcgccagggaaatcgcctgaagcagcctgcggactgtctggatggactgtatgccttgatgtcgcggtgctgggagctaaatccccaggaccggccaagttttacagagctgcgggaagatttggagaacacactgaaggccttgcctcctgcccaggagcctgacgaaatcctctatgtcaacatggatgagggtggaggttatcctgaaccccctggagctgcaggaggagctgaccccccaacccagccagaccctaaggattcctgtagctgcctcactgcggctgaggtccatcctgctggacgctatgtcctctgcccttccacaacccctagccccgctcagcctgctgataggggctccccagcagccccagggcaggaggatggtgcctgagacaaccctccacctggtactccctctcaggatccaagctaagcactgccactggggaaaactccaccttcccactttcccaccccacgccttatccccacttgcagccctgtcttcctacctatcccacctccatcccagacaggtccctccccttctctgtgcagtagcatcaccttgaaagcagtagcatcaccatctgtaaaaggaaggggttggattgcaatatctgaagccctcccaggtgttaacattccaagactctagagtccaaggtttaaagagtctagattcaaaggttctaggtttcaaagatgctgtgagtctttggttctaaggacctgaaattccaaagtctctaattctattaaagtgctaaggttctaaggcctactttttttttttttttttttttttttttttttgcgatagagtctcactgtgtcacccaggctggagtgcagtggtgcaatctcgcctcactgcaaccttcacctaccgagttcaagtgattttcctgccttggcctcccaagtagctgggattacaggtgtgtgccaccacacccggctaatttttatatttttagtagagacagggtttcaccatgttggccaggctggtctaaaactcctgacctcaagtgatctgcccacctcagcctcccaaagtgctgagattacaggcatgagccactgcactcaaccttaagacctactgttctaaagctctgacattatgtggttttagattttctggttctaacatttttgataaagcctcaaggttttaggttctaaagttctaagattctgattttaggagctaaggctctatgagtctagatgtttattcttctagagttcagagtccttaaaatgtaagattatagattctaaagattctatagttctagacatggaggttctaaggcctaggattctaaaatgtgatgttctaaggctctgagagtctagattctctggctgtaaggctctagatcataaggcttcaaaatgttatcttctcaagttctaagattctaatgatgatcaattatagtttctgaggctttatgataatagattctcttgtataagatcctagatcctaagggtcgaaagctctagaatctgcaattcaaaagttccaagagtctaaagatggagtttctaaggtccggtgttctaagatgtgatattctaagacttactctaagatcttagattctctgtgtctaagattctagatcagatgctccaagattctagatgattaaataagattctaacggtctgttctgtttcaaggcactctagattccattggtccaagattccggatcctaagcatctaagttataagactctcacactcagttgtgactaactagacaccaaagttctaataatttctaatgttggacacctttaggttctttgctgcattctgcctctctaggaccatggttaagagtccaagaatccacatttctaaaatcttatagttctaggcactgtagttctaagactcaaatgttctaagtttctaagattctaaaggtccacaggtctagactattaggtgcaatttcaaggttctaaccctatactgtagtattctttggggtgcccctctccttcttagctatcattgcttcctcctccccaactgtgggggtgtgcccccttcaagcctgtgcaatgcattagggatgcctcctttcccgcaggggatggacgatctcccacctttcgggccatgttgcccccgtgagccaatccctcaccttctgagtacagagtgtggactctggtgcctccagaggggctcaggtcacataaaactttgtatatcaacgaaaaaaa

SEQ ID NO: 131 - DNA, 2785 bp, Homo sapiens
ctggaaaaccctaggacttgaacccagggaaagcgttagggggtaaggggactacacttcccgtgaagctccgcggcggcttcccgtgaggccccgcggaggcttcctgagaggtcctgcgcgctttccgcgccagcttcagtgtcagctcgcgagccctggcgtcgcgtaggagggaggatggagagcggcgacgaagcggccatcgagaggcaccgcgtccacttgcgctccgccacattgcgcgacgccgtacccgccacactgcatctgctgccctgcgaggttgcggtggacgggcccgccccggtggggcgcttcttcacgcccgccatccgccagggccccgagggactcgaagtgtcgtttcggggccgctgtctacggggagaggaggtggcggtgccgcctggcctcgtgggatacgtgatggtgacagaagagaagaaggtgtcgatggggaagccagaccccttgcgggattccgggactgacgaccaagaggaggagccgctggagcgggacttcgaccgcttcattggagccactgccaacttcagccgcttcaccctgtggggtctggagaccatccctggcccggatgccaaagtgcgtggggccttaacttggcccagccttgcggcagcgattcacgcacaggtgcccgaggactgagaaccagagcttgaaattcaaagctgcgatcccttcacagcagtaaaccagctctttggaaccgattccatcaccccaataaaggagctcttcacagcacctgtgagtctgggcgccttagagcccctaagccagcatgggccctttccccctccccaccaagaactttgcatggctctggcatatagaaacaatttattgccgggggcaataggggtaagagaagccagaaatttttgcagccagcacccaccccacccccaacttctactttacaaaagaaatttttacaatcaccagccctctgtacagagctcccccatccggatcccttctcactgtacacagctgcctggctccctctggtccctgcttcagaggaggcctgggcctgtggccagctgaccttggagttggtctgagcccggagctcgccttggtgctgggcaccagtgggcccctgccaggcctgtcctctcctttttgagctgtcctcagccccatctcccttagagtgctttgtgggagctgcagtgggggcggggtgggctatcagccccagtcctgctgccgtcttggcactgcagtgggcagtgtctggtcaccacttccccctcttgctccagtccttgggagtgaagtgcagacacttggagtcgatccgcaggagccgcttgagcatggcccgctcatggccatccacgatgtcctctgacagtgtgaggatgtactggccctgggcagaggagatgggttcagcaggtggtcagcccacagaggactgcactctgcatcccacacacctgtctcccctgcctgcctccctaccttgtagtagttgatgagattgaggtactgcagagtggagatgacatcctccttcttgatgctggtgatttcactaatctcactgtgggagagcacaggtcaggttccctgaggacctttatctgtccccaggagccctgagagagaaagcccaggaacagacaagccatgccatgtacccccaggtagacagcgccaggctcacttgatggtgatctgtggcctctccccgctctccgacttcagccccatcaggatctccaggatggtctgggaccagtagcttcgataggataggaggccaaggtctgagaggggcttctcaggggtccctgttttcccttccactttggagagttcatagcctaaagcaatggagcaggagagggtgagtaagaggtcacagatgaacataagcaacatttaaaaacacaggttgccaaggcaggctgcctagttcctatcatggccctgccacttggcagttctatgccctccacttctctgtgcctcagttccctcaggaagaactgagtattcactctttccgtgcgctgagcacagtggagggcatgagggcactgagaggagcagctgcagtcaaccatgagggtgatcagaggccagtgaaggcttatgggcaggggatgcagagaaaatggctcatgggaagaaggggcctccaattttcctttgccatcccgggctctgtgtctagccatgtaaggaagtggagacagattcctgtctctaatccagacctgagaatgcttgaattctcaaagtcctcctagctgggaccttgggagtgtcacctgctgtaagacttgagtggcctgactgggtggttgtgaggatgcaaggagaaaaggtgcaccaaggtgcttcctaagtcggggagaccattcctgggagccacgtgactgacccccaccatggctctttccctccaactcgtgctgatagctggccgctgggaggccgtccccagtgagatcctcagaccctgcacagccctgagtggcttcacatctcttggtcagtgtcttcattctccccagtcagggacctgggatgtttgttacttctagaagcccttcctcaccctcataatggaccttagccccttgctggtcccactcacatcccgtctccattgctgtctgagttccaagactgagtttcttcaagcatccacttgtgctaccaggctgagaagttctgaggatgtgaccccatctgggcatcatttaaccaataaaatttctcgaatggaccataa

SEQ ID NO: 132 - DNA, 3899 bp, Homo sapiens
agtggcgtccgttgtaagtgctatgacaacagggcgaagatggctcagagttaggctggagaggggaggtgtcccttccgctgcggccgtcgggtttctgctacatcccattcaccgcctcctccatcctttcctcctcggtgtgagcagcaggacttgcatttgttctcgcctgcctagtgtcttccaagggatagatgccgtttcctctgctggtctctgggggtgacggggggcgcaggggagcttcttgggggaatcactccaactctgtggagctggtggtgctgcctggtggggctctctctttgcccgggacgtggaacaactttcagctggaggacgagagggaatagtgaagctaaaggttgcttttctctgcaccgtccgttcttgctccctctgctccatcactgggaccttgtcaggcgttcataaagcaaaatttgccgaacgagggttcgcagaaaggtggggcagagctcatctgacgtggcatcagtgtgaaagaaaatgtctttatttaaagcccgtgattggtggtctactattctgggagataaagaagaatttgatcaaggctgtttgtgtctggctaatgttgacaatagtggaaatggacaagataaaataattgtgggtagctttatgggatacctaaggatctttagcccccatcctgcaaaaacaggagatggagctcaagccgaagatttgcttctagaagtggatctacgagatccagtacttcaagtggaagtaggaaagtttgtttcaggtaccgaaatgctacatttggctgtgttacattctagaaaactttgtgtctactctgtctcaggaaccttgggtaatgtggaacatgggaaccaatgtcagatgaaattgatgtatgaacataatcttcagagaacagcctgcaatatgacctatggatcatttggtggtgtaaaaggtcgagatttaatttgcatccagtctatggatgggatgctgatggtatttgagcaggagagctatgcttttggaagatttctccctggctttcttctgcctggtcctcttgcctacagttcccgtacagattccttccttactgtctcttcctgccaacaagtggaaagttataagtaccaggtacttgcttttgcaacagatgcagataaaaggcaggagactgaacagcaaaaacttggttctggaaaaagactagttgtggattggactctaaatattggagagcaagcccttgacatatgtattgtctctttcaatcagtcggcatcctctgtttttgttcttggtgagagaaactttttttgccttaaggataatggacaaattcgattcatgaagaagcttgattggagcccaagttgttttctgccatattgctcagtttctgaaggaacaataaatactttgattggaaatcataataacatgctgcatatttatcaagatgtgacactgaagtgggccacccaacttccccacattcctgtagcagtaagagtgggctgtttgcatgatttaaagggagtgatagtcactctgagtgatgatggtcacttgcagtgttcatacctggggacagatccttctctgttccaagctccaaacgttcaatctcgagaactaaactatgatgaacttgatgtagaaatgaaagaacttcagaaaatcatcaaagatgttaacaaatcacaaggtgtttggcccatgactgagagagaagatgacttgaacgtttctgtcgtggtttctcctaactttgattcagtttctcaagcgaccgatgttgaggtgggaactgaccttgtcccttctgtcacggtgaaggtcacactgcagaacagagtgatattgcaaaaagccaaattatcagtctacgtgcaaccaccattagaattgacttgtgatcagttcacctttgaatttatgagcattccgcgagttatccaatgtaaatttagacttcccctaaagttaatttgcctaccaggtcagccttcaaaaactgcaagccacaaaattactattgataccaacaaatctccagtcagtcttcttagtctcttcccaggttttgccagtcagtcagatgatgatcaggtgaatgtaatgggttttcacttcttaggaggtgctcgaattactgttcttgcttccaaaacttctcaacgatatcgcattcagagtgaacaatttgaagatctttggctcataaccaatgagcttattcttcgccttcaagaatattttgaaaaacagggagtcaaagattttgcatgttctttttcgggatctataccccttcaagaatattttgagttgattgatcatcattttgagctacggataaatggtgaaaaattagaagaactcttatctgagagagctgtacaatttcgggccattcaacgccggctactagcaagattcaaagataaaactcctgcccctcttcaacacctggacaccttgttagatggaacctacaagcaggtaattgctctagcagatgcagtggaggaaaaccaaggcaatctgttccagtcattcaccaggctgaagagtgccacccatttggtgattctgctgatcgcgctgtggcagaagcttagtgctgaccaggttgctattctggaagcggcatttctgccgctacaagaagacactcaagaattgggctgggaagaaacggtggatgccgccatttcccacctgttgaagacttgcctgtcgaagagttctaaggagcaggctttgaacctcaacagccagctgaacatacccaaagacacaagccaactgaagaaacatatcaccttgctctgcgatagattatccaaaggtggccgtctctgcctaagtaccgatgcagcagccccacagaccatggtcatgccaggtggttgtactacaatcccagagtcagacctagaagaaagatcagtagaacaagactctacagaactgtttaccaaccacagacatctcactgcagagacacccaggcctgaagtttcacccctccaaggagtctcggaataattcaagtagagttgtttggttgagaggaacatccccatctcaaggccgaacctgtgtgaacctcatgccaagcacagatatagggctggcgcaggtgcttcctaaagctcaccttcctggagatgacatgcatagaaagaggggttgggactttttacttcactaggagaacttgtaacaccatggggaagtcagctgaaacttgtcttgttttgccaggaaaggaagtagttgcctttggtcatccatctgctaatagtcacagaatacagtgaaatgacatagttttgggttagattttataatgcaaagattcagatccaaaataatttcataccccattttttcacagaattcttatatagtaaatgtatcaagtttaataaagcatctcattgtcaaataatatcttggattttatttataattagagggatttatgagtgattgctctacattatttcttcaaaggaaaggaaaggaattgaagactttgctactctctggtaagacttgaatgtgattattttataaataaaagaaccactatgaaactttcatgtgatttgttctattaagctaaacgtggaagaagggaagttttctagtattgtatgaaaatgtttaaatattttcaaggaagctagtacattaacatccccttttcattaccccattgggtggcaccttttaaaaatccaggttattaaaggattcacactttattacagttaaaatttaaggtttttatgtgtaagaagtgaaagaaactttgctaatttcaagttcgaattacagttgtgagattgatttatttaaataaaaatatgcctttgccagtt

SEQ ID NO: 133 - DNA, 4019 bp, Homo sapiens
agtggcgtccgttgtaagtgctatgacaacagggcgaagatggctcagagttaggctggagaggggaggtgtcccttccgctgcggccgtcgggtttctgctacatcccattcaccgcctcctccatcctttcctcctcggtgtgagcagcaggacttgcatttgttctcgcctgcctagtgtcttccaagggatagatgccgtttcctctgctggtctctgggggtgacggggggcgcaggggagcttcttgggggaatcactccaactctgtggagctggtggtgctgcctggtggggctctctctttgcccgggacgtggaacaactttcagctggaggacgagagggaatagtgaagctaaaggttgcttttctctgcaccgtccgttcttgctccctctgctccatcactgggaccttgtcaggcgttcataaagcaaaatttgccgaacgagggttcgcagaaaggtggggcagagctcatctgacgtggcatcagtgtgaaagaaaatgtctttatttaaagcccgtgattggtggtctactattctgggagataaagaagaatttgatcaaggctgtttgtgtctggctaatgttgacaatagtggaaatggacaagataaaataattgtgggtagctttatgggatacctaaggatctttagcccccatcctgcaaaaacaggagatggagctcaagccgaagatttgcttctagaagtggatctacgagatccagtacttcaagtggaagtaggaaagtttgtttcaggtaccgaaatgctacatttggctgtgttacattctagaaaactttgtgtctactctgtctcaggaaccttgggtaatgtggaacatgggaaccaatgtcagatgaaattgatgtatgaacataatcttcagagaacagcctgcaatatgacctatggatcatttggtggtgtaaaaggtcgagatttaatttgcatccagtctatggatgggatgctgatggtatttgagcaggagagctatgcttttggaagatttctccctggctttcttctgcctggtcctcttgcctacagttcccgtacagattccttccttactgtctcttcctgccaacaagtggaaagttataagtaccaggtacttgcttttgcaacagatgcagataaaaggcaggagactgaacagcaaaaacttggttctggaaaaagactagttgtggattggactctaaatattggagagcaagcccttgacatatgtattgtctctttcaatcagtcggcatcctctgtttttgttcttggtgagagaaactttttttgccttaaggataatggacaaattcgattcatgaagaagcttgattggagcccaagttgttttctgccatattgctcagtttctgaaggaacaataaatactttgattggaaatcataataacatgctgcatatttatcaagatgtgacactgaagtgggccacccaacttccccacattcctgtagcagtaagagtgggctgtttgcatgatttaaagggagtgatagtcactctgagtgatgatggtcacttgcagtgttcatacctggggacagatccttctctgttccaagctccaaacgttcaatctcgagaactaaactatgatgaacttgatgtagaaatgaaagaacttcagaaaatcatcaaagatgttaacaaatcacaaggtgtttggcccatgactgagagagaagatgacttgaacgtttctgtcgtggtttctcctaactttgattcagtttctcaagcgaccgatgttgaggtgggaactgaccttgtcccttctgtcacggtgaaggtcacactgcagaacagagtgatattgcaaaaagccaaattatcagtctacgtgcaaccaccattagaattgacttgtgatcagttcacctttgaatttatgacaccagatttgactagaacagtaagcttttctgtttatctgaaaagaagttatacaccatcagaattggaaggaaatgctgttgtttcttattccagaccaacagatcgaaatcctgatggcattccgcgagttatccaatgtaaatttagacttcccctaaagttaatttgcctaccaggtcagccttcaaaaactgcaagccacaaaattactattgataccaacaaatctccagtcagtcttcttagtctcttcccaggttttgccagtcagtcagatgatgatcaggtgaatgtaatgggttttcacttcttaggaggtgctcgaattactgttcttgcttccaaaacttctcaacgatatcgcattcagagtgaacaatttgaagatctttggctcataaccaatgagcttattcttcgccttcaagaatattttgaaaaacagggagtcaaagattttgcatgttctttttcgggatctataccccttcaagaatattttgagttgattgatcatcattttgagctacggataaatggtgaaaaattagaagaactcttatctgagagagctgtacaatttcgggccattcaacgccggctactagcaagattcaaagataaaactcctgcccctcttcaacacctggacaccttgttagatggaacctacaagcaggtaattgctctagcagatgcagtggaggaaaaccaaggcaatctgttccagtcattcaccaggctgaagagtgccacccatttggtgattctgctgatcgcgctgtggcagaagcttagtgctgaccaggttgctattctggaagcggcatttctgccgctacaagaagacactcaagaattgggctgggaagaaacggtggatgccgccatttcccacctgttgaagacttgcctgtcgaagagttctaaggagcaggctttgaacctcaacagccagctgaacatacccaaagacacaagccaactgaagaaacatatcaccttgctctgcgatagattatccaaaggtggccgtctctgcctaagtaccgatgcagcagccccacagaccatggtcatgccaggtggttgtactacaatcccagagtcagacctagaagaaagatcagtagaacaagactctacagaactgtttaccaaccacagacatctcactgcagagacacccaggcctgaagtttcacccctccaaggagtctcggaataattcaagtagagttgtttggttgagaggaacatccccatctcaaggccgaacctgtgtgaacctcatgccaagcacagatatagggctggcgcaggtgcttcctaaagctcaccttcctggagatgacatgcatagaaagaggggttgggactttttacttcactaggagaacttgtaacaccatggggaagtcagctgaaacttgtcttgttttgccaggaaaggaagtagttgcctttggtcatccatctgctaatagtcacagaatacagtgaaatgacatagttttgggttagattttataatgcaaagattcagatccaaaataatttcataccccattttttcacagaattcttatatagtaaatgtatcaagtttaataaagcatctcattgtcaaataatatcttggattttatttataattagagggatttatgagtgattgctctacattatttcttcaaaggaaaggaaaggaattgaagactttgctactctctggtaagacttgaatgtgattattttataaataaaagaaccactatgaaactttcatgtgatttgttctattaagctaaacgtggaagaagggaagttttctagtattgtatgaaaatgtttaaatattttcaaggaagctagtacattaacatccccttttcattaccccattgggtggcaccttttaaaaatccaggttattaaaggattcacactttattacagttaaaatttaaggtttttatgtgtaagaagtgaaagaaactttgctaatttcaagttcgaattacagttgtgagattgatttatttaaataaaaatatgcctttgccagtt

SEQ ID NO: 134 - DNA, 1554 bp, Homo sapiens
attcccacctcctccagaagccccgcccactcccgagccccgagagctccgcgcacctgggcgccatccgccctggctccgctgcacgagctccacgcccgtaccccggcgtcacgctcagcccgcggtgctcgcacacctgagactcatctcgcttcgaccccgccgccgccgccgcccggcatcctgagcacggagacagtctccagctgccgttcatgcttcctccccagccttccgcagcccaccagggaaggggcggtaggagtggccttttaccaaagggaccggcgatgctctgcaggctgtgctggctggtctcgtacagcttggctgtgctgttgctcggctgcctgctcttcctgaggaaggcggccaagcccgcaggagaccccacggcccaccagcctttctgggctcccccaacaccccgtcacagccggtgtccacccaaccacacagtgtctagcgcctctctgtccctgcctagccgtcaccgtctcttcttgacctatcgtcactgccgaaatttctctatcttgctggagccttcaggctgttccaaggataccttcttgctcctggccatcaagtcacagcctggtcacgtggagcgacgtgcggctatccgcagcacgtggggcagggtggggggatgggctaggggccggcagctgaagctggtgttcctcctaggggtggcaggatccgctcccccagcccagctgctggcctatgagagtagggagtttgatgacatcctccagtgggacttcactgaggacttcttcaacctgacgctcaaggagctgcacctgcagcgctgggtggtggctgcctgcccccaggcccatttcatgctaaagggagatgacgatgtctttgtccacgtccccaacgtgttagagttcctggatggctgggacccagcccaggacctcctggtgggagatgtcatccgccaagccctgcccaacaggaacactaaggtcaaatacttcatcccaccctcaatgtacagggccacccactacccaccctatgctggtgggggaggatatgtcatgtccagagccacagtgcggcgcctccaggctatcatggaagatgctgaactcttccccattgatgatgtctttgtgggtatgtgcctgaggaggctggggctgagccctatgcaccatgctggcttcaagacatttggaatccggcggcccctggaccccttagacccctgcctgtatagggggctcctgctggttcaccgcctcagccccctcgagatgtggaccatgtgggcactggtgacagatgaggggctcaagtgtgcagctggccccataccccagcgctgaagggtgggttgggcaacagcctgagagtggactcagtgttgattctctatcgtgatgcgaaattgatgcctgctgctctacagaaaatgccaacttggttttttaactcctctcaccctgttagctctgattaaaaacactgcaacccaaaaaaaaaaaaaaaaaaaaaaaaaaaaaaaaaaaaaaaaaaaaaaaaaaa

SEQ ID NO: 135 - DNA, 4080 bp, Homo sapiens
gcgcctgcggcgccgcgggcgggtcgcctcccctcctgtagcccacacccttcttaaagcggcggcgggaagatgaggcttcgggagccgctcctgagcggcagcgccgcgatgccaggcgcgtccctacagcgggcctgccgcctgctcgtggccgtctgcgctctgcaccttggcgtcaccctcgtttactacctggctggccgcgacctgagccgcctgccccaactggtcggagtctccacaccgctgcagggcggctcgaacagtgccgccgccatcgggcagtcctccggggagctccggaccggaggggcccggccgccgcctcctctaggcgcctcctcccagccgcgcccgggtggcgactccagcccagtcgtggattctggccctggccccgctagcaacttgacctcggtcccagtgccccacaccaccgcactgtcgctgcccgcctgccctgaggagtccccgctgcttgtgggccccatgctgattgagtttaacatgcctgtggacctggagctcgtggcaaagcagaacccaaatgtgaagatgggcggccgctatgcccccagggactgcgtctctcctcacaaggtggccatcatcattccattccgcaaccggcaggagcacctcaagtactggctatattatttgcacccagtcctgcagcgccagcagctggactatggcatctatgttatcaaccaggcgggagacactatattcaatcgtgctaagctcctcaatgttggctttcaagaagccttgaaggactatgactacacctgctttgtgtttagtgacgtggacctcattccaatgaatgaccataatgcgtacaggtgtttttcacagccacggcacatttccgttgcaatggataagtttggattcagcctaccttatgttcagtattttggaggtgtctctgctctaagtaaacaacagtttctaaccatcaatggatttcctaataattattggggctggggaggagaagatgatgacatttttaacagattagtttttagaggcatgtctatatctcgcccaaatgctgtggtcgggaggtgtcgcatgatccgccactcaagagacaagaaaaatgaacccaatcctcagaggtttgaccgaattgcacacacaaaggagacaatgctctctgatggtttgaactcactcacctaccaggtgctggatgtacagagatacccattgtatacccaaatcacagtggacatcgggacaccgagctagcgttttggtacacggataagagacctgaaattagccagggacctctgctgtgtgtctctgccaatctgctgggctggtccctctcatttttaccagtctgagtgacagctccccttggctcatcattcagatggctttccagatgaccaggacaggtgggatattttgcccccaacttggctcggcatgtgaattcttagctctgcaaggtgtttatgcctttgcgggtttcttgatgtgttcgcagtgtcacccaagagtcagaactgtagacatcccaaaatttggtggccgtggaacacattcccggtgatagaattgctaaattgtcgtgaaataggttagaatttttctttaaattatggttttcttattcgcgaaaattcggagagtgctgctaaaattggattggtgtcatctttttggtagttgtaatttaacagaaaaacacaaaatttcaaccattcttaatgttacgtcctccccccacccccttctttcagtggtatgcaaccactgcaatcaatgtgtcatatgtcttttcttagcaaaaggatttaaaacttgagccctggaccttttgcctatgtgtgtggattccagggcaactctagcatcagagcaaaagccttgggtttctcgcattcagtggcctatctccagattgtctgatttctgaatgtaaagttgttgtgtttttttttaaatagtaggtttgtagtattttaaagaaagaacagatcgagttctaattatgatctagcttgattttgtgttgatccaaatttgcatagctgtttaatgttaagtcatgacaatttatttttcttggcatgctatgtaaacttgaatttcctaagtatttttattctggtgttttaaatatggggaggggtattgagcattttttagggagaaaaataaatatatgctgtagtggccacaaataggcctatgatttagctggcaggccaggttttctcaagagcaaaatcaccctctggccccttggcaggtaaggcctcccggtcagcattatcctgccagacctcggggaggatacctgggagacagaagcctctgcacctactgtgcagaactctccacttccccaaccctccccaggtgggcagggcggagggagcctcagcctccttagactgacccctcaggcccctaggctggggggttgtaaataacagcagtcaggttgtttaccagccctttgcacctccccaggcagagggagcctctgttctggtgggggccacctccctcagaggctctgctagccacactccgtggcccaccctttgttaccagttcttcctccttcctcttttcccctgcctttctcattccttccttcgtctccctttttgttcctttgcctcttgcctgtcccctaaaacttgactgtggcactcagggtcaaacagactatccattccccagcatgaatgtgccttttaattagtgatctagaaagaagttcagccgcacccacaccccaactccctcccaagaacttcggtcctaaagcctcctgttccacctcaggttttcacaggtgctcacaccacagttgaggctcacacacaggtctgtctgtcacaaacccacctctgttgggagctattgagccacctgggatgagatgacacaagacactcctaccactgagcgcctttgtccaggtgccagcctgggctcaggttccaagactcagctgcctaatcccagggttgagccttgtgctcgtgtcggaccccaaaccactgccctcctggtaccagccctcagtgtggaggctgagctggtgcctggccccagtcttatctgtgcctttactgctttgcgcatctcagatgctaacttggttctttttccagaaggctttgtattggttaaaaattattttctattgcagagagcagctgtgactcatgcaaaaagtattttctctgtcagatccccactctataccaaggatattattaaaactagaaatgactgcattgagagggagttgtgggaaataagaagaatgaaagcctctctttctgtccgcagatcctgacttttccaaagtgccttaaaagaaatcagacaaatgccctgagtggtaacttctgtgttattttactcttaaaaccaaactctaccttttcttgtttttttttttttttttttttttttttttggttaccttctcattcatgtcaagtatgtggttcattcttagaaccaagggaaatactgctccccccatttgctgacgtagtgctctcatgggctcacctgggcccaaggcacagccagggcacagttaggcctggatgtttgcctggtccgtgagatgccgcgggtcctgtttccttactggggatttcagggctgggggttcagggagcatttccttttcctgggagttatgtaccgcgaagtgtgtcatgtgccgtgcccttttctgtttctgtgtatcctattgctggtgactctgtgtgaactggcctttgggaaagatcagagaggcagaggtggcacaggacagtaaaggagatgctgtgctgcctacagcctggacagggtctctgctgtactgccaggggcgggggctctgcatagccaggatgacgcctttcatgtcccagagacctgttgtgctgtgtattttgatttcctgtgtatgcaaatgtgtgtatttaccattgtgtagggggctgtgtctgatcttggtgttcaaaacagaactgtatttttgcctttaaaattaaataatataacgtgaataaatgaccctaactttgt

SEQ ID NO: 136 - DNA, 4523 bp, Homo sapiens
atgagaccccggggagcagcgtttgcagcgggcccgccaggtgacctgcacctgggcaccgccatcggcttcgcaggggccatctggaggagtcggtcacccgccatgtcgaccttgctggacattaagagcagcgtgctcaggcaggtgcaggtgtgcccgtccttccgccgcaggactgagcaggacccagggagtgccagcgccgacccgcaggagcctgccacgggggcctggaaacccggggatggcgtggagttctttgcccacatgcgcctcatgctgaagaagggggaaggcagacagggcttgccgtgcctcgaggtccccctgcgcagtggctcgccagcacccccggagcctgtggatcccagcctcggcctgagagccctggccccagaggaggtggagatgctctacgaggaggccctgtacacggtgctttaccgcgcgggtaccatgggccctgaccaggtggacgacgaggaggccctgctcagctatctccagcaggtgtttggcaccagccttgaggagcacactgaggccatcgagcgagtgaggaaggccaaggcccccacgtatgccctgaaagtctctgtcatgcgtgccaagaaccttctggccaaggaccccaacggcttcagcgacccatactgcatgctgggcatcctgcctgcctcggacgccacgcgggagccccgtgcacagaaggagcagcgcttcggcttccgcaagggcagcaagcgcggtggacccctgcctgccaagtgcatccaggtcaccgaggtgaagagcagcaccctgaaccccgtctggaaggagcacttcctcttcgagattgaggatgtgagcacggaccagctgcacctggacatctgggatcatgacgacgatgtatccctggtagaagcgtgcaggaagctgaatgaagtcatcggcctgaagggcatgggcaggtacttcaaacagatcgtcaagtcagcccgcgcaaacgggacagcaggacccaccgaggaccacaccgatgacttcctggggtgcctcaacatacctgtccgggaggtgcctgtggctggcgtcgaccgctggttcaagctggagccacgctccagtgcctcgcgtgtgcagggacactgccacctggttctcaagctgatcactacgcagagggatacggccatgagccagcgcgggcgatccggcttcctgtcccacctgctgctgctcagccatctgctgcggttggagcactcagcagaggagcccaactccagcagctggcgaggagagctcagcacaccagccgccaccatcctctgcctgcacggagcccagagcaacctgtcacccttgcagctggccgtgctgcactggcaggtcagcagccgccaccatcaaacctgcacgctggactacagctacctgctggggctgctggaggacatgcaggcacactgggaagaggctccttcactgccccaggagcaggaggagagcctggctgatagcctttccgccttctctgagttcgggctgcagctgctgcgccagctccgagactacttccctgccaccaacagcaccgctgtccaccgcctggagctgctgctgaagtgtctgggcaagctgcagctcttccaaccctcctttgagatctgccccttcgagtcggagctgaacatggacattgctgcggccctgaagagaggcaaccgtgagtggtacgacaggatcctgaatgacaagagtccccgagagcagccaggaccacagcgcctgcctgggctggttgtgctggctgacgccgtctatgatgaccttcagttctgctacagtgtgtacgccagcctcttccacagcatcctcaatgtggacgtcttcaccctgaccttccggcagctggagcgtctggtggctgaggaggcgtgggtgctgacggaggagctgagccccaagatgaccctggaggtggcctcggggctctttgagctctacctgaccctggctgacctccagcgcttctgggatagcatccctggccgggacagccgctctctggccctggctggcatccacgcccccttcctgcctgctgtgaagctctggttccaagtgctgagggaccaggccaagtggaggcttcagggagccgtggacatggacacgctggagcccgtggacgcctcctccaggcacagcagctccgcagccactgctggtctctgcctcagccacatccaggagttgtgggtgcgcctggcgtggcctgaccctgcccaggctcaggggctgggcacccagcttggccaggacgtgtgtgaggccaccctcttctatacggagctgcttcggaagaaggtggacactcagccaggggcggccggtgaagcagtgagcgaggcgctctgcgtggtcctcaacaatgtggagctcgtgcgcaaggctgctgggcaggccttgaagggcctggcatggccagagggggccacggggcccgagggggtgctcccccgccctctgctcagctgcacacaggccctggacgatgatctgcaacgggaggcccacacggtgacagcgcacctgacctctaagatggtgggcgacatccgcaagtatgtacagcacatcagtctctcgcctgactccatccagaacgatgaggccgtggccccgctcatgaagtacctggatgagaagctggccctgctgaacgcctcgctggtgaaggggaacctgagcagggtgctggaggccctgtgggagctactcctccaggccattctgcaggcgctgggtgcaaaccgtgacgtctctgctgatttctacagccgcttccatttcacgctggaggccctggtcagttttttccacgcagagggtcagggtttgcccctggagagcctgagggatggaagctacaagaggctgaaggaggagctgcggctgcacaaatgttccacccgcgagtgcatcgagcagttctacctggacaagctcaaacagaggaccctggagcagaaccggtttggacgcctgagcgtccgttgccattacgaggcggctgagcagcggctggccgtggaggtgctgcacgccgcggacctgctccccctggacgccaacggcttaagtgacccctttgtgatcgtggagctgggcccaccgcatctctttccactggtccgcagccagaggacccaggtgaagacccggacgctgcaccctgtatacgacgaactcttctacttttccgtgcctgccgaggcgtgccgccgccgcgcggcctgtgtgttgttcaccgtcatggaccacgactggctgtccaccaacgacttcgctggggaggcggccctcggcctaggtggcgtcactggtgtcgcccggccccaggtgggcgggggtgcaagggctgggcagcctgtcaccctgcacctgtgccggcccagagcccaggtgagatctgcgctgaggaggctggaaggccgcaccagcaaggaggcgcaggagttcgtgaagaaactcaaggagctggagaagtgcatggaggcggacccctgagtccatcagctgccagccccggccctggcccccaccccaagttccctgaagcatcctccagctcactgtggccagctttgtgcaaccagggcccacggcgcccctcctgtgctgtgacgtgtgtgtcgtggctggccccgcggcgcctaccgccctggccgtgtctgtctggtgtgtgctgtgaacccctgcacccaaccccacatctgggtggccaacttggcaggacttggccagcagctgcccaggacacagtgcaggccagagcgggcttgaccacctggtgggcctccctgcccgcttccttgggctccccggccctgggtgggcggtgggcagctggtctccagggactcagtgagtggctgtgctctctgcacaacgggcaatgtgcagacgcatttttggtaatcacagctggggagtgaaaagggtgccactggcaccactgggtggatggtccagagcctccacccacagaggggatgcaaagggcaggtgagtcaagaaccgcataggtctccagtccccacggggctcccaggccggggaaaggttcccctgaggtcactctgaggccagggacgtcacccaaggctggtggtcagtgtgaagggctccgtgccaactggtcagctgtccttcacgcacatatccgtggccacctgagacctgctccacgacccttccaggcagagccgagagttcgccccaacccttccccaggcccagtgtgaaaaacagactcacaaggggcttcttggcctgcagcttcatttgcgagagcgccgaggcaggacacagagcacagctgtgctggaagtgtggggagaacccggacagctcagtcctgccagcagccgcaaagagccgaggctgccaggcccatttatgtccctcatgtctctagattttctcgtcacccagcctcaaaaatatatgtgtctgcaaccctcagt

SEQ ID NO: 137 - DNA, 1192 bp, Homo sapiens
ccagtgttcccagttcccaccagtccaactgcgaggagtgcgacgtgagtctgagtctgatccctccgaaaaccgtacttccggcgctgtctcggaggcctcccgtcccctcccttgtccgtcttctaactcttccccacgccaggtccgtcaagcctaagtccttgagttccgggtccgggcagcagagaaaggaagtcctctccctggaggcctatctccctcagaacggcgcgagaagcgagaccttagaaggcagcgcttcccgcgaaggaccggaaaggagcgcctactaaggacgccgtcgaggtccggggcgcctcaactctatagctctaactggctagaagtgcccaacgtggaatgtttcttttttaaaggcggctcttgaagcgacccggaagcggaagtggaagaaagttctagtggcttgaggtatccgcagagcggccgggtggcgggaggaaccgttacgggaactgaagttgcggattaagcctgatcaagatgacaacctcccaaaagcaccgagacttcgtggcagagcccatgggggagaagccagtggggagcctggctgggattggtgaagtcctgggcaagaagctggaggaaaggggttttgacaaggcctatgttgtccttggccagtttctggtgctaaagaaagatgaagacctcttccgggaatggctgaaagacacttgtggcgccaatgccaagcagtcccgggactgcttcggatgccttcgagagtggtgcgacgccttcttgtgatgctctctgggaagctctcaatccccagccctcatccagagtttgcagccgagtagggactcctcccctgtcctctacgaaggaaaagattgctattgtcgtactcacctccgacgtactccggggtcttttgggagttttctcccctaaccatttcaacttttttttggattctcgctcttgcatgcctcccccgtcctttttcccttgccagttccctggtgacagttaccagctttcctgaatggattcccggccccatccctcacccccaccctcactttcaatccgtttgataccatttggctccttttttggcagaacagtcactgtccttgtaaagttttttagatcaataaagtcagtggctttcaaaaaaaaaaaaaaaaaaaaaaaaaaaaaaaaaaaaaaaaaa

SEQ ID NO: 138 - DNA, 3599 bp, Homo sapiens
gcccgttgtctgtgtgtgggactgaggggccccgggggcggtgggggctcccggtgggggcagcggtggggagggagggcctggacatggcgctgaggggccgccccgcgggaagatgaataagggctggctggagctggagagcgacccaggcctcttcaccctgctcgtggaagatttcggtgtcaagggggtgcaagtggaggagatctacgaccttcagagcaaatgtcagggccctgtatatggatttatcttcctgttcaaatggatcgaagagcgccggtcccggcgaaaggtctctaccttggtggatgatacgtccgtgattgatgatgatattgtgaataacatgttctttgcccaccagctgatacccaactcttgtgcaactcatgccttgctgagcgtgctcctgaactgcagcagcgtggacctgggacccaccctgagtcgcatgaaggacttcaccaagggtttcagccctgagagcaaaggatatgcgattggcaatgccccggagttggccaaggcccataatagccatgccaggcccgagccacgccacctccctgagaagcagaatggccttagtgcagtgcggaccatggaggcgttccactttgtcagctatgtgcctatcacaggccggctctttgagctggatgggctgaaggtctaccccattgaccatgggccctggggggaggacgaggagtggacagacaaggcccggcgggtcatcatggagcgtatcggcctcgccactgcaggggagccctaccacgacatccgcttcaacctgatggcagtggtgcccgaccgcaggatcaagtatgaggccaggctgcatgtgctgaaggtgaaccgtcagacagtactagaggctctgcagcagctgataagagtaacacagccagagctgattcagacccacaagtctcaagagtcacagctgcctgaggagtccaagtcagccagcaacaagtccccgctggtgctggaagcaaacagggcccctgcagcctctgagggcaaccacacagatggtgcagaggaggcggctggttcatgcgcacaagccccatcccacagccctcccaacaaacccaagctagtggtgaagcctccaggcagcagcctcaatggggttcaccccaaccccactcccattgtccagcggctgccggcctttctagacaatcacaattatgccaagtcccccatgcaggaggaagaagacctggcggcaggtgtgggccgcagccgagttccagtccgcccaccccagcagtactcagatgatgaggatgactatgaggatgacgaggaggatgacgtgcagaacaccaactctgcccttaggtataaggggaagggaacagggaagccaggggcattgagcggttctgctgatgggcaactgtcagtgctgcagcccaacaccatcaacgtcttggctgagaagctcaaagagtcccagaaggacctctcaattcctctgtccatcaagactagcagcggggctgggagtccggctgtggcagtgcccacacactcgcagccctcacccacccccagcaatgagagtacagacacggcctctgagatcggcagtgctttcaactcgccactgcgctcgcctatccgctcagccaacccgacgcggccctccagccctgtcacctcccacatctccaaggtgctttttggagaggatgacagcctgctgcgtgttgactgcatacgctacaaccgtgctgtccgtgatctgggtcctgtcatcagcacaggcctgctgcacctggctgaggatggggtgctgagtcccctggcgctgacagagggtgggaagggttcctcgccctccatcagaccaatccaaggcagccaggggtccagcagcccagtggagaaggaggtcgtggaagccacggacagcagagagaagacggggatggtgaggcctggcgagcccttgagtggggagaaatactcacccaaggagctgctggcactgctgaagtgtgtggaggctgagattgcaaactatgaggcgtgcctcaaggaggaggtagagaagaggaagaagttcaagattgatgaccagagaaggacccacaactacgatgagttcatctgcacctttatctccatgctggctcaggaaggcatgctggccaacctagtggagcagaacatctccgtgcggcggcgccaaggggtcagcatcggccggctccacaagcagcggaagcctgaccggcggaaacgctctcgcccctacaaggccaagcgccagtgaggactgctggccctgactctgcagcccactcttgccgtgtggccctcaccagggtccttccctgccccacttccccttttcccagtattactgaatagtcccagctggagagtccaggccctgggaatgggaggaaccaggccacattccttccatcgtgccctgaggcctgacacggcagatcagccccatagtgctcaggaggcagcatctggagttggggcacagcgaggtactgcagcttcctccacagccggctgtggagcagcaggacctggcccttctgcctgggcagcagaatatatattttacctatcagagacatctatttttctgggctccaacccaacatgccaccatgttgacataagttcctacctgactatgctttctctcctaggagctgtcctggtgggcccaggtccttgtatcatgccacggtcccaactacagggtcctagctgggggcctgggtgggccctgggctctgggccctgctgctctagccccagccaccagcctgtccctgttgtaaggaagccaggtcttctctcttcattcctcttaggagagtgccaaactcagggacccagcactgggctgggttgggagtagggtgtcccagtggggttggggtgagcaggctgctgggatcccatggcctgagcagagcatgtgggaactgttcagtggcctgtgaactgtcttccttgttctagccaggctgttcaagactgctctccatagcaaggttctagggctcttcgccttcagtgttgtggccctagctatgggcctaaattgggctctaggtctctgtccctggcgcttgaggctcagaagagcctctgtccagcccctcagtattaccatgtctccctctcaggggtagcagagacagggttgcttataggaagctggcaccactcagctcttcctgctactccagtttcctcagcctctgcaaggcactcagggtgggggacagcaggatcaagacaacccgttggagcccctgtgttccagaggacctgatgccaaggggtaatgggcccagcagtgcctctggagcccaggccccaacacagccccatggcctctgccagatggctttgaaaaaggtgatccaagcaggcccctttatctgtacatagtgactgagtggggggtgctggcaagtgtggcagctgcctctgggctgagcacagcttgacccctctagcccctgtaaatactggatcaatgaatgaataaaactctcctaagaatctcctgagaaaaaaaaaaaaaaaaa

SEQ ID NO: 139 - DNA, 2133 bp, Homo sapiens
ctcagctagggcctgccggttcctagtgcgtgcccagcagtcctcaggtcaccttcactaccgggccaaggaccccgtgggaactcgcagccttcgccacactcgttcctcgcgcatccatggaggggtgcctacagagaagacctgcgtggcaaaaacctaaacgaagagatgaggggcatggagaggagtaggataagagaataaagataacagtgggggggagacgttagtttcctttatatcttttgttactggcggtagcagtgaagttagaaacggttttaaaacaaatttcagacaggcattttccaaaggcaagcctggagcgcacggatctgtataaccgcggaaggccctgtttccggtcccttgcgcctgcgctcttgcagccaagaaggcgggaggctggagtagagggaagcctgcaaccggaagtgaaggcagatttccctccttcgtcgctgttgctgccgccatacgcgctctccctgtttagctcttctgttagaaatagtatctttgttttcctttgctgttcctcaatcccctactcttcaccccttgttttcacctattttgcgagaacccatccagatcccccttcccttcttcccctgccggcccagttatggcagagaacgatgtggacaatgagctcttggactatgaagatgatgaggtggagacagcagctgggggagatggggctgaggcccctgccaagaaggatgtcaagggctcctatgtctccatccacagctctggctttcgtgacttcctgctcaagccagagttgctccgggccattgtcgactgtggctttgagcatccgtcagaagtccagcatgagtgcatccctcaggccattctgggaatggatgtcctgtgccaggccaagtcgggcatgggaaagacagcagtgtttgtcttggccacactgcaacagctggagccagttactgggcaggtgtctgtactggtgatgtgtcacactcgggagttggcttttcagatcagcaaggaatatgagcgcttctctaaatacatgcccaatgtcaaggttgctgttttttttggtggtctgtctatcaagaaggatgaagaggtgctgaagaagaactgcccgcatatcgtcgtggggactccaggccgtatcctagccctggctcgaaataagagcctcaacctcaaacacattaaacactttattttggatgaatgtgataagatgcttgaacagctcgacatgcgtcgggatgtccaggaaatttttcgcatgaccccccacgagaagcaggtcatgatgttcagtgctaccttgagcaaagagatccgtccagtctgccgcaagttcatgcaagatccaatggagatcttcgtggatgatgagacgaagttgacgctgcatgggttgcagcagtactacgtgaaactgaaggacaacgagaagaaccggaagctctttgaccttctggatgtccttgagttcaaccaggtggtgatctttgtgaagtctgtgcagcggtgcattgccttggcccagctactagtggagcagaacttcccagccattgccatccaccgtgggatgccccaggaggagaggctttctcggtatcagcagtttaaagattttcaacgacgaattcttgtggctaccaacctatttggccgaggcatggacatcgagcgggtgaacattgcttttaattatgacatgcctgaggattctgacacctacctgcatcgggtggccagagcaggccggtttggcaccaagggcttggctatcacatttgtgtccgatgagaatgatgccaagatcctcaatgatgtgcaggatcgctttgaggtcaatattagtgagctgcctgatgagatagacatctcctcctacattgaacagacacggtagaagactcgcccattttggaatgtgaccgtctgtccttcaggagaggacaccagggtgggggtgaaggagacactactgcccccacccctgacagcccccaccccatggcttccatcttttgcatcaccaccactcctgaacccccatttctgatttgtcagaatttttttttaacaaaactaaaaatgaaacacatgtgtctgtggtatctataa

SEQ ID NO: 140 - DNA, 1440 bp, Homo sapiens
ggctaacctgttgtaagcccgcagctttgggcctggtctctgctgctcccaggcggcccctttgggtactgcctgagcaagaagtgctggagaggaggaccagtcatcaataggaggatgagattgggagagacactcggtgcaggaggctgagtgagcaggggagcactaagacccaggggtagtggaggactgcagcaacgagctggaggaggagaaggaaggcccggcgactgaagcaggcaaaggaggaggcacagatggaggtggagcaataccgcagagagcgagagcacgaattccagagcaagcagcaggcggccatgggctcccaggggaacctgtctgctgaggtggagcaggctacaaggcgccaggtgcagggcatgcagagctcccagcagagaaaccgagagcgtgtcctggcccagcttcttggcatggtctgcgacgtcaggccccaggtccaccccaactaccggatttctgcctagggccaccgtagggcctgactccttctgccagttccctccctcaaagaaatcctccaatcaaaatcacctcccaccataatccctgtcttctttccatcccctagaaatcctgggaggcaggatccaataattttcctgtgacacttataaatatcctgctcacatctgaatctccttgttgttctttaaccctcactgggactttgtaaacttccaagtcattctcacctaaaccctctgtgaaatttgtaatatggggaagtaggaatgtggaaaacatcctgacttcagtgtctggccgatgtgggtccctctcttgaccctgtcacttgctggctgtgaaaccaggacaagctacttaacttggtagcctcgatgtcctcctctgtgaaactgggatgataataatgcctaccttgtgagggttgcttcaatgattaggaatcattctgtaaagtctagcacagttccttgcatgttgtagcagtgattcagtaagtagcaaccctgtgatactattaccaccacctgctcactggtcaaaacctacacagctgtttcctcacgtccatcactggctctctaattccacttgttcattctgtgaccctagttattttctgaaaaattggttcttctcttttcccagagaccttctgatctccaaaaagaggagatgactacatttagcccctctcttataattccaggtagataactgcattttgtagcctctctttgtttttcttttgctgatctttgtctttattagattttcctcctttcctatttccccaaagacttatcagatgctcattgctttctaagatctaaaatgatactgtgttccctcatatgcatgcccttcctttctatatccttgacaccttactttcccattgtaacaataaaaaaagtatcaataaaataattattggcaaataaa

SEQ ID NO: 141 - DNA, 8145 bp, Homo sapiens
acttggttcatgaagccttcgcctagaagtgaagctgctgaacaaaccttgagaagaatcatctcctgcttcaatctgctgctggataggaactaatcagagagagagaggcggaagacggagaaggagggagtcgaaggctttcccgatcacaaatctcacctccactacaactctctttatacttttcttgcagaaataataatagaaataaggaggtggtggggtttccaaaaatcttaaccttcaaccatctggggaaaaggcaaaaatcccatctaccgcaactctcagttcgagagtaaaggtttcccaacagtgatgtcacaagattgaccacattgatcacaatatggagtctggagaacggttaccatcctcagcagcctcctctactacaccaacttcatcttcgacaccttctgtggcttcagtagtttcaaaaggtggcctttccactggagttgcttcacttagctctacaatcaacccatgtggacatttattcagaacagctggggatcaaccgtttaacctgtccacagtgtcgagtgccttcccaatggtcagccacccagtctttggtctacattcagccagctcagggcattcagaatttggtggtttggggacacttggtacacccacagccttagccgcacatccccaactagcatcttttccaggtgcagaatggtggcgaacaactgatgctcatactcgtacaggagcaaccttctttccaccattactgggaattccaccactatttgctcccccagcccagaatcatgattcttcttcattccattcaaggacttcgggaaaaagtaatcgaaatggtcccgaaaaaggtgtaaatgggtcaataaatggaagtaatacatcatctgtaattggtatcaacacatctgtactatccactactgcttcaagttccatgggacaaactaaaagtacaagctcaggtggaggaaatcgaaaatgtaatcaggaacaaagcaaaaaccagcctttggatgctagagttgacaaaatcaaagataagaaaccaaggaagaaagcaatggaaagttctagcaacagtgatagtgattcaggcacatcatcagacacctcaagtgaaggcattagtagcagtgattcagatgatctagaagaagatgaagaagaagaagatcaaagtattgaagaaagtgaagatgatgattctgattcagagagtgaagcacaacataaaagtaacaaccaggtgctattacatggtatttcagacccaaaagcagatggacagaaagcaactgaaaaagcccaggaaaaaagaatacaccagccattacctcttgcgtctgaatcccagactcactcattccaatcccagcagaagcagcctcaggttttgtcacagcagcttccatttattttccaaagctctcaggcaaaggaggaatctgtgaacaaacacaccagtgtaatacagtctacgggattggtgtccaatgtgaaacctttatctttggtaaatcaagccaaaaaggaaacttacatgaaactcatagttccttctcctgatgttcttaaagcagggaataaaaatacctctgaagaatctagtttattgaccagtgaattgagatccaaacgggaacaatataaacaggcattcccatcacagttaaagaaacaagagtcatcgaagagcctgaagaaggttattgcagctttgtcaaatccaaaagcaacctctagttcaccagcacatccaaaacaaacattagaaaacaaccacccaaatccattcttgacaaatgcacttttaggtaatcaccaaccaaatggagttattcaaagtgtcattcaagaagctcctctagcacttactaccaaaactaaaatgcagagcaagattaatgaaaacattgctgctgcaagtagcacccctttttcctcacctgtaaatctgagtacaagtgggagaagaacccctggcaatcagacacctgtaatgccctctgcctctcccatcctgcatagtcaagggaaggaaaaagcagttagcaataatgtaaacccagtaaaaacacagcatcactcccatcctgcaaaatctttagtggaacaattcagaggaacagattcagacattcccagtagtaaagattctgaagattcaaatgaggatgaagaggaagatgatgaagaagaagatgaggaagatgatgaagatgatgaatctgatgacagccaatcagaatcagatagtaattcagaatcagatacagaaggatcagaagaagaagatgatgatgataaagaccaagatgaatcagatagtgatactgaaggagagaaaacttcaatgaaactgaataaaacaacttcctctgtcaaaagcccttccatgagtctcacaggtcactcaacacctcgtaacctccacatagcaaaagccccaggctctgctcctgctgccttatgttctgaatcccagtcacctgcttttcttggtacatcttcttccacacttacttcaagcccacactctggcacttccaaaagaagaagagtaacagatgaacgtgaactgcgtattccattggaatatggctggcagagagagacaagaataagaaactttggagggcgccttcaaggagaagtagcatattatgctccatgtggaaagaaacttaggcagtaccctgaagtaataaagtatctcagcagaaatggaataatggatatctcaagggacaatttcagcttcagtgcaaaaataagagtgggtgacttctatgaagccagagatggaccgcagggaatgcagtggtgtcttttgaaagaagaggatgtcattcctcgtatcagggcaatggaaggtcgtagaggaagaccaccaaatccagatagacaacgagcaagagaggaatccaggatgagacgtcggaaaggtcgacctccaaatgttggcaatgctgaattcctagataacgcagatgcaaagttgctaagaaaactgcaagctcaagaaatagccaggcaagcagcacaaataaagcttttgagaaaacttcaaaagcaggaacaggctcgggttgctaaagaagccaaaaaacaacaagcaataatggctgctgaggagaagcggaagcaaaaagaacagataaagattatgaaacagcaggaaaaaattaagagaatacagcaaatcagaatggaaaaagaacttcgagctcagcaaattctagaggctaaaaagaaaaagaaggaagaagcggcaaatgccaaattattggaggccgagaaacgaataaaggaaaaagaaatgagaagacaacaagctgttcttctgaaacatcaggaacgagagcgaaggcgacaacacatgatgcttatgaaagctatggaagctcgtaaaaaagcagaagaaaaagagcggttgaaacaagaaaaacgtgatgagaaaagattaaataaagagcgtaaactagagcagcgaagattagaattagaaatggcaaaggaactaaagaagcctaatgaagacatgtgcttagcagaccaaaagcctttgccagagttgcctcgtattccaggacttgttctctctggaagtacattttcagactgtctcatggtggtgcagttcttacgaaactttggtaaagttttgggctttgatgtgaatattgatgttccaaacctgagtgttcttcaagagggattgctaaatataggggacagcatgggtgaagtacaagacttgcttgtgaggctcctctcagctgctgtatgtgatccaggtctaataacaggatacaaggctaaaacagctcttggagaacatttgctgaatgttggtgtgaatcgagacaatgtttccgagattttacagatatttatggaagcccactgtggacaaactgagcttactgaaagtctgaagaccaaagcttttcaggctcacactccagcacagaaagcttcagtcctggctttcctgatcaatgaactggcatgcagcaagagtgtggtcagtgaaatcgacaagaacattgattatatgtcaaacttgaggagagataaatgggtggtagaaggtaaactccgcaagctcagaatcattcatgctaagaaaacaggcaaaagagacacttcaggtggcattgatctgggagaagagcagcatcccttgggcacacccactccaggacgcaagcgaagaaggaagggaggagacagtgattatgacgatgatgatgacgatgacagtgatgaccaaggggatgaagatgatgaggatgaagaagataaagaagacaaaaaaggaaaaaagactgatatctgtgaagatgaggatgaaggtgaccaagcagcaagtgttgaagagctggaaaaacagattgaaaaactgagtaaacaacagagtcagtacagaaggaagctctttgatgcgtctcactcattgcgttcagtgatgtttggccaagatcgttacagacgccggtactggattcttccccaatgtggggggatttttgtagaaggcatggagagtggtgaaggactagaagaaattgcaaaagaaagagaaaaactgaaaaaggcagaaagtgtccagatcaaagaagaaatgtttgagacttctggggacagtttaaattgttcaaatacagatcactgtgaacaaaaggaagatcttaaagaaaaagataacacaaatctattccttcagaaacctggctctttttccaaattaagcaagcttttggaagtagctaagatgcctcctgagtcagaggttatgacccccaaaccaaatgctggtgcaaatgggtgcacgttgtcttatcagaacagtggaaaacattcactgggcagcgttcagtcaacagcaacgcaaagcaatgtggaaaaggcagactctaataatctgtttaatactggttcaagtggtccagggaagttctacagtcctctccccaatgaccagttactaaaaacgctgactgaaaagaatagacaatggtttagtcttttgccacgaacaccctgtgatgacacttcacttactcatgccgatatgtcaactgcttctttggtgactcctcagtctcagccaccatctaagtcaccttcacctaccccagctcctcttggatcttctgctcagaatcctgttggcttaaatccatttgctttatcacctcttcaggtgaaaggtggagtatctatgatgggacttcagttttgtggatggcccactggtgtggttacttctaatattccatttacatcatctgtacctagtctaggatcggggttagggttatcagaaggaaatggtaattcattcttgacttccaatgttgcttcaagtaaaagtgaatctccagtaccacagaatgaaaaggccacttcagctcaacctgcagctgttgaagtagcaaaaccagtagattttcctagtccaaaacctattccagaagaaatgcagtttggttggtggagaattattgacccagaggacctaaaagctttgctcaaagtgctgcatctcagaggaataagagaaaaggcattacaaaaacaaattcagaaacatttggattatattactcaagcctgcctcaagaataaggatgttgctattattgaactgaatgaaaatgaagaaaaccaagtaactcgagatattgtggagaactggtcagtagaagaacaagcaatggaaatggatttgagtgtccttcaacaggtagaagatctagaaaggagagttgcatcagcaagtttgcaagtgaagggttggatgtgtccagagcctgcatcagaaagggaggacttggtatattttgaacataaatcatttactaaattgtgcaaggagcatgatggagaatttactggcgaagacgaaagcagtgcacatgcactagaacggaagagtgacaaccccctagatatagctgtaaccaggctggctgatttggagcggaacattgaaagaagaattgaagaggatattgctccagggctcagggtatggagaagggcattatcagaagctcgcagtgctgcacaggtagctctgtgcattcagcaattacagaaatcaatagcatgggaaaaatcaattatgaaagtttactgccaaatctgtcgaaagggagataatgaagaactgcttcttctttgtgatggctgtgacaaaggctgtcatacctactgccatagacccaagattacaacaatcccagatggagactggttttgtccagcttgcattgctaaggcaagtggtcaaactctaaaaatcaaaaaacttcatgtcaaaggaaaaaagactaatgagtcaaagaaaggcaagaaggtaactttaacaggagatactgaagatgaagactctgcatctacaagtagttcactaaaaagaggaaacaaagacctcaagaaaagaaaaatggaggaaaacacttctattaacttgtcaaaacaagaaagttttacttcagttaagaaacctaaaagagatgactccaaggacctagctctttgcagtatgattctgactgaaatggaaactcatgaggatgcatggccttttctacttcctgtaaacttgaaacttgttcctggttataagaaagttattaagaagcctatggatttttccacaattagagagaaactaagtagtggacagtatccaaaccttgaaacctttgctctagatgtcaggcttgtttttgacaactgtgaaacatttaatgaagatgattctgatataggcagagctggccacaatatgaggaagtattttgaaaaaaagtggacagatactttcaaagtgagctgaagttataataatctctttatttttttccttctaaacaaggacaaatgagaccagcaatgtgaactgtatttacataaacgtgcaaggcacatacataatgactttctttttccttaagtataaaaaaaaagtatcagaagaatgataccatttttaaaggcttcattcctacaacaaccaaggccctcggttattggtttgtgtgatttatcagctaatttaggtagaacagggaagcacacccaaagaattttcaaaggaaagggtgttatagtgcaatagcaattaaaatatatcaaatcgcactgaatactcaacaccagagctctaatgtgggaaatggttctcctttccctctcaataaatatctatttttcatttttttactttgtagtttattttttagtgaatgtatttaattttatgaattatttatgattaaaccacatccagaatcttcgttttctgtgaaaaggaagaactagaaaattgctttaaatcttgaaaatacaaggaatgttttaaaatataaaacaaagccaagttaaactgtttacactgatgtgctataaaagcaccaaaaagaaactttactgtagagttacaagtacatttatatatatatgttgctgcatcacttgtgtagttaaattgtatttcaaaacagtgaaaaaattgacatgtatatactgttcattcttgtttatattaagtcttgttttaaatatgtattatgtgtatatattgtttgcagacattattgttcatgccttagaggattgtagcattttattttcgtctgaaggtaatgatagctatacagtctgtacagtaattatcctctaccaacactgtggcgtctccttaatcttggtagtgcctgcctttgaaacagggtgtaggggatattagttttccatttttctattttgttatataattttaagccaccagggcctaaattaaagtataatcatttgtatccatgtggaataaaattgtgacaatttcctacgcacacagtattttttcatagaaacatttccctcccatttgccttgcctcagaaataaatttaaaagacgtttgtaaccactgtgttttatctactgtgtgttgtggtggcctgttggaggcaaatagatcagattttttttgtacctacgtaagagtacttgaagttttatttaaaataaaatgttgtggaaaaggtagcattctttttttaggagtgttatttttcactatgtgtggcacggatacaataaaagacttttacaaactaa

SEQ ID NO: 142 - DNA, 2373 bp, Homo sapiens
gcaggcgcagtgtgagcggcaacatggcgtccaggtctaagcggcgtgccgtggaaagtggggttccgcagccgccggatcccccagtccagcgcgacgaggaagaggaaaaagaagtcgaaaatgaggatgaagacgatgatgacagtgacaaggaaaaggatgaagaggacgaggtcattgacgaggaagtgaatattgaatttgaagcttattccctatcagataatgattatgacggaattaagaaattactgcagcagctttttctaaaggctcctgtgaacactgcagaactaacagatctcttaattcaacagaaccatattgggagtgtgattaagcaaacggatgtttcagaagacagcaatgatgatatggatgaagatgaggtttttggtttcataagccttttaaatttaactgaaagaaagggtacccagtgtgttgaacaaattcaagagttggttctacgcttctgtgagaagaactgtgaaaagagcatggttgaacagctggacaagtttttaaatgacaccaccaagcctgtgggccttctcctaagtgaaagattcattaatgtccctccacagatcgctctgcccatgtaccagcagcttcagaaagaactggcgggggcacacagaaccaataagccatgtgggaagtgctacttttaccttctgattagtaagacatttgtggaagcaggaaaaaacaattccaaaaagaaacctagcaacaaaaagaaagctgcgttaatgtttgcaaatgcagaggaagaatttttctatgaggagcagggaaaacctgaggtgcttggaggtccagacacaagaagaggattggaaccagttccgatacagcacaatggttggtctgttcccccagtattagaataaattaaaacatacaagccaggatgaatgaagccaataggaaataaaaaacaggcacacaacattatttggggaaaaacacctctagtgacacattttcttcatctgcactgattatttcagcaaaagaaatctagtatgttttcatacatctgatgtataaatttgctgaactttgagttagttttcttaagataatttttcatattaagaaaattttccttttctaacctattaaaatacctcactatcatttcaaaaggttaaatgagttgatcactatctctgctctgtgctcctcaaaatataatttcaaatggatccgatctaaatctatacctagtgcagatttgcaaaaaaagaaaaggaatagtcattaaggatacctgttaccatggctgcgattgttagcacttcatctacacagtcaaattcacaggacgctaagatagacttcgagagttgtggatcaagaggaaactctgacatgatgattccaaattcagaaagatttccatcattatccagtgctgccagataatctaagtcttccaatgcctgcatcaaactttctggtgctaggaaaggaaaaaaataataatttaagagtctcatatggctaagatggagaaacaggtactggacttttccctcctgcatgaaacaagcaaacaatggacaaaatatgtgaaacaacggtttgcaagccaccaaataccagggagtgaaggatagtgattcttgagagggcaaactcaggaggggagccctgtgattgtccagctcatgctccgaggagggtcccagctgcagtgtgcatgcggggggaacccaggtggagcctgccagcctccctgcagtaggaaaacaatgccagggatccagggagactaaggtggccggaactcgcggtcacagtactggagagagacacacagatctaagtcgggggccagagggagctccctcaactaggcagcacagccctactgatcagcgcatgtgtgtaaggaaccacctcaggccagagaaagagccatgtgagaagattagaaggaacagtggtgctgacacaggacctagggtagggcctgttcccaccaccctagctggaaaacctcatgatttatggggcactgggtagaaaacacaagtgagaaaccctagatgggcactgccacctgacacagctatacagcaggacctgaaaggatcacactgcatcctaggacaaagctcaaaagtacctctgggactacaaaaatattcagtgcccaagaaggtaaaatgtacaatgtctagcatccagtagagaggcatgaaaagcaggaaaatacattgcataatacagagaaaaattaatcacaactgacctggatctcagatgctagaaatagtagacaaagatgttatttcccagtgcaaataaagaaataaagatagcaagctgaaaaaaaaaaaaaaaaaaaaaaaa

SEQ ID NO: 143 - DNA, 2386 bp, Homo sapiens
ggaggaggaagcaagcgagggggctggttcctgagcttcgcaattcctgtgtcgccttctgggctcccagcctgccgggtcgcatgatccctccggccggagctggtttttttgccagccaccgcgaggccggctgagttaccggcatccccgcagccacctcctctcccgacctgtgatacaaaagatcttccgggggctgcacctgcctgcctttgcctaaggcggatttgaatctctttctctcccttcagaatcttatcttggctttggatcttagaagagaatcactaaccagagacgagactcagtgagtgagcaggtgttttggacaatggactggttgagcccatccctattataaaaatgtctcagagcaaccgggagctggtggttgactttctctcctacaagctttcccagaaaggatacagctggagtcagtttagtgatgtggaagagaacaggactgaggccccagaagggactgaatcggagatggagacccccagtgccatcaatggcaacccatcctggcacctggcagacagccccgcggtgaatggagccactggccacagcagcagtttggatgcccgggaggtgatccccatggcagcagtaaagcaagcgctgagggaggcaggcgacgagtttgaactgcggtaccggcgggcattcagtgacctgacatcccagctccacatcaccccagggacagcatatcagagctttgaacaggatacttttgtggaactctatgggaacaatgcagcagccgagagccgaaagggccaggaacgcttcaaccgctggttcctgacgggcatgactgtggccggcgtggttctgctgggctcactcttcagtcggaaatgaccagacactgaccatccactctaccctcccacccccttctctgctccaccacatcctccgtccagccgccattgccaccaggagaaccactacatgcagcccatgcccacctgcccatcacagggttgggcccagatctggtcccttgcagctagttttctagaatttatcacacttctgtgagacccccacacctcagttcccttggcctcagaattcacaaaatttccacaaaatctgtccaaaggaggctggcaggtatggaagggtttgtggctgggggcaggagggccctacctgattggtgcaacccttaccccttagcctccctgaaaatgtttttctgccagggagcttgaaagttttcagaacctcttccccagaaaggagactagattgcctttgttttgatgtttgtggcctcagaattgatcattttccccccactctccccacactaacctgggttccctttccttccatccctaccccctaagagccatttaggggccacttttgactagggattcaggctgcttgggataaagatgcaaggaccaggactccctcctcacctctggactggctagagtcctcactcccagtccaaatgtcctccagaagcctctggctagaggccagccccacccaggagggagggggctatagctacaggaagcaccccatgccaaagctagggtggcccttgcagttcagcaccaccctagtcccttcccctccctggctcccatgaccatactgagggaccaactgggcccaagacagatgccccagagctgtttatggcctcagctgcctcacttcctacaagagcagcctgtggcatctttgccttgggctgctcctcatggtgggttcaggggactcagccctgaggtgaaagggagctatcaggaacagctatgggagccccagggtcttccctacctcaggcaggaagggcaggaaggagagcctgctgcatggggtggggtagggctgactagaagggccagtcctgcctggccaggcagatctgtgccccatgcctgtccagcctgggcagccaggctgccaaggccagagtggcctggccaggagctcttcaggcctccctctctcttctgctccacccttggcctgtctcatccccaggggtcccagccaccccgggctctctgctgtacatatttgagactagtttttattccttgtgaagatgatatactatttttgttaagcgtgtctgtatttatgtgtgaggagctgctggcttgcagtgcgcgtgcacgtggagagctggtgcccggagattggacggcctgatgctccctcccctgccctggtccagggaagctggccgagggtcctggctcctgaggggcatctgcccctcccccaacccccaccccacacttgttccagctctttgaaatagtctgtgtgaaggtgaaagtgcagttcagtaataaactgtgtttactcagtgaaaaaaaaaaaaaaaaaa

SEQ ID NO: 144 - DNA, 2575 bp, Homo sapiens
ggaggaggaagcaagcgagggggctggttcctgagcttcgcaattcctgtgtcgccttctgggctcccagcctgccgggtcgcatgatccctccggccggagctggtttttttgccagccaccgcgaggccggctgagttaccggcatccccgcagccacctcctctcccgacctgtgatacaaaagatcttccgggggctgcacctgcctgcctttgcctaaggcggatttgaatctctttctctcccttcagaatcttatcttggctttggatcttagaagagaatcactaaccagagacgagactcagtgagtgagcaggtgttttggacaatggactggttgagcccatccctattataaaaatgtctcagagcaaccgggagctggtggttgactttctctcctacaagctttcccagaaaggatacagctggagtcagtttagtgatgtggaagagaacaggactgaggccccagaagggactgaatcggagatggagacccccagtgccatcaatggcaacccatcctggcacctggcagacagccccgcggtgaatggagccactggccacagcagcagtttggatgcccgggaggtgatccccatggcagcagtaaagcaagcgctgagggaggcaggcgacgagtttgaactgcggtaccggcgggcattcagtgacctgacatcccagctccacatcaccccagggacagcatatcagagctttgaacaggtagtgaatgaactcttccgggatggggtaaactggggtcgcattgtggcctttttctccttcggcggggcactgtgcgtggaaagcgtagacaaggagatgcaggtattggtgagtcggatcgcagcttggatggccacttacctgaatgaccacctagagccttggatccaggagaacggcggctgggatacttttgtggaactctatgggaacaatgcagcagccgagagccgaaagggccaggaacgcttcaaccgctggttcctgacgggcatgactgtggccggcgtggttctgctgggctcactcttcagtcggaaatgaccagacactgaccatccactctaccctcccacccccttctctgctccaccacatcctccgtccagccgccattgccaccaggagaaccactacatgcagcccatgcccacctgcccatcacagggttgggcccagatctggtcccttgcagctagttttctagaatttatcacacttctgtgagacccccacacctcagttcccttggcctcagaattcacaaaatttccacaaaatctgtccaaaggaggctggcaggtatggaagggtttgtggctgggggcaggagggccctacctgattggtgcaacccttaccccttagcctccctgaaaatgtttttctgccagggagcttgaaagttttcagaacctcttccccagaaaggagactagattgcctttgttttgatgtttgtggcctcagaattgatcattttccccccactctccccacactaacctgggttccctttccttccatccctaccccctaagagccatttaggggccacttttgactagggattcaggctgcttgggataaagatgcaaggaccaggactccctcctcacctctggactggctagagtcctcactcccagtccaaatgtcctccagaagcctctggctagaggccagccccacccaggagggagggggctatagctacaggaagcaccccatgccaaagctagggtggcccttgcagttcagcaccaccctagtcccttcccctccctggctcccatgaccatactgagggaccaactgggcccaagacagatgccccagagctgtttatggcctcagctgcctcacttcctacaagagcagcctgtggcatctttgccttgggctgctcctcatggtgggttcaggggactcagccctgaggtgaaagggagctatcaggaacagctatgggagccccagggtcttccctacctcaggcaggaagggcaggaaggagagcctgctgcatggggtggggtagggctgactagaagggccagtcctgcctggccaggcagatctgtgccccatgcctgtccagcctgggcagccaggctgccaaggccagagtggcctggccaggagctcttcaggcctccctctctcttctgctccacccttggcctgtctcatccccaggggtcccagccaccccgggctctctgctgtacatatttgagactagtttttattccttgtgaagatgatatactatttttgttaagcgtgtctgtatttatgtgtgaggagctgctggcttgcagtgcgcgtgcacgtggagagctggtgcccggagattggacggcctgatgctccctcccctgccctggtccagggaagctggccgagggtcctggctcctgaggggcatctgcccctcccccaacccccaccccacacttgttccagctctttgaaatagtctgtgtgaaggtgaaagtgcagttcagtaataaactgtgtttactcagtgaaaaaaaaaaaaaaaaaa

SEQ ID NO: 145 - DNA, 722 bp, Homo sapiens
acttcgctccgcgcagccgcctggtctgcagtttgttggagctctgcgtccagcgccgctgccgctgccgccgccgccgccgccgccgccgccgccgccgccgccgccactaccaccacttgattcttgcagccaccctgcgaaccctgccacactgcgatcgcatcatcgcggtattcggttcgctgcgttcccgccgccaccgcctcggcgccctttcttggcccttgttcccccaaatgtctgactctgactctcggactgagaaacgcaagaaaaaaagaccaaatggcaaagcaaccttctgatgtaagttctgagtgtgaccgagaaggtagacaattgcagcctgcggagaggcctccccagctcagacctggggcccctacctccctacagacagagccacaagacaggagcccagcacccatgagttgtgacaaatcaacacaaaccccaagtcctccttgccaggccttcaaccactatctcagtgcaatggtagtcatcctagaggatataggtgatctttcactgtgctttggatttatatttactggcttagatttgtatggccaccaccatagtcaagatacagaacaactcaaccacaaggatttctcatgatacctttttatagccacagccacctctctccctcttccttgagcattttgtcatatggtcattggtgattaaataaaatgtattttaatattgac

SEQ ID NO: 146 - DNA, 3455 bp, Homo sapiens
aaaaaaagaccaaatggcaaagcaaccttctgatgtaagttctgagtgtgaccgagaaggtagacaattgcagcctgcggagaggcctccccagctcagacctggggcccctacctccctacagacagagccacaaggtaatcctgaaggcaatcacggaggtgaaggggacagctgcccccacggcagccctcagggcccgctggccccacctgccagccctggcccttttgctaccagatccccgcttttcatctttatgagaagatcctccctgctgtctcgatcctccagtgggtatttctcttttgacacagacaggagcccagcacccatgagttgtgacaaatcaacacaaaccccaagtcctccttgccaggccttcaaccactatctcagtgcaatggctaactgggactagaaacagctccatcacccagcttccatgaggcaggctgaacctgcagatatgcgcccagagatatggatcgcccaagagttgcggcgtattggagacgagtttaacgcttactatgcaaggagggtatttttgaataattaccaagcagccgaagaccacccacgaatggttatcttacgactgttacgttacattgtccgcctggtgtggagaatgcattgacaggttctttgcggagccgagataccatgcagacattttgcttgttcaaaccaacaagacccagcaccgcggtctcctggtgccattattatgcagccagcggttctcttgtggagggggcaggtgacgtttcagaagacaccgagctggatgggactacctttctgttcatcaccacacagcagaatttctaatggaagtttgttgtgaatgtaaaggagggagcattctttgctttttaatatacaaaccatggttttttggagcaggattttgtgtaagaatggtgtttacatgcagtgtgttttccccctcaccttcaataaggtttttcaaaaaggaaatggaaactttttaaccaatttgtgaataacttttgtattaaaattttaagaacctacggcctattctcagaggattatgtaacccctgcagtggaaactgagccagctaacttaaaaagctgccttagtttatttttagagattacagaatttttaaacagggagacgtgtgatatactccctcccttccctactattgcctctctgacctttttaaattatttttaataccaaaagagttcttttgaaatggaactgattaaaagggcagagggtctgttgccagcctgcattgatataccagtcccatttgtaaatatttacgtacctttataaattcagttgcatctgtggcaaaatttcagactatttttgcgtctttcctcatcactttttgtgatgcaactccagtctggactcagatgcatagatttggtccagtgtattttcatgataaagtgaaattgagtcagaacaagagttaatatctgcctgtatcttgcacagttcgagcgatctgttattaactgggaagcatttggtgttggttttcattccatttcgacgagcatgttattgggaagtattctgaagaggcaatagcagtaataacaacagacttaagtgctacgcccctttgtgctgctggcttttctggttgcaggctttcccatggtcacaggatgcactgtcagcatcaggtcccagagggccaccgtgtccattacagcagagtccagctgcagcatccagctcacgccctcatgggaattggcacaggcctggggcagggcttctgatggccatttgcttggcctcctgcattttagtccaactcacagtccactagcttcactcctttaaattcactttgaaacaggcctcatcccacttccaccagcaccatagaagaataattctgggcagaagtctgttttttttcatttttccaggacagttggatattgtcaggccacttgtgaccccagccatgtagtgagggtgctctttctctgtgcctgctccttatgagtgcagtggaaggaagccacacactggtcagtcatttcagaggcagcagatgcccagggagacccaagaaagagtcaggttagggagcagtgaaagtgaggagggaagacaattctgtgaactctgtaactcttaaaatttttgaaaactccatcgttaaacaacttttaaaagaaataactaaattttcaaatgagtaagcagtgccaccaactagtgttttgcccgatagaagagccagcatgttcacgttatttaaattaggtggaaaaatctaaacatttttatcttcataatttaaaaaatatatatgtatatattgcatattcactttttcctttaggtagagatgatttcaatccaaatactcttactttaaaaaatttcctttccccaagaatctccttgggactttgacttatttttaaagctgtgttggagctcatcttgttccctgatgtgtctcgagcccattggtagggtcatacaaagcccacggttacaagcagtggtaggattgcagccgtgggcctgctggacacacacatacaccaaagatgtatttggatctgggcaccccctcccaggatccctgtactcacgtgccagtctcctgactagagcactttactctgtttcctcagccctgcagcccctgggagcacacactgggtgcagccctgggccaggcacgggaggccctgccctgtgctgcccaggggctgtgtgcaccacatgagcacatttccctctggcctggcggcctccaggctggctgtggaaacagttcctgaggaaattagagattctatgaattgtaggagtattaaagaccaggctgttggcaccagaacttaaagcgatgactggatgtctctgtactgtatgtatctggttatcaagatgcctctgtgcagaaagtatgcctcccgtgggtatacgtttttaccttttttaaaaaacatttttgtagaaaaaataattaaatcccctttttggaaacttactgcaggttttgtgccttgacaacctctccctatgtgaggtttgtaaaaagtgtcctgtgacttaacacagaaacgcaataaacacacacaaaatagtttcatgagtgattcttcagatgcccttcccaactggttagttgatcaagaattttgggggtgggggttgcggagaaatcaagtttaaaattccttctgattaaaaaaatatagtggaatacaattgtctgccgtttccccttcttaatgtatatattgtgagtatttattagattcgtaggtcatattacttatcaactgagccaaatgtctgtgtgcaattgtgtttcctttaccttgtaaaattttgtacagcataaataagtaaaaaaatcactgtttttctcaactttttcaaaaaaaaaaaaaaaaaaaaaaaaaaaaaaaaaaaaa

SEQ ID NO: 147 - DNA, 3367 bp, Homo sapiens
aaaaaaagaccaaatggcaaagcaaccttctgatgtaagttctgagtgtgaccgagaaggtagacaattgcagcctgcggagaggcctccccagctcagacctggggcccctacctccctacagacagagccacaagacaggagcccagcacccatgagttgtgacaaatcaacacaaaccccaagtcctccttgccaggccttcaaccactatctcagtgcaatggcttccatgaggcaggctgaacctgcagatatgcgcccagagatatggatcgcccaagagttgcggcgtattggagacgagtttaacgcttactatgcaaggaggttagagaaatagaggaagttgtcgtgtagttgtcatgtattcagtccacttaagggcagtggggaagcgtttgagacggagctgtggaggctgaatccttgaaggaggaggtgagagaggcacaggtatttttgaataattaccaagcagccgaagaccacccacgaatggttatcttacgactgttacgttacattgtccgcctggtgtggagaatgcattgacaggttctttgcggagccgagataccatgcagacattttgcttgttcaaaccaacaagacccagcaccgcggtctcctggtgccattattatgcagccagcggttctcttgtggagggggcaggtgacgtttcagaagacaccgagctggatgggactacctttctgttcatcaccacacagcagaatttctaatggaagtttgttgtgaatgtaaaggagggagcattctttgctttttaatatacaaaccatggttttttggagcaggattttgtgtaagaatggtgtttacatgcagtgtgttttccccctcaccttcaataaggtttttcaaaaaggaaatggaaactttttaaccaatttgtgaataacttttgtattaaaattttaagaacctacggcctattctcagaggattatgtaacccctgcagtggaaactgagccagctaacttaaaaagctgccttagtttatttttagagattacagaatttttaaacagggagacgtgtgatatactccctcccttccctactattgcctctctgacctttttaaattatttttaataccaaaagagttcttttgaaatggaactgattaaaagggcagagggtctgttgccagcctgcattgatataccagtcccatttgtaaatatttacgtacctttataaattcagttgcatctgtggcaaaatttcagactatttttgcgtctttcctcatcactttttgtgatgcaactccagtctggactcagatgcatagatttggtccagtgtattttcatgataaagtgaaattgagtcagaacaagagttaatatctgcctgtatcttgcacagttcgagcgatctgttattaactgggaagcatttggtgttggttttcattccatttcgacgagcatgttattgggaagtattctgaagaggcaatagcagtaataacaacagacttaagtgctacgcccctttgtgctgctggcttttctggttgcaggctttcccatggtcacaggatgcactgtcagcatcaggtcccagagggccaccgtgtccattacagcagagtccagctgcagcatccagctcacgccctcatgggaattggcacaggcctggggcagggcttctgatggccatttgcttggcctcctgcattttagtccaactcacagtccactagcttcactcctttaaattcactttgaaacaggcctcatcccacttccaccagcaccatagaagaataattctgggcagaagtctgttttttttcatttttccaggacagttggatattgtcaggccacttgtgaccccagccatgtagtgagggtgctctttctctgtgcctgctccttatgagtgcagtggaaggaagccacacactggtcagtcatttcagaggcagcagatgcccagggagacccaagaaagagtcaggttagggagcagtgaaagtgaggagggaagacaattctgtgaactctgtaactcttaaaatttttgaaaactccatcgttaaacaacttttaaaagaaataactaaattttcaaatgagtaagcagtgccaccaactagtgttttgcccgatagaagagccagcatgttcacgttatttaaattaggtggaaaaatctaaacatttttatcttcataatttaaaaaatatatatgtatatattgcatattcactttttcctttaggtagagatgatttcaatccaaatactcttactttaaaaaatttcctttccccaagaatctccttgggactttgacttatttttaaagctgtgttggagctcatcttgttccctgatgtgtctcgagcccattggtagggtcatacaaagcccacggttacaagcagtggtaggattgcagccgtgggcctgctggacacacacatacaccaaagatgtatttggatctgggcaccccctcccaggatccctgtactcacgtgccagtctcctgactagagcactttactctgtttcctcagccctgcagcccctgggagcacacactgggtgcagccctgggccaggcacgggaggccctgccctgtgctgcccaggggctgtgtgcaccacatgagcacatttccctctggcctggcggcctccaggctggctgtggaaacagttcctgaggaaattagagattctatgaattgtaggagtattaaagaccaggctgttggcaccagaacttaaagcgatgactggatgtctctgtactgtatgtatctggttatcaagatgcctctgtgcagaaagtatgcctcccgtgggtatacgtttttaccttttttaaaaaacatttttgtagaaaaaataattaaatcccctttttggaaacttactgcaggttttgtgccttgacaacctctccctatgtgaggtttgtaaaaagtgtcctgtgacttaacacagaaacgcaataaacacacacaaaatagtttcatgagtgattcttcagatgcccttcccaactggttagttgatcaagaattttgggggtgggggttgcggagaaatcaagtttaaaattccttctgattaaaaaaatatagtggaatacaattgtctgccgtttccccttcttaatgtatatattgtgagtatttattagattcgtaggtcatattacttatcaactgagccaaatgtctgtgtgcaattgtgtttcctttaccttgtaaaattttgtacagcataaataagtaaaaaaatcactgtttttctcaactttttcaaaaaaaaaaaaaaaaaaaaaaaaaaaaaaaaaaaaa

SEQ ID NO: 148 - DNA, 1879 bp, Homo sapiens
gcccggcgaaaccaccctcccgtgcagccgagcccagccgctctccggccgccgtccccggcggccccatgccccgatgccccgcgggggccatggacgaggggcccgtggacctgcgcacccggcccaaggccgccggactcccgggcgccgcgctgccgctccgcaagcgcccgctgcgcgcgccctccccggagcccgccgctccccgcggcgctgcgggccttgtcgtccccctggaccctctgcgcggcggctgcgacctgccggcggtccccgggcccccccacggcctggcccggccggaggcgctttactaccccggagccttactgcctttgtaccccactcgggccatgggctccccgtttcctctggtgaacctgcctacacccctataccccatgatgtgccccatggaacaccccctttctgctgacatcgccatggccacccgtgcagatgaggacggagacacgcctctccatattgctgtggtgcagggtaacctgccagctgtgcaccggctggtcaacctcttccagcaggggggccgggagctcgacatctacaacaacctacggcagacaccgctccacctggctgtgatcaccacattaccgtctgtggtccggctcctggtgacagctggtgccagccccatggcgctggaccgccatggccagacggccgctcacctggcgtgcgagcaccgcagcccgacctgcctgcgagccctgctggacagcgcagctccgggcacgttggacctggaggcccgcaattatgacgggctcaccgccctgcacgtggcagtgaacaccgagtgccaagaaaccgtgcagctcttgctagagcgcggtgccgacatcgacgcagtggacattaagagcggccgctccccgctcatccacgccgtggaaaacaacagccttagcatggtgcagctgctgctgcagcacggcgccaacgtgaacgcgcaaatgtactccggcagctccgccctgcactcagcgtccggccgcgggctcctcccgctggtgcgcacgctggtccgcagcggcgctgacagcagcctcaagaactgccacaacgacacgccgctcatggtggcgcgcagccgcagggtcatcgacatcctgagggggaaggccacccggcctgcttccacctcccagccagacccctcccctgaccggagcgccaacacctcccccgagagcagcagccgcctcagctccaatggtcttctctccgcatcaccatcctcctcaccctcccagtctccccccagggacccccctggattccccatggctcctcccaatttcttccttccttccccatctccacccgccttcctgccctttgctggggtcctccgaggccctggccggccggtgcccccctccccagctccaggaggcagctgagggggatgggggggcagatcttggactcatgaggaggggcccccctgccctgtggggtcaacccttctggaaactgtgaagatctcactctgccccccccccccatcttcgggaccaggatttgcacagaagcacatgcacctacccatacaccccctcttctgagcacagatgttcccccatctcgctccctcccaggactctgaccccagcattctcaggcaccagtccctgtccggaatgccacccacatcttccatttccatgtcccctcccagagctggtggacccagggaacagccactcccctccactctctaccagataactgaggaggggagaggtgggccgtaacgggcacggatcacgatgtaaattattaagcattttggttggatttcttttgtaataaactatttttgtaccataaaaaaaaaaaaaaaaaa

SEQ ID NO: 149 - DNA, 1187 bp, Homo sapiens
gggggcgacggccgctgtgacgctgcggcggcggcgggcgggcggcggcgcgtgagacgcgcgatccccggtgtcttgggagcagtgccccggcccccgccgctcccgccgccgccatgtcgggccggtcggtccgggcggagacccgcagccgggccaaggacgacatcaagaaggtgatggcggccatcgagaaagtgcggaaatgggagaagaagtgggtgactgtgggtgacacgtccctgaggatatttaagtgggttcctgtgacagacagcaaggagaaagaaaagtcaaaatcgaacagttcagcagcccgagaacctaatggctttccttctgatgcctcagccaattcctctctccttcttgaattccaggacgaaaacagcaaccagagttccgtgtctgacgtctatcagcttaaggtggacagcagcaccaactcaagccccagcccccagcagagtgagtccctgagcccagcacacacctccgacttccgcacggatgactcccagcccccaacgctgggccaggagatcctggaggagccctccctgccctcctcggaagttgctgatgaacctcctaccctcaccttctagaagagagcgtgcctcaggttacttgaacttgaacggagactgtagactcccggactttcccctaggactgggggccctgtaggctgctgttggaggactgggtagagacattggagggaagggaagggcttttctccacacaagggcagagagtccgtctagatttcttcctgtcctgccagctctgcccatgcctgaggtggtcctacctctcacgggcaccctagctgctgacagccctttgtggccgccgtccccatcccctgccctcagcacacacatctgcacacacgcagctttgttctcacctctacctgtcattccagcatccctgcctcttgtcacaaactgccccagcaagaatttgaggttctgacaacagtacccatcccccacagtaccccttcagctcagtttctagaaagctcccttttctttgaaatctgcatgttgaattgaactttgtgattttattttttgtttcaaaaaagtttaagaaaatggaaatgggcaacagtgagtgaagacatattttagcactgaatagaatatttttaaaattaaactatttgaaatatg

SEQ ID NO: 150 - DNA, 6927 bp, Homo sapiens
ggggggagggtggcggctcgatgggggagccgcctccagggggcccccccgccctgtgcccacggcgcggcccctttaagaggcccgcctggctccgtcatccgcgccgcggccacctccccccggccctccccttcctgcggcgcagagtgcgggccgggcgggagtgcggcgagagccggctggctgagcttagcgtccgaggaggcggcggcggcggcggcggcacggcggcggcggggctgtggggcggtgcggaagcgagaggcgaggagcgcgcgggccgtggccagagtctggcggcggcctggcggagcggagagcagcgcccgcgcctcgccgtgcggaggagccccgcacacaatagcggcgcgcgcagcccgcgcccttccccccggcgcgccccgccccgcgcgccgagcgccccgctccgcctcacctgccaccagggagtgggcgggcattgttcgccgccgccgccgccgcgcgggccatgggggccgcccggcgcccggggccgggctggcgaggcgccgcgccgccgctgagacgggccccgcgcgcagcccggcggcgcaggtaaggccggccgcgccatggtggacccggtgggcttcgcggaggcgtggaaggcgcagttcccggactcagagcccccgcgcatggagctgcgctcagtgggcgacatcgagcaggagctggagcgctgcaaggcctccattcggcgcctggagcaggaggtgaaccaggagcgcttccgcatgatctacctgcagacgttgctggccaaggaaaagaagagctatgaccggcagcgatggggcttccggcgcgcggcgcaggcccccgacggcgcctccgagccccgagcgtccgcgtcgcgcccgcagccagcgcccgccgacggagccgacccgccgcccgccgaggagcccgaggcccggcccgacggcgagggttctccgggtaaggccaggcccgggaccgcccgcaggcccggggcagccgcgtcgggggaacgggacgaccggggaccccccgccagcgtggcggcgctcaggtccaacttcgagcggatccgcaagggccatggccagcccggggcggacgccgagaagcccttctacgtgaacgtcgagtttcaccacgagcgcggcctggtgaaggtcaacgacaaagaggtgtcggaccgcatcagctccctgggcagccaggccatgcagatggagcgcaaaaagtcccagcacggcgcgggctcgagcgtgggggatgcatccaggcccccttaccggggacgctcctcggagagcagctgcggcgtcgacggcgactacgaggacgccgagttgaacccccgcttcctgaaggacaacctgatcgacgccaatggcggtagcaggcccccttggccgcccctggagtaccagccctaccagagcatctacgtcgggggcatgatggaaggggagggcaagggcccgctcctgcgcagccagagcacctctgagcaggagaagcgccttacctggccccgcaggtcctactccccccggagttttgaggattgcggaggcggctataccccggactgcagctccaatgagaacctcacctccagcgaggaggacttctcctctggccagtccagccgcgtgtccccaagccccaccacctaccgcatgttccgggacaaaagccgctctccctcgcagaactcgcaacagtccttcgacagcagcagtccccccacgccgcagtgccataagcggcaccggcactgcccggttgtcgtgtccgaggccaccatcgtgggcgtccgcaagaccgggcagatctggcccaacgatggcgagggcgccttccatggagacgcagatggctcgttcggaacaccacctggatacggctgcgctgcagaccgggcagaggagcagcgccggcaccaagatgggctgccctacattgatgactcgccctcctcatcgccccacctcagcagcaagggcaggggcagccgggatgcgctggtctcgggagccctggagtccactaaagcgagtgagctggacttggaaaagggcttggagatgagaaaatgggtcctgtcgggaatcctggctagcgaggagacttacctgagccacctggaggcactgctgctgcccatgaagcctttgaaagccgctgccaccacctctcagccggtgctgacgagtcagcagatcgagaccatcttcttcaaagtgcctgagctctacgagatccacaaggagttctatgatgggctcttcccccgcgtgcagcagtggagccaccagcagcgggtgggcgacctcttccagaagctggccagccagctgggtgtgtaccgggccttcgtggacaactacggagttgccatggaaatggctgagaagtgctgtcaggccaatgctcagtttgcagaaatctccgagaacctgagagccagaagcaacaaagatgccaaggatccaacgaccaagaactctctggaaactctgctctacaagcctgtggaccgtgtgacgaggagcacgctggtcctccatgacttgctgaagcacactcctgccagccaccctgaccaccccttgctgcaggacgccctccgcatctcacagaacttcctgtccagcatcaatgaggagatcacaccccgacggcagtccatgacggtgaagaagggagagcaccggcagctgctgaaggacagcttcatggtggagctggtggagggggcccgcaagctgcgccacgtcttcctgttcaccgacctgcttctctgcaccaagctcaagaagcagagcggaggcaaaacgcagcagtatgactgcaaatggtacattccgctcacggatctcagcttccagatggtggatgaactggaggcagtgcccaacatccccctggtgcccgatgaggagctggacgctttgaagatcaagatctcccagatcaagaatgacatccagagagagaagagggcgaacaagggcagcaaggctacggagaggctgaagaagaagctgtcggagcaggagtcactgctgctgcttatgtctcccagcatggccttcagggtgcacagccgcaacggcaagagttacacgttcctgatctcctctgactatgagcgtgcagagtggagggagaacatccgggagcagcagaagaagtgtttcagaagcttctccctgacatccgtggagctgcagatgctgaccaactcgtgtgtgaaactccagactgtccacagcattccgctgaccatcaataaggaagatgatgagtctccggggctctatgggtttctgaatgtcatcgtccactcagccactggatttaagcagagttcaaatctgtactgcaccctggaggtggattcctttgggtattttgtgaataaagcaaagacgcgcgtctacagggacacagctgagccaaactggaacgaggaatttgagatagagctggagggctcccagaccctgaggatactgtgctatgaaaagtgttacaacaagacgaagatccccaaggaggacggcgagagcacggacagactcatggggaagggccaggtccagctggacccgcaggccctgcaggacagagactggcagcgcaccgtcatcgccatgaatgggatcgaagtaaagctctcggtcaagttcaacagcagggagttcagcttgaagaggatgccgtcccgaaaacagacaggggtcttcggagtcaagattgctgtggtcaccaagagagagaggtccaaggtgccctacatcgtgcgccagtgcgtggaggagatcgagcgccgaggcatggaggaggtgggcatctaccgcgtgtccggtgtggccacggacatccaggcactgaaggcagccttcgacgtcaataacaaggacgtgtcggtgatgatgagcgagatggacgtgaacgccatcgcaggcacgctgaagctgtacttccgtgagctgcccgagcccctcttcactgacgagttctaccccaacttcgcagagggcatcgctctttcagacccggttgcaaaggagagctgcatgctcaacctgctgctgtccctgccggaggccaacctgctcaccttccttttccttctggaccacctgaaaagggtggcagagaaggaggcagtcaataagatgtccctgcacaacctcgccacggtctttggccccacgctgctccggccctccgagaaggagagcaagctccctgccaaccccagccagcctatcaccatgactgacagctggtccttggaggtcatgtcccaggtccaggtgctgctgtacttcctgcagctggaggccatccctgccccggacagcaagagacagagcatcctgttctccaccgaagtctaaaggtcccagtccatctcctggaggcggacagatggcctggaaacctctggctaatcgggccatccgtagagcgggaaccttcctgaggtgtccttgggccacccccaagtgttgggccatctgccaagagacagcgacccaaagccgaaggacaggtggcctggaaagatcccgcccaggtctgggagccccaggctggcctcagactgtggttttttatgtggccacctgagggcgccccaagccagttcatctcggagtccaggcctggccctgggagacagggtgaagggagtggtttttatgaacttaacttagagtctaaaagatttctactggatcacttgtcaagatgcgccctctctggggagaagggaacgtgactggattccctcactgttgtatcttgaataaacgctgctgcttcatcctgtgggggccgtggccctgtccctgtgtgggtggggcctcttccatttccctgacttagaaaccacactccacttctaacagggtttgagaggcttagtcagcactgggtagcgttttgactccattcttggctttctttttctttccagaaggatttttgtgcagaaatgggtcttttgttgccatgttagtcctccttggaaggcagctcagaaggcctgtgaaatgtcaggggacaggacccccagggagggaaccccaggctacgcactttagggttcgttctccagggagagcgacctcgtcccccgatcctgaccgcccttccggcccacgctctcctgtttggcttccacaggcctggacttctctggcttctctgcccacacactccctgcccccagtgtccctgcccctgccccagcacaggtgacttcatttctgtcctctcagctcagtggactcgctcaacttttgtataagtctccacttggtggcagcagcttgctgatgacttgttttaaaactttcatcctaaataaccttttgatacttgaatatttgtaagttttatacatagtttctaatttttttccgaacagatccagatacctaataagatgctggaatgtaatccctggacaatccgtgtcctggcagcatttggtcttcctctaagcgcctggctccgctgttctcaggagtgggttctgaagtctctggagaacaggatacgtggagggttaggaaggggccaggcctagagacgggagactccctcccggagcaggtggaggcacaggaccattcgctaccccatctgccgacacctgcgggggagcccaggcattctttgtaaaccctcctgaccacctggctcaaagaaaacagaagcatggagaccgccaagtattttcaagaaataaccccatgaatattccatcacttttttagaaagaggggcttggggcaggcagaggagagaagggagagcaaactgagagccaagtttccacacggtcctgcaggaggagaggatgcagctgcccagagggaagcaggatcacatttaaggaagtgtgtggggtccctggatgacaccagcacccagtgcggctctgtctggcacccgctcccaaggtgggaggagtgggtgtcccctgtgtgtcagtgggcagctcctgctgaacccgcagctcactagggagcctgacagtggggccatgcgcctgacactcctctctgcttgtggacctggcaaggcagggagcagaaaacagccacttgaaggctttctgtctgcgtctgtgtgcagtgtggatttagttgtgcttttttcttgctgggagagcacagccaccatttacaagcagtgtcaccgtcgtgggtggcgaggacagaacaggagcctctgctctctgtacctatctgggcccggtgggctcccttgtcctggcttccatctctgtctcagcgaccattcagccctgcgcaggaacacgtgttgcttagaaaagccaaatccagccttgtctctgcctcctctggtctcatgatgtgcatctgttaccttgaaactggaaaccagtctatcaatgtctgtgccaattttttattccctccccaacctccttccccatacgactttttatttatgtaggatgtgtgctgtctaatgatgggatgaccacacttttccatgttctaaaagtgctcctctcccgcagggtcccagggctggtggttgctttgggtctacagctacgtcttacccacctcctgcctcaacagcctgtgtggtggcaaagccggtgtggggctggggaacgcagcgttctccaggagggggacctggctctccttctgcaatgcaggcgaaggcctagatgccagtgtgacctcccacaaggcgtggcttccagactccccggccggaagtgatgcttttttgccttgggccctgggtttgaagcagcctggctttctcttggtaagtggctggtgtcttagcagctgcaatctgagctcagccacctacacaccaccgtggccgacactttcattaaaaagtttcctgagacga

SEQ ID NO: 151 - DNA, 6795 bp, Homo sapiens
ggggggagggtggcggctcgatgggggagccgcctccagggggcccccccgccctgtgcccacggcgcggcccctttaagaggcccgcctggctccgtcatccgcgccgcggccacctccccccggccctccccttcctgcggcgcagagtgcgggccgggcgggagtgcggcgagagccggctggctgagcttagcgtccgaggaggcggcggcggcggcggcggcacggcggcggcggggctgtggggcggtgcggaagcgagaggcgaggagcgcgcgggccgtggccagagtctggcggcggcctggcggagcggagagcagcgcccgcgcctcgccgtgcggaggagccccgcacacaatagcggcgcgcgcagcccgcgcccttccccccggcgcgccccgccccgcgcgccgagcgccccgctccgcctcacctgccaccagggagtgggcgggcattgttcgccgccgccgccgccgcgcgggccatgggggccgcccggcgcccggggccgggctggcgaggcgccgcgccgccgctgagacgggccccgcgcgcagcccggcggcgcaggtaaggccggccgcgccatggtggacccggtgggcttcgcggaggcgtggaaggcgcagttcccggactcagagcccccgcgcatggagctgcgctcagtgggcgacatcgagcaggagctggagcgctgcaaggcctccattcggcgcctggagcaggaggtgaaccaggagcgcttccgcatgatctacctgcagacgttgctggccaaggaaaagaagagctatgaccggcagcgatggggcttccggcgcgcggcgcaggcccccgacggcgcctccgagccccgagcgtccgcgtcgcgcccgcagccagcgcccgccgacggagccgacccgccgcccgccgaggagcccgaggcccggcccgacggcgagggttctccgggtaaggccaggcccgggaccgcccgcaggcccggggcagccgcgtcgggggaacgggacgaccggggaccccccgccagcgtggcggcgctcaggtccaacttcgagcggatccgcaagggccatggccagcccggggcggacgccgagaagcccttctacgtgaacgtcgagtttcaccacgagcgcggcctggtgaaggtcaacgacaaagaggtgtcggaccgcatcagctccctgggcagccaggccatgcagatggagcgcaaaaagtcccagcacggcgcgggctcgagcgtgggggatgcatccaggcccccttaccggggacgctcctcggagagcagctgcggcgtcgacggcgactacgaggacgccgagttgaacccccgcttcctgaaggacaacctgatcgacgccaatggcggtagcaggcccccttggccgcccctggagtaccagccctaccagagcatctacgtcgggggcatgatggaaggggagggcaagggcccgctcctgcgcagccagagcacctctgagcaggagaagcgccttacctggccccgcaggtcctactccccccggagttttgaggattgcggaggcggctataccccggactgcagctccaatgagaacctcacctccagcgaggaggacttctcctctggccagtccagccgcgtgtccccaagccccaccacctaccgcatgttccgggacaaaagccgctctccctcgcagaactcgcaacagtccttcgacagcagcagtccccccacgccgcagtgccataagcggcaccggcactgcccggttgtcgtgtccgaggccaccatcgtgggcgtccgcaagaccgggcagatctggcccaacgatggcgagggcgccttccatggagacgcagatggctcgttcggaacaccacctggatacggctgcgctgcagaccgggcagaggagcagcgccggcaccaagatgggctgccctacattgatgactcgccctcctcatcgccccacctcagcagcaagggcaggggcagccgggatgcgctggtctcgggagccctggagtccactaaagcgagtgagctggacttggaaaagggcttggagatgagaaaatgggtcctgtcgggaatcctggctagcgaggagacttacctgagccacctggaggcactgctgctgcccatgaagcctttgaaagccgctgccaccacctctcagccggtgctgacgagtcagcagatcgagaccatcttcttcaaagtgcctgagctctacgagatccacaaggagttctatgatgggctcttcccccgcgtgcagcagtggagccaccagcagcgggtgggcgacctcttccagaagctggccagccagctgggtgtgtaccgggccttcgtggacaactacggagttgccatggaaatggctgagaagtgctgtcaggccaatgctcagtttgcagaaatctccgagaacctgagagccagaagcaacaaagatgccaaggatccaacgaccaagaactctctggaaactctgctctacaagcctgtggaccgtgtgacgaggagcacgctggtcctccatgacttgctgaagcacactcctgccagccaccctgaccaccccttgctgcaggacgccctccgcatctcacagaacttcctgtccagcatcaatgaggagatcacaccccgacggcagtccatgacggtgaagaagggagagcaccggcagctgctgaaggacagcttcatggtggagctggtggagggggcccgcaagctgcgccacgtcttcctgttcaccgacctgcttctctgcaccaagctcaagaagcagagcggaggcaaaacgcagcagtatgactgcaaatggtacattccgctcacggatctcagcttccagatggtggatgaactggaggcagtgcccaacatccccctggtgcccgatgaggagctggacgctttgaagatcaagatctcccagatcaagaatgacatccagagagagaagagggcgaacaagggcagcaaggctacggagaggctgaagaagaagctgtcggagcaggagtcactgctgctgcttatgtctcccagcatggccttcagggtgcacagccgcaacggcaagagttacacgttcctgatctcctctgactatgagcgtgcagagtggagggagaacatccgggagcagcagaagaagtgtttcagaagcttctccctgacatccgtggagctgcagatgctgaccaactcgtgtgtgaaactccagactgtccacagcattccgctgaccatcaataaggaagatgatgagtctccggggctctatgggtttctgaatgtcatcgtccactcagccactggatttaagcagagttcaaatctgtactgcaccctggaggtggattcctttgggtattttgtgaataaagcaaagacgcgcgtctacagggacacagctgagccaaactggaacgagctggacccgcaggccctgcaggacagagactggcagcgcaccgtcatcgccatgaatgggatcgaagtaaagctctcggtcaagttcaacagcagggagttcagcttgaagaggatgccgtcccgaaaacagacaggggtcttcggagtcaagattgctgtggtcaccaagagagagaggtccaaggtgccctacatcgtgcgccagtgcgtggaggagatcgagcgccgaggcatggaggaggtgggcatctaccgcgtgtccggtgtggccacggacatccaggcactgaaggcagccttcgacgtcaataacaaggacgtgtcggtgatgatgagcgagatggacgtgaacgccatcgcaggcacgctgaagctgtacttccgtgagctgcccgagcccctcttcactgacgagttctaccccaacttcgcagagggcatcgctctttcagacccggttgcaaaggagagctgcatgctcaacctgctgctgtccctgccggaggccaacctgctcaccttccttttccttctggaccacctgaaaagggtggcagagaaggaggcagtcaataagatgtccctgcacaacctcgccacggtctttggccccacgctgctccggccctccgagaaggagagcaagctccctgccaaccccagccagcctatcaccatgactgacagctggtccttggaggtcatgtcccaggtccaggtgctgctgtacttcctgcagctggaggccatccctgccccggacagcaagagacagagcatcctgttctccaccgaagtctaaaggtcccagtccatctcctggaggcggacagatggcctggaaacctctggctaatcgggccatccgtagagcgggaaccttcctgaggtgtccttgggccacccccaagtgttgggccatctgccaagagacagcgacccaaagccgaaggacaggtggcctggaaagatcccgcccaggtctgggagccccaggctggcctcagactgtggttttttatgtggccacctgagggcgccccaagccagttcatctcggagtccaggcctggccctgggagacagggtgaagggagtggtttttatgaacttaacttagagtctaaaagatttctactggatcacttgtcaagatgcgccctctctggggagaagggaacgtgactggattccctcactgttgtatcttgaataaacgctgctgcttcatcctgtgggggccgtggccctgtccctgtgtgggtggggcctcttccatttccctgacttagaaaccacactccacttctaacagggtttgagaggcttagtcagcactgggtagcgttttgactccattcttggctttctttttctttccagaaggatttttgtgcagaaatgggtcttttgttgccatgttagtcctccttggaaggcagctcagaaggcctgtgaaatgtcaggggacaggacccccagggagggaaccccaggctacgcactttagggttcgttctccagggagagcgacctcgtcccccgatcctgaccgcccttccggcccacgctctcctgtttggcttccacaggcctggacttctctggcttctctgcccacacactccctgcccccagtgtccctgcccctgccccagcacaggtgacttcatttctgtcctctcagctcagtggactcgctcaacttttgtataagtctccacttggtggcagcagcttgctgatgacttgttttaaaactttcatcctaaataaccttttgatacttgaatatttgtaagttttatacatagtttctaatttttttccgaacagatccagatacctaataagatgctggaatgtaatccctggacaatccgtgtcctggcagcatttggtcttcctctaagcgcctggctccgctgttctcaggagtgggttctgaagtctctggagaacaggatacgtggagggttaggaaggggccaggcctagagacgggagactccctcccggagcaggtggaggcacaggaccattcgctaccccatctgccgacacctgcgggggagcccaggcattctttgtaaaccctcctgaccacctggctcaaagaaaacagaagcatggagaccgccaagtattttcaagaaataaccccatgaatattccatcacttttttagaaagaggggcttggggcaggcagaggagagaagggagagcaaactgagagccaagtttccacacggtcctgcaggaggagaggatgcagctgcccagagggaagcaggatcacatttaaggaagtgtgtggggtccctggatgacaccagcacccagtgcggctctgtctggcacccgctcccaaggtgggaggagtgggtgtcccctgtgtgtcagtgggcagctcctgctgaacccgcagctcactagggagcctgacagtggggccatgcgcctgacactcctctctgcttgtggacctggcaaggcagggagcagaaaacagccacttgaaggctttctgtctgcgtctgtgtgcagtgtggatttagttgtgcttttttcttgctgggagagcacagccaccatttacaagcagtgtcaccgtcgtgggtggcgaggacagaacaggagcctctgctctctgtacctatctgggcccggtgggctcccttgtcctggcttccatctctgtctcagcgaccattcagccctgcgcaggaacacgtgttgcttagaaaagccaaatccagccttgtctctgcctcctctggtctcatgatgtgcatctgttaccttgaaactggaaaccagtctatcaatgtctgtgccaattttttattccctccccaacctccttccccatacgactttttatttatgtaggatgtgtgctgtctaatgatgggatgaccacacttttccatgttctaaaagtgctcctctcccgcagggtcccagggctggtggttgctttgggtctacagctacgtcttacccacctcctgcctcaacagcctgtgtggtggcaaagccggtgtggggctggggaacgcagcgttctccaggagggggacctggctctccttctgcaatgcaggcgaaggcctagatgccagtgtgacctcccacaaggcgtggcttccagactccccggccggaagtgatgcttttttgccttgggccctgggtttgaagcagcctggctttctcttggtaagtggctggtgtcttagcagctgcaatctgagctcagccacctacacaccaccgtggccgacactttcattaaaaagtttcctgagacga

SEQ ID NO: 152 - DNA, 4197 bp, Homo sapiens
atcactacccagcccttgaaagatgagctgttcccgccgccactccagctctggcttctgggctccgaggaggggtggggacggtggggacggtggggacatcaggctgccccgcagtaccagggagcgactgaagtgcccatgccgcttgctccggagaaggtgtggcctcactcacatcccactctgagtccaaatgttctctccctggaagatatcaatgtttctgtctgttcgtgaggactccgtgcccaccacggcctctttcagcgccgacatgctcaatgtcaccttgcaagggcccactcttaacgggacctttgcccagagcaaatgcccccaagtggagtggctgggctggctcaacaccatccagccccccttcctctgggtgctgttcgtgctggccaccctagagaacatctttgtcctcagcgtcttctgcctgcacaagagcagctgcacggtggcagagatctacctggggaacctggccgcagcagacctgatcctggcctgcgggctgcccttctgggccatcaccatctccaacaacttcgactggctctttggggagacgctctgccgcgtggtgaatgccattatctccatgaacctgtacagcagcatctgtttcctgatgctggtgagcatcgaccgctacctggccctggtgaaaaccatgtccatgggccggatgcgcggcgtgcgctgggccaagctctacagcttggtgatctgggggtgtacgctgctcctgagctcacccatgctggtgttccggaccatgaaggagtacagcgatgagggccacaacgtcaccgcttgtgtcatcagctacccatccctcatctgggaagtgttcaccaacatgctcctgaatgtcgtgggcttcctgctgcccctgagtgtcatcaccttctgcacgatgcagatcatgcaggtgctgcggaacaacgagatgcagaagttcaaggagatccagacagagaggagggccacggtgctagtcctggttgtgctgctgctattcatcatctgctggctgcccttccagatcagcaccttcctggatacgctgcatcgcctcggcatcctctccagctgccaggacgagcgcatcatcgatgtaatcacacagatcgcctccttcatggcctacagcaacagctgcctcaacccactggtgtacgtgatcgtgggcaagcgcttccgaaagaagtcttgggaggtgtaccagggagtgtgccagaaagggggctgcaggtcagaacccattcagatggagaactccatgggcacactgcggacctccatctccgtggaacgccagattcacaaactgcaggactgggcagggagcagacagtgagcaaacgccagcagggctgctgtgaatttgtgtaaggattgagggacagttgcttttcagcatgggcccaggaatgccaaggagacatctatgcacgaccttgggaaatgagttgatgtctccggtaaaacaccggagactaattcctgccctgcccaattttgcagggagcatggctgtgaggatggggtgaactcacgcacagccaaggactccaaaatcacaacagcattactgttcttatttgctgccacacctgagccagcctgctccttcccaggagtggaggaggcctgggggcagggagaggagtgactgagcttccctcccgtgtgttctccgtccctgccccagcaagacaacttagatctccaggagaactgccatccagctttggtgcaatggctgagtgcacaagtgagttgttgccctgggtttctttaatctattcagctagaactttgaaggacaatttcttgcattaataaaggttaagccctgaggggtccctgataacaacctggagaccaggattttatggctcccctcactgatggacaaggaggtctgtgccaaagaagaatccaataagcacatattgagcacttgctgtatatgcagtattgagcactgtaggcaagagggaagaaagagaaggagccatctccatcttgaaggaactcaaagactcaagtgggaacgactgggcactgccaccaccagaaagctgttcgacgagacggtcgagcagggtgctgtgggtgatatggacagcagaagggggagaccaaggttccagctcaaccaataactattgcacaaccatctgtccctgcctcagttccctcttctgtaacatgaagtcgttgtgagggttaaaggcagtaacaggtataaagtacttagaaaagcaaagggtgctacgtacatgtgaggcatcattacgcagacgtaactgggatatgtttactataaggaaaagacactgaggtctagaaatagctccgtggagcagaatcagtattgggagccggtggcggtgtgaagcaccagtgtctggcacacagtaggtgctcattggctcccttccacctgtcattcccaccaccctgaggccccaaccgccacacacacaggagcatttggagagaaggccatgtcttcaaagtctgatttgtgatgaggcagaggaagatatttctaatcggtcttgcccagaggatcacagtgctgagaccccccaccaccagccggtacctgggaagggggagagtgcaggcctgctcagggactgttcctgtctcagcaaccaagggattgttcctgtcaatcaatggtttattggaaggtggcccagtatgagccctagaagagtgtgaaaaggaatggcaatggtgttcaccatcggcagtgccagggcagcactcattcacttgataaatgaatatttattagctggttggagagctagaacctggagagctagaacctggagaactagaacctggagggctagaactggagaggctagaaccaagaagggctagaacctggaggggctagaacctagagaagctaaaacctgagctagaagctggaggactagaacctggagggctggaatctggagagctagaacctggagggctagaacctggagggctagaatctggagagctagaacctggagggctagaatctggagagctagaacctggagggctagaacctggagagctagaacctagaagggctagaacctggagggctggaatctggagagctagaacctggagggctagaacctggagggctagaacctagaagggctagaacctggagggctggaatctggagagctagaacctggagggctagaacctggagggctagaacctagaagggctagaacctggagggctagaacctggcaggttagaacctagaagggctagaacctggagagccagaacctggagggctagaacctggaagggctagaacctgtagagctagaacatggagagctagaacccggcaggctagaacctggcaagctagaacctggagggaatgaacctggagggctagaacctggagaatgagaaaaatttacatggcaaagagcccataaatcctgaccaatccaactctgaattttaaagcaaaagcgtcaaaaaaaagattccctccttacccccaacccactcttttttcccaccacccactctcctctgcctcagtaagtatctggaggaagaaaacaggtgaaagaagaagtaaaaaccatttagtattagtattagaatgaagtcaaactgtgccacacatggtgaatgaaaaaaaaaaaaagaggctgtgttttgtcacacagggcagtcattcagcaccagagcacgtgatggtctgagactctcttaggagcagagctctgccgcaatggccatgtggggatccacacctggtctgaggggcaactgagtctgcgggagaagagcggccctatgcatggtgtagatgccctgataaagaacatctgtcctgtgaaagactcaatgagctgttatgttgtaaacaggaagcatttcacatccaaacgagaaaatcatgtaaacatgtgtcttttctgtagagcataataaatggatgaggtttttgcatagctctagcatttgttacaactcccgaaacccccgagtttggtccctggggtaccgccttgcacactcagaagcctttgggaaggggtgctattcatttctgctcaatctgttaacaggcttctggcatgtagatcagtggtctccaagcttttgtgattgtat

SEQ ID NO: 153 - DNA, 2574 bp, Homo sapiens
ttggatgttccgggaaagtgatgtgggtaggacaggcggggcgagccgcaggtgccagaacacagattgtataaaaggctgggggctggtggggagcaggggaagggaatgtgaccaggtctaggtctggagtttcagcttggacactgagccaagcagacaagcaaagcaagccaggacacaccatcctgccccaggcccagcttctctcctgccttccaacgccatggggagcaatctcagcccccaactctgcctgatgccctttatcttgggcctcttgtctggaggtgtgaccaccactccatggtctttggcccggccccagggatcctgctctctggagggggtagagatcaaaggcggctccttccgacttctccaagagggccaggcactggagtacgtgtgtccttctggcttctacccgtaccctgtgcagacacgtacctgcagatctacggggtcctggagcaccctgaagactcaagaccaaaagactgtcaggaaggcagagtgcagagcaatccactgtccaagaccacacgacttcgagaacggggaatactggccccggtctccctactacaatgtgagtgatgagatctctttccactgctatgacggttacactctccggggctctgccaatcgcacctgccaagtgaatggccgatggagtgggcagacagcgatctgtgacaacggagcggggtactgctccaacccgggcatccccattggcacaaggaaggtgggcagccagtaccgccttgaagacagcgtcacctaccactgcagccgggggcttaccctgcgtggctcccagcggcgaacgtgtcaggaaggtggctcttggagcgggacggagccttcctgccaagactccttcatgtacgacacccctcaagaggtggccgaagctttcctgtcttccctgacagagaccatagaaggagtcgatgctgaggatgggcacggcccaggggaacaacagaagcggaagatcgtcctggacccttcaggctccatgaacatctacctggtgctagatggatcagacagcattggggccagcaacttcacaggagccaaaaagtgtctagtcaacttaattgagaaggtggcaagttatggtgtgaagccaagatatggtctagtgacatatgccacataccccaaaatttgggtcaaagtgtctgaagcagacagcagtaatgcagactgggtcacgaagcagctcaatgaaatcaattatgaagaccacaagttgaagtcagggactaacaccaagaaggccctccaggcagtgtacagcatgatgagctggccagatgacgtccctcctgaaggctggaaccgcacccgccatgtcatcatcctcatgactgatggattgcacaacatgggcggggacccaattactgtcattgatgagatccgggacttgctatacattggcaaggatcgcaaaaacccaagggaggattatctggatgtctatgtgtttggggtcgggcctttggtgaaccaagtgaacatcaatgctttggcttccaagaaagacaatgagcaacatgtgttcaaagtcaaggatatggaaaacctggaagatgttttctaccaaatgatcgatgaaagccagtctctgagtctctgtggcatggtttgggaacacaggaagggtaccgattaccacaagcaaccatggcaggccaagatctcagtcattcgcccttcaaagggacacgagagctgtatgggggctgtggtgtctgagtactttgtgctgacagcagcacattgtttcactgtggatgacaaggaacactcaatcaaggtcagcgtaggaggggagaagcgggacctggagatagaagtagtcctatttcaccccaactacaacattaatgggaaaaaagaagcaggaattcctgaattttatgactatgacgttgccctgatcaagctcaagaataagctgaaatatggccagactatcaggcccatttgtctcccctgcaccgagggaacaactcgagctttgaggcttcctccaactaccacttgccagcaacaaaaggaagagctgctccctgcacaggatatcaaagctctgtttgtgtctgaggaggagaaaaagctgactcggaaggaggtctacatcaagaatggggataagaaaggcagctgtgagagagatgctcaatatgccccaggctatgacaaagtcaaggacatctcagaggtggtcacccctcggttcctttgtactggaggagtgagtccctatgctgaccccaatacttgcagaggtgattctggcggccccttgatagttcacaagagaagtcgtttcattcaagttggtgtaatcagctggggagtagtggatgtctgcaaaaaccagaagcggcaaaagcaggtacctgctcacgcccgagactttcacatcaacctctttcaagtgctgccctggctgaaggagaaactccaagatgaggatttgggttttctataaggggtttcctgctggacaggggcgtgggattgaattaaaacagctgcgacaac

SEQ ID NO: 154 - DNA, 2531 bp, Homo sapiens
cgaagcctctccctcttcctctgctcccgcggggtctgtgctgagaataatggcccggttggcccgggacgagtggaatgattaatgatgttttgcagcagttttctacgtctgaaattttttatgtctctggaacccagaatttgctaagagatggaggaacctcagaaaagctatgtgaacacaatggaccttgagagagatgaacctctcaaaagcaccggccctcagatttctgttagtgaattttcttgccactgctgctacgacatcctggttaaccccaccaccttgaactgtgggcacagcttctgccgtcactgccttgctttatggtgggcatcttcaaagaaaacagaatgtccagaatgcagagaaaaatgggaaggtttccccaaagtcagtattctcctcagggatgccattgaaaagttatttcctgatgccattagactgagatttgaagacattcagcagaataatgacatagtccaaagtcttgcagcctttcagaaatatgggaatgatcagattcctttagctcctaacacaggccgagcgaatcagcagatgggagggggattcttttccggtgtgctcacagctttaactggagtggcagtggtcctgctcgtctatcactggagcagcagggaatctgaacacgacctcctggtccacaaggctgtggccaaatggacggcggaagaagttgtcctctggctggagcagctgggcccttgggcatctctttacagggaaaggtttttatctgaacgagtaaatggaaggttgcttttaactttgacagaggaagaattttccaagacgccctataccatagaaaacagcagccacaggagagccatcctcatggagctagaacgtgtcaaagcattaggcgtgaagcccccccagaatctctgggaatataaggctgtgaacccaggcaggtccctgttcctgctatacgccctcaagagctcccccaggctgagtctgctctacctgtacctgtttgactacaccgacaccttcctacctttcatccacaccatctgccctctgcaagaagacagctctggggaggacatcgtcaccaagcttctggatcttaaggagcctacgtggaagcagtggagagagttcctggtcaaatactccttccttccataccagctgattgctgagtttgcttgggactggttggaggtccattactggacatcacggtttctcatcatcaatgctatgttactctcagttctggaattattctccttttggagaatctggtcgagaagtgaactgaagaccgtgcctcagaggatgtggagccatttctggaaagtatcaacgcagggactttttgtggccatgttctggcccctcatccctcagtttgtttgcaactgtttgttttactgggccctgtactttaacccaattattaacattgatcttgtggtcaaggaactccggcggctggaaacccaggtgttgtgactggcactgcccaggctgagactcttcaagtcccgctgacgtctgagctttgatgcttaagaagggtgaggcagggagcggacttcttattttcaaccttcagtaaaacaaggtgttgctttgtatatcaaaagctccaaccatgtcttttccccttcagcctgtgggtggcacgagcaaggactgacatccgcacagggaggattgtctgtttggctgacacagcagcagcctttcccacccagccactttcttcacagggattaggaggctcagtccccaacggctggcaagactcagggtcctcagtggacatggtgtgggtgacatcagaagggtgccacatcagtcccctccccaacctcagtgactgacagaggatccggatctcagagcctgagaccaggtttattggggcctggcctgtcctctaagtcaagtttaggaaaacaaggataagattctgtcataggcatagagagttgcacataaaaaataccgaagaaaacccaaaattcaatcaacaattctgtcttattgaagagttgctaggattcagagtaaaactcaaaggattcagtttgagcctagaatgatggttagacttgtagtcactgggcttttgttttgctttatggaaatcattgaaggtctggatccctttctctgaatggagagattgagagggatgtcgggcagttcccattagatttagtggccttcatgttattcagaattgttttggtgatacctcacccctgtaatcccagcactttgggtgggtgaggcaggcggatcacttgaagccaggacttcaagaccagcttggccaacatggtgaaacctcatctctactaaaaatacaaaaattagccaagtgtgatggcacatacctgtaatcccagctacttggaattggaaatcgcctgaacccaggaggcggaggttgcagggagggagactgcaccactgcacttcagcctgggtgacagagggagactctgtcttaaaaaaaaaaaaaaaaa

SEQ ID NO: 155 - DNA, 2401 bp, Homo sapiens
agcctcccgcccgccgcctctgtctccctctctccacaaactgcccaggagtgagtagctgctttcggtccgccggacacaccggacagatagacgtgcggacggcccaccaccccagcccgccaactagtcagcctgcgcctggcgcctcccctctccaggtccatccgccatgtggcccctgtggcgcctcgtgtctctgctggccctgagccaggccctgccctttgagcagagaggcttctgggacttcaccctggacgatgggccattcatgatgaacgatgaggaagcttcgggcgctgacacctcgggcgtcctggacccggactctgtcacacccacctacagcgccatgtgtcctttcggctgccactgccacctgcgggtggttcagtgctccgacctgggtctgaagtctgtgcccaaagagatctcccctgacaccacgctgctggacctgcagaacaacgacatctccgagctccgcaaggatgacttcaagggtctccagcacctctacgccctcgtcctggtgaacaacaagatctccaagatccatgagaaggccttcagcccactgcggaagctgcagaagctctacatctccaagaaccacctggtggagatcccgcccaacctacccagctccctggtggagctccgcatccacgacaaccgcatccgcaaggtgcccaagggagtgttcagcgggctccggaacatgaactgcatcgagatgggcgggaacccactggagaacagtggctttgaacctggagccttcgatggcctgaagctcaactacctgcgcatctcagaggccaagctgactggcatccccaaagacctccctgagaccctgaatgaactccacctagaccacaacaaaatccaggccatcgaactggaggacctgcttcgctactccaagctgtacaggctgggcctaggccacaaccagatcaggatgatcgagaacgggagcctgagcttcctgcccaccctccgggagctccacttggacaacaacaagttggccagggtgccctcagggctcccagacctcaagctcctccaggtggtctatctgcactccaacaacatcaccaaagtgggtgtcaacgacttctgtcccatgggcttcggggtgaagcgggcctactacaacggcatcagcctcttcaacaaccccgtgccctactgggaggtgcagccggccactttccgctgcgtcactgaccgcctggccatccagtttggcaactacaaaaagtagaggcagctgcagccaccgcggggcctcagtgggggtctctggggaacacagccagacatcctgatggggaggcagagccaggaagctaagccagggcccagctgcgtccaacccagccccccacctcgggtccctgaccccagctcgatgccccatcaccgcctctccctggctcccaagggtgcaggtgggcgcaaggcccggcccccatcacatgttcccttggcctcagagctgcccctgctctcccaccacagccacccagaggcaccccatgaagcttttttctcgttcactcccaaacccaagtgtccaaggctccagtcctaggagaacagtccctgggtcagcagccaggaggcggtccataagaatggggacagtgggctctgccagggctgccgcacctgtccagacacacatgttctgttcctcctcctcatgcatttccagcctttcaaccctccccgactctgcggctcccctcagcccccttgcaagttcatggcctgtccctcccagacccctgctccactggcccttcgaccagtcctcccttctgttctctctttccccgtccttcctctctctctctctctctctctctctctctttctgtgtgtgtgtgtgtgtgtgtgtgtgtgtgtgtgtgtgtgtgtgtcttgtgcttcctcagacctttctcgcttctgagcttggtggcctgttccctccatctctccgaacctggcttcgcctgtccctttcactccacaccctctggccttctgccttgagctgggactgctttctgtctgtccggcctgcacccagcccctgcccacaaaaccccagggacagcggtctccccagcctgccctgctcaggccttgcccccaaacctgtactgtcccggaggaggttgggaggtggaggcccagcatcccgcgcagatgacaccatcaaccgccagagtcccagacaccggttttcctagaagcccctcacccccactggcccactggtggctaggtctccccttatccttctggtccagcgcaaggaggggctgcttctgaggtcggtggctgtctttccattaaagaaacaccgtgcaacgtgaaaaaaaaaaaaaaaaaaaaa

SEQ ID NO: 156 - DNA, 2007 bp, Homo sapiens
ggcgcccacagagccgcggcaccatggcacctgctggacgcccgggggccaagaaggggattttggagcgcctggagagtggggaggttgtgattggagatggcagctttctcattactctggagaagagaggctatgtgaaggctgggctctggactccagaggcagtgatagaacacccagacgcagttcgtcaacttcacatggaattcttgagagcaggatcaaatgtcatgcagacttttaccttttctgccagtgaggacaatatggaaagcaagtgggaagatgtaaatgctgctgcctgtgacctcgccagggaagtggctggcaaaggtgatgctttggtagcaggggggatctgccagacatcaatatacaaataccagaaggatgaagctagaattaaaaaactttttcgacaacagctagaagtttttgcctggaaaaatgtggacttcttgattgcagagtattttgagcacgttgaagaagctgtgtgggctgtggaagtcttaaaagaatcagatagacccgtggcagttaccatgtgcataggcccagagggagacatgcatgatataacccccggagaatgtgctgtgaggctggtgaaggcaggggcttccatcgttggcgtgaactgccgctttgggcccgacaccagcttgaagacgatggagctcatgaaggagggtcttgagtgggcagggctgaaagcgcacctcatggtgcagcctctggggttccacgcgcctgactgtggcaaagaggggtttgtggatctcccagaatatccctttggactggagtccagagttgccaccagatgggatattcaaaaatacgccagagaggcctacaacctgggggtcaggtacattggcgggtgctgtggatttgagccctaccacatcagggcaattgcagaggagctggccccagaaaggggctttttgccaccagcttcagaaaaacacggcagctggggaagtggtttggacatgcacaccaaaccctggattagagcaagggctcgaagggagtattgggagaatctgctgccagcttcaggcagacctttctgtccttcgctgtcaaagccagacttctaaggagtagtgaaagaaaaccctgaaataatcgaacaggaaaaagttgccctcaagcctgacctggaaccgttcctcaccttcatcctcaccatgccctgctatctccagctgctgagcagctgaggtgctgcagccccttcccttccagcccacaagtgtgtgcatattgagctcctgctgtggttaagcactgcaacagactctaccagagatgcaaagagaagcgagagaggcaccttgttctccaagaacttactgtccaatcatgctgtggtgcattcctttgaagatcatgaagaatagccaaacttgtctttgagggtgaatttgacactttaaaataatcagaagtcactgagacccaaagctagtgaataattcaagtgactaagctagatacttgaggatgatagagcaacactaaactaaagcaatgagtctgctttttttaatgatttatacaatgactccaaaggcaatcccaaagaaaagatgtaaagaatgttttgagcaatggtagcattattgaaataaatgtttaactatccaaagtgattactttcaaagatgatttttacttaaagatattaggtctggccaggcgaagtgactcacacctgcaatcccagcactttgggaggccgaggcgggcggatcacctgaggtcagcagttcaagaccagcctgaccaacatggtgaaaccctgtctctaccaaaatacaaaaattagccgggcatgatggcgggtgcctgtaatcccagctactcgggaggctgaggcaggagaatcgcttgaacccaggaggcggagcttgcagtgagccgagatcaggccattgcacttcagcctgggtgacagagtgagactccatctcaaaaaaaaaaaaaaaa

SEQ ID NO: 157 - DNA, 1863 bp, Homo sapiens
gcttacgtcacttcctggagactggttgaatccggaagtgaccctagagaaacgagttgtggctgaggaccccggcggcagacgcaggttcgggaccatgagctggattccttttaagattgggcagcccaagaaacagattgtgcccaaaacagtggagagagactttgaaagggagtatggaaaacttcagcagctggaagagcagacccggaggctgcagaaagacatgaagaagagcaccgacgcagacctggccatgtcaaaatctgccgtgaagatatccttggacttactctccaatcccctctgtgagcaagaccaggaccttctgaacatggtgacggccctggacacggccatgaagcggatggatgccttcaatcaggaaaaggtgaaccagatccagaagactgtgatcgagcccttaaaaaagttcggcagtgtcttcccgagcctcaacatggctgtgaagaggcgggaacaggccttgcaggactacaggaggctgcaggccaaggtggagaagtatgaggaaaaggagaagacggggccagtgctggccaagctccaccaggcacgagaggagctgcggcctgtgcgggaggactttgaagccaagaacaggcagctgctggaggagatgccgcgcttctacggcagccgcctcgactacttccagcccagctttgagtccctcatccgagctcaggttgtgtactactcggaaatgcacaagatctttggagacctgtcccatcagcttgaccagccaggccactccgatgagcagcgggagcgggagaacgaggccaaactcagtgagctccgggccctctccattgtggccgatgactgaatccccgtcactcttggaggactcctgtgacgtggtcagcctcattcatccttgcccttctcagggctagctgctcctctcacaggctggggacagaggtggccctggttcacttgccggccctttgcaatgaatgactcttcctgagcctggcaccaggagccctaggcaggccgccgtctccccactcacagccccagcaggtaagcagtgtagacaaacccttggggcttttttatttggagaaccgtccagcatgcatcctggcccacggcctgagcaagctgcagcccttctgaggccatgggcttcgttggctaagttgggggtcttagccttgcatgcgttgtgggcatcaaatctacctccaaaagacccatcctggggagccctctggcccctcgttgccttttcacttcaaaacctcttttttctgggagaggccctgaaccctgtgcgggagagctggtcctccagccctggcaggccctcagccagcttcccagcaagacaaagggcacccttgtggctttgggacctaagtggttggggttcccgaggtcactgaggactggtacctcgggaacgcaagctgtcagtggaactgtcccacaagaattcacaggtctcaaagcaggaacagtgggtttgtgtctcacctgagtatctggaattttattttttcaagtaaaattttcaatgaaacgtccacatagtattgtgctgtaacttaggcgagcagaggaaaccccttcctgggcctgctgccctccacggagcagcagcaccctccagcaggcagcccagcatgccaggggtgtgtgcgcacctccccggccctggcccaccttctggagcgaactgcaccgtggtccagcagaggcgctgggtgggagggcacgcgggcaagcctaggagagtaggaagagctgtggaggacacactctcagtttgtttttgactttggtttatttaaaaaacaagccaaaaaaaaaaaaaaaaaa

SEQ ID NO: 158 - DNA, 2047 bp, Homo sapiens
ctacacacgtgtgtgtgcgcgtgtgtataaaacacagtgcactaatactcagcctttaaaaaaaatgccacttgcaacaacgtagatggagctggacgatatcatgctaaaattatgcaaagtgaaacaagcacaaaaaagaacgagacacgggcgtggggcacgaggtgctcactgcgcaagcgcccactccaccgcgtggtttccagctggaggctgggagcgttcgtggcttcctcttttcttgctgacccttcggagctctgggaagtggctgcaccttggcggctccccagagcgcgcggtgctaatcgtgggtcgtcagcctgggtggctgggcccggcttagggcagggtttggcatttccaatggtagggggctcggaccgtccctccgcgggaccctcccgttgggacaaggccgatcgcctgggcggttggagccgctatcctggcgcgagacggtggacaagtcctatattcaagagaagataactttgaacagtttcgaaggatctaaaacgtatgtgtctgcagacatcaatgaggatgaagaattagtagaagagattaatagatcaaaaacgtttgctggctttgcaggtggtgggcctgcctgggcatcggcgcgttggaggagacgccctggggggccttagctgccctgaagcggtagacaggtggcaacgtgggggctcaggagttgacaaacacaagaaagcagcgccgaattgcaggtttatccgcagcttttattttgaagacagtgccacgaaacctgcaaatcctggtgtcccaaatagtcaataccaagttgaaaaccatctgggagaggaaaagcgttgtgctttagacaggccgtctgagactcgtgcagaccggcttttgagagctggacaggtggtggatagatcagactccatacacccgaggagccccgccatgcatagtgaagaagctagataacagtcgtttcacaactggccagcctctgcccacttgaccccgagagagctggccagtgctgggctgtactacacaggcactgatgaccaagtgcagtgcttctgttgtggcggaaaactgaaaaactgggaacctggtgatcgtgcctggtcagaacacaggagacattttcctaattgcttctttattttgggccacaacgttaatattcgaggtgaatctgatgttgcgagttctgataggaatttctcaaattcaacaagttctccaaggaatccatccatgacgggttatgaagcccggctcattacttttgggacatggatgtactccgttaacaaagagcagcttgcaagagctggattttatgctataggtcaagaggataaagtacagtgctttcactgtggaggagggctagccaactggaagcccaaggaagatccttgggaacagcatgctaaatggtatccaggttgcaaatatctgctagaagagaagggacatgaatatataaacaacattcatttaacccgttcacttgagggagctctggtacaaactaccaagaaaacaccatcactaactaaaagaatcagtgataccatcttccctaatcctatgctacaagaagctatacgaatgggatttgatttcaaggacgttaagaaaataatggaggaaagaattcaaacatctgggagcaactataaaacgcttgaggttcttgttgcagatctagtgagcgctcagaaagacactacagaaaatgaattgaatcagacttcattgcagagagaaatcagccctgaagagccgctaaggcgtctgcaagaggagaagctttgtaaaatctgcatggacagacatatcgctgttgtttttattccttgtggacatctggtcacttgtaaacaatgtgctgaagcagttgacagatgtcccatgtgcagcgcggttattgatttcaagcaaagagtttttatgtcttaatgtaactctacagtgggtgtgctatgttcttattaccctgattaaatgtgtgatgtgactcaaaaaaaaaaaaaaaaaaaaaaaaaaa

SEQ ID NO: 159 - DNA, 1568 bp, Homo sapiens
agttgttgttgaggtggcgcggcgctaagatggcggcggcggcggcggcggccgtggcgggggtggggcgcggtggcggtggcgcggagccacggcaggagcggagccgggcccggggctgggccggcgtcgaacgcagcgaaggccggaggatggaaccaggtgaggagctggaagaggagggctctccaggtggccgtgaggatggcttcaccgccgagcacctggctgcagaggccatggcagctgacatggacccctggctagtgtttgatgcccgcacaacgcctgccactgagctggatgcctggctggccaagtacccaccatcccaagttacccgctatggggaccccggttcacccaactcagagcctgtgggctggattgcagtgtatgggcagggctacagccccaactccggggacgtgcagggcctgcaggcagcctgggaagctctgcagaccagtgggcggcccatcacaccgggtaccctgcgccagctcgccatcacccaccacgtgctctcgggcaagtggcttatgcatctggcaccgggcttcaagctggaccacgcctgggctggcattgcccgggccgtggttgaaggccggcttcaggtggccaaggtgagcccacgtgccaaggagggtgggcgccaggtcatctgtgtttacacggacgacttcacggaccgcttgggtgtactggaggcggattcagccatccgtgcagcgggcattaagtgcctgctcacctacaagcctgatgtctacacctacctgggcatctaccgggccaatcgctggcacctctgccccactctctatgagagccgtttccagcttgggggtagtgcccgtggctcccgagtgcttgaccgtgccaacaacgtggaactgacctagaggggccaaattggggagactgcccactcccccctccatgctggggttggatcctcctgtcttcctccttgtcccatgaaggccacaccccccagctctggggactcctaggtcacttgggaactacctgcatcttcagtccccttgaacttctgccctctgttcagggctgacacaagccccacaggctggggggctccggttccctgagggatgagccttcagcctccctttgtaatgctgctcctctccactgcccagcaccatgagttgggtgcagacacctagaaggagagacttcttggaacgctcatcccccgctatacctccccttcctcctgcatctccccttctttccttccccctcaggagagagaaaacttagtgcttccagcccttcttggagccttcatggtccaggggtaggggccccactggcctgagcatgccattttgaggggagggtagttgtgcctacttatcccctggcagaggggatgccaggaccatggacatgaggcttgcccatccctgccaacttacacagcctgtaccactgtccccccttccttggctactttgacatgtgcctgctcctggcatttcaataaaacccggcttgggtctgtgtcttgagtgttttttaaaaaaaaaaaaaaa

SEQ ID NO: 160 - DNA, 2024 bp, Homo sapiens
agtgaaggacttgaaattatggcagatggagaatggagccgacttgatggaatgaaggcaagtggagggatgtcggaacaggctgctttggctggattagcaccgggtgtaggcgggacacttagtcattctcccttggcccagacgatgccgccgtggagacagctgaggaagcaaaggagcctgctgaagctgacatcactgagctctgccgggacatgttctccaaaatggccacttacctgactggggaactgacggccaccagtgaagactataagctcctggaaaatatgaataaactcaccagcttgaagtatcttgaaatgaaagatattgctataaacattagtaggaacttaaaggacttaaaccagaaatatgctggactgcagccttatctggatcagatcaatgtcattgaagagcaggtagcagctcttgagcaggcagcttacaagttggatgcatattcaaaaaaactggaagccaagtacaagaagctggagaagcgatgagaaacttatttctatgggacagagtcttttttttttaatgtggaagaatgtcttataaaacctgaatcctgaggctgatgaattgtgaaaattcctcaaaaggaaattatgctggtcatcacaggaacatctcaacgttcgagtaaactggaggactgtggctattcctgaaccttctttgagacagaatccctcagaatctcacacttataacttcctaccttttacttgaatgctttgccatattcaggacagagactctcacaaagttcagaaaacagctggacttaccagtaaaatcaaatgagaggacctattttctctggtagtggttgattactacattattttcttaagtggctggttttttagttactatgtaaatggtcgtttttctgttaatgatgctaatgtgttgtaaacaagattctaaatttaaaaaggaaaacaaaacaaacttgttctttgcagcttatcaccttgtgaatgtcggtaacttacttttccataatattgcaaataacataaaatcttaaaataattccaagctgagtcttctagattgagcagaaatggtgaaaggagtattgataacttggcgtatgtgatgggcccctcttgtttattttctatgtgagtcacattgacatgcgatcagtttgggaaatgtgatgaaaacaaagactagatgggtatgtgtgtttatgtgttgggtagggaggtgacgattgccactcataaaataaaggattttataaaataccttcctactgtgtatgtaggatttggggggatcttagggacctaatcgacttctttgcacactaaaaacatcagacaatgggacatactgactgaccagtctaggttgaaagataggcagccttacccagaacacaacattagcagctgggaaggtgtctgaggtccccaattacatatcccaaagagtttcttacttctgtttctgtcatttcccctctgttccagacagtcatcatttatcctctgttcttcctggactgttgctgtggtctcttctcatcttaactgtcccttccaaccaccctccacactgctgccagagcaatcttaaaaatgtaaactggccctattactcctgcttagaaccctgtagtgacttatcatggcctctgaaaaatctagactttcattatgcatacaagtcccttgtgtttttttgtttgtttatagacagggtctctattgtcacccaggctggagtgtggtggtgtgataatagctcaccttgacctcctaggctcaactgatcttcccacctcagcctcctgaatagctgggactaccagcacgctccaccatgccttgctaattattttttatacagatggagtctcactatgttgtccaggctggtcttgaactggcctcaagtgattctcttaccacagcctgccagagtgctgagattgtaggcatgaaccaccgtgcctaacataaggcccctatttaaacatttttctt

SEQ ID NO: 161 - DNA, 1958 bp, Homo sapiens
ccggaaacagcgcggggtccgctatggcggcggcagccgagggcgtactggcgacccggagtgatgagcccgcccgagacgatgccgccgtggagacagctgaggaagcaaaggagcctgctgaagctgacatcactgagctctgccgggacatgttctccaaaatggccacttacctgactggggaactgacggccaccagtgaagactataagctcctggaaaatatgaataaactcaccagcttgaagtatcttgaaatgaaagatattgctataaacattagtaggaacttaaaggacttaaaccagaaatatgctggactgcagccttatctggatcagatcaatgtcattgaagagcaggtagcagctcttgagcaggcagcttacaagttggatgcatattcaaaaaaactggaagccaagtacaagaagctggagaagcgatgagaaacttatttctatgggacagagtcttttttttttaatgtggaagaatgtcttataaaacctgaatcctgaggctgatgaattgtgaaaattcctcaaaaggaaattatgctggtcatcacaggaacatctcaacgttcgagtaaactggaggactgtggctattcctgaaccttctttgagacagaatccctcagaatctcacacttataacttcctaccttttacttgaatgctttgccatattcaggacagagactctcacaaagttcagaaaacagctggacttaccagtaaaatcaaatgagaggacctattttctctggtagtggttgattactacattattttcttaagtggctggttttttagttactatgtaaatggtcgtttttctgttaatgatgctaatgtgttgtaaacaagattctaaatttaaaaaggaaaacaaaacaaacttgttctttgcagcttatcaccttgtgaatgtcggtaacttacttttccataatattgcaaataacataaaatcttaaaataattccaagctgagtcttctagattgagcagaaatggtgaaaggagtattgataacttggcgtatgtgatgggcccctcttgtttattttctatgtgagtcacattgacatgcgatcagtttgggaaatgtgatgaaaacaaagactagatgggtatgtgtgtttatgtgttgggtagggaggtgacgattgccactcataaaataaaggattttataaaataccttcctactgtgtatgtaggatttggggggatcttagggacctaatcgacttctttgcacactaaaaacatcagacaatgggacatactgactgaccagtctaggttgaaagataggcagccttacccagaacacaacattagcagctgggaaggtgtctgaggtccccaattacatatcccaaagagtttcttacttctgtttctgtcatttcccctctgttccagacagtcatcatttatcctctgttcttcctggactgttgctgtggtctcttctcatcttaactgtcccttccaaccaccctccacactgctgccagagcaatcttaaaaatgtaaactggccctattactcctgcttagaaccctgtagtgacttatcatggcctctgaaaaatctagactttcattatgcatacaagtcccttgtgtttttttgtttgtttatagacagggtctctattgtcacccaggctggagtgtggtggtgtgataatagctcaccttgacctcctaggctcaactgatcttcccacctcagcctcctgaatagctgggactaccagcacgctccaccatgccttgctaattattttttatacagatggagtctcactatgttgtccaggctggtcttgaactggcctcaagtgattctcttaccacagcctgccagagtgctgagattgtaggcatgaaccaccgtgcctaacataaggcccctatttaaacatttttctt

SEQ ID NO: 162 - DNA, 3334 bp, Homo sapiens
ggcctgaccacgcagttcttgggtctgtgctgctggcctggggttgtggttgaggccgggtctccgctcctgtgcccgggaagatggtgctaggtggttgcccgaatcttgttgtttgcctactgaagagatgaaaccatggcagaagtagaatccttatagaaacaggaccagaaacacctcccttctccaacaaaaggttcattttggtggctgtccgtttgacctgctgtgcttcagtttaattggcttggaaaggggtcagcagggtgaaaccgaaccccagaaaacttgatgaagaaatgtcttttgcccgttttgattacgtgcatgcaaacagcgatttgcaaagaccgtatgatgatgatcatgatcttactggtgaattacagacctgatgaatttatagaatgtgaagacccagtggatcatgttggaaatgcaactgcatcccaggaacttggttatggttgtctcaagttcggcggtcaggcctacagcgacgtggaacacacttcagtccagtgccatgccttagatggaattgagtgtgccagtcctaggacctttctacgagaaaataaaccttgtataaagtataccggacactacttcataaccactttactctactccttcttcctgggatgttttggtgtggatcgattctgtttgggacacactggcactgcagtagggaagctgttgacgcttggaggacttgggatttggtggtttgttgaccttattttgctaattactggagggctgatgccaagtgatggcagcaactggtgcactgtttactaagaagagctgccatcatggcccagggaggcgggtgaaagctccgtcttctgaattcatctctacaggctcaaaactcctctttgatatcagacctgatgttattttccttcttttggagggcatttgtttggttaagaaggcttctttggactttggaatttcaacccagattttaccttgcagacggaatgacaagcaaaaagtgttgtggggaatcaaatttgttcctttcctcatgcacaaaacataaaggatagtggcgagtttacaagctgtggatgggtttccatagtcttcctttctgtacattgctatatcttcagtcctttggagcaagtggacctaacaagttgagcaaaatgaatatttggatccatgttcctcttgtgaccctgagtcttcatgcaaggagatctgaagctgaacaatgaaaatcttcagcagaaatagaaatggccgtggattgtaatacacactgaaattctgactttctgaatttaaatgtagaataaattttaccaacttggagtactgtatgagtattttcagtagggggaataaactcaaaattatatttgttttgcagaaacctagtcatttgaaatgagccatcctattaagccctcttttgtctccattatgttccagaggcagtatatgcagtgcaataattttttcattccacttatgttttgaaagccagcggcatcagatgtgtgagttgagctattcctcctggcagaattgtccaatctaaaaatcagcgtttaccagcccatgctaataaaattaagatttcatacaagtttctgtaaaactattcttcatgattagctctccctgtgggctgcagcagtcagaaagagataacagccacacctctgcattccccggtcaccaggaataaaaggaaatgttccagattgtaagtggttttaaaaactcagttctcatcgtttgcaatctaagttgaaagaactattaaatataaaatcaaaggtgggcaatgtggccaagtcaatggaagaggctttactcagaataacttacaaattctagaaacaaggtagaactcactcagtttacctaataataattgaatttaagaccaaatatcacagttgaaataacttccctggatacattctatcattttgtagctttcctaagaatttcttgctttatcattcctgattaatcactgtttttacattattaaaggtggcaattttctgtaaaaaatttaaaacagatgatcctattctgtcttgaaagttctgtaccacactgaccttaaccttgcttataacataacaattggtaaacttttaattcataatctttataccctaagatagtatttattaaatttttatgggtcatgaagaaactagaccctctccccagaaaaatctacatacacagaatttacatagaacttgggttcatctacacaatttatgcatgaaataaaattgtactggtaccctataaatttatacaaataaaagagtttaagggagttcaaggatgccatatgtatattttaaaaaaatttctaagggaagtctaaaaaacataaattataatattacccaaaataagatgctacttttcacctaaccaagtcctgcctcatttcacactttaacctcctaagtatattcataaccctaccaaaagttgttttctttaaaaaataagaaactttagggccagcgcaatggtgcaagcctgtaatccctgcactttgggaggccgaggcaggtgaatcctttaaggtcaggagttcgagaccagcctggccaacatggtgagacacactcccccacccccgcccagtctctagtaaaaatgcaaaaattagccgggcgtggtggcgtgcacctgtaatcccagctactcgggaggctgaggtaagagaatcacttgaactgaggaggcagagattgcagtgagccgagatcctgccactgcacttcagcctgggcaacagagtgagactctgaccaaaaaagaaattttgcagctccaaggcttgaagtcatttatgttgccaggggtaagagcttggttgaagggctaaaagactagaaactactgaagatgcccttcttactgtcagtaaagctgctggagacaaaagaagttgttctcgctgctagagtggtaatttgagaatcatcagtattcctatgtgacaatccaaaattactggttttcatttgacttgtaaatgacacccatcatccatctgcccacaaacctggccaaatgtgatacaacctgaaaacctgatggactaaaggagtactatttaacaattgattgcctttgcactttattcaggttgtttcttaaattttggtagacagatccatttgtatatgtgtgtgttatatctagtttatggctatagagaaggtttaaaatactacagtgtccttccctcaaggttaaattagaagctgcctgccttttagttgtttcttgcctttaataaaatgttatcagttcccccaga

SEQ ID NO: 163 - DNA, 2265 bp, Homo sapiens
gagcgacgcccacggcctgtctcggccaccagcgtgttccagcgagcgcccagccacctcgctcgcagcctccccagcgcagcagcccggctgtgggcctgcggcagccgggtcttcctggtccccacctcctggggccgacgggcggcaggaaggggctcggcgggacgcgccatcagggacctgaggaggaacaacggaacgcgttcggaacggcctggactcccgagactcacccgactcgtggccacaccgggagaactgaagcggcagtagccggcggagacgcccgacccgaaggccggctgctagggagcagacagctgaaccgcttgccagacgccgaaacccagtgacgccctccaccgctccaccgtgctcccggctcctcgcccccgccgcccgcgggccccaaggcgcatgcgccgcctgtcctggaggggcccatttccgtccgtcgtggggggaggcacagtgagtccactggggcacggcagcgtctaagccacaagccgagcacataagccaggtcctaacggagcctatgtgtaagtccactactggtgcaaggttgcacacttctaagaagagcggcgtggggggctcggcgaccttcgcttcagtcgctcccccgtgcagtcccctgtgcccaagacacagcctgatgcttgtgctccggtgggcggagcttggaggcggcgggaactgcaattggtggctttgaaggcgcggcgagcgggaacagctcttgaggagtgagactgcaggagatgtgggccgtgccaaagagatggatgagactgttgctgagttcatcaagaggaccatcttgaaaatccccatgaatgaactgacaacaatcctgaaggcctgggattttttgtctgaaaatcaactgcagactgtaaatttccgacagagaaaggaatctgtagttcagcacttgatccatctgtgtgaggaaaagcgtgcaagtatcagtgatgctgccctgttagacatcatttatatgcaatttcatcagcaccagaaagtttgggatgtttttcagatgagtaaaggaccaggtgaagatgttgacctttttgatatgaaacaatttaaaaattcgttcaagaaaattcttcagagagcattaaaaaatgtgacagtcagcttcagagaaactgaggagaatgcagtctggattcgaattgcctggggaacacagtacacaaagccaaaccagtacaaacctacctacgtggtgtactactcccagactccgtacgccttcacgtcctcctccatgctgaggcgcaatacaccgcttctgggtcaggcgctgacaattgctagcaaacaccatcagattgtgaaaatggacctgagaagtcggtatctggactctcttaaggctattgtttttaaacagtataatcagacctttgaaactcacaactctacgacacctctacaggaaagaagccttggactagatataaatatggattcaaggatcattcatgaaaacatagtagaaaaagagagagtccaacgaataactcaagaaacatttggagattatcctcaaccacaactagaatttgcacaatataagcttgaaacgaaattcaaaagtggtttaaatgggagcatcttggctgagagggaagaacccctccgatgcctaataaagttctctagcccacatcttctggaagcattgaaatccttagcaccagcggcacttgtttgcaggatccaaaagctgctctgctattctggaagccacagtcaagggacccaggacccgagcagctggcagaaggacttgtaccttctgtttgtcccattgtatccaagatgttaaaatcatgatgtcacaacatttagacatttaaatggttaatcaaatgtatgtctctcctgatatacagctaactgctatagactaatgcaggcctccttgttaaaatggaccctttgttactcaaatttgaccaatcttggaagcttggatgtgcactgacttgacaaccactttttgtgggacataacactctagacacaggtgcttctagctctaaggggaacagataactaatctgtggccaaccaaccaatgattaatcagctatgctgcctcggatcttgatcaaaaaaggaaaatgtgaaaagtgatacacaaaatggcatcactttggttcagagctctaaaatggagttgggaagccattctaagaaggactgcctgcacaatctgcaacttgcaaaacacaaaaa

SEQ ID NO: 164 - DNA, 4659 bp, Homo sapiens
gagcgacgcccacggcctgtctcggccaccagcgtgttccagcgagcgcccagccacctcgctcgcagcctccccagcgcagcagcccggctgtgggcctgcggcagccgggtcttcctggtccccacctcctggggccgacgggcggcaggaaggggctcggcgggacgcgccatcagggacctgaggaggaacaacggaacgcgttcggaacggcctggactcccgagactcacccgactcgtggccacaccgggagaactgaagcggcagtagccggcggagacgcccgacccgaaggccggctgctagggagcagacagctgaaccgcttgccagacgccgaaacccagtgacgccctccaccgctccaccgtgctcccggctcctcgcccccgccgcccgcgggccccaaggcgcatgcgccgcctgtcctggaggggcccatttccgtccgtcgtggggggaggcacagtgagtccactggggcacggcagcgtctaagccacaagccgagcacataagccaggtcctaacggagcctatgtgtaagtccactactggtgcaaggttgcacacttctaagaagagcggcgtggggggctcggcgaccttcgcttcagtcgctcccccgtgcagtcccctgtgcccaagacacagcctgatgcttgtgctccggtgggcggagcttggaggcggcgggaactgcaattggtggctttgaaggcgcggcgagcgggaacagctcttgaggagtgagactgcaggagatgtgggccgtgccaaagagatggatgagactgttgctgagttcatcaagaggaccatcttgaaaatccccatgaatgaactgacaacaatcctgaaggcctgggattttttgtctgaaaatcaactgcagactgtaaatttccgacagagaaaggaatctgtagttcagcacttgatccatctgtgtgaggaaaagcgtgcaagtatcagtgatgctgccctgttagacatcatttatatgcaatttcatcagcaccagaaagtttgggatgtttttcagatgagtaaaggaccaggtgaagatgttgacctttttgatatgaaacaatttaaaaattcgttcaagaaaattcttcagagagcattaaaaaatgtgacagtcagcttcagagaaactgaggagaatgcagtctggattcgaattgcctggggaacacagtacacaaagccaaaccagtacaaacctacctacgtggtgtactactcccagactccgtacgccttcacgtcctcctccatgctgaggcgcaatacaccgcttctgggtcaggcgctgacaattgctagcaaacaccatcagattgtgaaaatggacctgagaagtcggtatctggactctcttaaggctattgtttttaaacagtataatcagacctttgaaactcacaactctacgacacctctacaggaaagaagccttggactagatataaatatggattcaaggatcattcatgaaaacatagtagaaaaagagagagtccaacgaataactcaagaaacatttggagattatcctcaaccacaactagaatttgcacaatataagcttgaaacgaaattcaaaagtggtttaaatgggagcatcttggctgagagggaagaacccctccgatgcctaataaagttctctagcccacatcttctggaagcattgaaatccttagcaccagcgggtattgcagatgctccactttctccactgctcacttgcatacccaacaagagaatgaattattttaaaattagagataaataagacgtgcgtggtttcttaagcacagctcctccttcttgatattgcacatgcacttcagttcatggctagctgtatagcttccgtctgtaaacttgtattttcaagaatccttggtattgaatttttagaaatgctcacataattgttgggactgattcattcctccacgatatgcctcctctctctgatatcctgctaactgtagccgttgtggcatttgagatgacaggacatatatatatatggccccacacttgaccttgagtgcctgaatgctctgaaatcaagcatatggcacagcgctcaagacttttgggtttgtgtccttttttctatggctgtctcttctcaattctggagaggtctggttccagtggctggtttccagggattgattcttaagctctggatcacagagagaagcaacaaggaactatactcaactcaaaactttttaggagaatcatgaaattggtctattcaaaggatggagttgagtccattctgttattgttgcaagaggttgcatatttggtgagtcagttatataaaatagtgttcttattgtaaatatgatacttctcataatctattttatcatgtgtataacattcaaactgacaaatatattgacttatgaataaaggtgtcaaaaaactggcacatcagttaattttgatcaaagtacttcagtgatcatcactaaataccctatctttttaaaaattttttcctttctaattttttatttctttatttatttattgagacagggtctcactgtgtcacccaagctggagtgcagtggcatgatcatggctcactgcagcctggacctcccaggctcaagtgatccttccacctcagcctcccgaatagctgggattacagacgcgctccatcctgcccagctaattttttttttgtttgttttttgttttttgagacaagtctccttctatcgcccaggctggagtgcaatggcacaatcttggctccctgcaacctctgcctcctgggttgaagagattctcctgcctcagcctctgagtagctgggactacaggcctgcaccaccatgcccagctaatttttgtatttttagtagagacagggtttctccatgttgcccaggctgatctcaaactcctgggctcaagcaatctgcccattttagcctcctaaaatgctgggattataggagtgtattagtctattctcatgctgctaataaagatacctaagactgggtaattcacaaaggaaagaggcttaactgacgcacatttccacgtggccagggaggcctcacaatcatggtggaaggcaaatgagaagcaaagtcatgtcttacatggcggcaggcaagagagcttgtgcagggaaactcccatttataaaaccaccagagctcatgaaacttattcactaccatgagaatagtatgggggaaatcgttcccatgactcaagtatctccacctggccctgcccttgtcacatgggggttattacaattcaaggtgacacttgtgtggagacacagccaaaccatatcacaggcatgagctaccacgcccgccagcatgtcttttttaaacattttaaaatctattctttatcttgtttcagagaggatttggagttacagaaacacattagactgggcatggtggctcacacttgtaatcccagcacttcaggaggtttctcctagtgtactctcacacttctgataccagatatgtgggggagggggtttcccccacacattaagcaagtgtgaaacatgatatagaaaaatgacttcactctgggccgggtgtagtggctcacgcctgtaatcctagcactttgggaagccgaggtgggcagatcacccgaggtcaggagttcgagaccagcctagccaacatggcaaaaccttgtctctactaaaaatagaaaaattagttgggggtagtggcagccgcctgtaatcccagctattcgagaggctgaggcaggagaactggttgaaccggggaggcagaggttgcagtgagccaagatcatgccactgcactctagcctgggtgacagagtgaaactctgcctcaaaaaataaaataaaggccaggcatggtggctcacgcctataatcccagcactttcagaggccaaggcaggtgggtcacaaggtcaagagtttgagactagccttagcaacatggtgaaggtgaaccccgactctactaaaaatacaaaaattagctgggcctggtggtgtgcacctgtaatcccagctacttaggaggctgaggcaggagaatcgcttgaacccgggagacataggttgcagtgagccgagactgcaccactgcactccagcctaggtgacagagtgagactccatcttaaaaaataaataaataaaataaaataaatgacatcactttggttcagagctctaaaatggagggaggaagccattctaaaaaggactccctacatgacctgcaacttgaaaaaaaattaaaagctccaaaaaaaaaacaatacaggagcttaccttgaacctttgaattgggccaaattgcgatgaccactgcatcctggaaaattttatttcaccagcactacaactcctcaacagcaccaaccaataaactatggatttttgtactaagccagttgcctctttcaaaacaacttgtcaacttgtctaatcaccctcagctttttttaaaaacccctcctctaccctctctcttcagaacacaagtggcttctagctgaatctgtctcccaaattgcaattcctaagacctcaataaaaacaccttgtcttgctgcaaaaaaaaaaaaaaa

SEQ ID NO: 165 - DNA, 1465 bp, Homo sapiens
gagcgacgcccacggcctgtctcggccaccagcgtgttccagcgagcgcccagccacctcgctcgcagcctccccagcgcagcagcccggctgtgggcctgcggcagccgggtcttcctggtccccacctcctggggccgacgggcggcaggaaggggctcggcgggacgcgccatcagggacctgaggaggaacaacggaacgcgttcggaacggcctggactcccgagactcacccgactcgtggccacaccgggagaactgaagcggcagtagccggcggagacgcccgacccgaaggccggctgctagggagcagacagctgaaccgcttgccagacgccgaaacccagtgacgccctccaccgctccaccgtgctcccggctcctcgcccccgccgcccgcgggccccaaggcgcatgcgccgcctgtcctggaggggcccatttccgtccgtcgtggggggaggcacagtgagtccactggggcacggcagcgtctaagccacaagccgagcacataagccaggtcctaacggagcctatgtgtaagtccactactggtgcaaggttgcacacttctaagaagagcggcgtggggggctcggcgaccttcgcttcagtcgctcccccgtgcagtcccctgtgcccaagacacagcctgatgcttgtgctccggtgggcggagcttggaggcggcgggaactgcaattggtggctttgaaggcgcggcgagcgggaacagctcttgaggagtgagactgcaggagatgtgggccgtgccaaagagatggatgagactgttgctgagttcatcaagaggaccatcttgaaaatccccatgaatgaactgacaacaatcctgaaggcctgggattttttgtctgaaaatcaactgcagactgtaaatttccgacagagaaaggaatctgtagttcagcacttgatccatctgtgtgaggaaaagcgtgcaagtatcagtgatgctgccctgttagacatcatttatatgcaatttcatcagcaccagaaagtttgggatgtttttcagatgagtaaaggaccaggtgaagatgttgacctttttgatatgaaacaatttaaaaattcgttcaagaaaattcttcagagagcattaaaaaatgtgacagtcagcttcagagaaactgaggagaatgcagtctggattcgaattgcctggggaacacagtacacaaagccaaaccagtacaaacctacctacgtggtgtactactcccagactccgtacgccttcacgtcctcctccatgctgaggcgcaatacaccgcttctgggtcaggagttagaagctactgggaaaatctacctccgacaagaggagatcattttagatattaccgaaatgaagaaagcttgcaattagtgaacatgaaaggaaaataaaaattcctcacagtcatctttttaaaaaaaaaaaaaaaaa

SEQ ID NO: 166 - DNA, 3732 bp, Homo sapiens
cggtggttgggtggtaagatggcggctgtgagtctgcggctcggcgacttggtgtgggggaaactcggccgatatcctccttggccaggaaagattgttaatccaccaaaggacttgaagaaacctcgcggaaagaaatgcttctttgtgaaattttttggaacagaagatcatgcctggatcaaagtggaacagctgaagccatatcatgctcataaagaggaaatgataaaaattaacaagggtaaacgattccagcaagcggtagatgctgtcgaagagttcctcaggagagccaaagggaaagaccagacgtcatcccacaattcttctgatgacaagaatcgacgtaattccagtgaggagagaagtaggccaaactcaggtgatgagaagcgcaaacttagcctgtctgaagggaaggtgaagaagaacatgggagaaggaaagaagagggtgtcttcaggctcttcagagagaggctccaaatcccctctgaaaagagcccaagagcaaagtccccggaagcggggtcggcccccaaaggatgagaaggatctcaccatcccggagtctagtaccgtgaaggggatgatggccggaccgatggccgcgtttaaatggcagccaaccgcaagcgagcctgttaaagatgcagatcctcatttccatcatttcctgctaagccaaacagagaagccagctgtctgttaccaggcaatcacgaagaagttgaaaatatgtgaagaggaaactggctccacctccatccaggcagctgacagcacagccgtgaatggcagcatcacacccacagacaaaaagataggatttttgggccttggtctcatgggaagtggaatcgtctccaacttgctaaaaatgggtcacacagtgactgtctggaaccgcactgcagagaaatgtgatttgttcatccaggagggggcccgtctgggaagaacccccgctgaagtcgtctcaacctgcgacatcactttcgcctgcgtgtcggatcccaaggcggccaaggacctggtgctgggccccagtggtgtgctgcaagggatccgccctgggaagtgctacgtggacatgtcaacagtggacgctgacaccgtcactgagctggcccaggtgattgtgtccaggggggggcgctttctggaagcccccgtctcagggaatcagcagctgtctaatgacgggatgttggtgatcttagcggctggagacaggggcttatatgaggactgcagcagctgcttccaggcgatggggaagacctccttcttcctaggtgaagtgggcaatgcagccaagatgatgctgatcgtgaacatggtccaagggagcttcatggccactattgccgaggggctgaccctggcccaggtgacaggccagtcccagcagacactcttggacatcctcaatcagggacagttggccagcatcttcctggaccagaagtgccaaaatatcctgcaaggaaactttaagcctgatttctacctgaaatacattcagaaggatctccgcttagccattgcgctgggtgatgcggtcaaccatccgactcccatggcagctgcagcaaatgaggtgtacaaaagagccaaggcgctggaccagtccgacaacgatatgtccgccgtgtaccgagcctacatacactaagctgtcgacaccccgccctcacccctccaatcccccctctgaccccctcttcctcacatggggtcgggggcctgggagttcattctggaccagcccacctatctccatttccttttatacagactttgagacttgccatcagcacagcacacagcagcacccttcccctgaggccggtggggaggggacaagtgtcagcaggattggcgtgtgggaaagctcttgagctgggcactggccccccggacgaggtggctgtgtgttcacacacacacacacacacacacacacacacacacacaggctctcgccccaggatagaagctgcccagaaactgctgcctggctttttttcttccgagcttgtcttatctcaaaccccttccagtcaaggaactagaatcagcaacgagagttggaagccttcccacagcttcccccagagcgaagaggctgtagtcatgtccccatcccccactggattccctacaaggagaggccttgggcccagatgagccagtacagactccagacagaggggcccttggggccctccaacctcaggtgatgagctgagaaagatgttcacgtctaagcgtccagtgtgcacccagcgctccatagacgcctttgtgaactgaaaagagactggcagagtcccgagaagatggggccctggctttccagggagtgcagcaagcagccggcctgcaggtgagcatggaggcccggccctcaccgcctcgaagccatgccccagatgccactgccacagcgggcgctcgctcctccctaggctgttttagtatttggatttgcattccatcccttgggagggagtcctcagggccactagtgatgagccaagaggagtgggggttgggggcgctcctttctgtttccgttaggccacagactcttcacctggctctgaagagccactcttacctcggtcccctcccagtggtcccaccttctccaccctgccctgccaagtcccctgcatgcccaccgctctccatcctccctcctctccctcttcctcccgtggagacagtatttctttctgtctgtccctttggcccagacccagcctgaccaacgatgagcatttcttaggctcagctcttgatacggaaacgagtgtcttcactccagccagcatcatggtcttcggtgcttcccgggcccggggtctgtcgggagggaagagaactgggcctgacctacctgaactgactggccctccgaggtgggtctgggacatcctagaggccctacatttgtccttggataggggaccggggggggcttggaatgttgcaaaaaaaaagttacccaagggatgtcagttttttatccctctgcatgggttggattttccaaaatcataatttgcagaaggaaggccagcatttacgatgcaatatgtaattatatatagggtggccacactagggcggggtccttcccccctacacagctttggcccctttcagagattagaaactgggttagaggattgcagaagacgagtggggggagggcagggaagatgcctgtcgggtttttagcacagttcatttcactgggattttgaagcatttctgtctgaacacaagcctgttctagtcctggcggaacacactgggggtgggggcgggggaagatgcggtaatgaaaccggttagtcaattttgtcttaatattgttgacaattctgtaaagttcctttttatgaatatttctgtttaagctatttcacctttcttttgaaatccttcccttttaaggagaaaatgtgacacttgtgaaaaagcttgtaagaaagcccctccctttttttctttaaacctttaaatgacaaatctaggtaattaaggttgtgaatttttatttttgctttgtttttaatgaacatttgtctttcagaataggattgtgtgataatgtttaaatggcaaaaacaaaacatgattttgtgcaattaacaaagctactgcaagaaaaataaaacacttcttggtaacacaaaaaaaaaaaaaaaaaaaa

SEQ ID NO: 167 - DNA, 3150 bp, Homo sapiens
ccacaaagggcacttggccccagggctaggagagcgaggggagagcacagccacccgcctcggcggcccgggactcggctcgactcgccggagaatgcgcccgaggacgacggggcgccagagccgcggtgctttcaactggcgagcgcgaatgggggtgcactggagtaaggcagagtgatgcgggggggcaactcgcctggcaccgagatcgccgccgtgcccttccctggacccggcgtcgcccaggatggctgccccgagccatgggccgcggcggagctagcgcggagcgcccgaccctcgacccccgagtcccggagccggccccgcgcggggccacgcgtccctcgggcgctggttcctaaggaggacgacagcaccagcttctcctttctcccttcccttccctgccccgcactcctccccctgctcgctgttgttgtgtgtcagcacttggctggggacttcttgaacttgcagggagaataacttgcgcaccccactttgcgccggtgcctttgccccagcggagcctgcttcgccatctccgagccccaccgcccctccactcctcggccttgcccgacactgagacgctgttcccagcgtgaaaagagagactgcgcggccggcacccgggagaaggaggaggcaaagaaaaggaacggacattcggtccttgcgccaggtcctttgaccagagtttttccatgtggacgctctttcaatggacgtgtccccgcgtgcttcttagacggactgcggtctcctaaaggtcgaccatggtggccgggacccgctgtcttctagcgttgctgcttccccaggtcctcctgggcggcgcggctggcctcgttccggagctgggccgcaggaagttcgcggcggcgtcgtcgggccgcccctcatcccagccctctgacgaggtcctgagcgagttcgagttgcggctgctcagcatgttcggcctgaaacagagacccacccccagcagggacgccgtggtgcccccctacatgctagacctgtatcgcaggcactcaggtcagccgggctcacccgccccagaccaccggttggagagggcagccagccgagccaacactgtgcgcagcttccaccatgaagaatctttggaagaactaccagaaacgagtgggaaaacaacccggagattcttctttaatttaagttctatccccacggaggagtttatcacctcagcagagcttcaggttttccgagaacagatgcaagatgctttaggaaacaatagcagtttccatcaccgaattaatatttatgaaatcataaaacctgcaacagccaactcgaaattccccgtgaccagacttttggacaccaggttggtgaatcagaatgcaagcaggtgggaaagttttgatgtcacccccgctgtgatgcggtggactgcacagggacacgccaaccatggattcgtggtggaagtggcccacttggaggagaaacaaggtgtctccaagagacatgttaggataagcaggtctttgcaccaagatgaacacagctggtcacagataaggccattgctagtaacttttggccatgatggaaaagggcatcctctccacaaaagagaaaaacgtcaagccaaacacaaacagcggaaacgccttaagtccagctgtaagagacaccctttgtacgtggacttcagtgacgtggggtggaatgactggattgtggctcccccggggtatcacgccttttactgccacggagaatgcccttttcctctggctgatcatctgaactccactaatcatgccattgttcagacgttggtcaactctgttaactctaagattcctaaggcatgctgtgtcccgacagaactcagtgctatctcgatgctgtaccttgacgagaatgaaaaggttgtattaaagaactatcaggacatggttgtggagggttgtgggtgtcgctagtacagcaaaattaaatacataaatatatatatatatatatattttagaaaaaagaaaaaaacaaacaaacaaaaaaaccccaccccagttgacactttaatatttcccaatgaagactttatttatggaatggaatggaaaaaaaaacagctattttgaaaatatatttatatctacgaaaagaagttgggaaaacaaatattttaatcagagaattattccttaaagatttaaaatgtatttagttgtacattttatatgggttcaaccccagcacatgaagtataatggtcagatttattttgtatttatttactattataaccactttttaggaaaaaaatagctaatttgtatttatatgtaatcaaaagaagtatcgggtttgtacataattttccaaaaattgtagttgttttcagttgtgtgtatttaagatgaaaagtctacatggaaggttactctggcaaagtgcttagcacgtttgcttttttgcagtgctactgttgagttcacaagttcaagtccagaaaaaaaaagtggataatccactctgctgactttcaagattattatattattcaattctcaggaatgttgcagagtgattgtccaatccatgagaatttacatccttattaggtggaatatttggataagaaccagacattgctgatctattatagaaactctcctcctgccccttaatttacagaaagaataaagcaggatccatagaaataattaggaaaacgatgaacctgcaggaaagtgaatgatggtttgttgttcttctttcctaaattagtgatcccttcaaaggggctgatctggccaaagtattcaataaaacgtaagatttcttcattattgatattgtggtcatatatatttaaaattgatatctcgtggccctcatcaagggttggaaatttatttgtgttttacctttacctcatctgagagctctttattctccaaagaacccagttttctaactttttgcccaacacgcagcaaaattatgcacatcgtgttttctgcccaccctctgttctctgacctatcagcttgcttttctttccaaggttgtgtgtttgaacacatttctccaaatgttaaacctatttcagataataaatatcaaatctctggcatttcattctataaagtc

SEQ ID NO: 168 - DNA, 3631 bp, Homo sapiens
gcggccgctgcagagattggaatccgcctgccgggcttggcgaaggagaagggaggaggcaggagcgaggagggaggagggccaagggcgggcaggaaggcttaggctcggcgcgtccgtccgcgcgcggcgaagatcgcacggcccgatcgaggggcgaccgggtcggggccgctgcacgccaagggcgaaggccgattcgggccccacttcgccccggcggctcgccgcgcccacccgctccgcgccgagggctggaggatgcgttccctggggtccggacttatgaaaatatgcatcagtttaatactgtcttggaattcatgagatggaagcataggtcaaagctgtttggagaaaatcagaagtacagttttatctagccacatcttggaggagtcgtaagaaagcagtgggagttgaagtcattgtcaagtgcttgcgatcttttacaagaaaatctcactgaatgatagtcatttaaattggtgaagtagcaagaccaattattaaaggtgacagtacacaggaaacattacaattgaacaatgcctcagctatacatttacatcagattattgggagcctatttgttcatcatttctcgtgttcaaggacagaatctggatagtatgcttcatggcactgggatgaaatcagactccgaccagaaaaagtcagaaaatggagtaaccttagcaccagaggataccttgccttttttaaagtgctattgctcagggcactgtccagatgatgctattaataacacatgcataactaatggacattgctttgccatcatagaagaagatgaccagggagaaaccacattagcttcagggtgtatgaaatatgaaggatctgattttcagtgcaaagattctccaaaagcccagctacgccggacaatagaatgttgtcggaccaatttatgtaaccagtatttgcaacccacactgccccctgttgtcataggtccgttttttgatggcagcattcgatggctggttttgctcatttctatggctgtctgcataattgctatgatcatcttctccagctgcttttgttacaaacattattgcaagagcatctcaagcagacgtcgttacaatcgtgatttggaacaggatgaagcatttattccagttggagaatcactaaaagaccttattgaccagtcacaaagttctggtagtgggtctggactacctttattggttcagcgaactattgccaaacagattcagatggtccggcaagttggtaaaggccgatatggagaagtatggatgggcaaatggcgtggcgaaaaagtggcggtgaaagtattctttaccactgaagaagccagctggtttcgagaaacagaaatctaccaaactgtgctaatgcgccatgaaaacatacttggtttcatagcggcagacattaaaggtacaggttcctggactcagctctatttgattactgattaccatgaaaatggatctctctatgacttcctgaaatgtgctacactggacaccagagccctgcttaaattggcttattcagctgcctgtggtctgtgccacctgcacacagaaatttatggcacccaaggaaagcccgcaattgctcatcgagacctaaagagcaaaaacatcctcatcaagaaaaatgggagttgctgcattgctgacctgggccttgctgttaaattcaacagtgacacaaatgaagttgatgtgcccttgaataccagggtgggcaccaaacgctacatggctcccgaagtgctggacgaaagcctgaacaaaaaccacttccagccctacatcatggctgacatctacagcttcggcctaatcatttgggagatggctcgtcgttgtatcacaggagggatcgtggaagaataccaattgccatattacaacatggtaccgagtgatccgtcatacgaagatatgcgtgaggttgtgtgtgtcaaacgtttgcggccaattgtgtctaatcggtggaacagtgatgaatgtctacgagcagttttgaagctaatgtcagaatgctgggcccacaatccagcctccagactcacagcattgagaattaagaagacgcttgccaagatggttgaatcccaagatgtaaaaatctgatggttaaaccatcggaggagaaactctagactgcaagaactgtttttacccatggcatgggtggaattagagtggaataaggatgttaacttggttctcagactctttcttcactacgtgttcacaggctgctaatattaaacctttcagtactcttattaggatacaagctgggaacttctaaacacttcattctttatatatggacagctttattttaaatgtggtttttgatgcctttttttaagtgggtttttatgaactgcatcaagacttcaatcctgattagtgtctccagtcaagctctgggtactgaattgcctgttcataaaacggtgctttctgtgaaagccttaagaagataaatgagcgcagcagagatggagaaatagactttgccttttacctgagacattcagttcgtttgtattctacctttgtaaaacagcctatagatgatgatgtgtttgggatactgcttattttatgatagtttgtcctgtgtccttagtgatgtgtgtgtgtctccatgcacatgcacgccgggattcctctgctgccatttgaattagaagaaaataatttatatgcatgcacaggaagatattggtggccggtggttttgtgctttaaaaatgcaatatctgaccaagattcgccaatctcatacaagccatttactttgcaagtgagatagcttccccaccagctttattttttaacatgaaagctgatgccaaggccaaaagaagtttaaagcatctgtaaatttggactgttttccttcaaccaccattttttttgtggttattatttttgtcacggaaagcatcctctccaaagttggagcttctattgccatgaaccatgcttacaaagaaagcacttcttattgaagtgaattcctgcatttgatagcaatgtaagtgcctataaccatgttctatattctttattctcagtaacttttaaaagggaagttatttatattttgtgtataatgtgctttatttgcaaatcacccactcctttacaaccatactttatatatgtacatacattcatactgtagaaaccagctcatgtgtacctcatatcccatccttaagagaagaaatgttataaagtagaactaaatataaattttcagaattaatgcattcaaagtaatatatcaaatccaggactttgttaacttcaggtaaaaacttcattagggtaatatcatctcaattttttcaaatgaaaggattctctaattagaaatttatatgtcagagctgttataaatttatcaactgtcaaatatgttctggacagctaaatcatttgagatttttggttttttgatttctattccctaacttgtgaagacaatgaaaaatcaggcagaaatatttagtatctagtcagtatctgtagctacactgtataactgttcttcaataaaatggttcatattttatagaaaaaaaaaaaaaaaa

SEQ ID NO: 169 - DNA, 2923 bp, Homo sapiens
tgggcagagattggaatccgccttccgggcttggcgaagaagggaggaggcaggagcgaggagggaggagggccaagggcgggcaggaaggcttaggctcggcgcgtccgtccgcgcgcggcgaagatcgcacggcccgatcgaggcgcgaccgggtcggggccgctgcacgccaagggcgaaggccgatccgggccccgcttcgccccggcggctcgccgcgcccacccgctccgcgccgagggctggaggatgcgttccctggggtccggacttatgaaaatatgcatcagtttaatactgtcttggaattcacgagatggaagcatagatcaaagctgtttggagaaaatcggaagtacagttttatctagccacatcttggagacattattgcaagagcatctcaagcagacgtcgttacaatcgtgatttggaacggatgaagcatttattccagttggagaatcactaaaagaccttattgaccagtcacaaagttctggtagtgggtctggactacctttattggttcagcgaactattgccaaacagattcagatggtccggcaagttggtaaaggccgatatggagaagtatggatgggcaaatggcgtggcgaaaaagtggcggtgaaagtattctttaccactgaagaagccagctggtttcgagaaacagaaatctaccaaactgtgctaatgcgccatgaaaacatacttggtttcatagcagcagacattaaaggtacaggttcctggactcagctctatttgattactgattaccatgaaaatggatctctctatgacttcctgaaatgtgctacactggacaccagagccctgcttaaatcggcttattcagctgcctgtggtctgtgccacctgcacacagaaatttatggcacccaaggaaagcccgcaattgctcatcgagacctaaagagcaaaaacatcctcatcaagaaaaatgggagttgctgcattgctgacctgggccttgctgttaaattcaacagtgacacaaatgaagttgatgtgcccttgaataccagggtgggcaccaaacgctatatggctccagaagtgctggacgaaagcctgaacaaaaaccacttccagccctacatcatggctgacatctacagcttcggcctaatcatttgggagatggctcgtcgttgtatcacaggagggattgtggaagagtaccaattgccatattacaacatggtaccgagtgatccgtcatacgaagatatgcgtgaggttgtgtgtgtcaaacgtttgcggccaattgtgtctaatcggtggaacagtgatgaatgtctacgagcagttttgaagctaatgtcagaatgctgggcccacaatccagcctccagactcacagcgttgagaattaagaagatgcttgccaagatggttgaatcccaagatgtaaaaatctgatggttaaaccatcggaggagaaactctagactgcaagaactgtttttacccatggcatgggtggaattagagtggaataaggatgttaacttggttctcagactctctcttcactacgtgttcacaggctgctaatattaaacctttcagtactcttattaggatacaagctgggaacttctaaacacttcattctttatatatggacagctttattttaaatgtggtttttgatgcctttttttaaatgggtttttatgaactgcatcaagacttcaatcctgattagtgtctccagtcaagctctgggtactgaattgcctgttcataaaacggtgctttctgtgaaagccttaagaagataaatgagtgcagcagagatggagaaatagactttgccttttacctgagacattcagttcctttgtattctacctttgtaaaacagcctatagatgatgatgtgtttgggatactgcctagtttatgatagtttgtcctgtctccttagtgatgtgtgtgtgtctccatgcacatgcacgccaggattcctctgctgccatttgaattagaagaaaataatttatatgcatgcacaggaagatattggtggctggtggttttgtgctttaaaaatgcaatatctgaccaagattcgccaatctcatacaagccatttactttgcaagtgagatagcttccccaccagctttattttttaacatgaaagctgatgccaaggccaaaagaagtttaaagcatctgtaaatttggactgttttccttcaaccaccatttttttttgtggttattatttttgtcacggaaaacatcctctccaaagttggagcttctattgccatgaaccatgcttacaaagaaagcacttcttattgaaatgaattcctgcatttgatagcaatgtaagtgcctataaccatgttctgtattctttattctcagtaacttttaaaagggaagttatttatattttgtgtataatgtgctttatttgcaaatcacccactcctttacaaccatactttatatatgtacatacattcatactgtagaaaccagctcatgtgtacctcatatcccatccttaagggaagaaatgttataaagtagaactaaatataaattttcagaattaatgcattcaaagtaatatatcaaatccaggactttgttaacttcaggcaaaaacttcattagggtaatatcatctcaattttttcaaatgaaaggattctctaattagaaatttatatgtcagagctgttctaaatttatcaactgtcaaatatgttttggacagctaaatcatttgagatttttggttttttgatttctattccctaacttgtgaagacaatgaaaaatcaggcagaaatatttagtatctagtcagtatctgtagctacactgtataactgttcttcaataaaatggttcatatttaaaa

SEQ ID NO: 170 - DNA, 2617 bp, Homo sapiens
ctcgctgcccaggcccccgacgccgcggcaggagccccccaagagcgcgggaagccccgtggacctggcgctcccggctcgggcgtggacggggcgggcgccggggcggggcgcgcgtcctcgcgggtctgaatggaagggtcgaggtcgtcgtcggcggcgagcagatcctgaagccagaactccaccccggcgcccgcgccatgcggcgggagaggtgcggcgccccccacccgcgtcgccgccatggaggtgctgcggcgctcctcggtcttcgccgccgagatcatggacgcctttgaccgctcgcccacagacaaggagctggtggcccaggccaaggcgctgggccgggagtacgtgcacgcgcggctgctgcgcgccggcctctcctggagcgcgcccgagcgtgccgcgccggtcccgggacgcctggctgaggtgtgcgcggtgctgctgcgcctgggcgatgagctggagatgatccggcccagcgtctaccgcaacgtggcgcgtcagctgcacatctccctgcagtctgagcctgtggtgaccgatgcgttcctggccgtggctggccacatcttctctgcaggcatcacgtggggcaaggtggtgtccctgtatgcggtggccgcggggctggccgtggactgtgtgaggcaggcccagcctgccatggtccacgccctcgtggactgcctgggggagttcgtgcgcaagaccctggcaacctggctgcggagacgcggcggatggactgatgtcctcaagtgtgtggtcagcacagaccctggcctccgctcccactggctggtggctgcactctgcagcttcggccgcttcctgaaggctgccttcttcgtgctgctgccagagagatgagctgcccacctggcagtggccgcagcctggccctctgggcccaacgcaggaggccctcagcacccgaacacatcttcctcctccccacccgagcctggagcactctaaccctcggagaccccctaagccccgttcctccgcagacccaggccctccggaaggggtgagtggggaggggctttcctgagcctggagctgggctttggggcagcctgcgaccctccccgcttgtgtcccttctcctgtgatctctgtgttttcccttttctttctggggccaggaagtcagggtcaactcccaggcctcagatgcaggggcccagaacacctgctctcacctgagccccaggtgaaggggcccgggaacacctgctctcacctgagccccaggtgaaggggcccgggaacacctgctctcacctgaaccccaggtgaaggggcccggaacacctgctctcacctgagccccaggtgaaggggcccggaacacctgctctcacctgagccccaggtgaaggggcccgggaacacctgctctcacctgagccccaggtgaaggggcccgggaacacctgctctcacctgaaccccaggtgaaggggcccagaacacctgctctcacctgagccccaggtgaaggggcccggaacacctgctctcacctgagccccaggtgaaggggcccgggaacacctgctctcacctgagcccctggtgaaggggcccggaacacttgctctcacctgagccccaggtgaaggggcccggaacacctgctctcacctgagcccccggtgaaggggcccggaacacttgctctcacctgagccccaggtgaaggggcccggaacacctcctctcacctgagccccaggtgaaggggcccggaacacctcctgtcacctgagccccaggtgaaggggcccgggaacacctctcacctgaacccgggggtcccatcccaggaagaagggccatctcaggacatgagtcctcaggggccctgcacattcaatctgaaggtgaccctggcctggctgaagctggaagagctgtggggactcagcctgtaaacagagcgtaaggttcacatgctggttgcttaatccgtttctggaggaagagtatgacacccacttgtgatggggtccttgtgcggtggggaccggggccggcgggctccaggccagcacacctaacccatggatgtggaacctacggccgagaaggaatgttgcatgagtcggatcccagtccattgtcagtggagggtgagggtgaccccatctgctatttttgtgctcatcctcatacaaccatttggggatgtgcctattagggctccgtaagaactcagatgcctgggaagcccagcccctcaggtgcccccacacacagccttcccttgacgcctacatttctaggcacatgtgaggcatctttcctggagccccgagccagccctgtccctccccagtgcagcatggcactcaggagatacaggctggacatggggcagtcgttctggggaggcctggcctagcagccacccacctgagccctcccggccaggcttcgtgctggggtgggccatgtgccaggacaggagggtcccggcggaaagccagccccggactcatcgtgacattgagatcccactggagggtaggggtggtaataaacttctccaaacgatcgttgtcattttagacagaaaaaaaaaaaaaaaaaa

SEQ ID NO: 171 - DNA, 7185 bp, Homo sapiens
cttagcggtagccccttggtttccgtggcaacggaaaagcgcgggaattacagataaattaaaactgcgactgcgcggcgtgagctcgctgagacttcctggacgggggacaggctgtggggtttctcagataactgggcccctgcgctcaggaggccttcaccctctgctctggttcattggaacagaaagaaatggatttatctgctcttcgcgttgaagaagtacaaaatgtcattaatgctatgcagaaaatcttagagtgtcccatctgtctggagttgatcaaggaacctgtctccacaaagtgtgaccacatattttgcaaattttgcatgctgaaacttctcaaccagaagaaagggccttcacagtgtcctttatgtaagaatgatataaccaaaaggagcctacaagaaagtacgagatttagtcaacttgttgaagagctattgaaaatcatttgtgcttttcagcttgacacaggtttggagtatgcaaacagctataattttgcaaaaaaggaaaataactctcctgaacatctaaaagatgaagtttctatcatccaaagtatgggctacagaaaccgtgccaaaagacttctacagagtgaacccgaaaatccttccttgcaggaaaccagtctcagtgtccaactctctaaccttggaactgtgagaactctgaggacaaagcagcggatacaacctcaaaagacgtctgtctacattgaattgggatctgattcttctgaagataccgttaataaggcaacttattgcagtgtgggagatcaagaattgttacaaatcacccctcaaggaaccagggatgaaatcagtttggattctgcaaaaaaggctgcttgtgaattttctgagacggatgtaacaaatactgaacatcatcaacccagtaataatgatttgaacaccactgagaagcgtgcagctgagaggcatccagaaaagtatcagggtagttctgtttcaaacttgcatgtggagccatgtggcacaaatactcatgccagctcattacagcatgagaacagcagtttattactcactaaagacagaatgaatgtagaaaaggctgaattctgtaataaaagcaaacagcctggcttagcaaggagccaacataacagatgggctggaagtaaggaaacatgtaatgataggcggactcccagcacagaaaaaaaggtagatctgaatgctgatcccctgtgtgagagaaaagaatggaataagcagaaactgccatgctcagagaatcctagagatactgaagatgttccttggataacactaaatagcagcattcagaaagttaatgagtggttttccagaagtgatgaactgttaggttctgatgactcacatgatggggagtctgaatcaaatgccaaagtagctgatgtattggacgttctaaatgaggtagatgaatattctggttcttcagagaaaatagacttactggccagtgatcctcatgaggctttaatatgtaaaagtgaaagagttcactccaaatcagtagagagtaatattgaagacaaaatatttgggaaaacctatcggaagaaggcaagcctccccaacttaagccatgtaactgaaaatctaattataggagcatttgttactgagccacagataatacaagagcgtcccctcacaaataaattaaagcgtaaaaggagacctacatcaggccttcatcctgaggattttatcaagaaagcagatttggcagttcaaaagactcctgaaatgataaatcagggaactaaccaaacggagcagaatggtcaagtgatgaatattactaatagtggtcatgagaataaaacaaaaggtgattctattcagaatgagaaaaatcctaacccaatagaatcactcgaaaaagaatctgctttcaaaacgaaagctgaacctataagcagcagtataagcaatatggaactcgaattaaatatccacaattcaaaagcacctaaaaagaataggctgaggaggaagtcttctaccaggcatattcatgcgcttgaactagtagtcagtagaaatctaagcccacctaattgtactgaattgcaaattgatagttgttctagcagtgaagagataaagaaaaaaaagtacaaccaaatgccagtcaggcacagcagaaacctacaactcatggaaggtaaagaacctgcaactggagccaagaagagtaacaagccaaatgaacagacaagtaaaagacatgacagcgatactttcccagagctgaagttaacaaatgcacctggttcttttactaagtgttcaaataccagtgaacttaaagaatttgtcaatcctagccttccaagagaagaaaaagaagagaaactagaaacagttaaagtgtctaataatgctgaagaccccaaagatctcatgttaagtggagaaagggttttgcaaactgaaagatctgtagagagtagcagtatttcattggtacctggtactgattatggcactcaggaaagtatctcgttactggaagttagcactctagggaaggcaaaaacagaaccaaataaatgtgtgagtcagtgtgcagcatttgaaaaccccaagggactaattcatggttgttccaaagataatagaaatgacacagaaggctttaagtatccattgggacatgaagttaaccacagtcgggaaacaagcatagaaatggaagaaagtgaacttgatgctcagtatttgcagaatacattcaaggtttcaaagcgccagtcatttgctccgttttcaaatccaggaaatgcagaagaggaatgtgcaacattctctgcccactctgggtccttaaagaaacaaagtccaaaagtcacttttgaatgtgaacaaaaggaagaaaatcaaggaaagaatgagtctaatatcaagcctgtacagacagttaatatcactgcaggctttcctgtggttggtcagaaagataagccagttgataatgccaaatgtagtatcaaaggaggctctaggttttgtctatcatctcagttcagaggcaacgaaactggactcattactccaaataaacatggacttttacaaaacccatatcgtataccaccactttttcccatcaagtcatttgttaaaactaaatgtaagaaaaatctgctagaggaaaactttgaggaacattcaatgtcacctgaaagagaaatgggaaatgagaacattccaagtacagtgagcacaattagccgtaataacattagagaaaatgtttttaaagaagccagctcaagcaatattaatgaagtaggttccagtactaatgaagtgggctccagtattaatgaaataggttccagtgatgaaaacattcaagcagaactaggtagaaacagagggccaaaattgaatgctatgcttagattaggggttttgcaacctgaggtctataaacaaagtcttcctggaagtaattgtaagcatcctgaaataaaaaagcaagaatatgaagaagtagttcagactgttaatacagatttctctccatatctgatttcagataacttagaacagcctatgggaagtagtcatgcatctcaggtttgttctgagacacctgatgacctgttagatgatggtgaaataaaggaagatactagttttgctgaaaatgacattaaggaaagttctgctgtttttagcaaaagcgtccagaaaggagagcttagcaggagtcctagccctttcacccatacacatttggctcagggttaccgaagaggggccaagaaattagagtcctcagaagagaacttatctagtgaggatgaagagcttccctgcttccaacacttgttatttggtaaagtaaacaatataccttctcagtctactaggcatagcaccgttgctaccgagtgtctgtctaagaacacagaggagaatttattatcattgaagaatagcttaaatgactgcagtaaccaggtaatattggcaaaggcatctcaggaacatcaccttagtgaggaaacaaaatgttctgctagcttgttttcttcacagtgcagtgaattggaagacttgactgcaaatacaaacacccaggatcctttcttgattggttcttccaaacaaatgaggcatcagtctgaaagccagggagttggtctgagtgacaaggaattggtttcagatgatgaagaaagaggaacgggcttggaagaaaataatcaagaagagcaaagcatggattcaaacttaggtgaagcagcatctgggtgtgagagtgaaacaagcgtctctgaagactgctcagggctatcctctcagagtgacattttaaccactcagcagagggataccatgcaacataacctgataaagctccagcaggaaatggctgaactagaagctgtgttagaacagcatgggagccagccttctaacagctacccttccatcataagtgactcttctgcccttgaggacctgcgaaatccagaacaaagcacatcagaaaaagcagtattaacttcacagaaaagtagtgaataccctataagccagaatccagaaggcctttctgctgacaagtttgaggtgtctgcagatagttctaccagtaaaaataaagaaccaggagtggaaaggtcatccccttctaaatgcccatcattagatgataggtggtacatgcacagttgctctgggagtcttcagaatagaaactacccatctcaagaggagctcattaaggttgttgatgtggaggagcaacagctggaagagtctgggccacacgatttgacggaaacatcttacttgccaaggcaagatctagagggaaccccttacctggaatctggaatcagcctcttctctgatgaccctgaatctgatccttctgaagacagagccccagagtcagctcgtgttggcaacataccatcttcaacctctgcattgaaagttccccaattgaaagttgcagaatctgcccagagtccagctgctgctcatactactgatactgctgggtataatgcaatggaagaaagtgtgagcagggagaagccagaattgacagcttcaacagaaagggtcaacaaaagaatgtccatggtggtgtctggcctgaccccagaagaatttatgctcgtgtacaagtttgccagaaaacaccacatcactttaactaatctaattactgaagagactactcatgttgttatgaaaacagatgctgagtttgtgtgtgaacggacactgaaatattttctaggaattgcgggaggaaaatgggtagttagctatttctgggtgacccagtctattaaagaaagaaaaatgctgaatgagcatgattttgaagtcagaggagatgtggtcaatggaagaaaccaccaaggtccaaagcgagcaagagaatcccaggacagaaagatcttcagggggctagaaatctgttgctatgggcccttcaccaacatgcccacagatcaactggaatggatggtacagctgtgtggtgcttctgtggtgaaggagctttcatcattcacccttggcacaggtgtccacccaattgtggttgtgcagccagatgcctggacagaggacaatggcttccatgcaattgggcagatgtgtgaggcacctgtggtgacccgagagtgggtgttggacagtgtagcactctaccagtgccaggagctggacacctacctgataccccagatcccccacagccactactgactgcagccagccacaggtacagagccacaggaccccaagaatgagcttacaaagtggcctttccaggccctgggagctcctctcactcttcagtccttctactgtcctggctactaaatattttatgtacatcagcctgaaaaggacttctggctatgcaagggtcccttaaagattttctgcttgaagtctcccttggaaatctgccatgagcacaaaattatggtaatttttcacctgagaagattttaaaaccatttaaacgccaccaattgagcaagatgctgattcattatttatcagccctattctttctattcaggctgttgttggcttagggctggaagcacagagtggcttggcctcaagagaatagctggtttccctaagtttacttctctaaaaccctgtgttcacaaaggcagagagtcagacccttcaatggaaggagagtgcttgggatcgattatgtgacttaaagtcagaatagtccttgggcagttctcaaatgttggagtggaacattggggaggaaattctgaggcaggtattagaaatgaaaaggaaacttgaaacctgggcatggtggctcacgcctgtaatcccagcactttgggaggccaaggtgggcagatcactggaggtcaggagttcgaaaccagcctggccaacatggtgaaaccccatctctactaaaaatacagaaattagccggtcatggtggtggacacctgtaatcccagctactcaggtggctaaggcaggagaatcacttcagcccgggaggtggaggttgcagtgagccaagatcataccacggcactccagcctgggtgacagtgagactgtggctcaaaaaaaaaaaaaaaaaaaggaaaatgaaactagaagagatttctaaaagtctgagatatatttgctagatttctaaagaatgtgttctaaaacagcagaagattttcaagaaccggtttccaaagacagtcttctaattcctcattagtaataagtaaaatgtttattgttgtagctctggtatataatccattcctcttaaaatataagacctctggcatgaatatttcatatctataaaatgacagatcccaccaggaaggaagctgttgctttctttgaggtgatttttttcctttgctccctgttgctgaaaccatacagcttcataaataattttgcttgctgaaggaagaaaaagtgtttttcataaacccattatccaggactgtttatagctgttggaaggactaggtcttccctagcccccccagtgtgcaagggcagtgaagacttgattgtacaaaatacgttttgtaaatgttgtgctgttaacactgcaaataaacttggtagcaaacacttcaaaaaaaaaaaaaaaaaa

SEQ ID NO: 172 - DNA, 6502 bp, Homo sapiens
cttagcggtagccccttggtttccgtggcaacggaaaagcgcgggaattacagataaattaaaactgcgactgcgcggcgtgagctcgctgagacttcctggacgggggacaggctgtggggtttctcagataactgggcccctgcgctcaggaggccttcaccctctgctctgggtaaagctgcttgtgaattttctgagacggatgtaacaaatactgaacatcatcaacccagtaataatgatttgaacaccactgagaagcgtgcagctgagaggcatccagaaaagtatcagggtagttctgtttcaaacttgcatgtggagccatgtggcacaaatactcatgccagctcattacagcatgagaacagcagtttattactcactaaagacagaatgaatgtagaaaaggctgaattctgtaataaaagcaaacagcctggcttagcaaggagccaacataacagatgggctggaagtaaggaaacatgtaatgataggcggactcccagcacagaaaaaaaggtagatctgaatgctgatcccctgtgtgagagaaaagaatggaataagcagaaactgccatgctcagagaatcctagagatactgaagatgttccttggataacactaaatagcagcattcagaaagttaatgagtggttttccagaagtgatgaactgttaggttctgatgactcacatgatggggagtctgaatcaaatgccaaagtagctgatgtattggacgttctaaatgaggtagatgaatattctggttcttcagagaaaatagacttactggccagtgatcctcatgaggctttaatatgtaaaagtgaaagagttcactccaaatcagtagagagtaatattgaagacaaaatatttgggaaaacctatcggaagaaggcaagcctccccaacttaagccatgtaactgaaaatctaattataggagcatttgttactgagccacagataatacaagagcgtcccctcacaaataaattaaagcgtaaaaggagacctacatcaggccttcatcctgaggattttatcaagaaagcagatttggcagttcaaaagactcctgaaatgataaatcagggaactaaccaaacggagcagaatggtcaagtgatgaatattactaatagtggtcatgagaataaaacaaaaggtgattctattcagaatgagaaaaatcctaacccaatagaatcactcgaaaaagaatctgctttcaaaacgaaagctgaacctataagcagcagtataagcaatatggaactcgaattaaatatccacaattcaaaagcacctaaaaagaataggctgaggaggaagtcttctaccaggcatattcatgcgcttgaactagtagtcagtagaaatctaagcccacctaattgtactgaattgcaaattgatagttgttctagcagtgaagagataaagaaaaaaaagtacaaccaaatgccagtcaggcacagcagaaacctacaactcatggaaggtaaagaacctgcaactggagccaagaagagtaacaagccaaatgaacagacaagtaaaagacatgacagcgatactttcccagagctgaagttaacaaatgcacctggttcttttactaagtgttcaaataccagtgaacttaaagaatttgtcaatcctagccttccaagagaagaaaaagaagagaaactagaaacagttaaagtgtctaataatgctgaagaccccaaagatctcatgttaagtggagaaagggttttgcaaactgaaagatctgtagagagtagcagtatttcattggtacctggtactgattatggcactcaggaaagtatctcgttactggaagttagcactctagggaaggcaaaaacagaaccaaataaatgtgtgagtcagtgtgcagcatttgaaaaccccaagggactaattcatggttgttccaaagataatagaaatgacacagaaggctttaagtatccattgggacatgaagttaaccacagtcgggaaacaagcatagaaatggaagaaagtgaacttgatgctcagtatttgcagaatacattcaaggtttcaaagcgccagtcatttgctccgttttcaaatccaggaaatgcagaagaggaatgtgcaacattctctgcccactctgggtccttaaagaaacaaagtccaaaagtcacttttgaatgtgaacaaaaggaagaaaatcaaggaaagaatgagtctaatatcaagcctgtacagacagttaatatcactgcaggctttcctgtggttggtcagaaagataagccagttgataatgccaaatgtagtatcaaaggaggctctaggttttgtctatcatctcagttcagaggcaacgaaactggactcattactccaaataaacatggacttttacaaaacccatatcgtataccaccactttttcccatcaagtcatttgttaaaactaaatgtaagaaaaatctgctagaggaaaactttgaggaacattcaatgtcacctgaaagagaaatgggaaatgagaacattccaagtacagtgagcacaattagccgtaataacattagagaaaatgtttttaaagaagccagctcaagcaatattaatgaagtaggttccagtactaatgaagtgggctccagtattaatgaaataggttccagtgatgaaaacattcaagcagaactaggtagaaacagagggccaaaattgaatgctatgcttagattaggggttttgcaacctgaggtctataaacaaagtcttcctggaagtaattgtaagcatcctgaaataaaaaagcaagaatatgaagaagtagttcagactgttaatacagatttctctccatatctgatttcagataacttagaacagcctatgggaagtagtcatgcatctcaggtttgttctgagacacctgatgacctgttagatgatggtgaaataaaggaagatactagttttgctgaaaatgacattaaggaaagttctgctgtttttagcaaaagcgtccagaaaggagagcttagcaggagtcctagccctttcacccatacacatttggctcagggttaccgaagaggggccaagaaattagagtcctcagaagagaacttatctagtgaggatgaagagcttccctgcttccaacacttgttatttggtaaagtaaacaatataccttctcagtctactaggcatagcaccgttgctaccgagtgtctgtctaagaacacagaggagaatttattatcattgaagaatagcttaaatgactgcagtaaccaggtaatattggcaaaggcatctcaggaacatcaccttagtgaggaaacaaaatgttctgctagcttgttttcttcacagtgcagtgaattggaagacttgactgcaaatacaaacacccaggatcctttcttgattggttcttccaaacaaatgaggcatcagtctgaaagccagggagttggtctgagtgacaaggaattggtttcagatgatgaagaaagaggaacgggcttggaagaaaataatcaagaagagcaaagcatggattcaaacttaggtgaagcagcatctgggtgtgagagtgaaacaagcgtctctgaagactgctcagggctatcctctcagagtgacattttaaccactcagcagagggataccatgcaacataacctgataaagctccagcaggaaatggctgaactagaagctgtgttagaacagcatgggagccagccttctaacagctacccttccatcataagtgactcttctgcccttgaggacctgcgaaatccagaacaaagcacatcagaaaaagcagtattaacttcacagaaaagtagtgaataccctataagccagaatccagaaggcctttctgctgacaagtttgaggtgtctgcagatagttctaccagtaaaaataaagaaccaggagtggaaaggtcatccccttctaaatgcccatcattagatgataggtggtacatgcacagttgctctgggagtcttcagaatagaaactacccatctcaagaggagctcattaaggttgttgatgtggaggagcaacagctggaagagtctgggccacacgatttgacggaaacatcttacttgccaaggcaagatctagagggaaccccttacctggaatctggaatcagcctcttctctgatgaccctgaatctgatccttctgaagacagagccccagagtcagctcgtgttggcaacataccatcttcaacctctgcattgaaagttccccaattgaaagttgcagaatctgcccagagtccagctgctgctcatactactgatactgctgggtataatgcaatggaagaaagtgtgagcagggagaagccagaattgacagcttcaacagaaagggtcaacaaaagaatgtccatggtggtgtctggcctgaccccagaagaatttatgctcgtgtacaagtttgccagaaaacaccacatcactttaactaatctaattactgaagagactactcatgttgttatgaaaacagatgctgagtttgtgtgtgaacggacactgaaatattttctaggaattgcgggaggaaaatgggtagttagctatttctgggtgacccagtctattaaagaaagaaaaatgctgaatgagcatgattttgaagtcagaggagatgtggtcaatggaagaaaccaccaaggtccaaagcgagcaagagaatcccaggacagaaagatcttcagggggctagaaatctgttgctatgggcccttcaccaacatgcccacagatcaactggaatggatggtacagctgtgtggtgcttctgtggtgaaggagctttcatcattcacccttggcacaggtgtccacccaattgtggttgtgcagccagatgcctggacagaggacaatggcttccatgcaattgggcagatgtgtgaggcacctgtggtgacccgagagtgggtgttggacagtgtagcactctaccagtgccaggagctggacacctacctgataccccagatcccccacagccactactgactgcagccagccacaggtacagagccacaggaccccaagaatgagcttacaaagtggcctttccaggccctgggagctcctctcactcttcagtccttctactgtcctggctactaaatattttatgtacatcagcctgaaaaggacttctggctatgcaagggtcccttaaagattttctgcttgaagtctcccttggaaatctgccatgagcacaaaattatggtaatttttcacctgagaagattttaaaaccatttaaacgccaccaattgagcaagatgctgattcattatttatcagccctattctttctattcaggctgttgttggcttagggctggaagcacagagtggcttggcctcaagagaatagctggtttccctaagtttacttctctaaaaccctgtgttcacaaaggcagagagtcagacccttcaatggaaggagagtgcttgggatcgattatgtgacttaaagtcagaatagtccttgggcagttctcaaatgttggagtggaacattggggaggaaattctgaggcaggtattagaaatgaaaaggaaacttgaaacctgggcatggtggctcacgcctgtaatcccagcactttgggaggccaaggtgggcagatcactggaggtcaggagttcgaaaccagcctggccaacatggtgaaaccccatctctactaaaaatacagaaattagccggtcatggtggtggacacctgtaatcccagctactcaggtggctaaggcaggagaatcacttcagcccgggaggtggaggttgcagtgagccaagatcataccacggcactccagcctgggtgacagtgagactgtggctcaaaaaaaaaaaaaaaaaaaggaaaatgaaactagaagagatttctaaaagtctgagatatatttgctagatttctaaagaatgtgttctaaaacagcagaagattttcaagaaccggtttccaaagacagtcttctaattcctcattagtaataagtaaaatgtttattgttgtagctctggtatataatccattcctcttaaaatataagacctctggcatgaatatttcatatctataaaatgacagatcccaccaggaaggaagctgttgctttctttgaggtgatttttttcctttgctccctgttgctgaaaccatacagcttcataaataattttgcttgctgaaggaagaaaaagtgtttttcataaacccattatccaggactgtttatagctgttggaaggactaggtcttccctagcccccccagtgtgcaagggcagtgaagacttgattgtacaaaatacgttttgtaaatgttgtgctgttaacactgcaaataaacttggtagcaaacacttcaaaaaaaaaaaaaaaaaa

SEQ ID NO: 173 - DNA, 7068 bp, Homo sapiens
cttagcggtagccccttggtttccgtggcaacggaaaagcgcgggaattacagataaattaaaactgcgactgcgcggcgtgagctcgctgagacttcctggacgggggacaggctgtggggtttctcagataactgggcccctgcgctcaggaggccttcaccctctgctctgggtaaagttcattggaacagaaagaaatggatttatctgctcttcgcgttgaagaagtacaaaatgtcattaatgctatgcagaaaatcttagagtgtcccatctgtctggagttgatcaaggaacctgtctccacaaagtgtgaccacatattttgcaaattttgcatgctgaaacttctcaaccagaagaaagggccttcacagtgtcctttatgtaagaatgatataaccaaaaggagcctacaagaaagtacgagatttagtcaacttgttgaagagctattgaaaatcatttgtgcttttcagcttgacacaggtttggagtatgcaaacagctataattttgcaaaaaaggaaaataactctcctgaacatctaaaagatgaagtttctatcatccaaagtatgggctacagaaaccgtgccaaaagacttctacagagtgaacccgaaaatccttccttgcaggaaaccagtctcagtgtccaactctctaaccttggaactgtgagaactctgaggacaaagcagcggatacaacctcaaaagacgtctgtctacattgaattggctgcttgtgaattttctgagacggatgtaacaaatactgaacatcatcaacccagtaataatgatttgaacaccactgagaagcgtgcagctgagaggcatccagaaaagtatcagggtagttctgtttcaaacttgcatgtggagccatgtggcacaaatactcatgccagctcattacagcatgagaacagcagtttattactcactaaagacagaatgaatgtagaaaaggctgaattctgtaataaaagcaaacagcctggcttagcaaggagccaacataacagatgggctggaagtaaggaaacatgtaatgataggcggactcccagcacagaaaaaaaggtagatctgaatgctgatcccctgtgtgagagaaaagaatggaataagcagaaactgccatgctcagagaatcctagagatactgaagatgttccttggataacactaaatagcagcattcagaaagttaatgagtggttttccagaagtgatgaactgttaggttctgatgactcacatgatggggagtctgaatcaaatgccaaagtagctgatgtattggacgttctaaatgaggtagatgaatattctggttcttcagagaaaatagacttactggccagtgatcctcatgaggctttaatatgtaaaagtgaaagagttcactccaaatcagtagagagtaatattgaagacaaaatatttgggaaaacctatcggaagaaggcaagcctccccaacttaagccatgtaactgaaaatctaattataggagcatttgttactgagccacagataatacaagagcgtcccctcacaaataaattaaagcgtaaaaggagacctacatcaggccttcatcctgaggattttatcaagaaagcagatttggcagttcaaaagactcctgaaatgataaatcagggaactaaccaaacggagcagaatggtcaagtgatgaatattactaatagtggtcatgagaataaaacaaaaggtgattctattcagaatgagaaaaatcctaacccaatagaatcactcgaaaaagaatctgctttcaaaacgaaagctgaacctataagcagcagtataagcaatatggaactcgaattaaatatccacaattcaaaagcacctaaaaagaataggctgaggaggaagtcttctaccaggcatattcatgcgcttgaactagtagtcagtagaaatctaagcccacctaattgtactgaattgcaaattgatagttgttctagcagtgaagagataaagaaaaaaaagtacaaccaaatgccagtcaggcacagcagaaacctacaactcatggaaggtaaagaacctgcaactggagccaagaagagtaacaagccaaatgaacagacaagtaaaagacatgacagcgatactttcccagagctgaagttaacaaatgcacctggttcttttactaagtgttcaaataccagtgaacttaaagaatttgtcaatcctagccttccaagagaagaaaaagaagagaaactagaaacagttaaagtgtctaataatgctgaagaccccaaagatctcatgttaagtggagaaagggttttgcaaactgaaagatctgtagagagtagcagtatttcattggtacctggtactgattatggcactcaggaaagtatctcgttactggaagttagcactctagggaaggcaaaaacagaaccaaataaatgtgtgagtcagtgtgcagcatttgaaaaccccaagggactaattcatggttgttccaaagataatagaaatgacacagaaggctttaagtatccattgggacatgaagttaaccacagtcgggaaacaagcatagaaatggaagaaagtgaacttgatgctcagtatttgcagaatacattcaaggtttcaaagcgccagtcatttgctccgttttcaaatccaggaaatgcagaagaggaatgtgcaacattctctgcccactctgggtccttaaagaaacaaagtccaaaagtcacttttgaatgtgaacaaaaggaagaaaatcaaggaaagaatgagtctaatatcaagcctgtacagacagttaatatcactgcaggctttcctgtggttggtcagaaagataagccagttgataatgccaaatgtagtatcaaaggaggctctaggttttgtctatcatctcagttcagaggcaacgaaactggactcattactccaaataaacatggacttttacaaaacccatatcgtataccaccactttttcccatcaagtcatttgttaaaactaaatgtaagaaaaatctgctagaggaaaactttgaggaacattcaatgtcacctgaaagagaaatgggaaatgagaacattccaagtacagtgagcacaattagccgtaataacattagagaaaatgtttttaaagaagccagctcaagcaatattaatgaagtaggttccagtactaatgaagtgggctccagtattaatgaaataggttccagtgatgaaaacattcaagcagaactaggtagaaacagagggccaaaattgaatgctatgcttagattaggggttttgcaacctgaggtctataaacaaagtcttcctggaagtaattgtaagcatcctgaaataaaaaagcaagaatatgaagaagtagttcagactgttaatacagatttctctccatatctgatttcagataacttagaacagcctatgggaagtagtcatgcatctcaggtttgttctgagacacctgatgacctgttagatgatggtgaaataaaggaagatactagttttgctgaaaatgacattaaggaaagttctgctgtttttagcaaaagcgtccagaaaggagagcttagcaggagtcctagccctttcacccatacacatttggctcagggttaccgaagaggggccaagaaattagagtcctcagaagagaacttatctagtgaggatgaagagcttccctgcttccaacacttgttatttggtaaagtaaacaatataccttctcagtctactaggcatagcaccgttgctaccgagtgtctgtctaagaacacagaggagaatttattatcattgaagaatagcttaaatgactgcagtaaccaggtaatattggcaaaggcatctcaggaacatcaccttagtgaggaaacaaaatgttctgctagcttgttttcttcacagtgcagtgaattggaagacttgactgcaaatacaaacacccaggatcctttcttgattggttcttccaaacaaatgaggcatcagtctgaaagccagggagttggtctgagtgacaaggaattggtttcagatgatgaagaaagaggaacgggcttggaagaaaataatcaagaagagcaaagcatggattcaaacttaggtgaagcagcatctgggtgtgagagtgaaacaagcgtctctgaagactgctcagggctatcctctcagagtgacattttaaccactcagcagagggataccatgcaacataacctgataaagctccagcaggaaatggctgaactagaagctgtgttagaacagcatgggagccagccttctaacagctacccttccatcataagtgactcttctgcccttgaggacctgcgaaatccagaacaaagcacatcagaaaaagcagtattaacttcacagaaaagtagtgaataccctataagccagaatccagaaggcctttctgctgacaagtttgaggtgtctgcagatagttctaccagtaaaaataaagaaccaggagtggaaaggtcatccccttctaaatgcccatcattagatgataggtggtacatgcacagttgctctgggagtcttcagaatagaaactacccatctcaagaggagctcattaaggttgttgatgtggaggagcaacagctggaagagtctgggccacacgatttgacggaaacatcttacttgccaaggcaagatctagagggaaccccttacctggaatctggaatcagcctcttctctgatgaccctgaatctgatccttctgaagacagagccccagagtcagctcgtgttggcaacataccatcttcaacctctgcattgaaagttccccaattgaaagttgcagaatctgcccagagtccagctgctgctcatactactgatactgctgggtataatgcaatggaagaaagtgtgagcagggagaagccagaattgacagcttcaacagaaagggtcaacaaaagaatgtccatggtggtgtctggcctgaccccagaagaatttatgctcgtgtacaagtttgccagaaaacaccacatcactttaactaatctaattactgaagagactactcatgttgttatgaaaacagatgctgagtttgtgtgtgaacggacactgaaatattttctaggaattgcgggaggaaaatgggtagttagctatttctgggtgacccagtctattaaagaaagaaaaatgctgaatgagcatgattttgaagtcagaggagatgtggtcaatggaagaaaccaccaaggtccaaagcgagcaagagaatcccaggacagaaagatcttcagggggctagaaatctgttgctatgggcccttcaccaacatgcccacagatcaactggaatggatggtacagctgtgtggtgcttctgtggtgaaggagctttcatcattcacccttggcacaggtgtccacccaattgtggttgtgcagccagatgcctggacagaggacaatggcttccatgcaattgggcagatgtgtgaggcacctgtggtgacccgagagtgggtgttggacagtgtagcactctaccagtgccaggagctggacacctacctgataccccagatcccccacagccactactgactgcagccagccacaggtacagagccacaggaccccaagaatgagcttacaaagtggcctttccaggccctgggagctcctctcactcttcagtccttctactgtcctggctactaaatattttatgtacatcagcctgaaaaggacttctggctatgcaagggtcccttaaagattttctgcttgaagtctcccttggaaatctgccatgagcacaaaattatggtaatttttcacctgagaagattttaaaaccatttaaacgccaccaattgagcaagatgctgattcattatttatcagccctattctttctattcaggctgttgttggcttagggctggaagcacagagtggcttggcctcaagagaatagctggtttccctaagtttacttctctaaaaccctgtgttcacaaaggcagagagtcagacccttcaatggaaggagagtgcttgggatcgattatgtgacttaaagtcagaatagtccttgggcagttctcaaatgttggagtggaacattggggaggaaattctgaggcaggtattagaaatgaaaaggaaacttgaaacctgggcatggtggctcacgcctgtaatcccagcactttgggaggccaaggtgggcagatcactggaggtcaggagttcgaaaccagcctggccaacatggtgaaaccccatctctactaaaaatacagaaattagccggtcatggtggtggacacctgtaatcccagctactcaggtggctaaggcaggagaatcacttcagcccgggaggtggaggttgcagtgagccaagatcataccacggcactccagcctgggtgacagtgagactgtggctcaaaaaaaaaaaaaaaaaaaggaaaatgaaactagaagagatttctaaaagtctgagatatatttgctagatttctaaagaatgtgttctaaaacagcagaagattttcaagaaccggtttccaaagacagtcttctaattcctcattagtaataagtaaaatgtttattgttgtagctctggtatataatccattcctcttaaaatataagacctctggcatgaatatttcatatctataaaatgacagatcccaccaggaaggaagctgttgctttctttgaggtgatttttttcctttgctccctgttgctgaaaccatacagcttcataaataattttgcttgctgaaggaagaaaaagtgtttttcataaacccattatccaggactgtttatagctgttggaaggactaggtcttccctagcccccccagtgtgcaagggcagtgaagacttgattgtacaaaatacgttttgtaaatgttgtgctgttaacactgcaaataaacttggtagcaaacacttcaaaaaaaaaaaaaaaaaa

SEQ ID NO: 174 - DNA, 7307 bp, Homo sapiens
cttagcggtagccccttggtttccgtggcaacggaaaagcgcgggaattacagataaattaaaactgcgactgcgcggcgtgagctcgctgagacttcctggacgggggacaggctgtggggtttctcagataactgggcccctgcgctcaggaggccttcaccctctgctctgggtaaagttcattggaacagaaagaaatggatttatctgctcttcgcgttgaagaagtacaaaatgtcattaatgctatgcagaaaatcttagagtgtcccatctgtctggagttgatcaaggaacctgtctccacaaagtgtgaccacatattttgcaaggtcttactctgttgtcccagctggagtacagtggtgcgatcatgaggcttactgttgccttgacctcctaggctcaagcgatcctatcacctcagtctcccaagtagctgggactattttgcatgctgaaacttctcaaccagaagaaagggccttcacagtgtcctttatgtaagaatgatataaccaaaaggagcctacaagaaagtacgagatttagtcaacttgttgaagagctattgaaaatcatttgtgcttttcagcttgacacaggtttggagtatgcaaacagctataattttgcaaaaaaggaaaataactctcctgaacatctaaaagatgaagtttctatcatccaaagtatgggctacagaaaccgtgccaaaagacttctacagagtgaacccgaaaatccttccttgcaggaaaccagtctcagtgtccaactctctaaccttggaactgtgagaactctgaggacaaagcagcggatacaacctcaaaagacgtctgtctacattgaattgggatctgattcttctgaagataccgttaataaggcaacttattgcagtgtgggagatcaagaattgttacaaatcacccctcaaggaaccagggatgaaatcagtttggattctgcaaaaaaggctgcttgtgaattttctgagacggatgtaacaaatactgaacatcatcaacccagtaataatgatttgaacaccactgagaagcgtgcagctgagaggcatccagaaaagtatcagggtagttctgtttcaaacttgcatgtggagccatgtggcacaaatactcatgccagctcattacagcatgagaacagcagtttattactcactaaagacagaatgaatgtagaaaaggctgaattctgtaataaaagcaaacagcctggcttagcaaggagccaacataacagatgggctggaagtaaggaaacatgtaatgataggcggactcccagcacagaaaaaaaggtagatctgaatgctgatcccctgtgtgagagaaaagaatggaataagcagaaactgccatgctcagagaatcctagagatactgaagatgttccttggataacactaaatagcagcattcagaaagttaatgagtggttttccagaagtgatgaactgttaggttctgatgactcacatgatggggagtctgaatcaaatgccaaagtagctgatgtattggacgttctaaatgaggtagatgaatattctggttcttcagagaaaatagacttactggccagtgatcctcatgaggctttaatatgtaaaagtgaaagagttcactccaaatcagtagagagtaatattgaagacaaaatatttgggaaaacctatcggaagaaggcaagcctccccaacttaagccatgtaactgaaaatctaattataggagcatttgttactgagccacagataatacaagagcgtcccctcacaaataaattaaagcgtaaaaggagacctacatcaggccttcatcctgaggattttatcaagaaagcagatttggcagttcaaaagactcctgaaatgataaatcagggaactaaccaaacggagcagaatggtcaagtgatgaatattactaatagtggtcatgagaataaaacaaaaggtgattctattcagaatgagaaaaatcctaacccaatagaatcactcgaaaaagaatctgctttcaaaacgaaagctgaacctataagcagcagtataagcaatatggaactcgaattaaatatccacaattcaaaagcacctaaaaagaataggctgaggaggaagtcttctaccaggcatattcatgcgcttgaactagtagtcagtagaaatctaagcccacctaattgtactgaattgcaaattgatagttgttctagcagtgaagagataaagaaaaaaaagtacaaccaaatgccagtcaggcacagcagaaacctacaactcatggaaggtaaagaacctgcaactggagccaagaagagtaacaagccaaatgaacagacaagtaaaagacatgacagcgatactttcccagagctgaagttaacaaatgcacctggttcttttactaagtgttcaaataccagtgaacttaaagaatttgtcaatcctagccttccaagagaagaaaaagaagagaaactagaaacagttaaagtgtctaataatgctgaagaccccaaagatctcatgttaagtggagaaagggttttgcaaactgaaagatctgtagagagtagcagtatttcattggtacctggtactgattatggcactcaggaaagtatctcgttactggaagttagcactctagggaaggcaaaaacagaaccaaataaatgtgtgagtcagtgtgcagcatttgaaaaccccaagggactaattcatggttgttccaaagataatagaaatgacacagaaggctttaagtatccattgggacatgaagttaaccacagtcgggaaacaagcatagaaatggaagaaagtgaacttgatgctcagtatttgcagaatacattcaaggtttcaaagcgccagtcatttgctccgttttcaaatccaggaaatgcagaagaggaatgtgcaacattctctgcccactctgggtccttaaagaaacaaagtccaaaagtcacttttgaatgtgaacaaaaggaagaaaatcaaggaaagaatgagtctaatatcaagcctgtacagacagttaatatcactgcaggctttcctgtggttggtcagaaagataagccagttgataatgccaaatgtagtatcaaaggaggctctaggttttgtctatcatctcagttcagaggcaacgaaactggactcattactccaaataaacatggacttttacaaaacccatatcgtataccaccactttttcccatcaagtcatttgttaaaactaaatgtaagaaaaatctgctagaggaaaactttgaggaacattcaatgtcacctgaaagagaaatgggaaatgagaacattccaagtacagtgagcacaattagccgtaataacattagagaaaatgtttttaaagaagccagctcaagcaatattaatgaagtaggttccagtactaatgaagtgggctccagtattaatgaaataggttccagtgatgaaaacattcaagcagaactaggtagaaacagagggccaaaattgaatgctatgcttagattaggggttttgcaacctgaggtctataaacaaagtcttcctggaagtaattgtaagcatcctgaaataaaaaagcaagaatatgaagaagtagttcagactgttaatacagatttctctccatatctgatttcagataacttagaacagcctatgggaagtagtcatgcatctcaggtttgttctgagacacctgatgacctgttagatgatggtgaaataaaggaagatactagttttgctgaaaatgacattaaggaaagttctgctgtttttagcaaaagcgtccagaaaggagagcttagcaggagtcctagccctttcacccatacacatttggctcagggttaccgaagaggggccaagaaattagagtcctcagaagagaacttatctagtgaggatgaagagcttccctgcttccaacacttgttatttggtaaagtaaacaatataccttctcagtctactaggcatagcaccgttgctaccgagtgtctgtctaagaacacagaggagaatttattatcattgaagaatagcttaaatgactgcagtaaccaggtaatattggcaaaggcatctcaggaacatcaccttagtgaggaaacaaaatgttctgctagcttgttttcttcacagtgcagtgaattggaagacttgactgcaaatacaaacacccaggatcctttcttgattggttcttccaaacaaatgaggcatcagtctgaaagccagggagttggtctgagtgacaaggaattggtttcagatgatgaagaaagaggaacgggcttggaagaaaataatcaagaagagcaaagcatggattcaaacttaggtgaagcagcatctgggtgtgagagtgaaacaagcgtctctgaagactgctcagggctatcctctcagagtgacattttaaccactcagcagagggataccatgcaacataacctgataaagctccagcaggaaatggctgaactagaagctgtgttagaacagcatgggagccagccttctaacagctacccttccatcataagtgactcttctgcccttgaggacctgcgaaatccagaacaaagcacatcagaaaaagcagtattaacttcacagaaaagtagtgaataccctataagccagaatccagaaggcctttctgctgacaagtttgaggtgtctgcagatagttctaccagtaaaaataaagaaccaggagtggaaaggtcatccccttctaaatgcccatcattagatgataggtggtacatgcacagttgctctgggagtcttcagaatagaaactacccatctcaagaggagctcattaaggttgttgatgtggaggagcaacagctggaagagtctgggccacacgatttgacggaaacatcttacttgccaaggcaagatctagagggaaccccttacctggaatctggaatcagcctcttctctgatgaccctgaatctgatccttctgaagacagagccccagagtcagctcgtgttggcaacataccatcttcaacctctgcattgaaagttccccaattgaaagttgcagaatctgcccagagtccagctgctgctcatactactgatactgctgggtataatgcaatggaagaaagtgtgagcagggagaagccagaattgacagcttcaacagaaagggtcaacaaaagaatgtccatggtggtgtctggcctgaccccagaagaatttatgctcgtgtacaagtttgccagaaaacaccacatcactttaactaatctaattactgaagagactactcatgttgttatgaaaacagatgctgagtttgtgtgtgaacggacactgaaatattttctaggaattgcgggaggaaaatgggtagttagctatttctgggtgacccagtctattaaagaaagaaaaatgctgaatgagcatgattttgaagtcagaggagatgtggtcaatggaagaaaccaccaaggtccaaagcgagcaagagaatcccaggacagaaagatcttcagggggctagaaatctgttgctatgggcccttcaccaacatgcccacagatcaactggaatggatggtacagctgtgtggtgcttctgtggtgaaggagctttcatcattcacccttggcacaggtgtccacccaattgtggttgtgcagccagatgcctggacagaggacaatggcttccatgcaattgggcagatgtgtgaggcacctgtggtgacccgagagtgggtgttggacagtgtagcactctaccagtgccaggagctggacacctacctgataccccagatcccccacagccactactgactgcagccagccacaggtacagagccacaggaccccaagaatgagcttacaaagtggcctttccaggccctgggagctcctctcactcttcagtccttctactgtcctggctactaaatattttatgtacatcagcctgaaaaggacttctggctatgcaagggtcccttaaagattttctgcttgaagtctcccttggaaatctgccatgagcacaaaattatggtaatttttcacctgagaagattttaaaaccatttaaacgccaccaattgagcaagatgctgattcattatttatcagccctattctttctattcaggctgttgttggcttagggctggaagcacagagtggcttggcctcaagagaatagctggtttccctaagtttacttctctaaaaccctgtgttcacaaaggcagagagtcagacccttcaatggaaggagagtgcttgggatcgattatgtgacttaaagtcagaatagtccttgggcagttctcaaatgttggagtggaacattggggaggaaattctgaggcaggtattagaaatgaaaaggaaacttgaaacctgggcatggtggctcacgcctgtaatcccagcactttgggaggccaaggtgggcagatcactggaggtcaggagttcgaaaccagcctggccaacatggtgaaaccccatctctactaaaaatacagaaattagccggtcatggtggtggacacctgtaatcccagctactcaggtggctaaggcaggagaatcacttcagcccgggaggtggaggttgcagtgagccaagatcataccacggcactccagcctgggtgacagtgagactgtggctcaaaaaaaaaaaaaaaaaaaggaaaatgaaactagaagagatttctaaaagtctgagatatatttgctagatttctaaagaatgtgttctaaaacagcagaagattttcaagaaccggtttccaaagacagtcttctaattcctcattagtaataagtaaaatgtttattgttgtagctctggtatataatccattcctcttaaaatataagacctctggcatgaatatttcatatctataaaatgacagatcccaccaggaaggaagctgttgctttctttgaggtgatttttttcctttgctccctgttgctgaaaccatacagcttcataaataattttgcttgctgaaggaagaaaaagtgtttttcataaacccattatccaggactgtttatagctgttggaaggactaggtcttccctagcccccccagtgtgcaagggcagtgaagacttgattgtacaaaatacgttttgtaaatgttgtgctgttaacactgcaaataaacttggtagcaaacacttcaaaaaaaaaaaaaaaaaa

SEQ ID NO: 175 - DNA, 7191 bp, Homo sapiens
cttagcggtagccccttggtttccgtggcaacggaaaagcgcgggaattacagataaattaaaactgcgactgcgcggcgtgagctcgctgagacttcctggacgggggacaggctgtggggtttctcagataactgggcccctgcgctcaggaggccttcaccctctgctctgggtaaagttcattggaacagaaagaaatggatttatctgctcttcgcgttgaagaagtacaaaatgtcattaatgctatgcagaaaatcttagagtgtcccatctgtctggagttgatcaaggaacctgtctccacaaagtgtgaccacatattttgcaaattttgcatgctgaaacttctcaaccagaagaaagggccttcacagtgtcctttatgtaagaatgatataaccaaaaggagcctacaagaaagtacgagatttagtcaacttgttgaagagctattgaaaatcatttgtgcttttcagcttgacacaggtttggagtatgcaaacagctataattttgcaaaaaaggaaaataactctcctgaacatctaaaagatgaagtttctatcatccaaagtatgggctacagaaaccgtgccaaaagacttctacagagtgaacccgaaaatccttccttgcaggaaaccagtctcagtgtccaactctctaaccttggaactgtgagaactctgaggacaaagcagcggatacaacctcaaaagacgtctgtctacattgaattgggatctgattcttctgaagataccgttaataaggcaacttattgcagtgtgggagatcaagaattgttacaaatcacccctcaaggaaccagggatgaaatcagtttggattctgcaaaaaaggctgcttgtgaattttctgagacggatgtaacaaatactgaacatcatcaacccagtaataatgatttgaacaccactgagaagcgtgcagctgagaggcatccagaaaagtatcagggtagttctgtttcaaacttgcatgtggagccatgtggcacaaatactcatgccagctcattacagcatgagaacagcagtttattactcactaaagacagaatgaatgtagaaaaggctgaattctgtaataaaagcaaacagcctggcttagcaaggagccaacataacagatgggctggaagtaaggaaacatgtaatgataggcggactcccagcacagaaaaaaaggtagatctgaatgctgatcccctgtgtgagagaaaagaatggaataagcagaaactgccatgctcagagaatcctagagatactgaagatgttccttggataacactaaatagcagcattcagaaagttaatgagtggttttccagaagtgatgaactgttaggttctgatgactcacatgatggggagtctgaatcaaatgccaaagtagctgatgtattggacgttctaaatgaggtagatgaatattctggttcttcagagaaaatagacttactggccagtgatcctcatgaggctttaatatgtaaaagtgaaagagttcactccaaatcagtagagagtaatattgaagacaaaatatttgggaaaacctatcggaagaaggcaagcctccccaacttaagccatgtaactgaaaatctaattataggagcatttgttactgagccacagataatacaagagcgtcccctcacaaataaattaaagcgtaaaaggagacctacatcaggccttcatcctgaggattttatcaagaaagcagatttggcagttcaaaagactcctgaaatgataaatcagggaactaaccaaacggagcagaatggtcaagtgatgaatattactaatagtggtcatgagaataaaacaaaaggtgattctattcagaatgagaaaaatcctaacccaatagaatcactcgaaaaagaatctgctttcaaaacgaaagctgaacctataagcagcagtataagcaatatggaactcgaattaaatatccacaattcaaaagcacctaaaaagaataggctgaggaggaagtcttctaccaggcatattcatgcgcttgaactagtagtcagtagaaatctaagcccacctaattgtactgaattgcaaattgatagttgttctagcagtgaagagataaagaaaaaaaagtacaaccaaatgccagtcaggcacagcagaaacctacaactcatggaaggtaaagaacctgcaactggagccaagaagagtaacaagccaaatgaacagacaagtaaaagacatgacagcgatactttcccagagctgaagttaacaaatgcacctggttcttttactaagtgttcaaataccagtgaacttaaagaatttgtcaatcctagccttccaagagaagaaaaagaagagaaactagaaacagttaaagtgtctaataatgctgaagaccccaaagatctcatgttaagtggagaaagggttttgcaaactgaaagatctgtagagagtagcagtatttcattggtacctggtactgattatggcactcaggaaagtatctcgttactggaagttagcactctagggaaggcaaaaacagaaccaaataaatgtgtgagtcagtgtgcagcatttgaaaaccccaagggactaattcatggttgttccaaagataatagaaatgacacagaaggctttaagtatccattgggacatgaagttaaccacagtcgggaaacaagcatagaaatggaagaaagtgaacttgatgctcagtatttgcagaatacattcaaggtttcaaagcgccagtcatttgctccgttttcaaatccaggaaatgcagaagaggaatgtgcaacattctctgcccactctgggtccttaaagaaacaaagtccaaaagtcacttttgaatgtgaacaaaaggaagaaaatcaaggaaagaatgagtctaatatcaagcctgtacagacagttaatatcactgcaggctttcctgtggttggtcagaaagataagccagttgataatgccaaatgtagtatcaaaggaggctctaggttttgtctatcatctcagttcagaggcaacgaaactggactcattactccaaataaacatggacttttacaaaacccatatcgtataccaccactttttcccatcaagtcatttgttaaaactaaatgtaagaaaaatctgctagaggaaaactttgaggaacattcaatgtcacctgaaagagaaatgggaaatgagaacattccaagtacagtgagcacaattagccgtaataacattagagaaaatgtttttaaagaagccagctcaagcaatattaatgaagtaggttccagtactaatgaagtgggctccagtattaatgaaataggttccagtgatgaaaacattcaagcagaactaggtagaaacagagggccaaaattgaatgctatgcttagattaggggttttgcaacctgaggtctataaacaaagtcttcctggaagtaattgtaagcatcctgaaataaaaaagcaagaatatgaagaagtagttcagactgttaatacagatttctctccatatctgatttcagataacttagaacagcctatgggaagtagtcatgcatctcaggtttgttctgagacacctgatgacctgttagatgatggtgaaataaaggaagatactagttttgctgaaaatgacattaaggaaagttctgctgtttttagcaaaagcgtccagaaaggagagcttagcaggagtcctagccctttcacccatacacatttggctcagggttaccgaagaggggccaagaaattagagtcctcagaagagaacttatctagtgaggatgaagagcttccctgcttccaacacttgttatttggtaaagtaaacaatataccttctcagtctactaggcatagcaccgttgctaccgagtgtctgtctaagaacacagaggagaatttattatcattgaagaatagcttaaatgactgcagtaaccaggtaatattggcaaaggcatctcaggaacatcaccttagtgaggaaacaaaatgttctgctagcttgttttcttcacagtgcagtgaattggaagacttgactgcaaatacaaacacccaggatcctttcttgattggttcttccaaacaaatgaggcatcagtctgaaagccagggagttggtctgagtgacaaggaattggtttcagatgatgaagaaagaggaacgggcttggaagaaaataatcaagaagagcaaagcatggattcaaacttaggtgaagcagcatctgggtgtgagagtgaaacaagcgtctctgaagactgctcagggctatcctctcagagtgacattttaaccactcagcagagggataccatgcaacataacctgataaagctccagcaggaaatggctgaactagaagctgtgttagaacagcatgggagccagccttctaacagctacccttccatcataagtgactcttctgcccttgaggacctgcgaaatccagaacaaagcacatcagaaaaagcagtattaacttcacagaaaagtagtgaataccctataagccagaatccagaaggcctttctgctgacaagtttgaggtgtctgcagatagttctaccagtaaaaataaagaaccaggagtggaaaggtcatccccttctaaatgcccatcattagatgataggtggtacatgcacagttgctctgggagtcttcagaatagaaactacccatctcaagaggagctcattaaggttgttgatgtggaggagcaacagctggaagagtctgggccacacgatttgacggaaacatcttacttgccaaggcaagatctagagggaaccccttacctggaatctggaatcagcctcttctctgatgaccctgaatctgatccttctgaagacagagccccagagtcagctcgtgttggcaacataccatcttcaacctctgcattgaaagttccccaattgaaagttgcagaatctgcccagagtccagctgctgctcatactactgatactgctgggtataatgcaatggaagaaagtgtgagcagggagaagccagaattgacagcttcaacagaaagggtcaacaaaagaatgtccatggtggtgtctggcctgaccccagaagaatttatgctcgtgtacaagtttgccagaaaacaccacatcactttaactaatctaattactgaagagactactcatgttgttatgaaaacagatgctgagtttgtgtgtgaacggacactgaaatattttctaggaattgcgggaggaaaatgggtagttagctatttctgggtgacccagtctattaaagaaagaaaaatgctgaatgagcatgattttgaagtcagaggagatgtggtcaatggaagaaaccaccaaggtccaaagcgagcaagagaatcccaggacagaaagatcttcagggggctagaaatctgttgctatgggcccttcaccaacatgcccacagatcaactggaatggatggtacagctgtgtggtgcttctgtggtgaaggagctttcatcattcacccttggcacaggtgtccacccaattgtggttgtgcagccagatgcctggacagaggacaatggcttccatgcaattgggcagatgtgtgaggcacctgtggtgacccgagagtgggtgttggacagtgtagcactctaccagtgccaggagctggacacctacctgataccccagatcccccacagccactactgactgcagccagccacaggtacagagccacaggaccccaagaatgagcttacaaagtggcctttccaggccctgggagctcctctcactcttcagtccttctactgtcctggctactaaatattttatgtacatcagcctgaaaaggacttctggctatgcaagggtcccttaaagattttctgcttgaagtctcccttggaaatctgccatgagcacaaaattatggtaatttttcacctgagaagattttaaaaccatttaaacgccaccaattgagcaagatgctgattcattatttatcagccctattctttctattcaggctgttgttggcttagggctggaagcacagagtggcttggcctcaagagaatagctggtttccctaagtttacttctctaaaaccctgtgttcacaaaggcagagagtcagacccttcaatggaaggagagtgcttgggatcgattatgtgacttaaagtcagaatagtccttgggcagttctcaaatgttggagtggaacattggggaggaaattctgaggcaggtattagaaatgaaaaggaaacttgaaacctgggcatggtggctcacgcctgtaatcccagcactttgggaggccaaggtgggcagatcactggaggtcaggagttcgaaaccagcctggccaacatggtgaaaccccatctctactaaaaatacagaaattagccggtcatggtggtggacacctgtaatcccagctactcaggtggctaaggcaggagaatcacttcagcccgggaggtggaggttgcagtgagccaagatcataccacggcactccagcctgggtgacagtgagactgtggctcaaaaaaaaaaaaaaaaaaaggaaaatgaaactagaagagatttctaaaagtctgagatatatttgctagatttctaaagaatgtgttctaaaacagcagaagattttcaagaaccggtttccaaagacagtcttctaattcctcattagtaataagtaaaatgtttattgttgtagctctggtatataatccattcctcttaaaatataagacctctggcatgaatatttcatatctataaaatgacagatcccaccaggaaggaagctgttgctttctttgaggtgatttttttcctttgctccctgttgctgaaaccatacagcttcataaataattttgcttgctgaaggaagaaaaagtgtttttcataaacccattatccaggactgtttatagctgttggaaggactaggtcttccctagcccccccagtgtgcaagggcagtgaagacttgattgtacaaaatacgttttgtaaatgttgtgctgttaacactgcaaataaacttggtagcaaacacttcaaaaaaaaaaaaaaaaaa

SEQ ID NO: 176 - DNA, 6474 bp, Homo sapiens
cttagcggtagccccttggtttccgtggcaacggaaaagcgcgggaattacagataaattaaaactgcgactgcgcggcgtgagctcgctgagacttcctggacgggggacaggctgtggggtttctcagataactgggcccctgcgctcaggaggccttcaccctctgctctgggtaaagttcattggaacagaaagaaatggatttatctgctcttcgcgttgaagaagtacaaaatgtcattaatgctatgcagaaaatcttagagtgtcccatctgtctggagttgatcaaggaacctgtctccacaaagtgtgaccacatattttgcaaattttgcatgctgaaacttctcaaccagaagaaagggccttcacagtgtcctttatgtaagaatgatataaccaaaaggagcctacaagaaagtacgagatttagtcaacttgttgaagagctattgaaaatcatttgtgcttttcagcttgacacaggtttggagtatgcaaacagctataattttgcaaaaaaggaaaataactctcctgaacatctaaaagatgaagtttctatcatccaaagtatgggctacagaaaccgtgccaaaagacttctacagagtgaacccgaaaatccttccttgcaggaaaccagtctcagtgtccaactctctaaccttggaactgtgagaactctgaggacaaagcagcggatacaacctcaaaagacgtctgtctacattgaattgggatctgattcttctgaagataccgttaataaggcaacttattgcagtgtgggagatcaagaattgttacaaatcacccctcaaggaaccagggatgaaatcagtttggattctgcaaaaaaggctgcttgtgaattttctgagacggatgtaacaaatactgaacatcatcaacccagtaataatgatttgaacaccactgagaagcgtgcagctgagaggcatccagaaaagtatcagggtagttctgtttcaaacttgcatgtggagccatgtggcacaaatactcatgccagctcattacagcatgagaacagcagtttattactcactaaagacagaatgaatgtagaaaaggctgaattctgtaataaaagcaaacagcctggcttagcaaggagccaacataacagatgggctggaagtaaggaaacatgtaatgataggcggactcccagcacagaaaaaaaggtagatctgaatgctgatcccctgtgtgagagaaaagaatggaataagcagaaactgccatgctcagagaatcctagagatactgaagatgttccttggataacactaaatagcagcattcagaaagttaatgagtggttttccagaagtgatgaactgttaggttctgatgactcacatgatggggagtctgaatcaaatgccaaagtagctgatgtattggacgttctaaatgaggtagatgaatattctggttcttcagagaaaatagacttactggccagtgatcctcatgaggctttaatatgtaaaagtgaaagagttcactccaaatcagtagagagtaatattgaagacaaaatatttgggaaaacctatcggaagaaggcaagcctccccaacttaagccatgtaactgaaaatctaattataggagcatttgttactgagccacagataatacaagagcgtcccctcacaaataaattaaagcgtaaaaggagacctacatcaggccttcatcctgaggattttatcaagaaagcagatttggcagttcaaaagactcctgaaatgataaatcagggaactaaccaaacggagcagaatggtcaagtgatgaatattactaatagtggtcatgagaataaaacaaaaggtgattctattcagaatgagaaaaatcctaacccaatagaatcactcgaaaaagaatctgctttcaaaacgaaagctgaacctataagcagcagtataagcaatatggaactcgaattaaatatccacaattcaaaagcacctaaaaagaataggctgaggaggaagtcttctaccaggcatattcatgcgcttgaactagtagtcagtagaaatctaagcccacctaattgtactgaattgcaaattgatagttgttctagcagtgaagagataaagaaaaaaaagtacaaccaaatgccagtcaggcacagcagaaacctacaactcatggaaggtaaagaacctgcaactggagccaagaagagtaacaagccaaatgaacagacaagtaaaagacatgacagcgatactttcccagagctgaagttaacaaatgcacctggttcttttactaagtgttcaaataccagtgaacttaaagaatttgtcaatcctagccttccaagagaagaaaaagaagagaaactagaaacagttaaagtgtctaataatgctgaagaccccaaagatctcatgttaagtggagaaagggttttgcaaactgaaagatctgtagagagtagcagtatttcattggtacctggtactgattatggcactcaggaaagtatctcgttactggaagttagcactctagggaaggcaaaaacagaaccaaataaatgtgtgagtcagtgtgcagcatttgaaaaccccaagggactaattcatggttgttccaaagataatagaaatgacacagaaggctttaagtatccattgggacatgaagttaaccacagtcgggaaacaagcatagaaatggaagaaagtgaacttgatgctcagtatttgcagaatacattcaaggtttcaaagcgccagtcatttgctccgttttcaaatccaggaaatgcagaagaggaatgtgcaacattctctgcccactctgggtccttaaagaaacaaagtccaaaagtcacttttgaatgtgaacaaaaggaagaaaatcaaggaaagaatgagtctaatatcaagcctgtacagacagttaatatcactgcaggctttcctgtggttggtcagaaagataagccagttgataatgccaaatgtagtatcaaaggaggctctaggttttgtctatcatctcagttcagaggcaacgaaactggactcattactccaaataaacatggacttttacaaaacccatatcgtataccaccactttttcccatcaagtcatttgttaaaactaaatgtaagaaaaatctgctagaggaaaactttgaggaacattcaatgtcacctgaaagagaaatgggaaatgagaacattccaagtacagtgagcacaattagccgtaataacattagagaaaatgtttttaaagaagccagctcaagcaatattaatgaagtaggttccagtactaatgaagtgggctccagtattaatgaaataggttccagtgatgaaaacattcaagcagaactaggtagaaacagagggccaaaattgaatgctatgcttagattaggggttttgcaacctgaggtctataaacaaagtcttcctggaagtaattgtaagcatcctgaaataaaaaagcaagaatatgaagaagtagttcagactgttaatacagatttctctccatatctgatttcagataacttagaacagcctatgggaagtagtcatgcatctcaggtttgttctgagacacctgatgacctgttagatgatggtgaaataaaggaagatactagttttgctgaaaatgacattaaggaaagttctgctgtttttagcaaaagcgtccagaaaggagagcttagcaggagtcctagccctttcacccatacacatttggctcagggttaccgaagaggggccaagaaattagagtcctcagaagagaacttatctagtgaggatgaagagcttccctgcttccaacacttgttatttggtaaagtaaacaatataccttctcagtctactaggcatagcaccgttgctaccgagtgtctgtctaagaacacagaggagaatttattatcattgaagaatagcttaaatgactgcagtaaccaggtaatattggcaaaggcatctcaggaacatcaccttagtgaggaaacaaaatgttctgctagcttgttttcttcacagtgcagtgaattggaagacttgactgcaaatacaaacacccaggatcctttcttgattggttcttccaaacaaatgaggcatcagtctgaaagccagggagttggtctgagtgacaaggaattggtttcagatgatgaagaaagaggaacgggcttggaagaaaataatcaagaagagcaaagcatggattcaaacttaggtgaagcagcatctgggtgtgagagtgaaacaagcgtctctgaagactgctcagggctatcctctcagagtgacattttaaccactcagcagagggataccatgcaacataacctgataaagctccagcaggaaatggctgaactagaagctgtgttagaacagcatgggagccagccttctaacagctacccttccatcataagtgactcttctgcccttgaggacctgcgaaatccagaacaaagcacatcagaaaaagatgctgagtttgtgtgtgaacggacactgaaatattttctaggaattgcgggaggaaaatgggtagttagctatttctgggtgacccagtctattaaagaaagaaaaatgctgaatgagcatgattttgaagtcagaggagatgtggtcaatggaagaaaccaccaaggtccaaagcgagcaagagaatcccaggacagaaagatcttcagggggctagaaatctgttgctatgggcccttcaccaacatgcccacagatcaactggaatggatggtacagctgtgtggtgcttctgtggtgaaggagctttcatcattcacccttggcacaggtgtccacccaattgtggttgtgcagccagatgcctggacagaggacaatggcttccatgcaattgggcagatgtgtgaggcacctgtggtgacccgagagtgggtgttggacagtgtagcactctaccagtgccaggagctggacacctacctgataccccagatcccccacagccactactgactgcagccagccacaggtacagagccacaggaccccaagaatgagcttacaaagtggcctttccaggccctgggagctcctctcactcttcagtccttctactgtcctggctactaaatattttatgtacatcagcctgaaaaggacttctggctatgcaagggtcccttaaagattttctgcttgaagtctcccttggaaatctgccatgagcacaaaattatggtaatttttcacctgagaagattttaaaaccatttaaacgccaccaattgagcaagatgctgattcattatttatcagccctattctttctattcaggctgttgttggcttagggctggaagcacagagtggcttggcctcaagagaatagctggtttccctaagtttacttctctaaaaccctgtgttcacaaaggcagagagtcagacccttcaatggaaggagagtgcttgggatcgattatgtgacttaaagtcagaatagtccttgggcagttctcaaatgttggagtggaacattggggaggaaattctgaggcaggtattagaaatgaaaaggaaacttgaaacctgggcatggtggctcacgcctgtaatcccagcactttgggaggccaaggtgggcagatcactggaggtcaggagttcgaaaccagcctggccaacatggtgaaaccccatctctactaaaaatacagaaattagccggtcatggtggtggacacctgtaatcccagctactcaggtggctaaggcaggagaatcacttcagcccgggaggtggaggttgcagtgagccaagatcataccacggcactccagcctgggtgacagtgagactgtggctcaaaaaaaaaaaaaaaaaaaggaaaatgaaactagaagagatttctaaaagtctgagatatatttgctagatttctaaagaatgtgttctaaaacagcagaagattttcaagaaccggtttccaaagacagtcttctaattcctcattagtaataagtaaaatgtttattgttgtagctctggtatataatccattcctcttaaaatataagacctctggcatgaatatttcatatctataaaatgacagatcccaccaggaaggaagctgttgctttctttgaggtgatttttttcctttgctccctgttgctgaaaccatacagcttcataaataattttgcttgctgaaggaagaaaaagtgtttttcataaacccattatccaggactgtttatagctgttggaaggactaggtcttccctagcccccccagtgtgcaagggcagtgaagacttgattgtacaaaatacgttttgtaaatgttgtgctgttaacactgcaaataaacttggtagcaaacacttcaaaaaaaaaaaaaaaaaa

SEQ ID NO: 177 - DNA, 798 bp, Homo sapiens
gcgtctgcctcagaggggcccgagccacccggtccgccgcgtccccgccgccgccgccgcgtcccccgccggggccgaccgagccgagccgggccggagcggcgggcgcggccgggccgccatggaccacaagccgctgctgcaggagcggccgcccgcctacaacctggaggccggccagggcgactacgcgtgcggcccgcacggctacggcgccatccccgccgcgcccccgccgccgccctacccctacctcgtcacagggatacccacccaccatcccagggtctacaacatccacagccggaccgtcacccgctatcctgccaactctatcgtggtcgtaggaggctgtcctgtctgcagggttggggtgctggaggactgcttcaccttcctgggcatcttcctggccatcatcctcttcccctttgggttcatttgctgttttgccttgaggaagcgacgatgccccaactgtggagccaccttcgcttaaagggaacaccaggcccggctttcctacacccagctctctttttctaatgtaaatgttgtgtacaataattttatttgattaagcttcaggactgttttgtaaagcgaggtgggaccgatgtggcacacgccagctgcggtttcccggagcgtggagaggcagtgctgctgctcccgcccgaggctcatgacaactcaataaagcactgcttttattttttgcagtcttcaatttgagaaaggtgagaaataatgttttcaataaatgagattcataccattgttaaaaaaaaaaaaaaa

SEQ ID NO: 178 - DNA, 15966 bp, Homo sapiens
gagccgagctgggagatggcggcggcagcggcggcgccgagagtgtgagcaccgcccgggagccgccggcccgggcgcagcgcgaccccgaccccgcccgcccgcctgcccgccatgggcaacgaggtcagcctggagggcggcgctggcgacgggccgctgccgcccggcggcgccggccccggcccgggccccggccccggccccggcgcaggaaagccgccttcagcaccggccggtggcggacagctccccgcggcgggagcagcgcggtcgaccgcggtaccaccggtccctggccccggccccggccccggtcccggccctggcccgggcagcacttcccggagactggaccccaaggaacccctgggtaaccagagagcagcttccccaactccgaagcaggcttctgctaccactcctggccatgagagcccccgagagacaagggcacagggaccagcaggccaggaggctgatggtccccgcaggacgctgcaggtagacagcaggacacagagatcagggcggtccccctcagtgtcaccggacagaggcagcacccccacatcaccctactccgtccctcagatcgccccccttcccagcagcacgctgtgtcccatatgcaagacttcggacctcacgtcgacccccagccagccaaacttcaacacctgcacccagtgtcacaacaaggtctgcaaccagtgtgggttcaaccccaaccctcatctcacccaggtgaaggagtggctctgtctgaactgtcagatgcagagggctctgggaatggacatgaccactgcacctcgctccaagagccagcagcagctgcactccccagccctgtctcctgcccactccccggccaaacagcccctggggaagccagaccaagagagatctcggggcccaggaggaccacagcctgggtcccgccaggctgagacagccagggccacctcagtgccggggcctgcccaagcagctgcccctccagaggtggggagggtgtctcctcagccccctcaacccaccaagccttccacagctgagcccaggccacctgcaggagaggccccggccaaaagtgccaccgcagtgcccgctgggcttggtgccactgagcagacccaggagggcctcactggtaagctcttcggccttggcgcgtcactgctaacccaggcgagcaccctcatgtctgtgcagcccgaggctgacacccagggccagcctgcccccagcaaggggacacctaagatcgtcttcaatgatgccagcaaggaggctggcccaaaacccttgggctcagggcccgggcctgggccagcacctggagccaaaactgagcctggggctagaatgggtcctggatctggacctggagccctgccgaaaactgggggaacaaccagtccaaagcatggcagagcagaacatcaggcagcatcgaaggctgctgccaagccaaagaccatgccgaaggaaagggccatctgcccactgtgccaagccgagctcaacgtgggcagcaagagcccagccaactataacacatgcaccacctgcaggctccaggtgtgcaacctgtgtggcttcaacccaacaccccacctggtggagaaaacagagtggctctgtctgaactgccaaaccaagcggctactggagggcagcctaggagagccgacccccctgccgccgcccacctcacagcagccccctgtaggggcccctcaccgtgcatctggaacatcccctctgaagcagaaagggccacaggggctgggccagccttcaggccccctgcctgccaaggccagccctctatccaccaaggccagccctctgcccagcaaggccagcccccaggccaagcccctcagggcttctgaacccagcaagaccccaagcagtgtccaggaaaagaagacccgagtccccactaaagctgagcccatgccgaagccacctccagagactaccccaacccctgcgactcctaaagtaaagagtggggtgaggagggctgaacctgccacccctgtcgtcaaggctgttccagaagcccccaagggtggggaggcggaggacctggtgggcaagccttactctcaggatgcgtctcggagcccacagagcctcagtgacacaggctattcctctgacggcatctctagctcccagagtgagatcacaggagtcgtgcagcaggaggtggaacagctggacagtgcaggggtgacagggccacatccacccagcccctccgagatccacaaggtggggagcagcatgcggcctttgctgcaggcccagggcctggccccaagtgagcggagcaagccactctccagcggtactggcgaggagcagaagcagcggccccactccttgtccatcacgcctgaggcctttgactctgatgaggagctggaggatatcctggaggaagacgaagactctgctgagtggaggcgccggagagagcagcaggacactgccgagtcctcagacgactttggcagccaattgaggcacgactatgtggaggacagcagtgagggtggcctgtcccctcttccaccccagcccccagcccgggcagcagaactgactgatgaggatttcatgcgacggcagattctcgagatgagcgccgaggaagacaacctggaggaggatgacactgccacctccgggcgtggcctggccaaacatggcacccagaaaggtggccccagacccaggcctgagcctagccaagaaccagcagcactgcccaagaggcgcctgccccacaatgccaccacgggctatgaggagctgctccctgagggaggctcagcagaggctaccgatggcagtgggaccctgcagggtgggctccgtcgcttcaagaccattgagctcaacagcacgggaagttatggtcatgagttggacctgggccaaggcccagaccccagtctggaccgggagcctgagctggagatggagagcctaacgggctcccctgaggaccgctcccgtggtgagcactcctctacattgcctgcctccacacccagctacacctcgggcacctctcccacctctctgtcctccctagaggaggacagtgacagcagccccagccgcaggcagcgtctagaagaagcaaagcagcagcgcaaggcccggcaccgctcccacgggcccctgctacccaccatcgaggactcctcagaggaggaggagctgcgggaggaagaggagctgcttcgtgagcaagagaagatgcgggaggtggagcagcagcgcatccgcagcacggcccgcaagacccggcgggacaaggaagaactgcgggcccagcggaggcgagagcgctccaagacaccacccagtaacttgtcacccatcgaggatgcctccccgacggaggagctgaggcaggcggccgagatggaggagctacaccgctcctcctgctctgagtactcaccctcaccctcccttgactctgaggctgaggccttggatggtggccctagccggctttacaagtcaggcagtgagtacaacctgcccaccttcatgtccctctactcaccaaccgagacaccctccggcagctccaccactcccagttccggacggccgctcaagagcgctgaggaggcttatgaggagatgatgcgcaaagctgagctgctccagaggcagcaaggccaggcagcaggggcccggggaccccatggcggcccctctcagcccacaggcccccggggcctgggctccttcgaatatcaagacactacagaccgtgagtatggccaggctgctcagcctgccgcagagggcacgccagccagcctgggagcagccgtgtacgaagaaatccttcagacatcacagagcatagtccgcatgcggcaggcctcctcacgagacctggcttttgctgaggacaaaaagaaggagaagcagtttctaaatgctgagagtgcatacatggacccaatgaagcaaaatggtggcccccttacccctggtaccagtcccacccagctcgctgcccctgtgtccttctctacccccacctcctcagacagcagcgggggccgagttattcccgatgtccgtgtcactcagcattttgcaaaggagactcaggaccccctcaagctgcacagctctcctgcctcccccagctcagcctccaaggagataggcatgcccttttcccagggccctgggaccccagccaccacagctgtggctccttgtccagctgggctgccacgaggatatatgactccagcctccccagcaggctccgagcgtagtccttcaccatcttccacagcccacagctatggacacagcccaaccactgcaaactatgggtcccaaactgaggatctaccccaggcccccagtggccttgctgcagctggacgagctgctagagagaagcccttgagtgcgagtgacggtgagggtggcactcctcagccttcccgggcatattcctactttgcaagctccagcccacctctctccccgtcttccccctcagagagtcccacattctcccctggcaagatgggcccaagggccacagcagagttctctacacagacgccaagtccagcccctgcctcagacatgccacggagccctggtgcccccactccatcacctatggtagcccagggtacacaaacaccacatcgacccagcacgcctcgcctggtgtggcaggagtcctctcaagaggctccctttatggtcatcacgctggcatctgacgcctccagccagaccaggatggtacatgccagtgcctccacctccccgctctgctcacctactgaaacccagcccaccacccatggctacagccagacaacacctccgagtgtgtctcagctgcccccagagccacctgggccacctggctttccacgggtgcccagtgctggtgcagatgggcccctggcactatatggctggggtgccctccctgctgagaacatctccctgtgccggatctcctctgtccctgggacgtctagggttgagccaggccccaggacccctggcactgcagtggtagacctccgtacagctgtcaagcccactcccatcatcctcactgaccagggcatggacctcacctctcttgctgtggaagcgaggaagtatggtcttgccctggatccaatcccaggacggcagtcgaccgccgtgcagcccttggttatcaacctcaatgcccaggagcataccttccttgctactgccaccaccgtgagcatcaccatggcctcgtctgtgttcatggctcaacaaaagcagcctgtggtctatggagacccctaccagagccgccttgactttggccagggtgggggtagccctgtgtgcctggcccaggtcaaacaagtagagcaggctgtccagacagccccataccgaagtgggccccggggaagacccagggaggccaagtttgccagatataacctacccaaccaagtagctcctctggccagaagagacgttttgatcactcagatgggcaccgcccagagcattggcctcaagccaggcccagtgccagagccaggtgccgagccccaccgggccacccctgcagagctgcggtcacatgctctgccaggtgccaggaagccacacacagtggtggtgcagatgggagagggcacagcaggcactgtgaccacactgctcccagaggagcctgcgggtgccctggaccttaccgggatgaggcctgagagccagctggcatgctgtgacatggtctacaagctcccctttggcagcagctgcactggcaccttccacccggcccccagtgtgcctgagaagagcatggcagatgctgccccacctggccaaagcagcagccccttctatggtccccgggaccctgagcctcctgagcccccaacctaccgggcacagggggtggtggggcctgggccccatgaggagcagaggccctacccacaaggcctgcctggtaggctgtactcctccatgtctgacaccaatttggctgaggctggcctcaactaccatgcccagaggatcgggcagctcttccagggtcctggacgagactcggctatggacctcagctcactgaagcactcctacagcctgggctttgcggatggacgctacctagggcagggcttgcagtatggctcagtcacggacctgcgtcatcctacagaccttttggctcacccgcttcccatgcggcgctatagctcagtgtcgaacatctactcagaccacaggtacggcccacggggagatgcagttggcttccaggaggccagcctggcccagtacagtgccaccacagcccgtgaaatcagtcgcatgtgcgctgccctcaactccatggaccagtatggtgggcggcatggcagtggtggtggtggccctgaccttgtgcagtaccagccccagcacgggcccgggctcagtgctccacagagtctggttcccctcagacctggactccttggtaaccccacctttccagagggccacccaagtcctgggaacttggcccagtatgggcctgcagcaggccaaggaacagcagtcagacagctgctgccgtccacagccactgtacgtgcagctgatggcatgatctactcgactatcaataccccaattgctgcaacactgcccatcaccacccagcctgcctcagtcctgcggcccatggtgcgtggtggcatgtacaggccttacgcatctggtggaatcacagccgtgccactcaccagtctgacacgtgtgcccatgattgccccccgggtacctcttggacccacagggctgtaccgctatcctgcaccaagtagatttcccattgcttccagtgttccacctgcagaagggcctgtctatctggggaaacctgctgctgccaaggcccctggggctgggggcccttcaaggccagagatgccagtaggggctgcacgggaagagcctcttcccacaaccacccctgctgccatcaaggaggctgcaggagccccagctcctgccccactagctggccagaagccaccagcagatgctgctcctgggggtggcagtggggccctcagccggccagggttcgagaaagaggaagcatcacaggaggagaggcagcggaagcaacaggagcagctgctccagctagagcgggagcgggtggagttggagaagctgcgacaacttcggctgcaagaggagctagagcgggaacgtgtggagctgcagaggcaccgtgaggaggagcagctgctggtgcagcgggagttgcaggagctgcagaccatcaagcaccatgtgctgcagcagcagcaagaggaacgccaggctcaatttgcactgcagcgggaacagctagcgcagcagcgtctgcagctggagcagatccagcagctgcagcagcagctgcagcagcagctagaggagcagaagcagcggcagaaggctccctttcctgcagcctgtgaggcacctggccgagggcctcccctagcggctgctgagttggcccagaatggccagtattggcccccccttacacatgcagccttcattgccatggcagggcctgaaggacttgggcagcctcgtgagcctgtgctgcaccggggtctccccagctctgcctcagacatgtcactgcaaacggaggagcagtgggaggccagccgtagtggcatcaagaagcggcactccatgccacgcctgcgggatgcctgtgagctagagtctgggactgagccctgtgtggtcaggaggattgccgacagcagcgtgcagacagacgatgaggatggggagagccgctacctcttgagtcggcgacgccgggcacggcggagtgctgactgcagtgtgcagacggacgacgaagacagtgctgagtgggagcagccagtgcgccgccgcaggtctcgtcttccccgccactcagactcaggctctgacagcaagcacgatgccactgcctcatcatccagtgctgctgccactgtgagggccatgagcagcgtgggcatccagaccatcagtgactgctccgtgcagacggagcctgaccagctgcccagggtctctccagccatccacatcacagctgccaccgatcccaaggtggagatcgtcaggtacatatcggcgccagagaagactgggcgtggggagagcctggcctgccagacggagccagatgggcaggcccagggtgtagccgggccgcagcttgtagggccaactgccatcagcccctacctgcctggcatccagatcgtcaccccagggcctctgggcagatttgaaaaaaagaagccagatcccctggagattgggtaccaggcccacctgcctccggagtctctctcacagcttgtgagccgccagcctcccaagtcccctcaggtcctctactcaccagtctcacccctgtcccctcaccggctcctggacacctcctttgcttccagtgagaggctgaacaaagctcacgtgagtccccagaagcacttcacggctgacagcgctctccgccagcagacgctgcctcgccccatgaagaccctgcagcggtccctgtctgaccctaagcccctcagccccaccgccgaagagtctgccaaagagagattctccctctaccagcaccaggggggactgggtagccaggtgtcggcgttgccacccaacagcctggtccgcaaggtgaagcggacactgcccagcccccctccagaggaggctcaccttcccctggctggccaggcctccccacagctgtatgcagccagcctgctgcagcgagggctgacggggcccaccactgtccctgctaccaaggccagcctgctccgggagctggaccgggacctgcggctggtggagcatgagtccaccaaactgcgcaagaagcaggcagagctggatgaggaggagaaggagattgacgccaagctcaagtacctggagttgggtatcacacaacgcaaagagtctttggccaaagaccggggtggccgtgactacccacccttgcgtggtcttggcgagcatcgtgactacctatcggacagtgagctcaaccagctgcggctccagggctgcaccactcccgctggccagtttgtggacttccctgccactgccgctgctcctgccaccccctctggtcccactgccttccagcagccccgcttccagcctccagccccacagtattctgcaggcagtggtgggccaactcagaacggattcccagcccaccaggcccccacctaccctggccccagcacgtacccagctcctgcctttcctcctggtgccagttacccagctgagcctggcctgccaaaccagcaggctttccgccccacaggccactatgcaggccaaacacccatgccaaccacacagagcaccctttttccagtccccgctgatagccgtgccccactgcagaagccacgccagacatcgctagccgacttggagcagaaggtgcccaccaactatgaggtgatcgccagccccgttgtgcccatgtcttcagccccatctgaaaccagctacagtggcccagcagtgagcagcggctatgagcagggcaaggtccctgaggtgccccgggctggtgaccgtggcagtgtgagccagagcccagcccccacctacccctctgactcacactataccagtctggagcagaacgttcctcgaaactacgtaatgattgatgacatcagtgaactgaccaaggacagcacctctactgctcctgatagccaacggctggagcccctggggccaggcagcagtgggcgtccagggaaggagcctggagaaccaggtgtccttgacgggcccacactgccctgctgctatgccagaggagaagaggaatctgaggaggactcatacgatccccgcgggaagggtggccacctccggagcatggagagcaatggtcgaccagccagtacccactactatggtgacagtgactacaggcatggggctcgagtagagaagtatggtccagggcccatggggcccaagcatccctccaagagcctggctccagctgccatctcctcaaagcgcagcaagcaccggaagcagggcatggagcaaaagatatccaagttctcgcctattgaagaggccaaagacgtagagtcagacctggcgtcctaccccccacctgcagtcagcagcagcctggtctctcggggcaggaagttccaggatgaaatcacctatgggctcaagaagaacgtgtatgagcagcaaaaatactatgggatgtccagccgggacgcagtggaggacgaccgcatttatggcgggagcagccggtcccgggcaccttctgcatacagtggggagaagctgtccagccacgacttcagtggctggggcaaggggtacgaaagggaacgggaggctgtggagcgacttcaaaaagcgggccccaagccctcatccctaagtatggcccacagccgggtacgaccccccatgcggagccaggcctctgaagaggagagccccgtcagtcctttggggaggccccgccctgccggagggcccctccctcccggcggggatacctgcccacagttctgctccagccactccatgcctgatgtccaggaacatgtcaaggacggacctcgggcccacgcatataagcgtgaggagggctacatcctggatgattcccattgcgtggtttccgacagcgaagcgtatcacctgggccaggaggagacggactggtttgataagccccgggatgcccgctctgaccggttcaggcaccacgggggccatgcagtttcctcctcctcccagaagcgaggccctgccaggcacagctaccatgactacgatgaaccccctgaggagggcctgtggcctcatgatgagggtggcccaggccgccatgcctcagccaaggaacaccggcacggtgaccacgggcggcactcaggccgccacactggtgaggagccgggacggcgtgctgccaaaccacacgctcgggacctgggtcgccatgaggcccggccccactctcagcccagctctgctccagctatgccgaagaagggtcagcctgggtatcccagctctgctgagtactcacagccatcccgtgcttcatccgcataccatcatgcctctgacagcaagaagggctcccggcaagcccactccgggcccgctgcactgcagtcaaaggcagaaccccaggcgcagccgcagctgcaaggtcggcaggcagctccaggaccacagcagtcacagtcaccatcatccaggcaaataccctctggggcagcatcacgccagccacagacacagcagcagcagcaaggtcttgggctgcagcccccacagcaggctctgacacaggctcggctgcagcaacagagccagccaaccacccggggctcagcccctgctgccagccagcctgcagggaagcctcagccaggccccagcacagccacaggtcctcaaccagcaggaccgccacgggcagaacagacaaatggctctaaagggacagccaaagcaccgcaacaggggagggctcctcaggcccagccagcaccaggacctggacctgcaggtgtgaaggctggagccaggcctggaggaaccccaggggctcccgccggccagccaggtgccgatggggagagcgtgttctccaagatcctccctggcggggcagccgagcaagctggcaaactgacggaagctgtctctgcttttggcaaaaaattttcctcattctggtgaccatgcccagcatggctcttgaagaaatgaagagaggtatcattgctgtggaaaaatctctggagtcagaggcctgggcgcagctctggactctgcgtataacacatctacaatctggcaaacccttggcccaaagactcaccaggtgggacgtggcaggcaggcctcagttgaggacgtgatgttttctcacagcagctgcctgggtgaagcatctgctggacaagtcggaccactggccaggggacctttgattgtctttccagagatgctgctctctgcagggcaccaccttcaaggcacagcccttgttgggagggagaaccctctccagaaaccctgccaccatggtgtcttgccgtacttcccacagccgcctttttgcggcctggccggccaggcttcccgtgcgttatacacagagtttgggcacacactgccctccctccgagatgccagaagtttttccacagccttggagaggggctttgactgagggctgggggccctgggctccgtttccttcacattccagctggcccggatccctctgtggcacagggccctgcccgtcacatgccctctgggtgacatcggagcagacctccatgtggccaggggttgggagaactttacaaacattaggacctaacactgtctcatcgctgaaataagaggccatagcaccgaaaagcagcgtgggcgccggctgaggcttctcccagcccgtgggtggcagcgtgctagcacactgccaccatctcaaagccatccccctagccatcgtgagcatcccagcggcaccgccattgtctcaaccagccggctcctcgtctgtacacctggggatttcttttgatttcaagaacagccttaatcattccagtttgatttacgtgtatacctcataaacatttttcttttgtttctctctccccctttctctcttctcttggctcactcccttgcctctccccctccaccaccaccttgtgactgatggtttggtttcctctctgctctgcccctgctcagcacagggagaatgttgacttagaagcaatagggggcagcaggccaccaagagcacaaccccagggcgaggtctggggaggcctcccagcccgcctctgtttactgtgcaattccagtcgttcttaagccatcaccagtgggtgtactcagagcagaggggccaggacttctgccagccaagggaaaggcccagagccctgtgcgggggaatgtggcactgtctatccatccggtggactgggcagcattcctccccagggctcttcccttgggggcctcctttcatctggggcacagccacaagtctcatctctaacgttctatgcaatgaaatataaaccctcaatgacaactgttaatatttaataaattccatgttatgtataaggagttaattgcaaacatgcaattgagaaactggatagatacactcataaaacccccacccctccccaccccacccctgctcccattgtgtgtgtgaaattctcagtctgtggcatgtttgacctgtggcaggactcgctgctgccaggtgagtcaccgcctgtcctgcagtggagcatgcacagctcgcagcctctttgcacgatttcatccattttaaatgcttgaccctcttgcttggagttctttttgcctcagaacctctccttcaggagcacttctagctgacttctgcacaagctagtgaggacctgccagaattgttgcctgagcgtgccaggctgcagggcaggcagtaaaaggcccccacataccctgcagttttctctgtccaggacagcaggtaaaaaggaatccccagagcagacgcaatggtaggagcctgcacaggatgtgtgtgtatggacattctgaaggtttgctgtaggatatctgtctgtctgtcattttcccttcctaccccaaccctgagccagaggcatctgacagccctttcccagagggcaccacgcaagggcagagctgggcggcatccacagccagagaggcagaggcaagagcagagccaggctgtgcccgagggaccccagctcttgactgcacctgtttcatgcctctcctctgtggctaggaggctcaaaggactgtgagccaggagatctgggctggagctagggggtcaatggatgctcaggaagagctgggcctttggcacttgtggtgagaacagttgacagtggtcatctggaactgttcatataaacagtggcttcaagctaagtttcttgtgaagtttctcaatagcaaatcttacagaaggtcctgtgtgaccctctctgcatctgtccccaggacctatgctccctgctcacccccttctccaaagcccaagcgtcccgctgctcatcagcttttttaccattgagccaggagtgcggcaggcagtacctgcctgacccttcaaggcctgaccttcgtccagagtgctctggtttgcaccatgcatttctcaggggtccgcatttctcatgcttttctataagatctacacaccccttcagagagggctcctcgctcacctctggtagctatggatgggacaggaagctgccaacctttgtgttggacttaacacccttgcctttctgggacttggcctcaccccacccatggaatacctgcctcatcccaaagatcaggtatgggctgaatgcagccatctgagcaagggctgagggaagccatcacctaacacctctggccacccaggaccaggtctgtgtggggatgtgccttggagaccaaggcaatagtcctttccactacaggccaggggatgggacaagaagtagggaacaggcagggaaatgttaggaggtcagcctccagcaggcctagtctcaggctctaaagtactgacttttcagcaaatttcctttctggccaagccctctgagtttgaaattctgacatctgccactcctcatcccccactgtacccacaggatacatcatcgcccctctgtgaaggtggctggagcaggcctctggtccatggactgtccttcctggcccttgcatggatgcagttgtgactctggggacaatgcagccagaagctgagggaccagcacttggtgccttggaaagtagagagcaacagacacatctccaaatgggcaaggagtctctagcatgcagcccaggccttctccatacccctctccccagcatcatgagcaagggcattgcctcctctctctgctcacttcagggcccagtgcactcacttcacagtgacagccctcccctacaatccttgggcagagcatgtggtctgagggcccacagtgaaagaacagcagtggtggcaactatgccttgccttctggagcctgtagggagttttccaggcaggtcctttgccaggacagcatggtcctgccctgttgtcccgtctgctctcctcttacccacccccatgctgtaaatacttgtcatcatggactccaacagggttagagggacaggcctaatcaactgaaactcctcggagatgccatctctgtctccctgggtgccagcagccctgctgccatgtgcactggggtggcactggagagccatggcagtcgtgagatattgtatgtgtatgcacatgatcatgtgtgtatgtgcgtgcgtgcgtgcgtgtgtgtgtgtgtgtgtgtttctgcctcattcagtttctggggtcaaatcagctccttctctccaagtgcactaccctggagagtggtggccactcaataccttttcctctagctttcatgtcttgtttttgctttccccttcctcctccctctctccctttctttccttctctccttctttatttgaggggggaagagtgctgtacaaagtcaaacaaacaagtttacagttgtaagtgcaatgacccgagtcctccacatgaccttgtgaattgtgtgctgtccttctgtgctctgtgagaactcgtggtacttcagtgtccctccccctgtattgtgacaaggtaattctgtggtatcagaataaaaggacttgatataaacaaaaaaaaaaaaa

SEQ ID NO: 179 - DNA, 7304 bp, Homo sapiens
agaaggtgccgcggcggcgccggagatgtgtaattaagtgaaccatatatgtttcatcatcatggagatcttggagaattatctgagcaccaggttcatatgtattcgatctcagaggcatctattggacaacaaaacactctttcagttgtgaactttatttatttattattattattttttgagacagagttttgctcttgttgcccaggttagagtgcagtggcacgatctcggctcactgcaatctccgcctcccaggttcaagcgattctcttgcctctgcctcccgagtagctgggattacaggcatctgctaccacgcctggccaattttttgtattttcagttgaaacgaggtttcaccatattggccaggctggtctcgaacttctgacctcaggtgatccaccccccgcctcgtcctccaaaagagctgggattacaagtgtgagccaccgcgcccggcccagttgtggactttaacagagggaagctttaaacatgtttaaccacaggcccaatttgaacaaagatacttcaatcattatagagaggaaaacagtactttttgttcaattgtgcaaactctccaagtatctaatggagaagtagagaagaaccctaatgaaactgagtgtgaatgaggctcagctaggcttctacttgggttcactttctcatctgtctgcctgtcctgggattgaccctcgctcctctgaagaccagcctgaaagccttaaaactggtcagatgatggatgagtctgatgaggactttaaagaactctgcgctagctttttccaaagggtgaaaaaacatggaatcaaggaagtgtcaggagaaaggaagacacaaaaggctgcctcaaacggcactcagataagaagcaaattgaaaaggaccaaacaaactgctaccaagaccaaaacccttcaaggccctgcagagaagaaacctccgtctggcagccaggcccctaggactaaaaagcaaagggtaaccaaatggcaagcaagtgaaccggcccactctgtgaatggggaggggggtgtgcttgcctctgctccagatccacctgtgctccgggaaacagcacaaaacacccagacgggtaaccagcaagaaccatcgccaaacctttccagagagaaaaccagagagaatgtgcccaacagcgactcccagcctcctccttcctgtttgacaacagcagtgccaagtccctccaaaccccgcacagcacaattggtcctacagcgaatgcagcagttcaagagagcagaccccgagcgtttgagacacgcttcagaagagtgctccctcgaggctgcgcgggaagaaaatgtcccaaaggatcctcaagaggagatgatggcggggaatgtgtatgggcttgggccccctgccccagagagcgacgctgcggtggccttgaccctgcagcaggagtttgcacgggtaggagcatcggcacatgatgatagcctggaggaaaagggtttgttcttctgccagatttgtcaaaagaacctctcagccatgaacgtgacccgaagggaacagcatgtgaacaggtgcttggatgaagctgaaaagacactaagaccttctgtgcctcagatccctgagtgcccgatttgtgggaaaccgtttcttaccttaaagagcagaaccagtcacttgaagcagtgtgctgtgaagatggaggttggcccccagctcctgcttcaggctgtgcggctgcagacagcacagcctgagggtagcagcagcccacccatgttcagcttcagtgatcacagtagaggtctgaaacggagaggacccaccagcaagaaggagccacggaagaggcggaaggtggacgaggcaccgtccgaggacctgctggtggccatggctctgtcccggtcggagatggagccgggtgcggctgtaccagcgctcaggctggaaagtgccttttctgagaggataagaccagaagcagagaataaaagtcgcaagaagaaacccccggtatcccccccattgttgttagtccaggactctgaaaccacaggccgacagatagaggaccgtgtggccctgctcctctctgaggaagtggaattgtctagcacgccaccacttcctgccagcaggattttaaaggaagggtgggaaagagcgggccagtgtcctcctccacctgaacgcaagcagagctttctgtgggagggcagcgcactgactggggcctgggccatggaggacttctacacggccaggctggtccctcctctcgtgccccagcggcctgcccagggccttatgcaggagcccgtgccgcctctggtgccacctgagcactcagagctgagcgagcgaaggtcacccgctctccacggcacccccactgcaggctgtggctccaggggcccgtcgccttcggccagccagagggagcaccaggccctgcaggacctcgtggacctggcgagggagggactgagcgccagcccgtggcccggcagtgggggcctggctggctcggaagggactgcagggttggacgtggtgcccggcggccttcctctgactgggtttgtggtgccatcgcaggacaagcacccggacaggggcggccgcaccttgctctccctcgggctgctggttgctgactttggcgccatggtcaataacccacacctgagtgatgtccagtttcagacggacagcggggaggtgctttacgcccacaagttcgtgctttatgcccgatgcccgctcctcatccagtatgtgaacaatgaaggcttctccgctgtagaggacggggttctgacccagcgtgtcctgctgggtgacgtgagcaccgaggccgcccgcacgttcctgcactatctctacactgcggacactggccttcctcctggccttagctctgagctgagctccctggcccacaggtttggcgtgagtgagctcgttcacctgtgcgaacaggtgcctattgccactgactcagagggcaaaccatgggaggagaaggaagcagagaattgcgaaagcagggccgagaatttccaggaactcttgaggtcaatgtgggcagatgaagaggaggaagcggagactttgttgaaatccaaggaccacgaagaagatcaagaaaacgtgaatgaagcagaaatggaagaaatttatgaatttgcagctactcagcgaaagcttctccaggaagaaagggcagcgggtgccggcgaggacgctgactggctggagggtggcagtccggtttctgggcaactcctagcaggtgtccaggtgcagaaacagtgggacaaggtggaggagatggagccgttggagccaggaagagatgaggccgccaccacctgggagaagatgggacagtgcgctctcccgccaccccagggccagcactcaggggcacggggagcagaggcccctgagcaggaggcgccagaggaggcgcttggccattccagctgctccagcccttccagggactgccaggcagagagaaaagaaggctctcttccgcactcagatgatgccggggattacgaacagctcttctcatcaactcagggagagatctcagagccgtcccaaataacaagtgagcccgaggaacaaagtggcgctgtcagggaaagggggctggaggtttctcatcgcctggctccctggcaggcatctccaccgcacccgtgccgcttcctattggggcctccccagggcgggagtccccgcgggtctcatcacacaagtgggtcgtccctgtcaacaccccggtcccgtggcggaacttcccaggtgggctccccaaccttgctgtctccagctgtgccatcaaagcagaaaagggacaggagcatcctcacgctgtctaaagagccagggcaccagaaaggcaaagagcgtcggtccgtgctggagtgcagaaataagggggtcctgatgttcccagaaaaatctccgtctattgacctaacccagtcaaatcctgaccattcgagctccagatctcagaaatcttcatccaaactgaacgaagaagatgaggtcatcctcttactggactcggatgaggagctggagctagaacaaaccaaaatgaagtccatttctagtgatcctctggaagaaaagaaagctctagaaattagccctaggtcctgtgagctgttttccatcattgatgttgatgcagatcaggaaccttcccagagcccaccaagaagcgaagctgtgctgcagcaggaggatgagggggcgctgccggagaatcggggctctttgggcaggagaggggctccctggctgttctgtgaccgtgagagcagccccagcgaggccagcaccacagacacctcgtggctggtgcccgccaccccgctggccagcagaagccgtgactgttcttcccagacccaaatcagcagcctcaggagcgggctggccgtgcaggcggtgactcagcacacgcccagggcctcagtaggaaacagggaagggaacgaagtcgcacagaagttttctgtcatcaggccccagacaccaccgccccagacaccgtcctcatgcctcactcccgtctctccaggaacttctgacggcagaaggcaaggccacagaagcccttcccgtccccaccccgggggccacccgcactcctctccgctggctccacatcccatctcaggggaccgcgcccacttcagcaggcggttcctgaaacactcgccgcctgggccaagcttcctgaaccagaccccagcgggtgaagtggtggaagtcggagacagtgacgatgagcaggaggtggcctcccatcaggccaacagaagccccccactggacagtgaccccccaattccaattgacgactgctgctggcacatggagcccctctcgccaattcccattgaccactggaacctggagcggaccggccccctgagcaccagcagccccagccgcaggatgaacgaggccgccgacagccgtgactgtcgctccccgggactcctggacaccacccccatccgaggaagctgcactacccagaggaaattgcaagagaagtcctcgggcgcgggctccctggggaatagcaggccgagctttctgaattcggctctgtgggacgtttgggacggggaagagcagaggcctccagagacccctcctccggcccagatgccaagcgctggtggagctcagaagcccgaagggttagagacacccaaaggtgctaatcggaagaagaacttgccccccaaagtgcccataacgccgatgccacagtattccattatggagacgccggtgctgaagaaggaactggataggtttggagtccgccctctgcctaaacgccagatggttctgaagctgaaggagatattccagtacactcaccagaccctggactcagactccgaggacgagagccagtcctcacagccgctgttgcaggcgcctcactgccagaccctcgcctcccagacctacaagccttcaagggcaggggtccatgcccagcaggaggccaccacaggacctggggcccataggcccaagggacctgctaagaccaagggcccccgacatcaaaggaagcatcatgaaagcatcacacccccaagcaggtcgcccaccaaggaggcacctccaggcctcaatgatgacgcccagatcccagcctctcaagaatccgtggccacctctgtggatggcagtgacagctccttgagctcacagagttcttcctcctgtgagtttggagcggcatttgagtctgcaggtgaagaggagggcgagggggaggtcagtgcctcgcaggcagccgtgcaggcggcggacacagacgaggcgctgaggtgctacatccgctccaagccggccctgtaccagaaggtgctgctgtaccagccctttgagctgcgggagctgcaggcagagctgaggcagaacggcctccgtgtgtcctcgcgcaggctgttggacttcctggacacccactgtatcaccttcaccactgccgccacccgcagggagaagctccagggcaggaggcggcagcctcggggcaagaagaaggtggagcggaactgatggggccatcccgaccccaccccaacctgccatcagcagcccccacccccgccatttgcagggaggacctgggacacccagcgtgggtcaggcctccacaggcatttctgggcctggggaccacatcagctctgcgctgtgatgatgaccacagcccaatccagggcttcctcctctgggctctgctttctagggtggcatttggagcatgtcacccactggatttacagactccagccccttcctctgtccgtgctcacagtgtgtctccctttttggttttctttttttttttctttttgagacagtcgtgctgtgtcacctaggctggagtgcagtggcacaatctcggctcactgcaacctccgcctcccgggttcaagcaattctcctgcctcagcctcccagatagctgggactacaggcacacgctgccacgcccagctgattttttatattttagtagaaacggggtttcaccatgttgctcaggctggtcacaaactccagagctcaggcaatccgcctgctgcggcctcccaaagtgctgggatcacaggcgccagccactgcgcccggcccagtgtgtctcccttaacccaagagggccctcagctgtcccagggggcagtgggccatcaccagctggccagggcatggcctattctgccacatttgccaccctctgagcccaccagtcctgggcacagctgccctacatgtctgtcctgagatggacgtcaggtccagcctgccccggcagcccgggcccgtcctcctcagcactcaggccaaccccagccaccgccagcctgagaccaggtgtcctgaggctccctgcactgccacagcccagatgcagttctcctgacccagccgtgctacccggacacttgtcattgttaccagcagtctccaaactggacagtgcacaagggcccagaacaactctgatgccaccacaaaacaaacatgttcactagcggattccattctttgggttaaagctgcctccagcctcaggagcagtgtggaggaagatgagggccaggaaagaaggaaaccttggtttctccatccttgtgaatgtcctcgtctgtttcaaatacagtgcagtcagttttatatgatgtgcaataaaccaaaaaggctttattaaaaaaaaaaaaaaa

SEQ ID NO: 180 - DNA, 1434 bp, Homo sapiens
gcgcacgctcttcctgggtcaagagccggctcggttctgggattctgaggctccccaccgcggtccggcttctctgggagactgtctacaaaccgacgagaggcgtcaaccttttaccctagggggcggatttgggtaggagccgagcgttcggtcggaaacgcccccttcttcctcctgggcggggcaagtgaggccaagtactgggcctccagggcgtcgtacctctgtgagacatggctcgctgtggggaaggcagtgcggcccccatggtacttctggggtccgctggagtttgcagtaaggggttgcaaaggaaggggccgtgtgagcggcgccggctgaaggcgacggtgtcggagcagctcagccaggatttgctcaggcttctaagggaagaattccatacagatgttaccttctctgtgggttgtactttgttcaaagcacacaaagcagtccttttagcaagagttcctgacttctattttcatactattggacagacatcaaatagtttaacaaatcaggagcctattgctgtggagaatgttgaagctttagaatttagaacgtttttacagattatatattcatcaaacagaaacataaaaaactatgaagaggaaattcttaggaaaaagataatggagattgggatatcacaaaagcaacttgacatcagttttccaaagtgtgaaaactcatctgattgttctcttcagaagcatgaaattccagaggatatcagtgacagagatgatgatttcatttccaatgataattatgacttggagcctgcatctgaattaggagaagatttattgaagctttatgtgaaacctggttgcccagatattgatatttttgttgatggaaaacgttttaaagctcacagggccattttgagtgccagatctagttattttgctgcaatgctgagtggctgttgggctgaaagctcccaagagtacgttactcttcaaggtataagccatgtagaactgaatgttatgatgcattttatatatggaggaactctggacattccagacaaaactaatgttggtcagatactcaatatggctgatatgtatggactagaaggattaaaagaagtagcaatctatattttaagaagagattactgtaatttctttcagaagcctgttcccagaacattgacgtctatactagaatgcctgattattgctcattcagttggagtggaaagtctttttgctgactgcatgaagtggattgtaaagcattttgcaaggttttggtctgagagaagctttgcaaatatacctcctgagattcagaaaagttgtcttaatatgttgattcagtccttagtaaatataacctgaatactcttttgtgtgtttgccattaaaaagtttatgcaaaaaaaaaaaaaaaaaaaaaaaa

SEQ ID NO: 181 - DNA, 1378 bp, Homo sapiens
cgacgcgggagccgcacgcgccggacgaggctcgctgcgctccctgttgcccagcgcgggcccgttgaggcggagccctcagttcccggccaggacacggtctgggccgccgaatctccggccgaagagcggcggcggcagcggcggaaaaaaatgaagaatgaaattgctgccgttgtcttctttttcacaaggctagttcgaaaacatgataagttgaaaaaagaggcagttgagaggtttgctgagaaattgaccctaatacttcaagaaaaatataaaaatcactggtatccagaaaaaccatcgaaaggacaggcctacagatgtattcgtgtcaataaatttcagagagttgatcctgatgtcctgaaagcctgtgaaaacagctgcatcttgtatagtgacctgggcttgccaaaggagctcactctctgggtggacccatgtgaggtgtgctgtcggtatggagagaaaaacaatgcattcattgttgccagctttgaaaataaagatgagaacaaggatgagatctccaggaaagttaccagggcccttgataaggttacctctgattatcattcaggatcctcttcttcagatgaagaaacaagtaaggaaatggaagtgaaacccagttcggtgactgcagccgcaagtcctgtgtaccagatttcagaacttatatttccacctcttccaatgtggcaccctttgcccagaaaaaagccaggaatgtatcgagggaatggccatcagaatcactatcctcctcctgttccatttggttatccaaatcagggaagaaaaaataaaccatatcgcccaattccagtgacatgggtacctcctcctggaatgcattgtgaccggaatcactggattaatcctcacatgttagcacctcactaacttcgtttttgattgtgttggtgtcatgttgagaaaaaggtagaataaaccttactacacattaaaagttaaaagttcttactaatagtagtgaagttagatgggccaaaccatcaaacttatttttatagaagttattgagaataatctttcttaaaaaatatatgcactttagatattgatatagtttgagaaattttattaaagttagtcaagtgcctaagtttttaatattggacttgagtatttatatattgtgcatcaactctgttggatacgagaacactgtagaagtggacgatttgttctagcacctttgagaatttactttatggagcgtatgtaagttatttatatacaaggaaatctattttatgtcgttgtttaagagaattgtgtgaaatcatgtagttgcaaataaaaaatagtttgaggcatgaaaaaaaaaaaaaaaaaaaaaaaaaaa

SEQ ID NO: 182 - DNA, 2591 bp, Homo sapiens
ctcagactgtccttcctctctggactgtaagaatatgtctccagggccagtgtctgctgcgatcgagtcccaccttccaagtcctggcatctcaatgcatctgggaagctacctgcattaagtcaggactgagcacacaggtgaactccagaaagaagaagctatggccgcagtgattctggagagcatctttctgaagcgatcccaacagaaaaagaaaacatcacctctaaacttcaagaagcgcctgtttctcttgaccgtgcacaaactctcctactatgagtatgactttgaacgtgggagaagaggcagtaagaagggttcaatagatgttgagaagatcacttgtgttgaaacagtggttcctgaaaaaaatcctcctccagaaagacagattccgagaagaggtgaagagtccagtgaaatggagcaaatttcaatcattgaaaggttcccttatcccttccaggttgtatatgatgaagggcctctctacgtcttctccccaactgaagaactaaggaagcggtggattcaccagctcaaaaacgtaatccggtacaacagtgatctggttcagaaatatcacccttgcttctggatcgatgggcagtatctctgctgctctcagacagccaaaaatgctatgggctgccaaattttggagaacaggaatggaagcttaaaacctgggagttctcaccggaagacaaaaaagcctcttcccccaacgcctgaggaggaccagatcttgaaaaagccactaccgcctgagccagcagcagcaccagtctccacaagtgagctgaaaaaggttgtggccctttatgattacatgccaatgaatgcaaatgatctacagctgcggaagggtgatgaatattttatcttggaggaaagcaacttaccatggtggagagcacgagataaaaatgggcaggaaggctacattcctagtaactatgtcactgaagcagaagactccatagaaatgtatgagtggtattccaaacacatgactcggagtcaggctgagcaactgctaaagcaagaggggaaagaaggaggtttcattgtcagagactccagcaaagctggcaaatatacagtgtctgtgtttgctaaatccacaggggaccctcaaggggtgatacgtcattatgttgtgtgttccacacctcagagccagtattacctggctgagaagcaccttttcagcaccatccctgagctcattaactaccatcagcacaactctgcaggactcatatccaggctcaaatatccagtgtctcaacaaaacaagaatgcaccttccactgcaggcctgggatacggatcatgggaaattgatccaaaggacctgaccttcttgaaggagctggggactggacaatttggggtagtgaagtatgggaaatggagaggccagtacgacgtggccatcaagatgatcaaagaaggctccatgtctgaagatgaattcattgaagaagccaaagtcatgatgaatctttcccatgagaagctggtgcagttgtatggcgtctgcaccaagcagcgccccatcttcatcatcactgagtacatggccaatggctgcctcctgaactacctgagggagatgcgccaccgcttccagactcagcagctgctagagatgtgcaaggatgtctgtgaagccatggaatacctggagtcaaagcagttccttcaccgagacctggcagctcgaaactgtttggtaaacgatcaaggagttgttaaagtatctgatttcggcctgtccaggtatgtcctggatgatgaatacacaagctcagtaggctccaaatttccagtccggtggtccccaccggaagtcctgatgtatagcaagttcagcagcaaatctgacatttgggcttttggggttttgatgtgggaaatttactccctggggaagatgccatatgagagatttactaacagtgagactgctgaacacattgcccaaggcctacgtctctacaggcctcatctggcttcagagaaggtatataccatcatgtacagttgttggcatgagaaagcagatgagcgtcccactttcaaaattcttctgagcaatattctagatgtcatggatgaagaatcctgagctcgccaataagcttcttggttctacttctcttctccacaagccccaatttcactttctcagaggaaatcccaagcttaggagccctggagcctttgtgctcccactcaatacaaaaaggcccctctctacatctggggatgcacctcttctttgattccctgggatagtggcttctgagcaaaggccaaaaaattattgtgcctgaaatttcccgagagaattaagacagactgaatttgcgatgaaaatattttttaggagggaggatgtaaatagccgcacaaaggggtccaacagctctttgagtaggcatttggtagagcttgggggtgtgtgtgtgggggtggaccgaatttggcaagaatgaaatggtgtcataaagatgggaggggagggtgttttgataaaataaattctagaaagcttaaaaaaaaaaaaaaaaaaa

SEQ ID NO: 183 - DNA, 1761 bp, Homo sapiens
atggaaccagctgctgccctgcacttctcccggccagcctccctcctcctcctcctcagcctgtgtgcactggtctcagcccaggtcactgtcgtggggcccactgatcccatcctggccatggtgggagaaaacactacgttacgatgctgtctgtcacccgaggaaaatgctgaggacatggaggtgcggtggttccagtctcagttctcccctgcagtgtttgtgtataagggtggaagagagagaacagaggagcagaaggaggagtaccgagggagaaccacctttgtgagcaaagacagcaggggcagcgtggccctgatcatacacaatgtcacagccgaggataacggcatctaccagtgttacttccaagaaggcaggtcctgcaatgaggccatcctgcaccttgtggtggcaggactggactctgagcccgtcattgaaatgagagaccacgaggacgggggcatccagctggagtgcatatctggagggtggtacccaaagcccctcacagtgtggagggacccctacggtgaggtcgtgcctgccctgaaggaggtctccacccctgacgcagacagcctcttcatggtcaccacagctgtgatcatcagagacaagtctgtgaggaacgtgtcctgctctatcaatgacaccctgctcggccagaagaaagaaagtgtcatttttattccagaatcctttatgcccagcaggtctccatgtgtggtgatcctgcctgttatcatgattattctgatgatacccattgccatatgcatctactggatcaacaatctccaaaaggaaaaaaaagattctcatctcatgacattcaacctctgtctgtcccttgcaggatggagaagaacattcttacatgctgccaatgttgtcctggaccaagacactggtcatccctatctcttcgtgtcagaggacaaaagaagtgtgacattggacccctccagggagagcattccgggcaacccagagagattcgacagtcagctttgtgtcctgggccaggagagcttcgcctcagggaaacattacttggaggtagatgtggaaaatgtgattgagtggactgtggggatctgtagagacaatgttgagaggaaatgggaggtcccactacttcctcagaatggcttctggaccttggagatgcataaaaggaaatactgggccctgacctcccttaagtggattctctctctggaggagcccctttgccaggtgggcatcttcctggactatgaagctggagacgtctccttctacaacatgagggacagatcacacatctacacatttccccattcagccttttctgtgcctgtgaggcccttcttcagcttagggtcttatgacagccaaatcttaatctgctctgcattcacaggagccagtggggtcacggtgcctgaagagggctggacacttcacagagcagggacccaccacagcccacagaatcagttccccagtctcacagccatggaaacaagccctggccatctcagcagccactgcacaatgcctctggtggaagacacgccctcctcccctctggtcacacaagagaacatcttccagctgcctctttcacacccactccagacctcagcccctgttcacctcctcattaggtgtggctttagtagttcctttggttgtaactatgggatggaatccaggcatagggaactagttgttccacagctcccagccaggaagaaagtgtga

SEQ ID NO: 184 - DNA, 3749 bp, Homo sapiens
aggggcgtggccacgtcgaccgcgcgggaccgttaaatttgaaacttggcggctaggggtgtgggcttgaggtggccggtttgttagggagtcgtgtacgtgccttggtcgcttctgtagctccgagggcaggttgcggaagaaagcccaggcggtctgtggcccagaggaaaggcctgcagcaggacgaggacctgagccaggaatgcaggatggcggcggtgaagaaggaagggggtgctctgagtgaagccatgtccctggagggagatgaatgggaactgagtaaagaaaatgtacaacctttaaggcaagggcggatcatgtccacgcttcagggagcactggcacaagaatctgcctgtaacaatactcttcagcagcagaaacgggcatttgaatatgaaattcgattttacactggaaatgaccctctggatgtttgggataggtatatcagctggacagagcagaactatcctcaaggtgggaaggagagtaatatgtcaacgttattagaaagagctgtagaagcactacaaggagaaaaacgatattatagtgatcctcgatttctcaatctctggcttaaattagggcgtttatgcaatgagcctttggatatgtacagttacttgcacaaccaagggattggtgtttcacttgctcagttctatatctcatgggcagaagaatatgaagctagagaaaactttaggaaagcagatgcgatatttcaggaagggattcaacagaaggctgaaccactagaaagactacagtcccagcaccgacaattccaagctcgagtgtctcggcaaactctgttggcacttgagaaagaagaagaggaggaagtttttgagtcttctgtaccacaacgaagcacactagctgaactaaagagcaaagggaaaaagacagcaagagctccaatcatccgtgtaggaggtgctctcaaggctccaagccagaacagaggactccaaaatccatttcctcaacagatgcaaaataatagtagaattactgtttttgatgaaaatgctgatgaggcttctacagcagagttgtctaagcctacagtccagccatggatagcaccccccatgcccagggccaaagagaatgagctgcaagcaggcccttggaacacaggcaggtccttggaacacaggcctcgtggcaatacagcttcactgatagctgtacccgctgtgcttcccagtttcactccatatgtggaagagactgcacaacagccagttatgacaccatgtaaaattgaacctagtataaaccacatcctaagcaccagaaagcctggaaaggaagaaggagatcctctacaaagggttcagagccatcagcaagcgtctgaggagaagaaagagaagatgatgtattgtaaggagaagatttatgcaggagtaggggaattctcctttgaagaaattcgggctgaagttttccggaagaaattaaaagagcaaagggaagccgagctattgaccagtgcagagaagagagcagaaatgcagaaacagattgaagagatggagaagaagctaaaagaaatccaaactactcagcaagaaagaacaggtgatcagcaagaagagacgatgcctacaaaggagacaactaaactgcaaattgcttccgagtctcagaaaataccaggaatgactctatccagttctgtttgtcaagtaaactgttgtgccagagaaacttcacttgcggagaacatttggcaggaacaacctcattctaaaggtcccagtgtacctttctccatttttgatgagtttcttctttcagaaaagaagaataaaagtcctcctgcagatcccccacgagttttagctcaacgaagaccccttgcagttctcaaaacctcagaaagcatcacctcaaatgaagatgtgtctccagatgtttgtgatgaatttacaggaattgaacccttgagcgaggatgccattatcacaggcttcagaaatgtaacaatttgtcctaacccagaagacacttgtgactttgccagagcagctcgttttgtatccactccttttcatgagataatgtccttgaaggatctcccttctgatcctgagagactgttaccggaagaagatctagatgtaaagacctctgaggaccagcagacagcttgtggcactatctacagtcagactctcagcatcaagaagctgagcccaattattgaagacagtcgtgaagccacacactcctctggcttctctggttcttctgcctcggttgcaagcacctcctccatcaaatgtcttcaaattcctgagaaactagaacttactaatgagacttcagaaaaccctactcagtcaccatggtgttcacagtatcgcagacagctactgaagtccctaccagagttaagtgcctctgcagagttgtgtatagaagacagaccaatgcctaagttggaaattgagaaggaaattgaattaggtaatgaggattactgcattaaacgagaatacctaatatgtgaagattacaagttattctgggtggcgccaagaaactctgcagaattaacagtaataaaggtatcttctcaacctgtcccatgggacttttatatcaacctcaagttaaaggaacgtttaaatgaagattttgatcatttttgcagctgttatcaatatcaagatggctgtattgtttggcaccaatatataaactgcttcacccttcaggatcttctccaacacagtgaatatattacccatgaaataacagtgttgattatttataaccttttgacaatagtggagatgctacacaaagcagaaatagtccatggtgacttgagtccaaggtgtctgattctcagaaacagaatccacgatccctatgattgtaacaagaacaatcaagctttgaagatagtggacttttcctacagtgttgaccttagggtgcagctggatgtttttaccctcagcggctttcggactgtacagatcctggaaggacaaaagatcctggctaactgttcttctccctaccaggtagacctgtttggtatagcagatttagcacatttactattgttcaaggaacacctacaggtcttctgggatgggtccttctggaaacttagccaaaatatttctgagctaaaagatggtgaattgtggaataaattctttgtgcggattctgaatgccaatgatgaggccacagtgtctgttcttggggagcttgcagcagaaatgaatggggtttttgacactacattccaaagtcacctgaacaaagccttatggaaggtagggaagttaactagtcctggggctttgctctttcagtgagctaggcaatcaagtctcacagattgctgcctcagagcaatggttgtattgtggaacactgaaactgtatgtgctgtaatttaatttaggacacatttagatgcactaccattgctgttctactttttggtacaggtatattttgacgtcactgatattttttatacagtgatatacttactcatggccttgtctaacttttgtgaagaactattttattctaaacagactcattacaaatggttaccttgttatttaacccatttgtctctacttttccctgtacttttcccatttgtaatttgtaaaatgttctcttatgatcaccatgtattttgtaaataataaaatagtatctgttaaatttgtgcttctaaaaaaaaa

SEQ ID NO: 185 - DNA, 3583 bp, Homo sapiens
aaaggcctgcagcaggacgaggacctgagccaggaatgcaggatggcggcggtgaagaaggaagggggtgctctgagtgaagccatgtccctggagggagatgaatgggaactgagtaaagaaaatgtacaacctttaaggcaagggcggatcatgtccacgcttcagggagcactggcacaagaatctgcctgtaacaatactcttcagcagcagaaacgggcatttgaatatgaaattcgattttacactggaaatgaccctctggatgtttgggataggtatatcagctggacagagcagaactatcctcaaggtgggaaagagagtaatatgtcaacgttattagaaagagctgtagaagcactacaaggagaaaaacgatattatagtgatcctcgatttctcaatctctggcttaaattagggcgtttatgcaatgagcctttggatatgtacagttacttgcacaaccaagggattggtgtttcacttgctcagttctatatctcatgggcagaagaatatgaagctagagaaaactttaggaaagcagatgcgatatttcaggaagggattcaacagaaggctgaaccactagaaagactacagtcccagcaccgacaattccaagctcgagtgtctcggcaaactctgttggcacttgagaaagaagaagaggaggaagtttttgagtcttctgtaccacaacgaagcacactagctgaactaaagagcaaagggaaaaagacagcaagagctccaatcatccgtgtaggaggtgctctcaaggctccaagccagaacagaggactccaaaatccatttcctcaacagatgcaaaataatagtagaattactgtttttgatgaaaatgctgatgaggcttctacagcagagttgtctaagcctacagtccagccatggatagcaccccccatgcccagggccaaagagaatgagctgcaagcaggcccttggaacacaggcaggtccttggaacacaggcctcgtggcaatacagcttcactgatagctgtacccgctgtgcttcccagtttcactccatatgtggaagagactgcacaacagccagttatgacaccatgtaaaattgaacctagtataaaccacatcctaagcaccagaaagcctggaaaggaagaaggagatcctctacaaagggttcagagccatcagcaagcgtctgaggagaagaaagagaagatgatgtattgtaaggagaagatttatgcaggagtaggggaattctcctttgaagaaattcgggctgaagttttccggaagaaattaaaagagcaaagggaagccgagctattgaccagtgcagagaagagagcagaaatgcagaaacagattgaagagatggagaagaagctaaaagaaatccaaactactcagcaagaaagaacaggtgatcagcaagaagagacgatgcctacaaaggagacaactaaactgcaaattgcttccgagtctcagaaaataccaggaatgactctatccagttctgtttgtcaagtaaactgttgtgccagagaaacttcacttgcggagaacatttggcaggaacaacctcattctaaaggtcccagtgtacctttctccatttttgatgagtttcttctttcagaaaagaagaataaaagtcctcctgcagatcccccacgagttttagctcaacgaagaccccttgcagttctcaaaacctcagaaagcatcacctcaaatgaagatgtgtctccagatgtttgtgatgaatttacaggaattgaacccttgagcgaggatgccattatcacaggcttcagaaatgtaacaatttgtcctaacccagaagacacttgtgactttgccagagcagctcgttttgtatccactccttttcatgagataatgtccttgaaggatctcccttctgatcctgagagactgttaccggaagaagatctagatgtaaagacctctgaggaccagcagacagcttgtggcactatctacagtcagactctcagcatcaagaagctgagcccaattattgaagacagtcgtgaagccacacactcctctggcttctctggttcttctgcctcggttgcaagcacctcctccatcaaatgtcttcaaattcctgagaaactagaacttactaatgagacttcagaaaaccctactcagtcaccatggtgttcacagtatcgcagacagctactgaagtccctaccagagttaagtgcctctgcagagttgtgtatagaagacagaccaatgcctaagttggaaattgagaaggaaattgaattaggtaatgaggattactgcattaaacgagaatacctaatatgtgaagattacaagttattctgggtggcgccaagaaactctgcagaattaacagtaataaaggtatcttctcaacctgtcccatgggacttttatatcaacctcaagttaaaggaacgtttaaatgaagattttgatcatttttgcagctgttatcaatatcaagatggctgtattgtttggcaccaatatataaactgcttcacccttcaggatcttctccaacacagtgaatatattacccatgaaataacagtgttgattatttataaccttttgacaatagtggagatgctacacaaagcagaaatagtccatggtgacttgagtccaaggtgtctgattctcagaaacagaatccacgatccctatgattgtaacaagaacaatcaagctttgaagatagtggacttttcctacagtgttgaccttagggtgcagctggatgtttttaccctcagcggctttcggactgtacagatcctggaaggacaaaagatcctggctaactgttcttctccctaccaggtagacctgtttggtatagcagatttagcacatttactattgttcaaggaacacctacaggtcttctgggatgggtccttctggaaacttagccaaaatatttctgagctaaaagatggtgaattgtggaataaattctttgtgcggattctgaatgccaatgatgaggccacagtgtctgttcttggggagcttgcagcagaaatgaatggggtttttgacactacattccaaagtcacctgaacaaagccttatggaaggtagggaagttaactagtcctggggctttgctctttcagtgagctaggcaatcaagtctcacagattgctgcctcagagcaatggttgtattgtggaacactgaaactgtatgtgctgtaatttaatttaggacacatttagatgcactaccattgctgttctactttttggtacaggtatattttgacgtcactgatattttttatacagtgatatacttactcatggccttgtctaacttttgtgaagaactattttattctaaacagactcattacaaatggttaccttgttatttaacccatttgtctctacttttccctgtacttttcccatttgtaatttgtaaaatgttctcttatgatcaccatgtattttgtaaataataaaatagtatctgttaaaaaaaaaaaaaaaaaaaaaaaaaaa

SEQ ID NO: 186 - DNA, 484 bp, Homo sapiens
ctgatgtggtgaagatggccagtaaagcacaagcctccaacccagttgtcgagggacaaccacccacaacaccaaagaggcgaagaagaggaaggccccctctcaaccaagattcagaagccctctgaagattcccaagacaacccggaagggaaaagagagtctttgagggagttccaggaaaaaagccactcccgaaagaccgccgcttcaagaaaacctgaggaagggagagggccaacgctatccagccactctgaccagctgaacgaggaactcaatcaaaaggagccacagcaggaccaggaaagtgaggagacttccaccatctccagcgtctccctggacagccagtaatttcagggcaagttcaaaggactagatctatctgagaggtctccataggtctaaccccagagaaatagccaaaagggtctatggtacattttacacacaacagggtacccctcattggtgattgaaa

SEQ ID NO: 187 - DNA, 1078 bp, Homo sapiens
gttgcaggtagcggtagcgatggacactctggatcgagtagtaaagcccaaaacgaaaagagccaagagattccttgagaagagagaaccgaaactcaatgaaaatattaaaaatgccatgctgattaaagggggaaatgcaaatgcaacagtgacaaaagtacttaaagatgtgtatgcactgaaaaaaccatacggtgtactatataaaaagaaaaatattacaagaccttttgaggatcagacatcactggaattcttttcaaagaagtcagattgttctttattcatgtttggctcccataataagaagcggccaaataatctagtaataggtcgtatgtatgactaccatgtgctggatatgattgaattaggtattgagaattttgtctctctaaaagacattaagaacagtaaatgtcctgagggaacaaaacccatgctgatatttgctggcgatgatttcgatgtaacagaagattatagaagactaaaaagtcttcttattgatttcttcagaggccccacagtatcaaatatccgcctggctggattagagtatgttctgcacttcactgcactgaatgggaagatttactttcgaagctataagttgctgttgaagaaatctggttgcagaacaccacggattgaattggaagagatgggaccctcattggatctggttctgaggaggacacacctggcatcggatgacctttataaattatctatgaaaatgccaaaagctctcaagccaaagaagaagaaaaatatttcccatgatacttttggtacaacttatggaaggattcatatgcagaagcaagacctaagcaaactacaaaccaggaaaatgaaggggttgaagaagcgacctgcagaaaggataacagaagaccacgagaaaaagtcaaaaagaattaaaaaaaattgatggaacttaaaaaaaaaaaaaaaaaaaaaaaaaaaaaaaaaaaaaaaaaaaaaaaaaaaaaaaaaaaaaaaaaaaaaaaaaaaaaaaaaaaaaaaaaaaaaaaaaaaaaaaaaaaaaaaaaaaaaaaaaaaaaaaaaa

SEQ ID NO: 188 - DNA, 1975 bp, Homo sapiens
agaaggctatttccgtttccgtacggaagcaaaggagccaagaccatggcgaaagccggggataagagcagcagcagcgggaagaaaagtctaaaacggaaagccgctgccgaagaacttcaggaggctgcaggcgctggggatggggcgacggaaaacggggtccaacccccgaaagcggctgcctttccgccaggctttagcatttcggagattaaaaacaaacagcggcgacacttaatgttcacgcggtggaaacagcagcagcggaaggaaaagttggcagctaagaaaaaacttaaaaaagaaagagaggctcttggcgataaggctccaccaaagcctgtacccaagaccattgacaaccagcgagtgtatgatgaaaccacagtagaccctaatgatgaagaggtcgcttatgatgaagctacagatgaatttgcttcttacttcaacaaacagacttctcccaagattctcatcacaacatcagatagacctcatgggagaacagtacgactctgtgaacagctctccacagttataccaaactcacatgtttattacagaagaggactggctctgaaaaaaattattccacagtgcatcgcaagagatttcacagacctgattgttattaatgaagatcgtaaaaccccaaatggacttattttgagtcacttgccaaatggcccaactgctcattttaaaatgagcagtgttcgtcttcgtaaagaaattaagagaagaggcaaggaccccacagaacacatacctgaaataattctgaataattttacaacacggctgggtcattcaattggacgtatgtttgcatctctctttcctcataatcctcaatttatcggaaggcaggttgccacattccacaatcaacgggattacatattcttcagatttcacagatacatattcaggagtgaaaagaaagtgggaattcaggaacttggaccacgttttaccttaaaattaaggtctcttcagaaaggaacctttgattctaaatatggagagtatgaatgggtccataagccccgggaaatggatacaagtagaagaaaattccatttataaagtactgagagaatgatattggattttgctgaacaggcctatcttgaactttggtaaattatttttgacagaatactcttttcaaaatggcatttgctgatttcataaacctttcacgtctggacgaattaccaaatgccatgaattgccactgtgtgtttatgtagaaaatacaaataaaagttattttgatggcttaggtttccttaaacttagttctcttgtttttgggtaactgtgaataattaagttggaatcaagattcagattaactttcctatttgcatagaacacatgagaggaataaaatggttggtaaatattggctaacccttgatttttataccagattaaccttggattcccagtgtctggcacagttttaatagcttaaatggaggccaggtttctggatgttttaacattctcttaagccttcagaagggtaaaaaatttaaagcaaaatgatctaccagggtttaaagcaaagttgcaaattactgaagctaatctttgcttcctgattttgaggtttttggttttttgtgcccacgttgtggggagctcttttttacctcattacatggtgctgtagtactccattcaggcactgaaacaaagttaaccctataagtaactcatggatggaaacccgtagaacttaacagcctcctcctgaccttaaaagaataaaggttcacagtttacctttaattccctagcagtcttgccagatgtatggcataaagtcatgtgagaagagtaggtggaaaaaactgtacaaacttaaccccttcaggtgttcagaacagattaatataccatgtatttaataccaataataatgcaaaataaaagtttcatactaagttttattgta

SEQ ID NO: 189 - DNA, 672 bp, Homo sapiens
caggccagccctggggcgccttaaaaaccggagctggcgcttggcatcgccactctgggcaggatccaacgtcgctccagctgctcttgacgactccacagataccccgaagccatggcaagcaagggcttgcaggacctgaagcaacaggtggaggggaccgcccaggaagccgtgtcagcggccggagcggcagctcagcaagtggtggaccaggccacagaggcggggcagaaagccatggaccagctggccaagaccacccaggaaaccatcgacaagactgctaaccaggcctctgacaccttctctgggattgggaaaaaattcggcctcctgaaatgacagcagggagacttgggtcggcctcctgaaatgacagcagggagacttgggtgaccccccttccaggcgccatctagcacagcctggccctgatctccgggcagccaccacctcctcggtctgccccctcattaaaattcacgttcccaccctgtgtccacttcatgattcctcgcaagctgggcccagtcctctcatcccaagagcagagccaccgtagccggagtcctagcctcccaaattcggaaatccaatccaacggtctcaggaatgttttccatcccgccacgcgcctcccgaagctcccagaccggaggctcagccccc

SEQ ID NO: 190 - DNA, 3785 bp, Homo sapiens
acagaaggaagagcgcgaaattgcccaggatggacactttcaaaggggccccagcggctaagtgactctcagggaaggtggccttgccatcccaacttctatttaggggcaaccactagcaagttcttctcttcgggcaattggaaagagttcctataagcaaagtggaggtgatgtggacccctggaaaatttccttgccccgtttgaactttgcaatgattcactgcaagtcatgtccacgtggaaagcaagactcaccaaaagactgaagtctccctctagaagcatgcatccatttccgtgctcagctctgctcgcctgttttgggaatacgagggagagtgcttccttcaatcagtccggcgtggctgatactcattccaccgtccgtgtgcagcctgtggccaaagcaggcagacagccaagacacccaagcgcagaaggagctccagagaaaaggcaagattcgagcacccatgcagagagaaatggcagtgcgaatcggaattcaagtcaccgcactgcggcccagcccgcggagacgcctgaagatgtgcccgggtccctggatgatggggcggactgtgaagcagtggtgtttcacgcttccatccccagaccatcaattattgacacgcccaaggaagaagaatttcgagaagaacctaaatgcctcgagctggagcagaaaatgacatcagacagcccacctgaggatattgaccataaggactcatatctcattacaagaagcatcatggccgagccagactacatagaagatgacaatcctgaactcattaggcctcagaaactgatcaatcctgtaaaaacctcccggaaccatcaagatcttcacagagaacttcttatgaatcaaaaaaggggtcttgctcctcagaacaaaccagaattgcagaaggtgatggaaaaaagaaaacgagaccaagtaataaagcagaaggaagaagaagcacagaagaagaaatctgacttggaaatagagctattaaaacggcagcagaagttggagcagcttgaacttgagaagcagaaattgcaagaagagcaagaaaatgcccccgagtttgtgaaggtgaaaggcaatctcaggagaacaggccaagaagtcgcccaagcccaggagtcctaggctgaggctgcaccaagacctcgtgtgtcaccccacagagctgtctgtgggtgccttctcaatctcagggcaatagcccctggagaatatttcagccagcagagaattttgacttgcagtaggatttggtttgattttcctacgatctgggtggatgccttgcctgtgacagttgcagttcctattcgccaaatgaagggcagtgccccgcacgtaagttggaatgatggacctgtgttcagagacttaacagaaccaacaagcaaaacaagtgagaacaggaaaaaggaagaggacactggaatcaattcttgagagttgcactacttggtttttcttccattccaagtttcgtgggacccagagccttttttcttttaaaagctaaaaaacaagtgtttaattcctctttttgttatctgttagataattgagatcacctagaaatgcgtttaatctgttcactcactgtaaattttgaggacccagaattgtcttgtttaatttatactttcacccctgttgcagttaacaccagagaaggaacgtgaatgtcgagcacagccactacccttgttggcacttaatttagaaatagggtgagaagtttaaaagcccatcttgattttattttcattccttttggttctctgtgtaataatagcaggctacatagtgacattccagttccaagaaggtacatcctgtccattcattaattgctttgattactaggagggtttctgttcagttttgtttttaaatgtcttgctgatctagttctttcagatggaataaccttccagtcccttagagagtggaactagtccatataacccagcttcagtagcaaaagtagaagccgccacatcttttcatttctccaagaggagagtggggaaggttcccatgaccagctgggcagtcaggatttctctaggcattctaatgtgaaataagtgtagactgctgtcaaggaggcttcatcagaagatgtatagcatttgaatgtctaatgataatgcatatcattagaatccaagctttgaaaatttctgattaatgctcatgtatttctttatctttgtttttccttgtgaagaaagactttcaccactgtctgagtgatgatgctgttgataaggatgatgtcgatgactactatattgcatctctcaggaacagctgatgggaagggaggggctgctgagttcccttgttctagctagcagcacgctcctcagagagggggccgagttacagacagcagccgcattctcatgcaaaattagttttaaactgctagtgtgggcatcggtaccttttgcctgggtgataccgaagaattgttgaggatttagtatgctccgtagagacagttcagccagtcatttctgcattggagagacttctcatactttctttgaagactcatagaaagctggatctagagctcttgaatccttaattagcacagtagaaattagctttctatgggaatgctttagtgttagcagttgacaattaggcccatattcaatctgaatgggaacaaaagtaaatgcaatgataatatactgctagttagagaaacatgttagttgattatacctgaaatggattatttatctcatcagcaagtattatttgaataaaatgagaaatgcttaagaaaaattgttgctctacagtaatttggtttcgaagaatggaatggtaactattttttcccatcgttcttttgagagaaggaagtgtgatgactgatgatcttgaaaagcccatttctgattgcacgttgactggaattctttctttgtgtctgtggactagcgatgctgtttgtaaaatgaagattcgggactggctcatatctttttatctaactagatgtcagatcttgaaatctgtattctcgaagcaattctgccacttgatcgtattcacaggggccctggtaggctcctttagaaggaccatttctgttcctagagcttaactagaattcattcttcactgaaaaaaaaaaaagttacttaagaaagcatttctttcctaatctcactcaaatctgcagaattatttgtaattagtaatacaaaatctggccaaaaggagacttgtaaatagcgtaaagtggtgtcttatgctaaacggtggaatgtataggcagagaagctctttgaagttgtcagatgagctgggctcacaagcctgattcaaacaggctgtcggtctcctctcaccccttaatactgtgcagcccaaactcctaggactcttgaacatctgagcagttttgtgctttgagccactttttgacaaaaatggctccatttttccacagcgtggttttcttaaaatagtttaatgttttatagtctcatagtagtagtgttgctttctaagctataacagtcgaccttattcttctactctgaaaaatcttgacttgtttgagtgtatataatatatataaagggagccttaatggattggttttcataatttaatattttttgtatttgctcttgtataattgtttttaacggaaagtattaaagaattgagggtggaattcttagaaccaaagttattcttaataaaaatcaccacatgcttggaccatg

SEQ ID NO: 191 - DNA, 2100 bp, Homo sapiens
gaagcgcgctcccggggaggtgttgcagccatggctacggcagccggcgcgacctactttcagcgaggcagtctgttctggttcacagtcatcaccctcagctttggctactacacatgggttgtcttctggcctcagagtatcccttatcagaaccttgggcccctgggccccttcactcagtacttggtggaccaccatcacaccctcctgtgcaatgggtattggcttgcctggctgattcatgtgggagagtccttgtatgccatagtattgtgcaagcataaaggcatcacaagtggtcgggctcagctactctggttcctacagactttcttctttgggatagcgtctctcaccatcttgattgcttacaaacggaagcgccaaaaacaaacttgaagttgtctgaaagcttgctctacacttttacattcatcctcacccttttttttgtggggtagaggaggtgcagtaatttactcagtgatctttctactttctagaaactgtccttcaaagctctttaagaccccctcgttagtcagttttttctcttatatgctctggttgagcttgaatagaccagttgttacttaagaaagaaacagagaaagattttagcttttcaatcctatttggcagaggacttcagctaccttcttacagtctttggctgtgttggtaccctcgtgtgctctgagctaagccacatactaaactgactttttggtttgtatacccttgctcccgccttctgatgaaaacaccttaccctcacaaccaccatctttcctctcctttccaaagctctttccaccttgctgcactaagataaagtgacactttcactatatgtcaattccacacacatttattaggtacctgtgaggtaggatcctatcctctcaaacttccatttctcatgctacagagaaagataaggaagatgagcaagtgcctggaatggggcaggctgagcagtcacacaggcatagaggcacgctgagaacctggaggggagactgcagagtgccttccctgatgctgcagccggaagtgatccttccctccacctggcccctgggacactgtgctctgcagtgtgcagggcctgatggcactgctagattgctccttcagctcagggccacagcttaaacagctttacctttcccctcagcacctgtcccactatcttgcacacaggtgctctaaccatgtttattgaacaaaggagggaaactgatttcactttcacttgttcattatcattccaatttttatgtgaaaatggcacaacccatttggggtaccctcaccccaaaataaaagcccaagtctacctttgactggtaccaccttttttgtggtttcgttggtgagaaacctttatctttttcatacctttctattctcaatcacttctccaaaagtgtgtctttccagctctgatttattcaaaacacaagcatttctgtttagagattctagcccatgggttatctggctagttattacctctcctgttcacttagttatactttattattgctcacaggctggggaggcagaatgactctgtcaccactaggagccattagggcttcttccctggaggactgcctgcttgctttctggggacactagccctcatttcccttctgtggtacagtggggcaaattatttgtattaagcaaacatttatgggaaacaacccgctcccgaaaacggagcccccaagtaaagcacaaccctgaaagattatgaactatgaattgtctctagtagagataaatttctgcaaacatatctcagtcttccctctgtttctctggtgattaagaagttcctttttggtaaggaaaaggatttttaaccatagagttaggcatcatggaaattcaaaccagatttcttaatacctggtcttcctcaaagagaaataataacagtaatagtggtgctgggaacaatatggcagattattgaatgaaattgattaacttgaataaaatgctgtgaattttctctaaaaaaaaaaaaaaaaaaaaaaaaaaaaaaaaagtaaaaaaaaaaaaaaaaaaaaaaaaaaaaaa

SEQ ID NO: 192 - DNA, 984 bp, Homo sapiens
actagttgatgacgcacccatggcgcctggttgtctagacgagccggtgtaccgactccccggtggatgataactatgagtgcaaaagcaagacgcgcactttcctgtcacctcgccctttcaccccctcgggaagatcaaagtgtctttagcccaagcatggccttgagcgacttcatcacacctgcatgaggtcacaagcagtcactagcgcaggggggtgaggcgagttctgggtgaaagaaacggggcggggctgaggccaaggaagaggttggactgtgtctcgcatgctcctgacgcagaaggttttgaaccttttttcacctcgtctgaaatggctgcctcccagtgtctctgctgctcaaaatttctcttccagagacagaacctcgcctgtttcctcacaaacccacactgtggcagccttgttaatgcagatggccatggtgaagtgtggacagattggaataatatgtccaagtttttccagtatggatggcgatgcaccactaatgagaatacctattcaaaccgtaccctgatgggcaactggaaccaggaaagatatgacctgaggaatatcgtgcagcccaaacccttgccttcccagtttggacactactttgaaacaacatatgatacaagctacaacaacaaaatgccactttcaacacatagatttaagcgagagcctcactggttcccaggacatcaacctgaactggatcctccccgatacaaatgcacagaaaagtcaacttacatgaatagctattcaaagccttaaattgggcatcactcaggatgtgtataagatcttaatattgactagtttcacatccaggtttctaagaaatgataagatacttcacttttccagagtgaaatgtaggagggagcacattctaagtacagctaaaaatttagctcactgtaacacagtttcactctctgaataaataaagcaaaaaacacagtaaa

SEQ ID NO: 193 - DNA, 1308 bp, Homo sapiens
ccgggagcgctaggcctggtccctcttcctagaatagcgttgcgcgcatgcgccttgacgagtgagccggggagccatggacaactgtttggcggccgcagcgctgaatggggtggaccgacgttccctgcagcgttcagcaaggctggctctagaagtgctggagagggccaagaggagggcggtggactggcatgccctggagcgtcccaaaggctgcatgggggtccttgcccgggaggcgccccacctagagaaacagccggcagccggcccgcagcgcgttctcccgggagagagagaagagagacccccaacccttagtgcttccttcagaacaatggctgaattcatggactatacttcaagtcagtgtgggaaatattattcatctgtgccagaggaaggaggggcaacccatgtctatcgttatcacagaggcgagtcgaagctgcacatgtgcttggacatagggaatggtcagagaaaagacagaaaaaagacatcccttggtcctggaggcagctatcaaatatcagagcatgctccagaggcatcccagcctgctgagaacatctctaaggacctctacatagaagtatatccagggacctattctgtcactgtgggctcaaatgacttaaccaagaagactcatgtggtagcagttgattctggacaaagcgtggacctggtcttccctgtgtgatgttgaccatcactgccatcacatcacctttttttaagtagtaagaataaagccactgtatgattctcttaatagctatacattaatcctgtttttagtgctgactgggtcagccttccgggaactggagtctgtctctttcagtgcttttttgtttgtttggttggtttttttttgagacagtctcactctgttgcccaggctggagtgcagtggcgtgatctcggctcactgcaagttccgcctcccgggttcacaccattctcctgcctcagcctcccgagtagctggcactacaggcacccgccaccatgcccggctattttttttgtatttttagtagagacggggtttcaccatgttggccaggatggtctcgatctcttgacctcgtgatccacccaccttggcctcccaaagtgttgggattacaggcgtgagccaccgcgcccggcctcagtgccttttttaacttgagggtgtagaggtcctccacgcttgtttgcctgaaagtaatataatgatgctgtctgaacaggttttactgcttgctttccaagtaaaggttaattatgataataaagagatttggaaatgaa

SEQ ID NO: 194 - DNA, 2050 bp, Homo sapiens
gcctgggttgcgctgccggccacgtccccgcgccgggcctcaggctccttcctactgtccgagggccaccaggccgccgggggcctgctgcgcccggatgcgtctgttactagagtggagagtctaccttcgtctcacatgtgccacaaaggatggcatggcccgggagtgccccaccacgtggctttcaccccctgcaaagccagacttcgcccagcgacacagtgtcaagcccacagctctccaaggaggaagatggtccaggctgggagcatccccttagcagcagcctctgatcccttggccaagcaggagggaaccattagcagcctgaggagctggctggctgggagcctcggggaccgcccagccttgctcccagctcacccacaagatgtggacagctcttgtgctcatttggattttctccttgtccttatctgaaagccatgcggcatccaacgatccacgcaactttgtccctaacaaaatgtggaagggattagtcaagaggaatgcatctgtggaaacagttgataataaaacgtctgaggatgtaaccatggcagcagcttctcctgtcacattgaccaaagggacttcggcagcccacctcaactctatggaagtcacaacagaggacacaagcaggacagatgtgagtgaaccagcaacttcaggaggtgcagctgatggtgtgacctccattgctcccacggctgtggcctccagtacgactgcggcctccattacgactgcggcctccagtatgactgtggcctccagtgctcccacgactgcagcctccagtacaactgtggcctccattgctcccacgactgcagcctccagtatgactgcggcctccagcactcccatgacacttgcactccccgcgcccacgtccacttccacagggcggaccccgtccactaccgccactgggcatccatctctcagcacagccctcgcacaagtgccaaagagcagcgcgttgccaagaacagcaaccctggccacattggccacacgtgctcagactgtagcgaccacagcaaacacaagcagccccatgagcactcgtccaagtccttccaagcacatgcccagtgacaccgcggcaagccctgtaccccctatgcgtccccaagcacaaggtcccattagccaggtgtcagtggaccagcctgtggttaacacaacaaataaatccacacccatgccctcaaacacaaccccagagcccgcccccacccccacagtggtgaccaccaccaaggcacaagccagggagccaactgccagcccagtgccagtacctcacaccagcccaatccctgagatggaggccatgtcccccacgacacagccaagccccatgccatatacccagagggccgctgggccaggcacatcccaggcaccggagcaggtagagactgaagccacaccaggtactgattccactgggccaacacccaggagctcagggggcactaagatgccagccacggactcgtgccagcccagcacccaaggccagtacatggtggtcaccactgagcccctcacccaggccgtggtagacaaaactctccttctggtggtgctgttactcggggtgacccttttcatcacagtcttggttttgtttgccctgcaggcctatgagagctacaagaagaaggactacacccaggtggactacttaatcaacgggatgtatgcggactcagaaatgtgaggggggcgggggcctggcgggaggcctggccccttcctcgtcctttccttttgcctttgagaccaaaccaagtgcttccaaattcttttggtgcaattgaggagatatgccagatgcttaaacacatttaattgctgtcagattaattccatgatcactaaagagttgctgcttttttcatatttatttttgtaaatgattctgtgcccaggagcagctgggggttccacctcagggtggggcgggcaggaccccgtctccccaggtgtcggagcctgacctgaattaaagtactgactgctcgcc

SEQ ID NO: 195 - DNA, 5518 bp, Homo sapiens
gtcgccatcttgccccttcagaggcaccgcaaacaaacccaattcctggtgtcccctagtcttggcggaggagccttttagatgagccccgaaaggccgggcagggaggacaagctctttggggctaccaaacagaagcagcaatgcctgttgtgtggccaacccttctggatctcagcagggatgaatgcaaaagaattcttcgaaaattggaattggaggcatatgctggagttatcagtgcacttcgggcacagggggatctcaccaaggaaaagaaagatcttcttggagaactatcaaaagttcttagcatctcaacagaacgccaccgtgctgaagttcggagagcagtaaacgatgaacggttaacaacaattgcacataatatgtctggacctaatagctcttcagaatggtccattgaaggtcgtcgattggtaccactgatgccccggctcgttccccaaaccgcctttactgtaacagctaatgctgttgctaatgcagctatccagcataatgcatctcttccagtgcctgcagaaacaggaagcaaggaagtggtttgctattcctacacaagtaccacgtcaaccccaacctctacccctgttccaagtggcagcatagcaacggttaagtctccaagacctgccagtcctgcctccaatgtagttgtcttgccaagtggaagtactgtttatgtcaaaagtgtaagctgttcagatgaagatgaaaaacccagaaaacgaaggcgaacaaactcttccagctcctctcctgttgttctaaaggaagttccaaaggccgttgttccagtctcaaagacgatcactgtgcctgtgagtggtagtcccaagatgagcaacatcatgcagagcattgccaactccttaccaccccacatgtctcctgtaaaaataaccttcactaaaccatcaacacagacaacaaacacaacaacacagaaggttattatagtcaccacatcaccaagctcaaccttcgtgcccaacattctctccaaatcccataactatgcagcagtcactaagcttgtaccaacgtcagtcattgcttctacaacccagaagccaccagttgttataactgcttcacagtcctctctggtcagtaatagcagcagtggcagcagcagttctacaccatcacctattcctaatacagttgcagtaacagctgtggtgtcctctacaccatctgtggtcatgtcaacagtagcacaaggtgtatctacatcagcaatcaaaatggcatcaaccagacttccttcccccaaaagcttagtgagtgccccaactcagattcttgcacagttccctaaacaacatcaacagtctcctaagcagcagttatatcaagtgcaacagcagacacagcaacaagtggcccagccttctccagtatctcatcagcaacagcctcagcagtctcctttgccacctggtattaaacctaccatccaaatcaaacaggagtcaggtgttaaaatcatcacacaacaggttcaaccaagtaaaatcttacccaaaccagtgacagcaactctacccaccagtagcaattcccctattatggtggttagcagtaatggtgcaattatgacaactaaactggtaaccactcctactggcacacaagcaacctatacccggccaacagtgagcccatccattggtcggatggctgcaacccctggagctgcaacctatgtgaaaactacgagtggtagcatcattacagtagtacccaaatcattagctaccttggggggcaagataattagcagtaatatagtttctggaacgactaccaaaatcactacaatcccaatgacttccaagcccaacgtgattgttgtacaaaagactacaggaaaaggaacgaccattcaaggcctcccgggcaaaaatgttgtcacaacgttgctaaatgctggaggagaaaagactattcagacagtgccaacaggagcaaagccagctatccttactgctacaagacccatcaccaaaatgattgtaacgcagccaaaaggaataggttctacagttcaaccagcagctaaaatcatcccaacaaaaattgtttatgggcagcaagggaaaacgcaggttcttattaaacccaaaccagtgacttttcaagcgacagttgttagtgaacaaacaagacagctagtaacagaaacattacagcaagcatccagggtagcagaggctggtaattcatctattcaggaaggaaaagaagaaccacagaattatacagatagtagttcctcttctacagagtcctcccagagttcccaagattcccagcctgtagttcatgtaattgcttcccggcgtcaggattggtcagaacatgagattgcaatggagactagccctaccataatttatcaggatgtatccagtgaatcacaatcagctacttcaacaatcaaagctctgttagaactccaacagacaacagtaaaggaaaaattggaatctaaaccaagacaacccactattgacctgagtcaaatggcagtgcctattcagatgacccaggaaaagagacattctcctgagagtccatcaattgctgtggtagagtcagaactagtagctgaatacatcactactgaacgcactgatgaggggacagaggttgcttttccccttctagtcagccatcgctcccagccccaacagccttcccagccccagcggaccctgctccagcatgtggctcagtcacagaccgcaacacagacttcggtggtggtgaagtccatcccagcatcttcccctggagcaatcacccacattatgcagcaggcattaagcagtcacactgcttttaccaaacacagcgaggaacttggaactgaggagggcgaggttgaagagatggacactttagaccctcagacaggtctgttttaccgatctgccctgactcagtcacagtcagctaaacagcagaaacttagccagcccccgctggaacagactcagctgcaagtgaaaactctgcagtgcttccagactaaacagaagcagaccatccacctgcaggcagaccagctccagcacaaactcccgcaaatgccccagctttccatcaggcatcaaaaactcacccctctccagcaagaacaagcacagcccaagccagatgtacagcacacacagcatcccatggtggccaaagacaggcagcttcctaccttaatggcacagcccccgcaaactgtagtacaggtgcttgcagtgaaaaccacgcagcagctccctaaactgcagcaggctccgaaccaaccaaaaatctacgtgcaaccccaaaccccccagagccaaatgtcgctcccagcttcttcagagaaacagacggcaagccaggtggagcagccaattataacccaaggatcctctgttacaaagataacttttgaggggcgccagcctcccacagttacaaagataactggtggcagttctgtgcctaagctgacatcaccagttacaagcatatctcccattcaggcctctgagaagacagcagtgtctgacattttgaaaatgtctttgatggaagctcagattgatacaaatgtagaacatatgatagtggatcccccaaagaaggctcttgccactagcatgctcactggtgaagcaggatcattaccctccacccacatggtggtggcagggatggcgaattccactccccagcaacagaaatgtagagagtcctgttcgagtccatccactgttggctcttccctaacgacaaggaaaattgatccaccagcagtgcctgcgacaggccagttcatgcgtattcagaatgtaggccaaaagaaagctgaagagagtccagcagaaattatcatccaggctattcctcagtatgctattccttgtcactccagctccaatgtggtggtggagcccagtgggcttcttgagctaaacaacttcactagtcaacagctggatgatgaggagacagcaatggagcaggacatagacagtagcacggaggatggaactgaacccagcccttctcagagctctgctgaacggtcctagtgtttggacacaatagtgcactttaaaacctgcttggttaccaagtgtccagggaaacccttgtattttgatgactaaaaagagcactttgcccgtacttaggctgtggaccctaaaacagcagtgtttcaacaagatgttgctgcaggagcagctttttaaaacaagataaaactcacaggggaatgtacttttttaaaaaaaaatgaaaaagaaaaaaaaagctgcacatttacagtgacttaagacctggtcttctttctctgttggatcatggccggtgaaacagttttgtcttgcagtggaaagagacttcctgtgaatgtttctcaactggtttctactgagcaaaataccatctaaaaggagaatgtgaatagttgtattttgaaatgatgtgtcaggaaaagttttttaaaaacttgtatgtttttgcaaatccctggaagtgttgaattggttaaaattttacattttctcagttcataattagtttataaacacctagaataatactggcattaaagaatccttgttggatggtagaaatcagatccctaaccagtgggaggtactttttgggtggcttgtgcattcttatcagttgtgtgctaatttattgtattgttcctttgtgctctaagcagcacacttgccttctatttatttaagtgtaaacatttcaaagcaggccgtactccttctgacaaatttcttgtaaaccaggattgcctacgctttccactgtcgtcgtctccccactttccctcttcctttaagaaaacttactaaaaaatgtttcattgcgaagcagaggaaaagaaacgttttcagacctaaaggaaatgtttggtcatgttaagaaaacaaattattcattcatatgatgctttcttaacgttgaaattgcacattcacattggactgagactttgaaaataacttttacatacttttgtttaagcccctttgaaatgtataaaaagttcatttacagttctaaatgtaatgtttttaagccttctatctttttaggacacagtttgtttaagcaatatgttttggtcttgtgatcactgtctgtcacaagtagagtgaaaggggtaagggggtgggagggtaagagttttgacaagttgtggcaaaggaaactatacttttcatttttaaaaatgtaaatagaaaagtttttaacggttttatatagatttcactataaataagcattttaagactgacaaatgttgaactgtacatacatttatcagcataactgcccagtttttttggtgctgaagtactgtaagtagaattcatcaacggtctcctaatttttgcatctacatctggggggaaaaagctgtgatactatagttaataaattcccactagagtgacaaaaaaaa

SEQ ID NO: 196 - DNA, 5745 bp, Homo sapiens
cacagggcctgcagagaggggacccaccgggcaggatgcactggcttccagcaggccacgacatcaacggtgccctggagccctccaacatagacaccagcatcctggaggagtacatcagcaaggaggatgcctccgacctctgcttccctgacatctctgctccagccagctcggcctcctactcccacgggcagcctgcgatgcctggctccagcggggtccaccacctgagcccccctgggggtggaccctccccggggcgccatggtcccctcccacccccgggctacggcaccccgctgaactgcaacaacaacaacggcatgggcgctgcccccaagcccttcccggggggcaccgggccccccatcaaggctgagcccaaggctccctatgccccaggcacactgccggactctcccccagactcgggctccgaggcctactccccccagcaggtgaatgagccccacctcctgcgcacgataacccctgagacactgtgccacgtgggagtgccctcccgcctggagcatccgcccccacctccagcccacttgccaggccccccgccacccccaccacccccacctcactaccctgtcctgcagcgggatctgtacatgaaggccgagcccccgatcccccactacgctgccatggggcaggggctggtgcccactgatcttcaccacacccagcagtcccagatgctgcaccagctcctgcagcagcacggagctgagctccctacacacccctccaagaagaggaagcactctgaatcccccccgagcaccctcaatgcccagatgctgaatggaatgatcaaacaggagcctgggaccgtgacagccctgcctctgcaccccactcgagccccatcgccaccctggcctccccagggtccgctctccccgggccctggttccttgcctctcagcattgcccgtgtccagacaccgccttggcacccgccaggtgccccctccccaggcctcctgcaggacagtgacagcctcagtggctcctacctggaccccaactaccagtccatcaagtggcagcctcatcagcagaacaagtgggcgaccctgtacgatgctaactacaaggagctgcccatgctcacctaccgcgtggatgcggacaagggcttcaacttttcggtgggcgacgacgcctttgtgtgccagaagaagaaccacttccaggtgacagtgtacatcggcatgctgggcgagcccaagtacgtcaagacgcccgagggcctcaagcccctcgactgcttctatctgaagctgcacggagtgaagctggaggccctgaaccagtccattaacatcgagcagtcccagtcagaccggagcaagcggcccttcaacccggtcacggtcaatctgccccctgagcaggtcacgaaggtgactgtggggcggctgcacttcagcgagaccaccgctaacaacatgcgtaagaagggcaagcccaacccggaccagaggtacttcatgctggtggtggccctccaggctcatgcacagaaccagaactacacgctggccgcccagatctcagagcgcatcattgtgcgggcctccaacccaggccagttcgagagcgacagcgatgtgttgtggcagcgggcacaggtgcccgacaccgtcttccaccacggccgcgtgggcatcaacacagaccggccggatgaggcgctggttgtgcacgggaatgtcaaggtcatgggctcgcttatgcacccctccgacctgcgcgccaaggaacacgtgcaggaggtggacaccaccgagcaattgaagaggatctcgcgcatgcggctggtgcactacagatacaagcccgagttcgccgccagcgcgggcatcgaggccaccgcgccagagacaggtgtcatcgctcaggaggtgaaggagatcttgcctgaggctgtgaaagacaccggagacatggtctttgccaatgggaaaaccatagagaacttcctggtggtgaacaaggagcgcatcttcatggagaacgtaggggccgtgaaggagctgtgcaagctgacagacaacctggagacgcgcattgatgagctggagcgctggagccacaagctggccaagctgcggcggctcgacagcctcaagtccaccggcagctcgggcgccttcagccatgcagggagccagttcagtcgggcgggcagcgtcccccacaagaagaggccccccaaggtggccagcaagtcatcgtccgtggttccggaccaggcctgcatcagccagcgcttcctgcagggaaccatcattgccctggtggtggtcatggccttcagcgtggtgtccatgtccacactgtacgtgctgagcctgcgcacagaggaggacctggtagacactgatggcaggtccagccagagctttgggaccacgcagctccgacagtcccccttgaccacggggctaccaggcatacagccctctttgctgctggtgaccaccagcctcaccagctcggccccaggttctgctgtccgcaccttggacatgtgttccagccacccctgccctgtcatctgctgttcctcacccactaccaaccctaccactggtcctagtcttggccccagctttaaccctggccatgttctcagcccaagtcccagccccagcaccaaccgctcaggccccagccagatggcccttctgccagtcaccaacatcagagccaagtcctggggtctttcagtcaatggcattggccactccaagcatcacaagagtctggagcctctggccagccctgcagtccccttccctggggggcagggcaaagccaagaacagtcccagccttggtttccatggccgggcccgccgaggggccctccagtccagcgtgggccctgctgagcccacctgggcccagggccagtcagagccagtgccctccctgacctccatccaggtgctggagaattcgatgtccatcacctcccagtactgtgctccaggggatgcctgcaggcctgggaacttcacctaccacatccctgtcagtagtggcaccccactgcacctcagcctgactctgcagatgaactcctcctcccccgtgtctgtggtgctgtgcagcctgaggtcaaaggaggaaccatgtgaggaggggagccttccacagagtctccacacccaccaggacacccagggcacctctcaccggtggccaataaccatcctgtccttccgtgaattcacctaccacttccgggtggcactgctgggtcaggccaactgcagttcagaggctctcgcccagccagccacagactaccacttccacttctaccgcctgtgtgactgagctgccctcctgaggcagcaccacaccagggaccaggggtgcccaggcaccccccaacactggatgcaatggtgttacactggagcccgctgcaggccagctctgctgttcactggccctacccgagactggtgaaactggaagtcttcacactggagttgctgttccagctggtcgcccctcacggcacagagggaacctgagagccagagacttcttgggccttcctgcctgccaccccctaggggccaggacaggaccagtttacctctttccagatatggtggttggagggctggttcaggtgccctggagggaaggggaagcctgtggccctgatttgttcagagcccattctcccttgcctccccttttgagactggagccaacccttttggagagaggacctgcccacctttgagatcagcagggggctcggatccagccctaagagacttgggtggacccccatgagtcaatggagggcagacggctctcccccttaaagctgttccctgggggatggcttggtagtggactttctggggtttgcctgttacgccagactcggacttctaagctttaagtgtggcccaggaggtttcttctccctgggagggcttggctcccaagaagtcccagggcagccgaggccagccctgcctgggttggagaaactgactttgtgccttaagtctactcagtgcctggtgaagccaccctcagcccttcacaggcctgaaccagtaggggccagtgggccaggtaagccctagagccttgaaccaggaatatccaggaagaggaaattccctttgagcccccagatggtattgcagcttcactgcctgcgttcctgggagcgtctggagctcacagtgatcagtgaccacatcattctctctgagcagaggagcaggaatccctcaagcagcagcctggtcttggctggtgggcagatgcaaatagcttttgctgttattaatgaagtaattactaaatgcacttaaaccagggcaggaaggaatggaaggatggagctagaaagctcagagtgggccagagcaggggtgtgacacttgcaaagacagggctctgactctgatccctcccagggagcctccgacacccatcccactcccaaccaccaagaccctgggttagggaagaagttgtatcttaagtgccaccttcaagtttcttagtggtgcctggtgcattccgaggctacatccaggctcatggaaggagtgtagtattcatttagccatgtctgccatgggtccagaaatgggaaagggaattgctgtccttgccctgtggtatgctgccacctctttgggaagcaggccttgcccctgtcccaccactcattctcagctttgaatgggaggcctttctatagtggaggcctttccttgaagcctatgaactgcaggcccccttttgccattgatctcaaagcacttgtcctcaggatagggaagagcagggggatgcaggaatagcagggatagcttgctcccagccccctccccaatttggttccgttgacataggaattttacgattcccaaaccatgcaggggctgagccttccttatgatgactttgttctccctcccactgggggaatcctccctatgccttaaaactgccgagccccactccatgtaataggattcctgggcttcctcaatgggggttcatgttcttggactgcgggccctcagtccttaactggaaagtgaccgtccactgccccatggagcccatctggacacagcacagccccaaaaccgttagcagctggctctgtttccaagcctggggaggggttcctcagtgcaggagttggggacaggctggggatccaagctgcttgagggggtcaaccttggaccaaagttgccttaagcctgtggtaaaagggcttcagggaaggtaagtgggccacctgctggaagctgccagctgcccggctggcaatggtgtgagtgtcttggccctgtccctgccctggggtccagcaggtcatccctcccttcttctctctcctttggcgtttgttcctgtagtcactgggctaatctccccctagcttcaagctgtacatagggcctcccagtgcaaatcctcctgcccataccgtgcacccttagaagcctgcgtgtgcatagagcgccccctacttcccagttaactcccagttcttctccctgagcttggtatttgtcatgtgccaactctgactctgaggtgggcagtgagggaagcagccccgggcctgcttgcttcctgtccccgaaatgttcgtttcttctgaagtaaatatacatatataaataaatgtataaatactgctttgtatctg

SEQ ID NO: 197 - DNA, 3905 bp, Homo sapiens
cccaaacccagccactcacacatggcgggctcagcagccaccggccccgcccctcctcgtcgccgcagtcgcaactgcgtctgcggccacagggcggacagccacgcctctgcggagggcgaccggaagtgctcacgtcttcaccttccccgccacgccaccgtcctttcaggcccagcgtgcagcaggaaggaggactcttttgccgcggactcaagccggaagccgccttcctagtggagacgcgagtgggggaggagcagtccgaggggaacgtgggttgaacgttgcaactagggtggagatcaagctggaacaggagttccgatcgacccggtaccaagaaggggagtgcccgcggcagggttcattgaaaaaatccttagtgatattgacatgtctcaagtgacataaattagccaatgactcggaatgatggattctccgaagattggaaatggtttgccagtgattggaccagggactgatatagggatatcttcactccacatggtggggtatttgggaaaaaattttgattcagctaaagttccatcagatgagtattgccctgcttgtagagagaagggaaagttaaaagccttaaagacttaccgaattagttttcaagaatctatctttttgtgtgaggatctgcagtgcatctatcctttgggctctaaatcacttaataacctaatttctcctgatttggaagaatgtcacactccacataagcctcagaaaaggaagagcttagaaagcagctataaggattcacttcttttagcaaattccaaaaagactagaaattatattgctattgacggtggaaaagttttgaacagcaaacataatggagaagtatatgacgaaacctcgtcaaacttacctgatagtagtggtcaacagaatccaattaggacagctgattccttggagcggaatgagattttggaagctgatactgttgacatggctactacaaaagatcctgctacagttgatgtctctggaactggcagaccttcccctcaaaatgaaggatgtacatctaaactggaaatgccactggagagcaaatgtacatcatttccccaggctttatgtgtccagtggaaaaatgcttatgctctctgttggttagactgtatcctgtcagctttggtgcactcggaagagttaaagaacaccgtgactggactgtgctcgaaggaggaatctatattctggcggttgcttacaaaatataatcaagcaaatacacttctatataccagtcaattgagtggtgttaaagatggagattgtaaaaaacttacctcagaaatatttgcagagatagagacctgtctgaatgaagttagagatgaaatttttattagccttcagccccagcttagatgcacattaggtgatatggaaagccctgtgtttgcatttcccctgctcttaaaactagaaacccacattgaaaagctcttcctatattctttttcttgggactttgaatgttcgcagtgtggacaccaatatcaaaacaggcatatgaagagtctggtcacctttacaaatgtcatccctgagtggcacccacttaatgctgcccattttggtccatgtaacaattgcaacagtaaatcacaaataagaaaaatggtattagaaaaagtatctcccatattcatgttgcactttgtagaaggcttaccacagaatgacttgcagcactatgcatttcattttgaaggctgtctttatcagataacttctgtaattcagtatcgagcaaataatcattttataacatggattttagatgctgatggaagttggctggaatgtgatgacttaaaaggcccatgttctgaaaggcacaagaaatttgaagttcctgcttcagagatacatattgttatttgggaaagaaaaatatcccaagtgacagataaagaagctgcctgccttccacttaaaaagactaatgaccaacacgctctcagtaatgagaaaccagtatctttaacatcgtgttctgtgggtgatgctgcctcagctgaaacagcctcagtaactcaccctaaagatatatcagttgcccctcgtactctttcacaggacacagctgtaactcatggagatcatttactttcaggtccaaaaggtttggttgacaatattttacctctgacacttgaagaaactatccagaaaacagcctcagtttcacagttaaattctgaagctttcctgttagaaaataaacctgtagcagaaaatacaggaattctcaaaaccaatactttgctatcacaagaatcactaatggcttcttcagtatcagctccatgtaatgaaaagcttattcaagaccaatttgtggacataagttttccatcccaagttgtaaatacaaacatgcagtcagtacagctgaatacagaagatactgtaaatactaaatctgtgaataatactgatgctactggtcttatacagggagtgaagtcagtagaaattgagaaggacgctcagttaaaacaattccttacaccaaaaactgaacaattaaaaccagaacgtgtcacatctcaggtatctaatttgaagaaaaaagaaactacagcagattctcaaaccacaacatctaagtcattacagaatcagtctctgaaagaaaatcagaagaagccatttgtgggaagttgggttaaaggcttaataagcaggggtgcttcttttatgccactctgtgtttcagctcataatagaaacactataactgatttacaaccttcagttaaaggggtaaataattttggtggctttaaaactaaaggtataaaccagaaggccagccacgtatccaagaaagctcgtaagagtgcaagtaagcctcctcccatcagtaagccaccagcaggccctccatcgtctaatggcacagctgcccacccacatgctcatgctgcttcagaagttttggaaaagtctggaagcacctcatgtggagctcaactcaaccacagttcttatgggaatggtatttcttcagcaaaccatgaagacttggtggaaggtcagattcataaacttcgtctaaaacttcgtaaaaagctaaaggcagaaaagaagaaattagctgctcttatgtcttccccgcaaagcagaacagttcgaagtgaaaatctagaacaggtgccccaggatgggtctccaaatgattgtgaatcaatagaggacttgttaaatgagctaccatatccaattgatattgccagtgagtctgcatgcaccactgttcctggtgtttccctgtacagtagtcaaactcatgaagaaattttagcggaattattgtctcctacacctgtttcaacagagctgtcagaaaatggggaaggtgactttaggtatttgggaatgggagatagtcatatcccaccaccagtaccaagtgaattcaatgatgtttcccagaacacacatctgagacaggaccataattattgtagccccaccaagaaaaatccatgtgaagttcagccagactctctgacaaataatgcctgcgttagaacattaaacttggagagtccgatgaagactgatattttcgatgagtttttttcctcctcagcattaaatgctttagcaaatgacacattagacctacctcatttcgatgaatatctgtttgagaattattgaattaatgcttgttaacttttttcatataatatttattattattagaagaacttacaatgtgttcaggtagtgtttatacactggacttgtgtaattacttgtgtaataaccatgaacaaaatgcaaggtttaacctttggttctgcccatgaagcatgtaatctttcttacacattaaaatcactgaatgtgta

SEQ ID NO: 198 - DNA, 2409 bp, Homo sapiens
gaagtattgcgccgttggtgattacggaagaaccaggagtttggcgtgaccatggggaagcaaaagaaaacaaggaagtatgcgaccatgaagcgaatgcttagtctcagagatcagaggcttaaagaaaaggatagattaaaacctaaaaagaaagaaaagaaggatcccagcgcattaaaggaaagagaagttccccaacacccttcctgcttatttttccaatataatacacagctgggcccaccttaccacatcctcgttgataccaactttatcaacttttccataaaagccaaactggacttagtgcagtcaatgatggactgtctgtatgccaagtgtatcccatgtataaccgattgtgtaatggctgaaattgagaaattggggcagaagtatcgagtggctctaaggattgccaaggatccaagatttgaacgattaccatgtacacacaaaggaacctatgcagatgactgcttagtacagagagtaactcagcataagtgttacattgtggccacagttgaccgggacctgaaaagaagaatccgtaagattcctggagttcctatcatgtacatttctaaccatagatacaacattgaacggatgccagatgattatggagcccctcgattctaattcttacaagacacagttcctctgcctttcttcgaccaactttctcttgttgccagttcattacacaaaatgtagcgggatttttaaggaatcagagagactgatggagttcagggagatatttattatttaggtgcaccagcccagtcagattaacatccaaaggactgaaccctgaacagagttaagttaccttttaagcattttgtggggccgcgggggttggggggaatctgtgcagggggaagcatattacagaagcaagaaagacagttattcaattaactgagacatgcattacatcatttcttacttttcaaggaaaatcatgttttacgacttgagtttatctgtctagttaccttgcagctgcacagctagagaaacagggtatttacaatgcctgggaaaggaggagagataaggctcactagccacagaaaaacaggcagttaatttttaaaggactccagctctttctctttctcacggggaattggattttcttacatgcaactgaatttctgcttacacatttttaaatttcttttaattgcttttccaatgcaatagcatgaattattattctgttgacctatttgccttactatgagctgagggtagttcaatatgctcactcttttttttttttttcttgagatgaagttttgctctgtcaccaggctggagtgcagtggcgtgatctgggctcactgcaacccctgcctcccatccttcaagtgattctcctgcctcagcctcccgagtagctgggattacaggtacacaccaccatgctcaactaatttttcttttttgggcggggggggtggatatttttagtagagacaaatacttttgtatttttaatacagaaaagtatgcctcggcctcccaaagtgctggaattacagacatgagccactgtgcctggcctgctcactttctgatgctgcttttttgttgtttgtttgtttatttgtttgttttgagacggagtctcgctctgtcaccaggctggagtgcagtggcgcaatctcggctcattgcaacctccgcctcccaggttcaagcgattctcctgcctcagcctgcggagtagctgggactataggtgcgtgccaccacgtccagccactgatgctgttttgccactgatgctgttttgaaattgatattttgtctcataaaaactaggccaggcatggtggctcattcctgtaatcccagcactttgggaggccaaggtgggtggatcacctgaggtcaggagttggagatgagcctggacaacatggcaaaaccccacctctactaaaaatacaaaaaaaattagctgggtatggtgtcacgtgcctgtaatcccagccactggggaggctgaggcaggagaacctcttgaacccaggaggtggaggttgcagtgagctgagattgcgccactgcattccagcctgggtgacagagtgagactgtctcaaaaaaaaaaaaaaattaatgatggtcaaagggtataaaatctcagacaggaagaatatgttttatgctttttttgagttctgttgtacagtgtggtgcctatacttaataatggggtattatacatttcaaaattgatgttctcatcacagaaatgtatttgaagtattgcatatgttaactagcttgatttaactattccatattgtatccacaatttatgatatcactttgtaacccatacatttatacaattataaattgtcaatttacaataaaaaa

SEQ ID NO: 199 - DNA, 1247 bp, Homo sapiens
actttacgcaggcgcgttaggtcctagtcgctatgcgtgtgcttgtgggtggcgggacaggcttcattgggacagccctaacccagctgctgaatgccagaggccacgaagtgacgttggtctcccgaaagcccgggcccggccggatcacgtgggatgagctcgctgcatcggggctgccgagctgcgatgccgccgtcaacctggccggagagaacatcctcaaccctctccgaagatggaatgaaaccttccaaaaagaggtaatcggcagccgcctagagaccacccaattgctggctaaagccatcaccaaagccccacaaccccccaaggcctgggtcttagtcacaggtgtagcttactaccagcccagtctgactgcggagtatgatgaagacagcccaggaggggactttgactttttctccaacctcgtaaccaaatgggaagctgcagccaggcttcctggagattctacacgccaggtggtggtgcgctcaggggttgtgctgggccgtgggggtggtgccatgggccacatgctgctgccctttcgcctgggcctggggggccccatcggctcaggccaccaattcttcccctggatacacatcggggacctggcaggaatcctgacccatgcccttgaagcaaaccacgtgcacggggtcctgaatggagtggctccatcctccgccactaatgctgagtttgcccagaccttgggtgctgccctgggccgccgagccttcatccctctccccagcgctgtggtgcaagctgtctttgggcgacagcgtgccatcatgctgctggagggccagaaggtgatcccacagcgaacactggccactggctaccagtattccttcccagagctaggggctgccttaaaggaaattgtagcctaagtaggtcgtggcaagggcctgaggcctgttcctcacaggcttccaggttaggcactgtgaataggctcagctcctctagagagctgaagccatctggttcttagattcctctcccagtcctctttcccattgttctgttgctccaccttattgtctcaaggccgtaatctcatcaggttgggacattaatcttttcaactccttgtaagatttcccagtttggtttctctacatgtcctgcagctgccccacttctcctttacgctgtgtagagaatgctctgcagtttaggcaataaaaataaattgtctcactaaaaaaaaaaaaaaaaaa

SEQ ID NO: 200 - DNA, 695 bp, Homo sapiens
gggcgtggccgcggtaggctgccagccaggctgggaaagcggtggtagctggttgggttgctggggctcggttgttgtagtcgcgatgttcttctccgaggccagagccaggtcgcggacgtgggaagccagtccctcggaacacaggaagtgggtggaagtatttaaagcatgtgatgaagatcacaaaggatatctcagcagagaggactttaaaactgctgttgtaatgctgtttgggtacaagccctccaagatagaagtggattctgtgatgtcttcaataaatccaaatacttctggtatattactcgaggggtttttaaatattgtcaggaaaaagaaggaagctcaacgatatcggaacgaagtaagacacatcttcacagcctttgacacctactatcgtggatttttaactttggaagatttcaaaaaagcatttaggcaggtggctcccaaattaccggaaaggactgttcttgaggtattcagggaagtagatcgagattcagatggtcacgtcagctttagagactttgaatatgccctgaactatggacagaaggaagcctaactattgtgaactacttttggtaactctggggagatcaatagattgtaatgtcagcagactcgactctactaatgatgtcatgctacagacttgtgattaaacatttaaaaatttttaa

SEQ ID NO: 201 - DNA, 1381 bp, Homo sapiens
atagctgcgggaccgtactcgtctcccccgacgcagaccatggagagcgcgctggcggtgccccggctgcccccgcatgatccagggacgccggtgctgtcggtggtggacatgcacacgggcggcgagcccttgcgtatcgtgctggcggggtgtccggaggtgtctgggcccaccctgctggccaagcggcgctacatgcgccagcaccttgaccacgtgcggcgacggctcatgttcgagccccgagggcaccgggacatgtacggggcggtcctagtcccgagcgagctgccggacgcgcatctgggcgtcctgttcctgcacaacgagggctacagctccatgtgcggccacgcagtgctggcgctgggccgcttcgctttggacttcgggcttgtgccggcgccccctgcgggcacccgcgaggcccgcgtcaatatccactgcccctgcgggctggtgaccgccttcgtggcatgcgaggacggccgcagccacggaccggtgcgcttccacagcgtcccggccttcgtgctggccacagatctcatggtggatgttcctggacatggaaaggtgatggtggacattgcatatggcggtgcattttatgcatttgttactgctgaaaagttaggactagacatttgttctgcaaagaccagggaccttgtggatgcagcgagtgcagtgacagaggcagtgaaagctcagtttaaaattaatcatcctgatagtgaagaccttgcctttttatatggaactatattaacagatggaaaagatgcttataccaaggaaccaaccaccaacatttgtgtttttgcagatgaacaggttgacagaagtcccactggctcaggagtgacagcccgaattgccttacagtatcacaaagggcttctggaactgaaccagatgagagccttcaaaagcagtgcaactggctcagtattcacagggaaagctgtgagggaagcgaaatgtggtgattttaaagctgttatagtggaagtatcaggacaagcccattacacgggtacagcaagctttataatagaagatgacgacccattgagggatggatttcttctcaagtgacttcttccatgattttaagggctttctttttaaagtaatcattatccttaaggactgttttctctaaattatatgaaaacaaataaattatacatataaactaactctcattctttgtaaaatactaccctgtggctaaatataaagtcattatacctcgtatttgcaactgtatttgtataaatatcacttatgtctagcatacaaaatgccagaaattcagagtctttttctagtgattaacgtatcaggtaaaattaaaacagtagttactttt

SEQ ID NO: 202 - DNA, 2905 bp, Homo sapiens
agcgttgggccgcggtcgcggggccgtctcaggctgccgtcccgcccctcccgtccggccgccgccgccgccaccgccgccaccgcctgggggttggttgaggcggacggcggggtccgggccggagtacgtcgttcccgctgcgctaggggaagcgggcagtcagaaaaatgggtaagaagagtcgagtaaaaactcagaaatctggcactggtgctacagcaactgtgtcaccaaaggaaatcttgaacctgaccagtgagctgctgcagaaatgcagcagtccggcgcctggcccaggaaaagagtgggaagagtatgtgcagatccggactctggttgagaaaatacggaaaaagcaaaaaggtctgtccgttacttttgatggaaaaagagaagattactttcctgatctaatgaaatgggcctctgaaaatggggcttctgtcgagggttttgaaatggttaacttcaaagaagagggctttggtttgagagcaacaagagatatcaaggcagaagaattgtttttatgggttccacgaaaattgctaatgactgttgaatctgctaaaaattcagtgttggggcccttatattctcaagaccgaatccttcaagccatgggaaacatcgcactggcctttcatttgctgtgtgagcgagccagccctaactccttctggcagccctatattcaaaccctccccagtgaatatgacactcctctctactttgaagaagatgaagttcggtatcttcagtccacacaagctatacatgatgtcttcagccagtataaaaacacagctcgacagtacgcctacttctataaagtcatccagacccatcctcatgccaacaaactacccttgaaggattctttcacttacgaggactacaggtgggcagtctcttctgttatgacgaggcaaaaccaaattcccacagaggatggttcccgcgtgaccctggctctgattcctttatgggatatgtgtaaccacaccaacggcctgatcactactggttacaacctggaagatgaccgctgtgagtgtgtggctctgcaggattttcgggctggagagcagatttacattttttatggcactcgatccaacgcagagtttgtgatccacagtggttttttctttgacaataactcacacgacagagtgaaaataaagcttggagtgagtaaaagtgacagactctacgccatgaaggccgaggtcttggctcgtgccggcatccccacttccagtgtttttgcattgcattttaccgagccgcccatctctgctcagcttttggcttttctccgagtattctgtatgactgaagaagaactgaaagaacacttgctgggagacagcgctattgatagaatcttcaccttggggaactcggaatttcctgttagctgggacaacgaggtcaaactttggacatttcttgaagatagagcctcacttcttttaaaaacatataaaacaactattgaggaagataaatccgtcttgaaaaaccacgatctttctgttcgtgcaaaaatggccatcaaattgcgcttaggtgagaaagagattttggaaaaagcagtaaagagtgcagctgtcaaccgggaatactatcgccaacagatggaggaaaaggctccgcttcccaaatatgaagagagtaaccttgggctgttggagagcagcgtgggggactcgaggctccccctggtcttgagaaacctcgaggaggaggctggagtgcaggatgccttgaacatcagagaggcaatcagcaaagcaaaggccacagaaaacgggcttgtaaacggtgaaaactctatccctaatgggaccaggtccgaaaatgaaagtctcaatcaagaaagtaaaagagcagttgaagacgccaaaggatcttcttcagacagcactgctggagttaaggagtagctcgaggtgaagctggatgggggatccagtggagcaggagttgacggacagtccgttcacatcgctgtgtttccttgttaacatttttctttctgcagagaggaagatatgtttttgctgctttatataaaaatggtttttttaagttattttaaaaatctagcttccctttttgattaagattgccatcttgcttttaggcaaaacaaaccaattaacaaacaaccacaagaaagggagaagaggtgcctgtgggagattttgcagacctattgtgggtataggtattttcttcctggggaagaattcagttcccgtctcagctgtacttttgtgggcctgtcatcttgatgaccagaatgaaagcttgctctgcctcctgccagccagaattggtggcgggacttggggatacagcgtgaaggtggggaagttgcacagcagaaaacagaattgaagttgggaaactctagagtctgggcaaaatgtttggttttttctcttaaaaaaaataacaccccattaccaaaagaaaaggtaaggtggcaaccttatttttaatagtttgaaatgatgataatcctaattatataaaaatatatatataaacacacatatatatagtgatttctaaagatttgtttacttttgtgttttgttttactgtactaagaacttgtcctttctccttgaatcaaagtaggacatgcatcatcctcctaattttaaatgttggctctgattttaaagtggtgcatttgattccagccttggtaatggagagtttgcaaacacacagcggcccacagcttcacgtggtggtgtgcagtgtgaggcagctccttggctttcctggttttcacaacaagctagagattttcaaagctacacttttgagtaaaaacccttattaaaagaaaaacatgattaataaaaaaaaaaaaaaaaaa

SEQ ID NO: 203 - DNA, 1441 bp, Homo sapiens
agcgttgggccgcggtcgcggggccgtctcaggctgccgtcccgcccctcccgtccggccgccgccgccgccaccgccgccaccgcctgggggttggttgaggcggacggcggggtccgggccggagtacgtcgttcccgctgcgctaggggaagcgggcagtcagaaaaatgggtaagaagagtcgagtaaaaactcagaaatctggcactggtgctacagcaactgtgtcaccaaaggaaatcttgaacctgaccagtgagctgctgcagaaatgcagcagtccggcgcctggcccaggaaaagagtgggaagagtatgtgcagatccggactctggttgagaaaatacggaaaaagcaaaaaggtctgtccgttacttttgatggaaaaagagaagattactttcctgatctaatgaaatgggcctctgaaaatggggcttctgtcgagggttttgaaatggttaacttcaaagaagagggctttggtttgagagcaacaagagatatcaaggcagaagaattgtttttatgggttccacgaaaattgctaatgactgttgaatctgctaaaaattcagtgttggggcccttatattctcaagaccgaatccttcaagccatgggaaacatcgcactggcctttcatttgctgtgtgagcgagccagccctaactccttctggcagccctatattcaaaccctccccagtgaatatgacactcctctctactttgaagaagatgaagttcggtatcttcagtccacacaagctatacatgatgtcttcagccagtataaaaacacagctcgacagtacgcctacttctataaagtcatccagacccatcctcatgccaacaaactacccttgaaggattctttcacttacgaggactacaggtgggcagtctcttctgttatgacgaggcaaaaccaaattcccacagaggatggttcccgcgtgaccctggctctgattcctttatgggatatgtgtaaccacaccaacggcctgacaccagaagattccttcgctcttgctgtcgcctctgcctaagaccctccattccttaggcacttacgggactcactcatagacctcctccagcgtggctgccctgagcaccctatgtggaatgactacgcctccagctcatccgccctcctgccctgtcctgttacatttccctctattgtccagatccgcttgtttctgcctttttaaaaaattattgttggttcacccccccgcctcccattagaatggaagatccatgaacgcagggtgattttgggggagggtctgttttgctcattgctatatcgctgtggtttttaatgaattcatgaccggtaaataaatgactgtaaaagccccatgcctaggaaaaaagatcagaaagaaataaaccaaaatgttaacgtgaaaaaaaaaaa

SEQ ID NO: 204 - DNA, 1580 bp, Homo sapiens
gggacacggcgcgggatggacgcgcaggactgccaggcggccgcatcgcccgagccgcccgggcccccagcccgtagctgcgtggccgcctggtgggacatggtcgaccgcaacctgcgtcaaagccccatttcttgtggatttaaagaaaccagagttaaagattcctcacacagtgaacttctacctgagagttgaacctggggtgatgctagggatctggcacacagtccccagctgccggggggaagatgccaaggggaaggactgttgctggtatgaagcagcccttcgtgatgggaacccaattattgtttatcttcatggcagtgcagaacacagggcagcttcgcacagactgaagctggtaaaggtgctgagtgatggtggctttcatgtcttgtctgttgactacagaggatttggggactctacaggtaagcccacagaggagggactgactacggatgccatttgtgtctatgagtggaccaaggcaagaagtggcatcactcccgtgtgtctctggggccactctctgggtacaggagttgcaacaaatgctgcaaaagtgctagaagaaaaaggatgcccagttgatgctattgtcttggaagctccatttaccaacatgtgggttgcaagtatcaattatcccttgttaaagatttaccggaacattccaggatttttacgtacacttatggatgccctgagaaaagacaaaataatctttcctaatgatgaaaatgttaaattcctttcttctcctcttctcatcttacatggagaggatgacaggacagtgcctttggagtatgggaaaaagctctatgaaattgcacgcaatgcatacaggaacaaagagagggtcaagatggttatctttcctcctggcttccaacacaacctgctttgtaaaagccccacactgttaataaccgtgagagatttcctgagcaagcagtggtcatgagtctgggaggagtggaaatcttcaatgaagacttggcccaaacaccacctgtgatgtatattgttctaatgtaaaattgtactgggctggtcggatgagctgaggccattgacttctctacaaatcacttgccattttaacaacagaaagtacgaatgttaggcagtatggaatgttcttatttagcttatcataatctactttgtaaaacatgctgaaacctcactgtggagaaccagaatttggtaaaatctagatcctatctaaaaatatgtagttattaaacattctgtggatatttgtgaataaggtagttgctatggtccgaatatctgggcctgcccccccaaattatgctgaaacctaatcaccagtgtgatggtaataggaggtgggactgagctctgatgaatgagattagtgcccttataaattatgaccaaaagagctcttcactcctcctaccatttgaggatacagtgagaagccttcatctatgaaccacaaagtagccctcatcagacactgaatcagccagtgccttgctcttggacttcccagcccccagaactgtgagaaataaatttctgttgtttataagcta

SEQ ID NO: 205 - DNA, 1477 bp, Homo sapiens
gggacacggcgcgggatggacgcgcaggactgccaggcggccgcatcgcccgagccgcccgggcccccagcccgtagctgcgtggccgcctggtgggacatggtcgaccgcaacctgcggcacacagtccccagctgccggggggaagatgccaaggggaaggactgttgctggtatgaagcagcccttcgtgatgggaacccaattattgtttatcttcatggcagtgcagaacacagggcagcttcgcacagactgaagctggtaaaggtgctgagtgatggtggctttcatgtcttgtctgttgactacagaggatttggggactctacaggtaagcccacagaggagggactgactacggatgccatttgtgtctatgagtggaccaaggcaagaagtggcatcactcccgtgtgtctctggggccactctctgggtacaggagttgcaacaaatgctgcaaaagtgctagaagaaaaaggatgcccagttgatgctattgtcttggaagctccatttaccaacatgtgggttgcaagtatcaattatcccttgttaaagatttaccggaacattccaggatttttacgtacacttatggatgccctgagaaaagacaaaataatctttcctaatgatgaaaatgttaaattcctttcttctcctcttctcatcttacatggagaggatgacaggacagtgcctttggagtatgggaaaaagctctatgaaattgcacgcaatgcatacaggaacaaagagagggtcaagatggttatctttcctcctggcttccaacacaacctgctttgtaaaagccccacactgttaataaccgtgagagatttcctgagcaagcagtggtcatgagtctgggaggagtggaaatcttcaatgaagacttggcccaaacaccacctgtgatgtatattgttctaatgtaaaattgtactgggctggtcggatgagctgaggccattgacttctctacaaatcacttgccattttaacaacagaaagtacgaatgttaggcagtatggaatgttcttatttagcttatcataatctactttgtaaaacatgctgaaacctcactgtggagaaccagaatttggtaaaatctagatcctatctaaaaatatgtagttattaaacattctgtggatatttgtgaataaggtagttgctatggtccgaatatctgggcctgcccccccaaattatgctgaaacctaatcaccagtgtgatggtaataggaggtgggactgagctctgatgaatgagattagtgcccttataaattatgaccaaaagagctcttcactcctcctaccatttgaggatacagtgagaagccttcatctatgaaccacaaagtagccctcatcagacactgaatcagccagtgccttgctcttggacttcccagcccccagaactgtgagaaataaatttctgttgtttataagcta

SEQ ID NO: 206 - DNA, 6469 bp, Homo sapiens
ggcgcttcctgttccggcgccaggaggagccgcgcgctgctggtgctgttgccgccgctgctctagctgccgtcagtcaggctgcgcccgcgtcttcagggcccagtccctcggacccatcgccgcttctagaccctactgcggtctcggatattgccgggaaaatgtctgatgaattttcgttggcagatgcactacctgaacactcccctgccaaaacctctgctgtgagcaatacaaaacctggccaacctcctcaaggctggccaggctccaacccttggaataatccgagtgctccatcttcagtgccatctggactcccaccaagtgcaacaccctccactgtgccttttggaccagcaccaacaggaatgtatccctccgtgcctcccaccggaccacctccaggacccccagcaccctttcctccttccggaccatcatgtcccccacctggtggtccttatccagccccaactgtgccgggccctggccccacagggccatatcctacaccaaatatgccctttccagagctacccagaccatatggtgcacccacagatccagctgcagctggtcctttaggtccatggggatccatgtcttctggaccttgggcgccaggaatgggagggcagtatcctacccctaatatgccatatccatctccaggcccatatcccgctcctcctcctccccaagcccctggggcagcaccacctgttccatggggcaccgttccaccaggagcctggggaccaccagcaccatatcctgcccctacaggatcgtatcccacaccaggactctatcctactcccagtaatcctttccaagtgccttcaggaccttctggtgctccaccaatgcctggtggcccccattcttaccattaagttaacaatggacgaagagatgacgctttgctttttgaagtacatgtatatgcacatgaatgcatatataaaaattgctggtttcactattagagggcattcatgaaagaacaactcttgcacctctcagagaagataactgcctcttgtacttggatgcgtagtacatcatatgtatacaatcagataaaagcatagaagtaaatcattcggatgtgatttttatttggttttcatggaaagttaaagtgataaagtatattgaatagttctttgacagaatttgtttaaactatgaaactacacacttaaaaatctaagatgtggattattgttagaatctgcaacttcattggcaaattatttcaagtatttttctataatcactttccccttctaaataaataaacttcgagaataacccatcataatccaaacaaatgatgcctcaacattttgagctgctctgtcggacaaataaacctggtcctcttgaggttatattttggatatacatttttaaactgtcagtaattattgtcagatgtggagttcaatagccagccagtgttcatttttatccttgagcttttagtaaaaacttcctggttttatttttagtcattgggtcatacagcactaaagtctgctatttatggaaactaacttttttgtttttaatccaggccaacatgtatgtaaattaaatttttagataattgattatctctttgtactacttgagatttgattatgagatgtgcatattgctttgggaagagctcgaggaaggaaataattctctcctttgttttgaacctcaaactagataaaccctaggaattgcttaactgcaacaagtaattttcattcccacaaaaacctgaggcagctcttttgcccagagcgttccctgtagccacccccaccccacttgcccttggttctttagaaggagcacacacatcccttgattcctccctgatgtggtaaactggcacactccaggggtctaaaacataaaacagttgtgtttagggaaccttaagtcatgcagacatgactgttctctttgtacaagtgtgaatcaaaatatgtatctctttttcagagtctggttaagctatgtcattgtctactgcatagtttcctgagtctgtttgtaaagtgcttatggctaacagttcagttctgtatttgttgacaggtaaataagtggagttgagtgccatctttgaaaaaattaccctctagctctaacactgaaaataataataaattgtagatctctgcaactaagtttaaagcagtgtgactgtgttgcttaaatatcaagtattgtttataaccaccaaaaaaaaaaagccctggtagttttttggcaccttatgtttaaatcagattcttagatttggagtagacctgaccttgttatttattagataacattttgaatgtatccattggatttctaaaatgtattgtgaatttctcagacaaacaggatttatgctggagctctgttttgcttagaaataaaatatttagtagtttatttctgctctaattaaaatgtcaagaatgccaaatgctgccagttttttggtttgatagctacctccttctaagaaagcaaaatggttacctttgagaggaacattcagtgtttaatcatcccttatgttaactagatgatagattcaagcttttagaaatgagaaagtagaaactaatttgttaagatattttcagactgcggaatgttgttagctttttctttcacttctcttcaaggacaggtgttagctgtctacaatactgttgaactctgttgtcaaagtagcccccttagtctacaaggcaggtagccttggcttgaattatcaatatcaaaatgtcagttaaccatggagggataaagtaatgtgaaaagtgagatggctgcaaagatagctctccttacagttattttggctgtcctacattgggataagctgacaaattagcagtatttagtttaacactggagcaaatataatttgagtaggaagaagagatagcaggtttgggaatctataattatgaagtccattgattttgggagaaaatctgttgctaaaggatttgaagggccatgaacacaatttgggattattactccctataagtataataattttgctagtgacccatactgtccagtgtgccctaaatcatactgctattgtactccctttgttttcaaggactttgcaactggtatttgggggagatttttttttttttttgagacggagtctcgctctgtcgcccatgctggagtgcagtggtgctatcttggttcactgcaagctccatctcccaggttcacaccattctcctgcctcagcctcccaagcagctgggactacaggtgcccgccaccatgcccggctaatttttttttttttttttttttagtagagatggggtttcactgtgttagccaggatggtctcgatctcctgacctcgtgatctgcccgccttggcttcccaaagtgctgggattacaggcgtgagccaccacgtccggccgatttttttttttttttttaatgtaagaatggagataaaagggataatataatttgcttttatattgttatttttgtaaagcatcttttcttcaattcttgttggcattctgggccaaaatatttcaggttggttcggtgtggagttaagaaaagcaggcgttttagtggagaaatggggaacagcatcaagaaaggcttttttccttttttcttttttttttggagacagagtcttgccctgtcacccaggctggagtgcaatggcgtgatcttggctcgctgcaacctctgcctccaggttcaaacgattcttctgcctcagcctcccaagtagctgggattacaggtgcccgccaccacacccatttttgtatttttagtagagacgggggtttcaccatgttggccagggtggtctgaaactcctgacctcgtgatccgcctgcctcagcctcccaaagtgctgagattacaggcgtgagccaccatgcgtgacctttttttctttttaaaagggaacaatgttgctttcaaaacaagacatgctaggctgaaactgatttatggaaaagactgcttgttagcaagtatatttggtcttgagggggatacagattatagaatatgctgacatttgggcttcagaggaagaattttcaaatctaatggaaatagttgaggtgttcaggaatgctgtttcttggagttggaagcttaggttttgaaatgttgaaaccaaaaagacaaaaattaaaacatagaccttaggtcgtcattcacacccggttctcaagaatcaagtggagcacttcaaagaccttggcttgtctgtcccatcctgccactttctcatcttttcatgcttttgaagacaccatttacagctctgactcagccctattttgtgtaaagtaatatattgattattcagaaatagacaatacattttttaattacccaaggactgactgttttgtgcattttactgttggttgtcttcagtagagaatagtaatagggcagagaaaagtatatattttgcctcagtcagtcccaccaccacaatggactattgggatattttctaaaaaaccaatcaatttgcccatgattacctcacaaataattagtgctacctggggtactctcaaatatacagcttttgaaactgtagatgaaaaaagctctactcagagtttttgtcaagactgtgcctgggttgaatatcagtcaattgcctacacttctaaacaataagtgccaatgtctcaattttctcaccctgaatgatagaagctagctttatcaaatgccaaggttagaaagcctggaaataaaacttaagcacagacattcaagtttttgaaaagcataagcctaaattcagataaatcacactgatatattgtactatgcatagaaagttgtaggtggcgttcagggaagactttgattttaataaagcaatatttagtattgaagacaaacactttttattttcagatttctgccaagtaaaacagaaattgccaataaaataatcagtattttgtaaatggcaggcaagcttctggctgtcgaaaacatctgagtcatttattcagtagacaatatgtccttgatccaggttctttgccagctataagggaatccctgtccttgagaggctcatagtctataagtaacattacagaatttgttagcatacccattcattattagttttacctaaacgtgttaggatcactactggtggaaattgtaaccagcctttgggcatcttaaagggtgacatgtggcatgcctttttttttttttaagaatttaatgtttttcaagattgtagtgttgatcagcgcaacaattcaagtgtgcaaagtaacaggatagtttgcctcttcactttacccctggataaaggcactttcactgcctgtcactgatcagcagatactgacttgttgccattaagtgaacttgacttcttatgtgtgctctatgagtttgttgtaattttcttcttgaaattgtgatttttcactgacagtaatgacaaatttaatgtatgtaattgtctatgcattttaagttaaactgcctaaaatgtgatttgagacatatacatatgtttgtattataaattgtaagcaatcagtttgagatactaggttttatcacctgctgctgtatttgtaaacaaagacaaatgttgctttaagaagtaattataattaggaataggctatggatgtgatacttggtattttttaagataaacttgtttgcttttgtgtattatacctggaaactttttttaaaaaatgtattttcatggtttcacagatttttcatgttattttattctttaggcccaattctgggcttctctgagcaagtccagagcctaattaactgtaaatttgttgtcaaaaaggaagaaaaaagggcctgagatacctctttgcatgtgacctgcattcactaaggatatctggaaaccacccttcctccgcaaaccctctcagcaacatggtgtccattgtggtgattttctcttcttttaaggctaggctactcttggtaaccagattatccgtatatatgataatatgaagtcagggaactttctctgtctgtccctactcccctcactcccccactttctgttatgaaagatagttctacttttatcattaactgctacgcatttagtgagggtcacattattaaacttggagtttaccattttcccacaggagatttcgctggcattccttggaactcccaatttcagtagggcaatgaatgaatgaatactttgcagtgctacttttggaaggaatttctgctttttgccttatgattggacaaaatgcagctgtaaaattttaaattgtttttgatatgttattcaatatcccatgaaagtattcacctaaagtggagttatgaaatggatggtgaaataataagaccattctggagcagg

SEQ ID NO: 207 - DNA, 1487 bp, Homo sapiens
ctggtctaacagacccgcgagaacgaaggacgcttgcctttttccggtcggggaagggggaagaaggtaacttccggtgacggggttgcatcacttcctctcaagcttggcgtttgtttggtggggttacacgcgggttcaacatgcgtatcgaaaagtgttatttctgttcggggcccatctatcctggacacggcatgatgttcgtccgcaacgattgcaaggtgttcagattttgcaaatctaaatgtcataaaaactttaaaaagaagcgcaatcctcgcaaagttaggtggaccaaagcattccggaaagcagctggtaaagagcttacagtggataattcatttgaatttgaaaaacgtagaaatgaacctatcaaataccagcgagagctatggaataaaactattgatgcgatgaagagagttgaagaaatcaaacagaagcgccaagctaaatttataatgaacagattgaagaaaaataaagagctacagaaagttcaggatatcaaagaagtcaagcaaaacatccatcttatccgagcccctcttgcaggcaaagggaaacagttggaagagaaaatggtacagcagttacaagaggatgtggacatggaagatgctccttaaaaatctctgtaaccatttcttttatgtacatttgaaaatgccctttggatacttggaactgctaaattattttattttttacataaggtcacttaaatgaaaagcgattaaaagacatctttcctgcattgccatctacataatatcagatattacggatgttagattgcatctcagtgttaaatctttactgatagatgtacttaagtaaatcatgaaaattctacttgtaactatagaagtgaattgtggacgtaaaatggttgtgctatttggataatggcactaggcagcatttgtatagtaactaatggcaaaaattcatggctagtgatgtataaaataaaatattctttgcagtaaaatattccctttgttaatgttatagaaggggggatacaaaaaggaactaacaatttgtatggcagtgtcagatatttttattttagtatttcctgttttggtttatttgcatcttagaagagcataatgacattgtttgatgaagcctaattatgctggactgttttgacctggtttaacccttctgataggtagttgtggatgctggggatgagaactgaataatctttgcctggagtgacactacactctagaatttccactttggagaatactcagttccaacttgtgattcctgatagaacagactttacttttctagcccagcattgatctagaagcagaggaatcccagcgccttttaaaagttgttatgtggttttcttttaaaaagctcctgtttttggaaagtagaatttatgggtacaacgtatgttcattatttgtacataaaataaaaccatttaaaaagtaaaaaaaaaaaaaaaa

SEQ ID NO: 208 - DNA, 1754 bp, Homo sapiens
ggaaggtgcgtccgagccatggccgctgccaacccgtgggacccggcgtccgcgcctaacggcgctgggctagtgctaggccacttcatagcttcggggatggtcaatcaggagatgttaaacatgtctaagaaaacagtttcttgttttgtgaacttcaccagactacagcagatcacaaatattcaagctgaaatctaccagaaaaacctggaaattgaactcctgaaactagaaaaagatacagcagatgttgttcatcctttctttttggctcagaagtgtcatactctgcaaagcatgaataatcatttggaagcagtgctgaaagagaagagatcccttaggcaaagactgttgaaacccatgtgccaggaaaacttacctattgaagctgtttatcacagatatatggtacatttgctggagttggctgtgactttcattgagagattagaaacccaccttgaaacaattagaaatattcctcatttagctgcaaatctaaagaaaatgaaccaggctttagcaaagatggatatattggtgactgagacagaagaactggcagagaatatactcaagtggcgtaaacaacaaaacgaagtttcgtcttgtatccccaaaatattagctgaagaaagttatctttataaacatgatattataatgcctcctttaccttttacttctaaagttcatgtccaaactattaatgccaagtagtcatcaactttatttttgcttaattatgtgtagtcatatgaagtctatttctagttgactgtaacatgggtattaatagtctttgctgctggtaatactgaaagaacctgctttatattggagtatcaagatctcaggttcattaagaccaaactgacttttcctttgtttttcatatatttttattctacctttcagtaaaactagagaagctaaaaaagagccatgacaatttattaatataagtgaattaaccatttctcaggtgggaaattctctttttttaaaaatgtgtgtttatcgtctggtgtggtggctcacacctgtaatcctaacacttggggaggctgaggcgggcagatcacttaaacccaggagttcaagaccagcctgggtaacatggtgaaatcccatatctacaaaataaacaaaaaattagccgaccatggtggtgcatgcctgtagtcccagctattcgggaggctgaggtaagaggatcacctaagcctgtgaggtcatggttgcaatgagtcatgatcacgccactgcgctacagcctgggcgacacagtaagaccctgtctcaaaaaaaagaagtgtgtttctggccaggcacggtggctcacgcctgtaatcccagcactttgggaggcctaggtgggcagatcatgaggtcaggagttcgagaccagcctggccaacatggcgaaacacctgtctctactaaaaatacaaaaattaggccgggcgcagtggctcacacctgtaatcccaacactttgggaggccgacccagatgggtggatcacctgaggtcaggagtttgagaccagccttgacaacatggtgaaaccccatctctggtagaaatataaaaaattaaccgggcatggtggtggacgcctgtaatcccagctacttgggaggctgaggcagaataatcgcttgaacccaggaggcagaggttgcagtaagccaagatcgtgcctctgcactccaacctgggtgatggagcaagactccatctcc

SEQ ID NO: 209 - DNA, 2211 bp, Homo sapiens
tcctggcggagccatggctgcgcagcgggctggccgggggtctcctgaacccgggccccgccgccccgaccgcccggccccgccgccggggctgtccccgccgcgtccgtagcgcgtcctgccagggctgaaatctctttaatgatggagggaagcaggcagacgcgagtgtctcggccatacaagatcagcgaatcatcaaaggtataccgctgggccgaccactcaagcacggtgctgcagcggctgaacgagcagcgtctccgcgggctcttctgcgacgtcgtcctggtggccgatgagcagcgtgtgccagcccatcgcaacctgctggccgtgtgcagcgactacttcaactccatgttcaccatcggcatgcgggaagctttccagaaggaggtggagctgatcggcgcctcctacattgggctcaaggccgtggtggacttcctgtacggcggggagctggtgctggatggcggcaacattgactacgtcctggagacggctcacctgctgcagatctggacggtggtagacttctgctgtgagtacctggagcaggaggtgagcgaggacaactacctgtacctgcaggagctggcctccatctacagcctcaagcggcttgatgccttcatcgatggcttcatcctgaaccacttcggcacgctgtcctttacgcccgacttcctgcagaacgtctccatgcagaagctgtgtgtctacctgagcagcagcgaggtgcagcgggagtgtgagcacgacctcttgcaggccgccctgcagtggctgacgcagcagcccgagcgcgaggcccacgcccgccaggtgctggagaacatccacttcccgctcatccccaagaacgacctgctgcaccgcgtcaagccggccgtgtgctcgctgctgcccaaggaggccaactgcgagggcttcatcgaggaggccgtgcgctaccacaacaacctggcggcccagcccgtcatgcagaccaagcgcacggcgctgcgcaccaaccaggagcgcctgctgtttgtgggcggcgaggtctccgagcggtgtctggagctcagtgacgacacctgctacctggacgccaagagcgagcagtgggtcaaagagacgccgctgcccgcccggcggagccaccactgtgtcgcggtgctggggggcttcatcttcatcgccggcggcagcttctcacgggacaacggaggggatgcggcctccaatcttctttataggtatgacccccgctgtaaacagtggatcaaggtggcctccatgaaccagcgccgtgtggatttctaccttgcctccatcgaagacatgctggtggccatcggcggccggaatgagaacggagcgctctcttcagtagagacgtacagtcccaagactgactcctggtcctatgtggccggcttgccaaggttcacgtacggccacgcgggcaccatctacaaagacttcgtgtacatctcggggggccacgactaccaaattggcccctaccgcaagaacctgctatgctacgaccaccggacagacgtgtgggaggagcggcggcccatgaccacggcgcgcggctggcacagcatgtgcagcctgggtgacagcatctactccatcgggggcagcgatgacaacatcgagtccatggagcgcttcgacgtgctgggcgtggaggcctacagcccgcagtgcaaccagtggacccgcgtggcgccgctgctgcacgccaacagcgagtcgggcgtggcagtgtgggagggccgcatctacatcctgggcggctacagctgggagaacactgccttctccaagaccgtgcaggtgtacgaccgcgaggccgacaagtggagcaggggcgtcgacctgcccaaggccatcgctggcgggtccgcctgtgtctgcgccctggagccacggccagaggacaagaagaagaaaggcaaaggcaagaggcaccaggaccggggccagtgaccctagctgcgcctcttgggaccatcctcaccgtcacctcccagggctctgtagaccagcagcaacttcttagtattccggaaacattatgtacaacttagcagctttttttacttttatgattcttggtatttctatgatatcacagtaaccaattaaatactatctgtaactttaaaaaaaaaaaaaaaaaaaaaaaaaaaaaaaaaaaaaaaaaaa

SEQ ID NO: 210 - DNA, 5968 bp, Homo sapiens
cctggctgcgcgcggcggtggcggagccgctacggctgtagcagcagccgcgaagatggcggaagggctggagcgtgtgcggatctccgcgtcggagctgcgcgggatcctggctactctggccccgcaggccgggagcagagaaaacatgaaggaattaaaggaggccaggccgcgcaaagataacaggcgtccagatctggaaatctataagcctggcctttctcggctaaggaacaagcccaaaatcaaggaaccccctgggagtgaggaattcaaagatgaaattgttaatgaccgagattgctctgctgttgaaaatggtacacagcccgttaaagatgtctgcaaggaactgaacaaccaagagcagaatggtcctatagacccagaaaataatcggggacaagaatcctttcctaggactgctggacaagaggatcgtagtctaaaaattatcaaaagaacaaagaaacccgacctgcagatctatcagcctggacgacgtttgcagactgttagcaaagaatccgccagtcgggtggaggaggaagaagtcctcaaccaggtagaacaactgagagtagaggaagatgagtgtaggggaaatgttgcgaaggaggaagttgcgaataaaccagacagggctgagatagaaaagagcccaggtggtgggagagtaggggctgcaaaaggagaaaaaggaaagaggatgggaaaaggggagggggtgagggaaacccacgacgacccagcccgcgggaggccgggctccgcaaagcgctactcccgctcagacaaacgaaggaatcgctaccgcacgcgcagcaccagctcagctggcagcaacaacagcgctgagggagctggcctgacggataatggatgtcgccgccgccgacaggataggaccaaggagaggccacgactgaagaagcaagtgtctgtgtcctcaaccgattccttagacgaggacagaattgatgagcctgatggattaggacccaggagaagttcagaaaggaagagacatttagaaagaaactggtctggccgtggggagggtgagcagaaaaacagtgctaaagaatatcgaggcactcttcgtgtcactttcgatgcagaagccatgaacaaagagtctcccatggtgaggtcagccagggatgatatggatagaggaaagcctgacaaaggcttgagcagtgggggcaaaggctctgagaagcaggagtccaaaaacccgaaacaagaacttcggggtcgtggtcgtggcattctgattttgcctgcccataccaccctatctgtcaattcagcaggttctccagagtccgcgcctttgggacctcggcttttgtttggatctggtagtaagggatctcggagttggggccgtggaggcaccacacgccgattgtgggacccaaacaatcctgatcagaaacctgctctaaagactcagacgccccagctacatttcttggacactgatgatgaagtcagccctacatcttggggtgactcacgccaggctcaggcatcttactataagtttcaaaactctgacaacccctattattacccccggacaccaggccctgcctcccagtatccctatacgggctataaccctctacagtacccagtgggccctacgaatggtgtgtacccagggccttactacccaggctacccgactccgtcaggacagtatgtgtgtagccctctacctaccagcaccatgagtcccgaggaggtagagcagcacatgaggaacctgcagcaacaggagctgcacaggcttctccgggtggctgacaaccaggaactgcagctcagcaacctgctctccagggaccgcatcagtccggagggcctggagaagatggcgcaactcagagctgaactgctgcagctatatgagcgctgtattctattagatattgagttctctgataatcagaatgtggatcagatcctgtggaagaatgctttctatcaggtgattgagaagttcaggcaacttgtcaaggatccgaatgttgagaacccagaacagattcggaacagacttttggagctcttggatgagggtagtgacttctttgatagtttgcttcagaagctgcaggttacttacaagttcaaactggaagactacatggatggtcttgccattcgcagcaagccattacgcaagacagtaaaatatgccttgatcagtgcccagcgatgcatgatatgccaaggagatattgctaggtaccgggagcaagccagtgatacagcgaattatgggaaagcacgcagttggtacctgaaggcccagcacattgctcccaagaatgggcgcccctataaccagttggctttgctggcagtgtatacgaggaggaagcttgacgctgtctattactatatgcgcagtttagctgccagcaaccctatcctgactgccaaggagagtctcatgagcttgtttgaagagaccaagcggaaggcagaacagatggaaaagaagcaacatgaggaatttgacctgagccctgaccagtggcggaaaggaaagaagtctactttccggcatgttggagatgacaccactcgcctggagatctggattcatccatcccatccacggtcttcccagggcactgagtctgggaaggattctgagcaagagaatgggctgggcagcctgagtcccagtgatctgaacaaaaggttcatcctcagttttctccatgcccatgggaagctgtttacccggattgggatggagacattccctgcagtggctgagaaggtcctcaaggagttccaggtgttactgcagcacagcccctctcccattggaagtacccgcatgctgcagcttatgaccatcaatatgtttgcagtacacaactcccagctgaaagactgcttctcggaggagtgccgctctgtgatccaggaacaagccgcagctctgggcttggccatgttttctctactggtccgccgctgcacctgcttacttaaggagtccgccaaagctcagctgtcctctcctgaggaccaggatgaccaagacgacatcaaggtgtcttcctttgtcccggacctgaaggagctgctccccagtgtcaaagtctggtcagattggatgctcggctacccggacacctggaatcctcctcccacatccctggatctgccctcgcatgttgctgtggatgtatggtcgacgctggctgatttctgtaacatactgactgcagtgaatcagtctgaggtgccactgtacaaggacccggatgatgacctcacccttcttatcctggaagaggatcggcttctctcgggctttgtccccttgctggctgcccctcaggacccctgctacgtggagaaaacctcggataaggttattgcagctgactgcaaaagggtcacagtgctgaagtattttctggaagccctttgtggacaagaagagcctctgctggcattcaagggtggaaagtatgtgtcagtggcacccgtcccagacaccatgggaaaggaaatgggaagccaagagggaacacgactggaagatgaggaggaggatgtggtgattgaagactttgaggaagattcagaggctgaaggcagcggaggcgaggatgacatcagggagcttcgggccaagaagctggctctggccaggaagatagctgagcagcagcgtcgccaggaaaagatccaggctgtcctggaggaccacagtcagatgaggcagatggagctcgaaatcagacctttgttcctcgtaccagacaccaacggcttcattgaccacctggccagtctggcgcggctgctggagagcaggaagtacatcctggtggtgcccctcatcgtgatcaatgagctggacggcctggccaaggggcaggagacagaccaccgggctgggggctacgcccgtgtggtacaagagaaggcccgcaagtccatcgagttcctcgagcagcgattcgagagtcgggactcttgcctgcgagccctgaccagccgtggcaatgaactcgaatccatcgccttccgcagtgaggacatcactggccagctgggtaacaacgatgatctcatcctgtcctgctgcctccactactgcaaagacaaggctaaggacttcatgcccgccagcaaagaggagccaatccggctactgcgggaggtggtgctgttgacggatgaccggaacctgcgtgtgaaggcgctcacaaggaatgttcctgtacgggacatcccagccttcctcacgtgggcccaggtgggctgagggagccacactggggccccccccccgtggaaccgttcctgaaaggccaccaggcgcccagtgtagcacggaagatgcccacgtgcctgagccaccaatccacccagacaataaaccatcctcttccaacccacgccacggccatgctgtgggggacctgctcctcacagagcccctcccaaggatcgggcggaagctgctgggaccctcctgggctgccaggatttagcagggaggtggctggctacagcaacagcagctgggcaagccagataggccgcccatgctctcagcctttctccctcccccgtctcattccaaggctgagggagggccttctcgcctggggacgcagccactttctccagtggagacagggcaggggttctgagtttccgtcagatgcagtgaaatcacagttccctttcatcttcagaacctctgtcgtgaatgtgttcaagaggctttggttaagtcaggaagaagtgcccagggtgtgtgtccccagtctccctgaggcctggactcgcccatgaacccaagtcggcttctagacagcatgtccctaacagcagccctgggcccccacctcttctaccatccaccccagacttaccacacacccttcctgctgctcctcttcctgcccttatcaacctgggtccctcacacttcgccagttgcgtccccgtggacagtcatgagtctagaggaaaggggcatctggtctcaggcccgtgctctcgggtggcctccacctgctccctctctcctcactggcctttctttccgtctagcttcctcttcaggaaatgtcctgactcccctcagctcccccttcacccctccttgcccgcctaccctccctccagaatagcccctcacccttcttccccttctagttgatccttttcacctccctgatccccttcatttcttcaccgcggttcctcgtcataggggttctcactctgaactttccctctctactacccatggcaggaacctagtacaggtctcccacccagggccttccaccctcggctcctgtgctgggagaaacttccaggcgtggacagcccagcctgaggcattccagtgctggggcaccgtcgcctaacctggtttctagctttgccctcactccccggaaaaactgacactgacacaggggccctttccttgcccctttagctggtacctcagtggggaggcttccttaccaagaatgagttcctgaaacccagggccagagacaaggacaacttaggggaagacggggttttcggtggagccaggggcaaatcttaatgggaccagtgggggataccccagagcccatggcctgactgcacagcctgcctggaggatgggtgcgcagctctgccctccctgaggcccaggactatgccagaagcgatggggtaccgtgtaggggagccaaggccagtagtttgggggtaggagtcccctagagtctcagaagactgggctctttggagtacagggtccccggcctctcctttaagattctctccccagctggaaggccgatgactgggtggtcgggagggagacccagctctcctttctgtcccgtttgcagcactggttttgtttccttaataaatttttagttatgaaacatacctg

SEQ ID NO: 211 - DNA, 6245 bp, Homo sapiens
tttcctccgaagctctgtggtccgatctgcggtccgcttgctttccctgcccggtcccgagcgctcagcctgaagcgccgctttcgagggcaccctgcatacactggccgcgcctcagggatctcattgcccgcgctttctcattgcctctttccgtgttcgattcggctgatctgggcccagcctccgctcccgctctctgtcggtgggcgcgggggaatccgaaacggctcagcagaatcccagcagcttgctgctactggagcgggccgcctccatggcctccaggcaggccgggctggaccgcgtgaggtcctaggagacgggattccgggaagcggggagtatggtgggggtcctggccatggcggctgcagctgctccgcctcccgtgaaggactgcgagattgagccatgcaaaaagcgaaagaaagatgatgacacatctacctgcaaaacaattacaaaatatttatcaccactagggaagactagagacagggtttttgctccaccaaaacctagtaatattctggattattttagaaagacttcacccacaaatgagaagacacaattagggaaagagtgcaagataaagtcacctgaatcagtacctgttgacagcaacaaagactgtacgacacctttggaaatgttctcaaatgtagagtttaagaagaaaagaaagagggttaatttatctcatcaactaaataatattaaaactgaaaatgaagctccaattgaaattagtagcgacgatagcaaagaagactatagtttaaataatgattttgtggaaagtagtacttctgttttacgttacaagaaacaagtagaggtacttgcagaaaacattcaagatacaaaaagtcaaccaaatactatgacctccctgcaaaattctaaaaaagtaaatcctaaacaagggaccacaaaaaatgacttcaaaaagttgagaaaaaggaaatgcagagatgtagtagatctatctgaaagcttacccttggcagaggaactaaatttgcttaaaaaagatggtaaagatactaaacagatggagaatactacaagccatgcaaactctagagataacgtaactgaagcagcccagttaaatgatagtataataactgtctcatatgaggaatttttaaaaagtcacaaggaaaataaagtggaagagataccagactctacaatgtcaatttgtgttccttctgaaactgtcgacgaaatagtcaaaagtggttatataagtgaatcagaaaactccgaaatttcccagcaggtacgctttaagacagttactgttcttgcacaggttcaccctattccgcccaaaaagacagggaaaataccccgaattttcttgaaacaaaagcaatttgaaatggaaaatagtttatctgatcctgagaatgaacagacagttcagaaaagaaaatctaatgttgttatacaggaggaagaattagaattggctgttttggaagctggaagttctgaagctgtgaaaccaaaatgcactctagaagaaagacagcaatttatgaaagcatttaggcagccagcatcagatgcacttaaaaatggagttaaaaagtcttctgataagcagaaagaccttaatgaaaaatgtctatatgaagtaggaagagatgataattctaaaaaaatcatggaaaattctggtatccaaatggtttcaaaaaatggcaatttacagttacacactgataaaggaagttttctgaaggagaaaaataaaaagctaaagaagaagaataagaaaacattagatactggggctattccaggcaaaaacagagagggaaacactcaaaagaaagaaacaacctttttcttaaaagagaaacaatatcaaaatagaatgagtttaagacaaaggaaaacagagtttttcaaaagcagcactttatttaacaatgaaagtcttgtttatgaagatatagcaaatgatgaccttctaaaggtttcctctctgtgtaacaataataaattgtcaagaaaaaccagcataccagttaaagatattaagcttacacagtctaaagctgaatctgaagccagcttgctaaatgtttccacgcccaagtcaactagaagatctggaagaattagcagcacacctactacagaaaccattagaggtattgattctgacgatgtacaagataatagtcaactaaaggcttccactcaaaaagcagccaacttatcggaaaagcacagcttatatacagcagaattaataacagtaccctttgattcagagagccctattagaatgaaattcaccagaattagtactcccaaaaaatctaagaaaaaatctaacaaaagatctgagaaatctgaagcaactgatggaggttttacttctcagattagaaaggcaagcaatacttcaaaaaacatatcaaaagcaaaacaattgattgaaaaagcaaaagctttacacatcagtaggtcaaaggtgactgaagaaatagcgatacccttaaggcgctcctctagacatcagacacttcctgaaaggaagaaattgtcagaaacagaagattctgttataataatagattcaagtcctactgctttaaagcatccagagaaaaatcagaagaaacttcagtgtttgaatgatgtgctaggaaaaaaacttaacacatccactaaaaatgtacctggaaaaatgaaagtcgctcctttatttcttgtcagaaaagcacaaaaagcagctgatcctgtccctagttttgatgaaagcagtcaagatacatctgaaaaatctcaggattgtgatgttcaatgtaaagcaaagcgtgacttcctaatgagtggtttgccagatttgttgaaacggcaaattgcaaagaaagctgctgcgctggatgtgtacaatgcagtgagtaccagtttccagagagtcgtacatgtgcaacaaaaggatgatgggtgttgtttgtggcatttgaaaccaccctcttgtcctctcttaactaaatttaaagaactgaacactaaagtaatagatctctcaaaatgtggtattgctcttggtgaattttcaacattgaattcaaagttgaaaagcggtaactctgctgctgtgttcatgaggacaaggaaggaatttactgaagaagtaagaaatcttttgcttgaggaaattaggtggtcaaatcctgaattttcattgaaaaaatattttcccttactcctaaaaaaacaaattgagcaccaagtactttcttccgagtgtcatagtaaacaagaactggaggctgatgtcagccataaagaaaccaaaaggaaactcgtagaagcagaaaattctaagtcaaaaagaaagaaaccaaatgagtattcaaaaaatctggagaagaccaataggaagtcagaagaacttagcaaaagaaacaactcttctgggataaagctagattcttccaaagattctggaactgaagacatgctttggacagaaaagtatcaacctcagactgccagtgaacttataggaaatgagttagctataaaaaagttacatagttggttgaaagactggaaaagaagagctgaattggaagaaaggcagaatctgaagggaaaaagagatgagaaacatgaagatttctcgggtggcatagactttaaaggcagttcagatgatgaagaagagagtcgtctttgcaatactgtccttataacagggccaacaggagtgggaaaaactgctgcagtgtatgcttgtgcccaggagcttggatttaagatatttgaagtgaatgcctcttcccagcgcagtggtagacaaattctatctcagttgaaggaagctactcagtcccatcaagtagacaaacaaggtgtaaactcacaaaaaccctgtttttttaatagctactacataggcaagtcaccaaaaaaaataagctcccctaagaaagttgttacatcaccaagaaaagttcctccaccatcaccaaaaagtagtggaccaaagcgagcacttcctcccaaaaccttggcaaattattttaaagtatctcccaaacctaaaaataatgaagaaataggaatgcttctggaaaataataaaggaataaaaaattcttttgaacagaaacaaattactcagactaaatctacaaatgcaactaattcaaatgtcaaagacgttggagctgaagaacccagcagaaaaaatgcaacatctcttattctttttgaggaggttgatgtaatttttgatgaagatgctgggtttttgaatgcaatcaaaacattcatggcaacaactaaacgacctgtaatccttactacaagtgacccaacatttagtttaatgtttgatggctgctttgaagaaatcaagttcagtactccttccctgctaaatgttgccagctacctacaaatgatttgcttaactgagaattttagaactgatgtaaaagactttgtaaccttgttaactgcaaatacttgtgatatcagaaaaagtatcctttacttacaattctggattagaagtggaggtggagttttagaagaacgaccattaaccctttatcgtggaaatagcagaaatgtacaactagtttgctctgaacatggccttgataacaaaatttaccctaaaaatactaaaaagaaacgtgtagaccttccaaaatgtgacagtggctgtgctgagaccttgtttggccttaagaacattttttccccatctgaagacttattttcatttttaaagcacaaaatcacaatgaaggaagaatggcataaattcatccagcttcttacagaattccaaatgcggaatgtagattttttatatagtaatcttgagtttattctaccattaccagttgataccattccagaaactaaaaacttttgtggcccatcagtaactgtggatgccagtgcagcaacaaaaagtatgaattgtcttgctaggaaacactctgaaagagaacagccattgaaaaagtcccagaaaaagaaacaaaagaaaacattggtaatattagatgatagtgatctatttgacactgacttggactttcctgatcaatctattagcctgtcctctgtatcatcttcctcaaatgcagaagaaagcaaaaccggagacgaagaaagcaaagccagagacaaaggaaacaatccagagacaaagaaatctattccttgtcctcctaaaacaactgcaggaaaaaaatgttctgcccttgtttctcattgtttaaattctctctctgagttcatggataacatgtccttcttagatgcacttttaactgatgtaagggaacaaaacaaatacggtagaaatgactttagttggacaaatggaaaggttacaagtggactttgtgatgagtttagtcttgagagtaatgatggatggacttctcaaagctctggagaattaaaggcagctgcagaagctctcagctttactaaatgttcttctgctatttcaaaagcattggaaaccttgaattcttgcaagaaattaggaagagatccaaccaacgatcttactttttatgtttcacaaaagcgcaataatgtatactttagtcagtcagcagctaatttagacaatgcttggaagaggatatcagtcattaaaagtgtattttcgagtcgatctcttctctatgtgggtaatagacaagctagtataattgaatacctgccaacccttcgaaacatctgtaagactgagaagctaaaagaacaaggaaaaagtaaaagaagattcctgcactattttgaaggaattcatcttgacattccaaaagagactgtgaatactttggcagctgacttcccttaatgttccatactaacaatgctttgtatagattatcatgtggtccttaagatacatttttatattatgtggatcttcatggaaaagtatatttctcgatgtacattttaaacaaacaatttgtatatttttttattggcgggtaaatatttaaaatatttgagttacaaattttatatatgattgtaattttttttctgaattttttgtattatctgatttagctttgttggagtattttttgtatgtgagtgaactgtttctggaaggtagagttcattaagatgaactccctatttcaagtgtttatattatatattagcttaatattcagatacattatcttggctgctaacattagtgtcac

SEQ ID NO: 212 - DNA, 2893 bp, Homo sapiens
agcctgcgcttcggaagcatggatgtgcgcctgcgctgcgctagggcgcggcgggcggtttgaattttgcttacagagtcccgtctcaccatcctgggcttccaacggagactgcggtatccgcagctggagacccagcggcgagtagccttttgctcccggacggacttgagaggcttaaaggatggcctcgtcagatctggaacaattatgctctcatgttaatgaaaagattggcaatattaagaaaaccttatcattaagaaactgtggccaggaacctaccttgaaaactgtattaaataaaataggagatgagatcattgtaataaatgaacttctaaataaattggaattggaaattcagtatcaagaacaaaccaacaattcactcaaggaactctgtgaatctcttgaagaagattacaaagacatagaacatcttaaagaaaacgttccttcccatttgcctcaagtaacagtaacccagagctgtgttaagggatcagatcttgatcctgaagaaccaatcaaagttgaagaacctgaacccgtaaagaagcctcccaaagagcaaagaagtattaaggaaatgccatttataacttgtgatgagttcaatggtgttccttcgtacatgaaatcccgcttaacctataatcaaattaatgatgttattaaagaaatcaacaaggcagtaattagtaaatataaaatcctacatcagccaaaaaagtctatgaattctgtgaccagaaatctctatcacagatttattgatgaagaaacgaaggataccaaaggtcgttattttatagtggaagctgacataaaggagttcacaactttgaaagctgacaagaagtttcacgtgttactgaatattttacgacactgccggaggctatcagaggtccgagggggaggacttactcgttatgttataacctgagtcccttgtgaacttttgaacataccaacagggtatagagtatagaggctatttctataattttcttatatataatttttttaacttttaatcttttttgtttccttttttttttttttgagacaggatcttgctttgtcacccaggggcttgctttgtcacgcaggctagagtgcagtggcgcaaacatggctcactgcagcctcaacctcccaggctcaagtgatcctcccacctcagccccctgaatggctgggactacaagcgtgcgccaccatgcctggctaatttttgtattttttggagagatggggtttcaccatgttgcctaggctggtcttgagctcctgagctcaaacaatccaccctcctcagcctcccaaagtgctgggattacaggcttgagccaccacacctgacctattcttgtttcttataaaaataaaacttttttggataaagcttatttcttgtttttttctttttctttttttttttttttgagacagtctcgctctttcacccaggccggactgcagcggcgctatctcggctcactgcaaactctgcctcccaggttcacgccatcctcctgcctcagcctcctgagtagctgggactacaggcacctgccaccacgcccagctaattttttgtatttttagtagagatggggtttcaccgtgttagccaggatggtctcgatctcctgacctcatgatccgcccacctcggcctcccaaagtgctgggattacaggcgtgagccaccgcgcccggccaacttatatattttcaagattcacctcctctcaccaaatatttaactacctgctgaatacgcctctgtactaggcacataatggaactaaaaaatgctcatgtccagtttttgtgttgagtgaacaatgctgcagaccctaataagattgggtacagatcggcatgcgcctgtagtcccagctactcaggagaattgcttgaacctaggaggtggaggttgcagtgagccgagatcgtgccactgcactccagtctgggcaacagagcgagactccatctcagaaaaaaagaaaaaaagactgggtacagatgtgatattggaagaaaaagatcaagctgatgaggttaggatacccaggccctttggacttaaagatcactagtgtctaaattccatcgatggcatttcagtctataggtaaacttcctggaagctggatttggagacagtttatcatctgattattgggctttcgtataggtccttagggagcagcttacctgaaatgcatttagtgtacaccagtctgtaaacttcaacctgtaatgaaagtgtaataaatgtacattgagttgatgtgataatgtgatataataagaaatatatatttgatcttcctatctagttccttgttcagagctcctaaaacccttgtaatttccaaagtgatggagtacatcttttgttctagtatttggtctttgaccccagttcctgacacaaagctcctaaattcctttaaatttcccagtgataggagaattttttgttctaatgaggtcactcttgatgggcacctggataactcaggatgggggctgctcacaaagaccacatcatgattggaagtttcaaactttcagtctcccacctccagagaggggagaggggctggagatttgtgtcaataatccatcaggcctatgtcaacaagacataatccgttaactatggagttcagggagcttcagggttggcaaacattttgatgtgccaggaaggtgacgcactccagctttatgaagtcagcaagtcctgtgctcaggatgcttctggaccttgccccaggtaccccttcatgtggctgttgttcatctgtatcctttgtagtagccttaaaataaactgttaaacacaaaaaaaaaaaaaaaaaaaaaa

SEQ ID NO: 213 - DNA, 1740 bp, Homo sapiens
tacagctttgattttataacatcctgctaatttttgttcttacagaaatacactttcgggaaatggcctctaaatcctggctgaattttttaaccttcctctgtggatcagcaataggatttcttttatgttctcagctatttagtattttgttgggagaaaaggttgacacccagcctaatgttcttcataatgatcctcatgcaaggcattcagatgataatggacagaatcatctagaaggacaaatgaacttcaatgcagattctagccaacataaagatgagaacacagacattgctgaaaacctctatcagaaagttagaattctttgctgggttatgaccggccctcaaaacctagagaaaaaggccaaacacgtcaaagctacttgggcccagcgttgtaacaaagtgttgtttatgagttcagaagaaaataaagacttccctgctgtgggactgaaaaccaaagaaggcagagatcaactatactggaaaacaattaaagcttttcagtatgttcatgaacattatttagaagatgctgattggtttttgaaagcagatgatgacacgtatgtcatactagacaatttgaggtggcttctttcaaaatacgaccctgaagaacccatttactttgggagaagatttaagccttatgtaaagcagggctacatgagtggaggagcaggatatgtactaagcaaagaagccttgaaaagatttgttgatgcatttaaaacagacaagtgtacacatagttcctccattgaagacttagcactggggagatgcatggaaattatgaatgtagaagcaggagattccagagataccattggaaaagaaacttttcatccctttgtgccagaacaccatttaattaaaggttatctacctagaacgttttggtactggaattacaactattatcctcctgtagagggtcctggttgctgctctgatcttgcagtttcttttcactatgttgattctacaaccatgtatgagttagaatacctcgtttatcatcttcgtccatatggttatttatacagatatcaacctaccttacctgaacgtatactaaaggaaattagtcaagcaaacaaaaatgaagatacaaaagtgaagttaggaaatccttgaaagaaaatcatgaatgaacaaaggtaatatgtctagcactgcactgaaaaaggacttctgcatttctgacatagaacactggaatcccagtgaggaattctaagtgaacattccttatagaaacctttcacatgaatgactataaactgaagctttaaatgagctgtgaagtgtgttaaaatgtgttttgatacagtaatatataaatatgtctatatatatgaggaacttgtgttttttaaatggtggccaggtagaggaactagaaaagagattttgttgcctgttttctgaccatctgtgttattgtcactgagaaactaaaatagtaaatttactaaaactacactgcaccatgttagtaataaacagatctgccttaaagaaaagaaaattttagaaagaaatattgttgctcagtgttgttaatatagctcaagaattgagtttatatttgcagtatgctataaatgatacccccctaccacacccacacacacagtttttgtctaatgaaaatgttgctgtgattatttataattggtagtatttcttccagaagaagctaaaataagactggcactta

SEQ ID NO: 214 - DNA, 3209 bp, Homo sapiens
attcccatcccccttctctagtccccgacctgcggcagccggagctcggggagcggagcgtggtggggaggggagcgggacaggcgacacaggagacagcggcgccgcggcctctccccaccaggcggccccggatcctactggacgccctgagggcacaccgaccgcgcctctagagtcaccccacgccgacccctcccctcttctctagacttatttccatccttcccgcttttaccctccccacccctccctgggctccaggccgccgccccctcctcactcctggaccggcccttctcggtgcccctcttccctagggagatgcgatgagccggtgcccccgcgtcctcatcgtcgccccgggcacggtgcccgtccagtgcccgtggtggggagggagcactccgcggtccctccgtgacgcccctcgcttggccccccccacagctggcgtccctcggccatgccccaggggacccagccagggggtgggctctagagcgagtggggtggagaggagaaaggacggggccttgggcgcctctgagatgctcccaagtgccagggagggccgagcgaggcgcaggcaaccgggcagcaggcatgatgccctcgcctagtgactccagccgctcgctgaccagccggcccagcaccaggggccttacccacctccgcctccaccgaccctggctgcaggccctgcttacgctggggctggtccaagtgctcctgggcatcctggtggtcaccttcagcatggtggcctcttccgtcaccaccaccgagagcatcaagaggtcctgcccgtcttgggctgggttctcgctggcgttctccggggtggttggcattgtgtcctggaagcggccattcactctagtgatctccttcttctccttgctttcggtgctctgtgtcatgcttagcatggctggctctgttctctcctgtaagaatgctcaactggcccgagacttccaacagtgctctctggaaggaaaggtctgtgtgtgctgtccctctgttcccctcctccggccctgtccagagtcggggcaggaactgaaagttgcccctaactccacctgtgatgaagcccgaggggccctcaagaacctgctcttcagcgtctgtgggctcaccatttgtgccgctataatctgtacactctctgctattgtctgctgcatccaaatcttctccctggacctcgtgcatacgctggcccctgagcggtcagtctcaggcccactgggacctctgggctgcacgtccccgcccccagcccctctcctacacaccatgctggacctggaggaatttgtcccgcctgtgcccccaccgccctactatcccccagagtatacctgcagctcagaaacagatgcacagagcatcacgtacaatggctccatggacagcccagtgcccttgtaccctaccgattgccccccttcttatgaggcagtcatgggactacgaggagacagccaggccactctctttgaccctcagcttcacgatggctcgtgcatctgtgaacgagtggcctccattgtagacgtgtccatggacagcgggtctctggtgctgtcagccattggtgacctccctgggggctctagcccgtcggaggactcgtgcctgctggagctgcagggctccgtgcgctccgtggactacgttctctttcgctccatccagcgcagccgtgccggctactgcctcagcctggactgtggcctgcggggccccttcgaggaaagccccctgccacggcgccccccacgggctgcccgctcctattcctgctctgcccctgaagctccacccccactgggtgcccccacagctgcccgcagctgccaccggttggagggctggccgccctgggtgggaccctgcttccccgagctgaggcggcgggtcccccggggagggggccgcccagccgcagccccgcccacccgagccccgactcgtcgcttcagcgatagctcaggttccctcaccccaccggggcaccggcctcctcatccggcatccccaccaccgctgctgctgccacggtcccacagcgacccaggcatcacgacctccagtgacactgctgacttcagggacctttataccaaagtgcttgaggaagaagctgcttctgtttcctctgcagatacagggctctgctctgaagcctgcctcttccgcctagcccgctgcccttcccccaagttgctacgtgcccggtcagccgagaaacggcgccctgtgcccaccttccaaaaagttcccctgccctcgggccctgcacctgcccactccctgggggacctaaagggcagctggccaggtcggggcctggtcactcgtttcctccagatatccaggaaagccccagaccccagtgggactggagctcatggacataagcaggtgccccggagcctgtggggccggcctggccgagagagcctccaccttcgcagctgcggagatctgagctctagctcttccctgcggcgtctcctgtctggccgcaggctggagcgtggtacccgcccccacagcctcagcctcaacgggggcagccgggagactgggctctgacctaggcttcttgtcacactgaacacatccagccacaggcaccagctggttgggaccagcagcccccagcatcctcttgcactggctggcacaaaaagaaacctgctgtataccccccaaagtgtccctttccctcctacctctggggtctcttgctgcttgcctctgctgctctggactgggagagcttctgtcctgtgctgcatgggtatttagactgtgggggagatgccccttcttatagcactggaggaggaaaacaaattcttgtccccctcagaatgagagtggctctttctgatttgcaagggcactatggtcagggcaaaggcatggcccaggtgtttaagtacagggtgacgtgtgcctatgcaatggggtggtaaggcaggcacgaagagtccaaaaaatctaggtggcctctcagctctgccacctctagctgcatgaccttgggcaagctatgtaaccccaattgcctgctccattaaagactgtgaaggtagaatgtttgtaaagctcttaacagtatgtaagccttcaataaatttcagttttccccttgttttcttgatcaaaaaaaaaaaaaaaaaaaa

SEQ ID NO: 215 - DNA, 2921 bp, Homo sapiens
attcccatcccccttctctagtccccgacctgcggcagccggagctcggggagcggagcgtggtggggaggggagcgggacaggcgacacaggagacagcggcgccgcggcctctccccaccaggcggccccggatcctactggacgccctgagggcacaccgaccgcgcctctagagtcaccccacgccgacccctcccctcttctctagacttatttccatccttcccgcttttaccctccccacccctccctgggctccaggccgccgccccctcctcactcctggaccggcccttctcggtgcccctcttccctagggagatgcgatgagccggtgcccccgcgtcctcatcgtcgccccgggcacggtgcccgtccagtgcccgtggtggggagggagcactccgcggtccctccgtgacgcccctcgcttggccccccccacagctggcgtccctcggccatgccccaggggacccagccagggggtgggctctagagcgagtggggtggagaggagaaaggacggggccttgggcgcctctgagatgctcccaagtgccagggagggccgagcgaggcgcaggcaaccgggcagcaggcatgatgccctcgcctagtgactccagccgctcgctgaccagccggcccagcaccaggggccttacccacctccgcctccaccgaccctggctgcaggccctgcttacgctggggctggtccaagtgctcctgggcatcctggtggtcaccttcagcatggtggcctcttccgtcaccaccaccgagagcatcaagaggtcctgcccgtcttgggctgggttctcgaacctgctcttcagcgtctgtgggctcaccatttgtgccgctataatctgtacactctctgctattgtctgctgcatccaaatcttctccctggacctcgtgcatacgctggcccctgagcggtcagtctcaggcccactgggacctctgggctgcacgtccccgcccccagcccctctcctacacaccatgctggacctggaggaatttgtcccgcctgtgcccccaccgccctactatcccccagagtatacctgcagctcagaaacagatgcacagagcatcacgtacaatggctccatggacagcccagtgcccttgtaccctaccgattgccccccttcttatgaggcagtcatgggactacgaggagacagccaggccactctctttgaccctcagcttcacgatggctcgtgcatctgtgaacgagtggcctccattgtagacgtgtccatggacagcgggtctctggtgctgtcagccattggtgacctccctgggggctctagcccgtcggaggactcgtgcctgctggagctgcagggctccgtgcgctccgtggactacgttctctttcgctccatccagcgcagccgtgccggctactgcctcagcctggactgtggcctgcggggccccttcgaggaaagccccctgccacggcgccccccacgggctgcccgctcctattcctgctctgcccctgaagctccacccccactgggtgcccccacagctgcccgcagctgccaccggttggagggctggccgccctgggtgggaccctgcttccccgagctgaggcggcgggtcccccggggagggggccgcccagccgcagccccgcccacccgagccccgactcgtcgcttcagcgatagctcaggttccctcaccccaccggggcaccggcctcctcatccggcatccccaccaccgctgctgctgccacggtcccacagcgacccaggcatcacgacctccagtgacactgctgacttcagggacctttataccaaagtgcttgaggaagaagctgcttctgtttcctctgcagatacagggctctgctctgaagcctgcctcttccgcctagcccgctgcccttcccccaagttgctacgtgcccggtcagccgagaaacggcgccctgtgcccaccttccaaaaagttcccctgccctcgggccctgcacctgcccactccctgggggacctaaagggcagctggccaggtcggggcctggtcactcgtttcctccagatatccaggaaagccccagaccccagtgggactggagctcatggacataagcaggtgccccggagcctgtggggccggcctggccgagagagcctccaccttcgcagctgcggagatctgagctctagctcttccctgcggcgtctcctgtctggccgcaggctggagcgtggtacccgcccccacagcctcagcctcaacgggggcagccgggagactgggctctgacctaggcttcttgtcacactgaacacatccagccacaggcaccagctggttgggaccagcagcccccagcatcctcttgcactggctggcacaaaaagaaacctgctgtataccccccaaagtgtccctttccctcctacctctggggtctcttgctgcttgcctctgctgctctggactgggagagcttctgtcctgtgctgcatgggtatttagactgtgggggagatgccccttcttatagcactggaggaggaaaacaaattcttgtccccctcagaatgagagtggctctttctgatttgcaagggcactatggtcagggcaaaggcatggcccaggtgtttaagtacagggtgacgtgtgcctatgcaatggggtggtaaggcaggcacgaagagtccaaaaaatctaggtggcctctcagctctgccacctctagctgcatgaccttgggcaagctatgtaaccccaattgcctgctccattaaagactgtgaaggtagaatgtttgtaaagctcttaacagtatgtaagccttcaataaatttcagttttccccttgttttcttgatcaaaaaaaaaaaaaaaaaaaa

SEQ ID NO: 216 - DNA, 3812 bp, Homo sapiens
agggaatctggcccctagaggctggtacttgggcccgaaacccccatctccggcggagagaccgtccgaggtaattgtctgccacgagtgcacattctgaaaacaggagattttagttcctaaaaatgggaagaacctacattgtagaagagactgttggccagtatctttcaaacataaatctccaaggaaaggcttttgtctctggccttttaataggacagtgttcgtcacaaaaggattatgtgattcttgccactagaacgccacccaaagaggagcaaagtgagaacctcaaacatcccaaagctaagttggataacttggatgaagaatgggccacagaacatgcctgccaggtatccagaatgctaccagggggacttttagttcttggagtatttattattactactttagaactggcaaatgattttcaaaatgccctgcgtagactaatgtttgctgtggaaaagtctataaatagaaagagattgtggaatttcacagaggaggaagtctcagaacgagtgacacttcacatttgtgcttctacaaaaaaaatattttgtcgaacttatgatatccatgatccaaagagttcagcaagaccagcagattggaagtatcaaagtggattatcatcctcatggctttctttagagtgtacagttcacattaatattcacatcccactttctgctacttctgtcagctatactctggagaaaaatacaaagaatggacttacacgctgggccaaggaaatagaaaatggtgtttatttgattaatggacaagttaaagatgaagattgtgacctattagaaggacagaaaaaatcttctagaggaaatactcaagcaactagtcattcttttgatgtcagagtgctaacgcagttgctcctgaattcagaccacagatccacagccacagtccagatatgtagcggttctgtaaaccttaagggtgctgtgaaatgcagagcttatatccacagcagtaaacccaaagttaaagatgctgtgcaggcagtaaagagggatatattgaacacagttgctgatcgttgtgaaatgctatttgaggatctgcttttgaatgaaattccagaaaaaaaagattctgaaaaagagttccacgtcctcccttatcgagtctttgttccccttcctggatccactgtaatgttgtgtgattataaatttgacgatgagtcagctgaagaaatcagggaccattttatggagatgttggatcacacaattcaaatagaagatttggaaattgcagaggaaacaaacacagcttgtatgagttcttctatgaatagtcaagcttcattggacaacacagatgatgaacaaccaaaacaaccaattaaaactacaatgttattgaaaattcagcaaaacataggtgtgattgcagcatttacagttgcagtccttgctgcgggtatctcctttcattacttcagtgattagggtgaggcacaaagagtttcttgatcatccagagaacattgacagacaattatgaataataaagatgttaacaatccatctgtatttaaaacactagcagccagatctgctgccatgatgcctatttggtgtgtttctgattaaaatgaaatcacaagctgccttgtttagcctgctttacattgtaggtggcccgcatttccagaaataacgttatgcatctagatggaagctgcatgtaacaaatcattattatctatttttaaaagcttcaaaatgatgggatatgatcatagattttagtcttactaatctgaatcacatattaatcaggacattaaaaactttaacagaggcatgatggctcacacgtataatcctaatgctttgaaggctgaggtaggagcatcacctggggctgggagggagttggagaccagcctggatgacataatgagattctgtctctactggaaaaaaaaaaaattagctggacatggtggcaatcagctctagtcccaactacttggaggctgaagcaggaagatcacgtgagcccaggagtttgaggctgcagcgagctatgatcacatcactgtactccagcctgggtgacaaaatgagacattgtctctaaaatacataagtaaatttaaaaaaaaaagaataataatttgaacagtgaatgttgatgtaacatcttaataatagagcaccagaaaaatttctaccaaatgagacaacaactttaggaaagttctcctctaggagctttctaatgtgcactcagttcctgtatactgtgtgttttgttctgatcaaggggtagggaacctttccagagaagtcccattagtaagaaatgacataaaatacgtgctttctcaggttactgtataactgttataatatatttaatatataaaattaagacttttgcttccagcaagtatgttagactagatattataaaacaactagatcctgaataaaatctgcttttaataggttcactggaagtaggagaattttcaagaaccatacttcgacatttcctctgccacaaaaaatgaacgcattttaagttaggagtcatgaatactgtattgaccatacaagtggattatggttgtctggatggcagataccaatagcaacattgtcatatgcagtttgcctcaaatcagaaacaagaagacatcggaatctgagatgctgccctagagaggacagttaaagaaggttcagtggtcctcagtttgcagtgctctagctcctggcagaagcaagagggaaacattcctaatttagttccaagattcctacagattattatcaagtagtagtattttatgactagagatcacaggcacaagttgaaacaaactaacatgacaagaaagctatagaaaaaataaacattgaactcagttcttcaaggtttcatcaccaacataaggaatgaagttggaaccacaggcagatctgaaaaagaaccaaatagagctcctaaaaatgagaaatatttattgaaataagaaaaaagccctcagacatgttgaatattttattagactcagctgaagagacaagtgaactaaactataagctggatctaaagaaattacccagtgagcagtgaggagaaacaaggagctagaaaacattggaaagttaagagagttcgagggaagaattataaagactaggagtcctagaaagagaaaatttagagaataaaggagaggcagtacttgaaagataacacaattttacaaatttgttggaaaaacatgaattcataaattcaggaagcacaatatataccaaacatatatttaaataaaatccaggcctagactcaaggtattgtaaatgacaagataccaaatacaagattttaaaagcaaccatggggagaaaaagatcagtgaaagcaagacagtcaaatacttagtaggcttcctaacagcaacaatgtacccaaaagagggtagaattctgagaaaaactattagcttagaatttgcaacaagcgaaactgaaacaaacagatgctcagatgaaaaacagatgttatcctcagcacaacttcagtaaagagactacaaaaggatgatcttcaagaagggaaatgattctaaaaggattatctgaaattgaaaaactagtaagcaaataaatgataaacataagtaaatttaaactgttgtttgtataaaacaattataatgaagtgtttataagaaattgtaaacaaatgtaaaactaaataaacattgttatgcaacaaaaaaaaaaaaaaaaaaaaaaaaaaaaaaa

SEQ ID NO: 217 - DNA, 2346 bp, Homo sapiens
gctccgcagctgggaatcacgggactagccttcgtttccttggcaacgcagtacacaagtgctagccctagcagctcgcgatgtgcttcagcagagcagacgctgcggataactacccttttggaacatgtcaacagaggaaactttttcctcacttccatcccccgaatttgattgggaacaagtttgtccctcttaggggatcaccccacagagggcctgggtgttatttttcagatggatatggcttggcatacgacttatctaagatcccaaccagtataaaaggatatactttgggagccagaacagctgtgaggtttaagccaatacagaaggaaatgacacctcatgcaggcaggtaccagaaagtaagtcctcagcaggaaaaacacaaacaaaattttgctccatttaatgtcttggtgcctcgatttaagaactacccaaaggacacttactatcccagccctggtgcatacaacccagagaagaagccaccgccaaaaattgcctggccaatgaaatttggatctccagactgggctcaggttccatgtctacagaaaagaaccctaaaagctgagctgtccacagacaaagactttagaaagcatcggaaccgtgtggcctacctaagcctgtattataattgagcggctgtaactaccttcacgtgctcctcttatacacagactctccaggactgaggacagagctgctcttcttcttctacgttactgtggccctcttgtctggcagcctggagcccagggagggacaggggcttatagctgctgtatgagaacataaagactagtgcacagtgctatctccatctactgacttgtggtgtacacgtgcatgtctgggtctgtgggtttctgttgggtgctgagttgggtgatttcattttagtgaaatatttgtgggcccctgctctctagttctaattcccaggagccaattttatatattctaccactagccctggtcataggaggctgttagcctatacatgtcaagggtttggatgggatttgggcttgctagatacagaaaacacttaaggcagattaaaacatgtattggagctctcccaattgtgttgctcagtgtggagtgggaaggtcttgatttggttgactttcccagattgacataaaactcaaaaaccaaaaaattgcccctttcctatgacatcatccatttagtctgtgagtcaacatatatactgaggtcctactatgtgttgagcagagcagtaagcactggggatatggcaggaatcaaaataaacttatctactaagtccttgggcctggcctgaagtcagaggaggactccccagggcagctaggggattgggtctgccctccaatctgaatgaccccctagaaccttacaagtcattctggggttataaagatcataacatttatagccccagactgacttgtaagcagctgcatttaaagtacttactcagacactcaggcctgagagatagacccctttctttccagcactagctgaaataatcaagtatatagtttgttcaggattggcactaaatgtgatttaatcttttaataaaagggtccttttgtacccacttaggcttcttcgtaattaccagaaaggtgataagcctgcatgtgtctggacaccaaagattgagaagctgccagtggctgcaagagagcctactgtaaccctcatggccaccccctgatgagtgttacctggggaaagggctagcaagaggtgaagcctcctggtcatatgatgctgggggtgcctaattccttaaaggccaaggtcttctgaaataataatggtgaaggacagaaaagtctttatgagaaatcacataggatatattaagataatgataaagatacctcagcaagaacatacctaatatatacacttcttttaatctgatgacttaatgatttctgttatcaagaagtatttatgacttgagataagtcaggattaactgttatcacctctcctgtacacctccctcctttttctcctttgtacccacatgtgcagattttttcagaggtgacaatttagcatttaatgtttttttttctgcttcaagttcttaggtccctttggaggatattgatgggggtggaggtggggatagaacatctttcacactgtttggtacagagacgctcaaagcttttcccagggaaaggaactctctaaaatagtaatctgatttgatgaaagataaaattttaatatagcttcagttaaccttcaggatactttaaatgctacattgtatataaaagtaataaagtacaaatgaacacgaagact

SEQ ID NO: 218 - DNA, 3685 bp, Homo sapiens
agtggactcacgcaggcgcaggagactacacttcccaggaactccgggccgcgttgttcgctggtacctccttctgacttccggtattgctgcggtctgtagggccaatcgggagcctggaattgctttcccggcgctctgattggtgcattcgactaggctgcctgggttcaaaatttcaacgatactgaatgagtcccgcggcgggttggctcgcgcttcgttgtcagatctgaggcgaggctaggtgagccgtgggaagaaaagagggagcagctagggcgcgggtctccctcctcccggagtttggaacggctgaagttcaccttccagcccctagcgccgttcgcgccgctaggcctggcttctgaggcggttgcggtgctcggtcgccgcctaggcggggcagggtgcgagcaggggcttcgggccacgcttctcttggcgacaggattttgctgtgaagtccgtccgggaaacggaggaaaaaaagagttgcgggaggctgtcggctaataacggttcttgatacatatttgccagacttcaagatttcagaaaaggggtgaaagagaagattgcaactttgagtcagacctgtaggcctgatagactgattaaaccacagaaggtgacctgctgagaaaagtggtacaaatactgggaaaaacctgctcttctgcgttaagtgggagacaatgtcacaagttaaaagctcttattcctatgatgccccctcggatttcatcaatttttcatccttggatgatgaaggagatactcaaaacatagattcatggtttgaggagaaggccaatttggagaataagttactggggaagaatggaactggagggctttttcagggcaaaactcctttgagaaaggctaatcttcagcaagctattgtcacacctttgaaaccagttgacaacacttactacaaagaggcagaaaaagaaaatcttgtggaacaatccattccgtcaaatgcttgttcttccctggaagttgaggcagccatatcaagaaaaactccagcccagcctcagagaagatctcttaggctttctgctcagaaggatttggaacagaaagaaaagcatcatgtaaaaatgaaagccaagagatgtgccactcctgtaatcatcgatgaaattctaccctctaagaaaatgaaagtttctaacaacaaaaagaagccagaggaagaaggcagtgctcatcaagatactgctgaaaagaatgcatcttccccagagaaagccaagggtagacatactgtgccttgtatgccacctgcaaagcagaagtttctaaaaagtactgaggagcaagagctggagaagagtatgaaaatgcagcaagaggtggtggagatgcggaaaaagaatgaagaattcaagaaacttgctctggctggaatagggcaacctgtgaagaaatcagtgagccaggtcaccaaatcagttgacttccacttccgcacagatgagcgaatcaaacaacatcctaagaaccaggaggaatataaggaagtgaactttacatctgaactacgaaagcatccttcatctcctgcccgagtgactaagggatgtaccattgttaagcctttcaacctgtcccaaggaaagaaaagaacatttgatgaaacagtttctacatatgtgccccttgcacagcaagttgaagacttccataaacgaacccctaacagatatcatttgaggagcaagaaggatgatattaacctgttaccctccaaatcttctgtgaccaagatttgcagagacccacagactcctgtactgcaaaccaaacaccgtgcacgggctgtgacctgcaaaagtacagcagagctggaggctgaggagctcgagaaattgcaacaatacaaattcaaagcacgtgaacttgatcccagaatacttgaaggtgggcccatcttgcccaagaaaccacctgtgaaaccacccaccgagcctattggctttgatttggaaattgagaaaagaatccaggagcgagaatcaaagaagaaaacagaggatgaacactttgaatttcattccagaccttgccctactaagattttggaagatgttgtgggtgttcctgaaaagaaggtacttccaatcaccgtccccaagtcaccagcctttgcattgaagaacagaattcgaatgcccaccaaagaagatgaggaagaggacgaaccggtagtgataaaagctcaacctgtgccacattatggggtgccttttaagccccaaatcccagaggcaagaactgtggaaatatgccctttctcgtttgattctcgagacaaagaacgtcagttacagaaggagaagaaaataaaagaactgcagaaaggggaggtgcccaagttcaaggcacttcccttgcctcattttgacaccattaacctgccagagaagaaggtaaagaatgtgacccagattgaacctttctgcttggagactgacagaagaggtgctctgaaggcacagacttggaagcaccagctggaagaagaactgagacagcagaaagaagcagcttgtttcaaggctcgtccaaacaccgtcatctctcaggagccctttgttcccaagaaagagaagaaatcagttgctgagggcctttctggttctctagttcaggaaccttttcagctggctactgagaagagagccaaagagcggcaggagctggagaagagaatggctgaggtagaagcccagaaagcccagcagttggaggaggccagactacaggaggaagagcagaaaaaagaggagctggccaggctacggagagaactggtgcataaggcaaatccaatacgcaagtaccagggtctggagataaagtcaagtgaccagcctctgactgtgcctgtatctcccaaattctccactcgattccactgctaaactcagctgtgagctgcggataccgcccggcaatgggacctgctcttaacctcaaacctaggaccgtcttgctttgtcattgggcatggagagaacccatttctccagacttttacctacccgtgcctgagaaagcatacttgacaactgtggactccagttttgttgagaattgttttcttacattactaaggctaataatgagatgtaactcatgaatgtctcgattagactccatgtagttacttcctttaaaccatcagccggccttttatatgggtcttcactctgactagaatttagtctctgtgtcagcacagtgtaatctctattgctattgccccttacgactctcaccctctccccactttttttaaaaattttaaccagaaaataaagatagttaaatcctaagatagagattaagtcatggtttaaatgaggaacaatcagtaaatcagattctgtcctcttctctgcataccgtgaatttatagttaaggatccctttgctgtgagggtagaaaacctcaccaactgcaccagtgaggaagaagactgcgtggattcatggggagcctcacagcagccacgcagcaggctctgggtggggctgccgttaaggcacgttctttccttactggtgctgataacaacagggaaccgtgcagtgtgcattttaagacctggcctggaataaatacgttttgtctttccctcaaaaaaaaaaaaaaaaaaaaaaa

SEQ ID NO: 219 - DNA, 1572 bp, Homo sapiens
ggctggtttggatccgggtcagtcgggtgccgagatttgggagagacgctctgaactgactgccccgcatcaccggagcgtcccagctgcgaggagtgtaaacaggaacatcgataagtagtgtaaaaacttgcacaatgaaatccgaagccaaggatggagaggaggagagtctacagactgctttcaaaaaattaagagtggatgcatcagggtctgtagcatctctgtctgttggagaaggcacaggtgtcagagcaccagtcagaacagcaacagatgataccaaacctaaaaccacatgtgcatctaaagacagttggcacgggtctacaaggaagtcttcacgaggagcagtgagaactcagcgtcgtcgacgttctaagtctcctgtccttcatcctccaaagtttatacattgcagtacaatagcgtcttcttccagcagtcaactcaagcacaaaagccagactgactcacctgatggcagcagtgggctgggaatttcatcccctaaagagttcagtgcaggagaaagctctacttctctcgatgctaatcacacaggggcagtcgttgagcctttgagaacttctgttccaaggctcccatcagagagtaagaaggaagactcctctgacgctacccaagtcccccaagcaagtctcaaagccagtgatctctctgactttcaatcagtttccaagctaaaccagggcaagccatgcacatgcataggcaaggaatgccagtgtaagagatggcatgatatggaagtgtattccttttcaggcctgcagagtgtccctcccttggctccagaacgaagatccacacttgaggactactctcagtcgctgcacgccagaactctgtctggctctccccgatcctgttctgagcaagctcgagtcttcgtggatgatgtgaccattgaggacctgtcaggctacatggagtattacttgtatattcccaagaaaatgtcccacatggcagaaatgatgtacacctgatagcaagaagctaattcatatgctttaaaccaatgaaggcttgtcaaagagatttagttaatggcagaccttgtggccactttgtgtgagaagacatctctttctgctcactgtgcttgcaataaaaacttttcttggcatctcagttaatcttcattctttcaacttactctcttgagttcttacatacacttcaaggcgagcagatcaaagaaaaatcccccttatttagaaatgttcctgggggatgaagaaaccataattacttgagactggcagcagtgggtatatggtaaaagcctttgtaaaacagtgcatttttcagatttgtttaaggtttgctagccaaggaaagtaaaatgtgattttgtaactgcactaaacatttgtcatgctgtagttgccagcccagaatattagaagttacaagactgatttaaaccgtctctgatttaatgcaagatatattgtgtctataaaggtttctcttgttattgttaagccagagatctaaggtttagattcaatttgaataaactagctggcctgccctcta

SEQ ID NO: 220 - DNA, 6528 bp, Homo sapiens
cggccgcccgcctccccggacgagccgtcggtggccgcgtcgtcggtgggcagcagccgcttgccgctcagcgcctcgcttgccttctccgacctcaccgaggagatgctggactgcgggcccagcggcttggtgcgggagctggaggagctgcgctcggagaacgactatctcaaggacgagattgaggagctgcgggccgagatgctggagatgcgggacgtctatatggaggaggacgtgtatcagctgcaggagctgcgacagcagctggaccaggccagcaagacctgccgcatcctgcagtaccggctgcgcaaagccgagcgccgcagtctccgtgccgcccagaccggccaggtggacggcgagcttatccgtggtctggagcaggatgtcaaggtctctaaggacatctccatgcggctgcataaggagctcgaggtggtggagaagaaacgggcgcggctggaggaggagaacgaagagcttcgtcagcggctcatcgagactgagctggctaagcaggtgctgcagacggagctggagcgaccgagagagcattccttgaagaaaagaggaacccgctccctggggaaggccgataagaagactttggtgcaggaggacagtgcagacctgaagtgccagttgcactttgcaaaggaggagtcagccctcatgtgcaagaagctcactaagcttgccaaggagaatgacagcatgaaggaggagctgctgaagtaccgctcgctctatggggacctggacagcgcgctgtcagccgaggagctggccgatgccccccactcgcgggagaccgagctgaaggtgcacctgaagctggtggaggaggaagccaacctgctgagccgccgcatcgtggagctggaggtggagaaccgaggcctgcgggctgagatggacgacatgaaggatcatggaggtggctgtgggggtcctgaggcacgcctggccttctccgcgctgggtggcggagagtgcggggagagcttggcagagctgcggcgacacctgcagtttgtcgaagaggaggccgagctgctgcggcgctcctctgccgagctcgaggaccagaacaagctgctgctgaacgagctggccaagttccgctcggagcacgagctggacgtggcgctgtcggaggacagttgttctgtgctcagcgaaccttcacaggaggagctggcggccgccaagctgcagatcggcgagctcagcggcaaggtcaagaagctgcagtacgagaaccgcgtgctcctctccaacctccagcgctgtgacctcgcctcctgccagagtacgcggcccatgctggagacggacgccgaggccggggactctgcccagtgtgtgcctgctcccctgggcgagacacacgagtcccatgcggtccgactctgcagagccagggaggccgaggtgctgcctgggctgagagagcaggccgccctggtcagtaaggccatcgatgtcctggtggctgatgccaatggcttcacggctggcctccggctgtgtctggacaacgagtgtgctgacttccggctgcatgaggcccccgacaacagcgagggccccagggacaccaagctcatccatgccatcctggtgcgcctgagcgtgctgcagcaggagctgaatgccttcacgcggaaggcagatgcagtcctcgggtgctctgtcaaggaacagcaggagtccttctcatcactgccccccttgggctcccaggggctctctaaggagattcttctggcaaaagaccttggctcagactttcagccacctgacttcagggacctgccggaatgggagcccaggatccgagaggctttccgcactggtgacttggactctaagcccgaccccagccggagcttcaggccttaccgagctgaagacaatgattcctatgcctctgagatcaaggagctgcagctggtgctggctgaggcccacgacagcctccggggcttgcaagagcagctctcccaggagcggcagctacgaaaggaggaggccgacaatttcaaccagaaaatggtccagctgaaggaggaccagcagagggcgctcctgaggcgggagtttgagctgcagagtctgagcctccagcggaggctggagcagaaattctggagccaggagaagaacatgctggtgcaggagtcccagcaattcaagcacaacttcctgctgctcttcatgaagctcaggtggttcctcaagcgctggcggcagggcaaggttttgcccagcgaaggggatgacttcctcgaggtgaacagcatgaaggagctgtacttgctgatggaggaagaggagataaacgctcagcattctgataacaaggcctgcacgggggacagctggacccagaacacgcccaatgagtacatcaagacactggccgacatgaaggtgacgctgaaggagctgtgctggctgctccgggatgaacgccgtggtctgacggagcttcagcaacagtttgccaaggccaaggctacctgggagacagagcgggcagagctcaagggccatacctcccagatggagctgaagacagggaagggggccggggagcgggcagggcccgactggaaggcagccctacagcgggagcgtgaggagcagcagcacctcctagctgagtcctacagcgctgtcatggagctgactcggcagctgcagatcagtgagcgcaactggagccaggaaaagctgcagctggtggagcggctgcagggtgagaagcagcaggtggagcagcaggtgaaggagctgcagaaccgcctaagccagctgcagaaggctgccgacccctgggtcctgaagcactcggagctggagaagcaggacaacagctggaaggagacacgcagtgagaagatccacgacaaggaggctgtttccgaagttgagcttggaggaaatggtttaaagagaaccaaatctgtttcttccatgtctgagtttgaaagtttgctcgactgttccccttaccttgctggcggagatgcccggggcaagaagctgcctaacaaccctgcctttggctttgtgagctccgagccaggggatccagagaaagacaccaaggagaagcctgggctctcgtcgagggactgcaaccacctgggtgccctggcctgccaggaccccccagggaggcagatgcagcgcagctacacggctcctgacaagacgggcatccgagtctactatagtcccccggtggcccggcgcctcggagtccctgtggttcatgacaaagagggcaagatcattatcgagcccggcttcctcttcaccacagccaagcccaaagagtcggccgaggctgatgggctggctgagagctcctatggtcggtggctctgcaacttctcacggcagcgcctggacggaggctcagcgggcagcccctcggcggccgggcctggcttcccagcggccctgcatgactttgagatgtcaggcaacatgagtgatgacatgaaggagatcaccaactgtgtgcgccaggccatgcgctccggctcactggagaggaaagtgaagagcacatccagccagacggtgggcctggccagtgtgggcacacagaccatccgcacggtcagcgtgggcctgcagaccgacccaccccgcagcagcctccatggcaaggcctggtcaccccgcagctcttcgctcgtgtctgtgcgcagcaagcagatctcctcctccctggacaaggtccattcgcgcatcgagcggccctgctgctcccccaagtatggctcaccaaagctccagaggcggtctgtgtccaagctggacagcagcaaggaccgcagcctgtggaacctgcaccagggcaagcagaacggctcggcctgggcccgctccaccaccacgcgggacagccctgtattgagaaacatcaacgatggactctccagcctcttcagtgtggtggagcactcagggagcacggagtctgtctggaaactaggcatgtctgagacgcgggccaagcccgagcctcccaagtacggcattgtgcaggaattcttccgtaatgtgtgtggccgggcaccgagccccacctcatcagcaggagaggagggcaccaagaagccagagcccctctccccagccagctaccatcagccagagggtgtggccaggatcctgaacaagaaggcagccaagttgggcagcagtgaggaggtcagactcaccatgctcccccaggtggggaaggatggtgtcctccgggacggagatggagccgtggtccttcccaatgaggacgctgtttgtgactgtagtacccagtctctcacctcctgcttcgcccgatcgtcccgctctgccatccgccactctccttccaagtgcaggctgcacccttcagagtccagctggggtggggaggagagggcactcccccccagcgagtgacagagcagccaagctccccgcctcaaccagcccagcccctggatagcagaagggaaccagcagagacgagacgaggctgaacaccagggtcatgccagtcccgccagccgcctcctccatgccccagtgactggtgtgggcagagcaggcagccagtggagctgtgggccagttccgctcttggatgctgctgctctcacccatgaggtcaggggggccctccaaggttatctccaggtgaggggattcacatcaggccacaagccaccagaggccttctgccacctcccagagcgacagccagggaggctgcgtactcagcctcggggagaaatccccgtgggacctgagccccaagacctacggaccactcagccttaccatcgtaccgtccaggattgtccttgccatctttgttgtctcagccagaccttggttttcagtaaagccccagtttctacttcctgcatgccactgtgcaaggccactcatcactgttcctgcagaagcctctggacgtggggctggatggggttgaaaatgttacatgtaaatattggtttggttcggtttttagcattttacttggtaactggttgttttcttttttggggtggggggattggtttgtaaaaattctctactcttttggaatgtgatttctaagtttgttggtttcttcaaatgccttttaagtcttggtaacattcccaaagcagaaaactgcctgacccacagtggggattccctggagaattggggtcccaagaaggaatgctgcccttctcgaacccgttctcccccttcctcctgcctctctgccttttactgctattcccttcttctcctcctttatccttctttctgttttccccatctccactctctcttcaaccaaagtcccaaggaaccctcggggctcaatcccccatagaccacttggcttgggtccatggggttggcatcagttggttggcggaaatgggggaccagttggcatgatggccctaaactgggaaacctcatgtttcttatgtctcacctctttccagagccaaatcagccccttttggaatgatgacttcattggaatgcaaatcaagtcattttggtgcatcagtggctcttaggcctgcacacacgagacatcagaatccaatcctctgaccctgtgccagccctttcccccagtttatttcccaccaaaggctgacctctaagaggtcttgctttctatgaactcaagatgggtcccacctctaggtgtccccaggtgcactcttctaccggttggcttccgatgtgacaaggccaagggcccaaagacttgaccctcttacacccttgctgacatggttccatcatgtccacccgcatgcacttttatggtttcatcacccagcctcttctcctctggcccacccagcgtccaggctctttctccctctcccctcctatctagaatgtcccctgcttctagcctcaccagaccccccaagctcccactacttcttccataataatagtaataacaatggttatcatcatcccctgcacatcccgcctaaagcactttactatatagaaaacgtttcccctggccgggcatggtggctcacgcctgaaatcccagctctttgggaggctgaggcgagcggatcagttgaggtcaggagttcaacgccagcctggccaacgtggtgaatccctgtctgtactaaaagtacaaaaaattagctgagcatggtggtgcgtgcctgtaatcccagctactcgggaggctgaggtgggagaatcgcttgagcccaggaggcggaggttgcaggagcagagattgcgccactgcactccagcctggatgacagagtgagacccaatctcaaaaaagaaatcgtttcccaccccacatctccttcagacctctcagggacaactctgggaggcagccttggcaggacatgggttagtgcgcccattttgctgtgaggaaactgaggtacaggtctcatcccagagcatgagaagtcactgagtttagatgagaacttgggt

SEQ ID NO: 221 - DNA, 3728 bp, Homo sapiens
gatgtgttttctgcctttctggactactttgcctctaagatgcagaaactgagtacaagggaaaggactccaaatccccagtatgtcccctgcaggagcagagttgaaggaggtcccaccaggtctggtgggtggccctgctcaggcttacctcccccttgtaggggtcactgggaactgtcaactgcgaaggactgtgatctccagtctggtatggtctgctctggggtccaagtgaggaaagcataaatcgggcaactctctcccagtgagaagatagaaggagcttctacagagaaggacgagattgaggagctgcgggccgagatgctggagatgcgggacgtctatatggaggaggacgtgtatcagctgcaggagctgcgacagcagctggaccaggccagcaagacctgccgcatcctgcagtaccggctgcgcaaagccgagcgccgcagtctccgtgccgcccagaccggccaggtggacggcgagcttatccgtggtctggagcaggatgtcaaggtctctaaggacatctccatgcggctgcataaggagctcgaggtggtggagaagaaacgggcgcggctggaggaggagaacgaagagcttcgtcagcggctcatcgagactgagctggctaagcaggtgctgcagacggagctggagcgaccgagagagcattccttgaagaaaagaggaacccgctccctggggaaggccgataagaagactttggtgcaggaggacagtgcagacctgaagtgccagttgcactttgcaaaggaggagtcagccctcatgtgcaagaagctcactaagcttgccaaggagaatgacagcatgaaggaggagctgctgaagtaccgctcgctctatggggacctggacagcgcgctgtcagccgaggagctggccgatgccccccactcgcgggagaccgagctgaaggtgcacctgaagctggtggaggaggaagccaacctgctgagccgccgcatcgtggagctggaggtggagaaccgaggcctgcgggctgagatggacgacatgaaggatcatggaggtggctgtgggggtcctgaggcacgcctggccttctccgcgctgggtggcggagagtgcggggagagcttggcagagctgcggcgacacctgcagtttgtcgaagaggaggccgagctgctgcggcgctcctctgccgagctcgaggaccagaacaagctgctgctgaacgagctggccaagttccgctcggagcacgagctggacgtggcgctgtcggaggacagttgttctgtgctcagcgaaccttcacaggaggagctggcggccgccaagctgcagatcggcgagctcagcggcaaggtcaagaagctgcagtacgagaaccgcgtgctcctctccaacctccagcgctgtgacctcgcctcctgccagagtacgcggcccatgctggagacggacgccgaggccggggactctgcccagtgtgtgcctgctcccctgggcgagacacacgagtcccatgcggtccgactctgcagagccagggaggccgaggtgctgcctgggctgagagagcaggccgccctggtcagtaaggccatcgatgtcctggtggctgatgccaatggcttcacggctggcctccggctgtgtctggacaacgagtgtgctgacttccggctgcatgaggcccccgacaacagcgagggccccagggacaccaagctcatccatgccatcctggtgcgcctgagcgtgctgcagcaggagctgaatgccttcacgcggaaggcagatgcagtcctcgggtgctctgtcaaggaacagcaggagtccttctcatcactgccccccttgggctcccaggggctctctaaggagattcttctggcaaaagaccttggctcagactttcagccacctgacttcagggacctgccggaatgggagcccaggatccgagaggctttccgcactggtgacttggactctaagcccgaccccagccggagcttcaggccttaccgagctgaagacaatgattcctatgcctctgagatcaaggagctgcagctggtgctggctgaggcccacgacagcctccggggcttgcaagagcagctctcccaggagcggcagctacgaaaggaggaggccgacaatttcaaccagaaaatggtccagctgaaggaggaccagcagagggcgctcctgaggcgggagtttgagctgcagagtctgagcctccagcggaggctggagcagaaattctggagccaggagaagaacatgctggtgcaggagtcccagcaattcaagcacaacttcctgctgctcttcatgaagctcaggtggttcctcaagcgctggcggcagggcaaggttttgcccagcgaaggggatgacttcctcgaggtgaacagcatgaaggagctgtacttgctgatggaggaagaggagataaacgctcagcattctgataacaaggcctgcacgggggacagctggacccagaacacgcccaatgagtacatcaagacactggccgacatgaaggtgacgctgaaggagctgtgctggctgctccgggatgaacgccgtggtctgacggagcttcagcaacagtttgccaaggccaaggctacctgggagacagagcgggcagagctcaagggccatacctcccagatggagctgaagacagggaagggggccggggagcgggcagggcccgactggaaggcagccctacagcgggagcgtgaggagcagcagcacctcctagctgagtcctacagcgctgtcatggagctgactcggcagctgcagatcagtgagcgcaactggagccaggaaaagctgcagctggtggagcggctgcagggtgagaagcagcaggtggagcagcaggtgaaggagctgcagaaccgcctaagccagctgcagaaggctgccgacccctgggtcctgaagcactcggagctggagaagcaggacaacagctggaaggagacacgcagtgagaagatccacgacaaggaggctgtttccgaagttgagcttggaggaaatggtttaaagagaaccaaatctgtttcttccatgtctgagtttgaaagtttgctcgactgttccccttaccttgctggcggagatgcccggggcaagaagctgcctaacaaccctgcctttggctttgtgagctccgagccaggggatccagagaaagacaccaaggagaagcctgggctctcgtcgagggactgcaaccacctgggtgccctggcctgccaggaccccccagggagccagaagctgcccttcctcctcatcctggcccctccccagcccccgccaatactgtgaacccccttcccactcagcctggtttcctggtgagggtcctgcagtcatgggccctgggggacccccagggcaaggcccatgggagggaagggaccaagggcatccttgggccaactgtccacctctcttgtccactattctctcctttccacttctgtcttcaaaaggctccttcctaggatggatcgggtgctaggacaactgcagtccaatccaccagctctccctgcccctgtgtcttatttcagacatgagaataactgtacagtgtaaacttataaagcgtttttaatggttgtagattggaaataaagtatgtcatatgaacagctaaaaaaaaaaaaaaaaaa

SEQ ID NO: 222 - DNA, 3529 bp, Homo sapiens
tccggatgctgagacaggagaatctcttgaacctggagggtggaagttgtagtgagccgagatcatgccactgcactccagcctgggtgacagaacaagactctgtctcaagaaaaaaaaaaagaaaaaaaaaagccaggtttggtggtgcacacctgtagtcccagctactctggaggctgaaatgggaggatcacttgagcccaggagtttgaggctgcagtgagctattattgcactactgcattccagcctgggtgacatatcaagacctgtttgggagaaaaaaaaaaaaagaaaatgcagacagaatgtgggactgggcaccaacaacatctctacaagaggtgaacaagacggtcctggtctttgccctcacgcagcacacggaccagggtggtagaccagagtgtgccctcagtgttatttccactaataacgacgtttcctcctctgtccttcgcagaaccaaatctgtttcttccatgtctgagtttgaaagcttgctcgactgttccccttaccttgctggcggagatgcccggggcaagaagctgcctaacaaccctgcctttggctttgtgagctccgagccaggggatccagagaaagacaccaaggagaagcctgggctctcgtcgagggactgcaaccacctgggtgccctggcctgccaggaccccccagggaggcagatgcagcgcagctacacggctcctgacaagacgggcatccgagtctactatagtcccccggtggcccggcgcctcggagtccctgtggttcatgacaaagagggcaagatcattatcgagcccggcttcctcttcaccacagccaagcccaaagagtcggccgaggctgatgggctggctgagagctcctatggtcggtggctctgcaacttctcacggcagcgcctggacggaggctcagcgggcagcccctcggcggccgggcctggcttcccagcggccctgcatgactttgagatgtcaggcaacatgagtgatgacatgaaggagatcaccaactgtgtgcgccaggccatgcgctccggctcactggagaggaaagtgaagagcacatccagccagacggtgggcctggccagtgtgggcacacagaccatccgcacggtcagcgtgggcctgcagaccgacccaccccgcagcagcctccatggcaaggcctggtcaccccgcagctcttcgctcgtgtctgtgcgcagcaagcagatctcctcctccctggacaaggtccattcgcgcatcgagcggccctgctgctcccccaagtatggctcaccaaagctccagaggcggtctgtgtccaagctggacagcagcaaggaccgcagcctgtggaacctgcaccagggcaagcagaacggctcggcctgggcccgctccaccaccacgcgggacagccctgtattgagaaacatcaacgatggactctccagcctcttcagtgtggtggagcactcagggagcacggagtctgtctggaaactaggcatgtctgagacgcgggccaagcccgagcctcccaagtacggcattgtgcaggaattcttccgtaatgtgtgtggccgggcaccgagccccacctcatcagcaggagaggagggcaccaagaagccagagcccctctccccagccagctaccatcagccagagggtgtggccaggatcctgaacaagaaggcagccaagttgggcagcagtgaggaggtcagactcaccatgctcccccaggtggggaaggatggtgtcctccgggacggagatggagccgtggtccttcccaatgaggtaggtgggtgggatctgtcctttctcttagtaggtggagttagtatataaggtccaagctcttttggtttttaagttcagagatatgggccgaggtgggtggatcgcctgagatcgggagttcaagaccatgttggccaggctggtctcgaactcccgacctcaagtgatccgcccaccttggcctcccaaagtgttaggattacaggcgtgagccaccgcgcctggccacatctctgtgtttaacatcaccttggtaccttgagattggccacagtgggaggatttacagcataaaaattggtaaacactacaaatcggggctcctcctatcactcctggaaaactaattgttaaacattagcgggcataccacttctccaccccatcaagacttcacacctaagtgctcacatttcctctgagaatctttcacaccccactcctgctatcagtttcttataagttaattagtaaaccttatttgaatgttagtgagcattatttgaatgtgttagaatgtgcataagttaactttgcagaaagggaaggaaatgtatttgaaggatggcatgttttataaaacccaagagtaggaacctgacaacctcagcagcttctccctgtcttcctctcctctctttaagcttcaccctctctgatatcatattcctcctttttctctgtttctctctctgttgcatttgcacaaggactgggtgggctgtcccagctctgactttacaacatcttccagttcaagcccctaggagagactgacacaaatccctgtctcccaattccacatttctgaaagaaggaaactctgattggtgcagctagaggcgagtgtaccccttggtccagtctatggctgggagtggtaccatgtggtctgctgtggggcacagagacatgagaagggctgtgtgtggaatgggctgtgatagactcaaacattctacttttctattattgtacgtttaggtggtttctagtttgtccctactgcaaataatgctgtggtgaacatcttggtgcaaaatcatttttttacatttcagactatttccttaggtataagttgcagaaatgagccactgtgcctggcagcagcacttttgatcattatttctgtttattggtaatagtaaaaaattagaaactacccagatgtacataaaaagtgaattggggccaggcacagtggctcacacctgcgatcccaccactttggaaggccgaggcgggcagatcactagaggtcaggagtttgagcctgaccaacatgctaaaatcccctctctactaaaaatacaaaaattagctaggcatggtggcacacgcttgtaatcttagctacttgggaggctgaggcacaagaatcacttgaatccgtgaggtggaggttgtagtgagtcaagatcgtgccactgcactccagcctggggaacagagcaagattctgtctaaaaaataaaaaaataaaaaaagcgaattgggtatataaatcagttatttctatctagtgaaatggtacagagacactaaaaaagaaggcgatcagccaggcatggtggctcatgcctttgggaggcatgagcacccaaaggtgctaattccagcagtttgggaggctgaggcaggaggatcgcttgagcccaggagttcaagaccagcctgagcaacatagtgagaccctgtctcaaacg

SEQ ID NO: 223 - DNA, 2347 bp, Homo sapiens
gctgaagcggggtaattcctctcctgcaattacttttggatggaagtatgcccctttctcagtagaagatggtaatcttggagaatgaccatggagaaggggatgagttctggagaagggctgccttccagatcatctcaggtttcggctggtaaaataacagccaaagagttggaaacaaagcagtcctataaagagaaacgaggaggctttgtgttggtgcatgcaggtgcaggttatcattctgaatccaaagccaaggagtataaacatgtatgcaaacgagcttgtcagaaggcaattgaaaagctgcaggccggtgctcttgcaactgacgcagtcactgcagcactggtggaacttgaggattctccttttacaaatgcaggaatgggatctaatctaaatctgttaggtgaaattgagtgtgatgccagcataatggatggaaaatccttaaattttggagcagttggagcactgagtggaatcaagaacccggtctcggttgccaacagactcttatgtgaagggcagaagggcaagctctcggctggcagaattcctccctgctttttagttggagaaggagcctacagatgggcagtagatcatggaataccctcttgccctcctaacatcatgaccacaagattcagtttagctgcatttaaaagaaacaagaggaaactagagctggcagaaagggtggacacagattttatgcaactaaagaaaagaagacaatcaagtgagaaggaaaatgactcaggcactttggacacggtaggcgctgtggttgtggaccacgaagggaatgttgctgctgctgtctccagtggaggcttggccttgaaacatccggggagagttgggcaggctgctctttatggatgtggctgctgggctgaaaatactggagctcataacccctactccacagctgtgagtacctcaggatgtggagagcatcttgtgcgcaccatactggctagagaatgttcacatgctttacaagctgaggatgctcaccaagccctgttggagactatgcaaaacaagtttatcagttcacctttccttgccagtgaagatggcgtgcttggcggagtgattgtcctccgttcatgcagatgttctgccgagcctgacttctcccaaaataagcagacacttctagtggaatttctgtggagccacacgacggagagcatgtgtgtcggatatatgtcagcccaggatgggaaagccaagactcacatttcaagacttcctcctggtgcggtggcaggacagtctgtggcaatcgaaggtggggtgtgccgcctggagagcccagtgaactgacccttcaggctgagtgtgaagcgtctcagaggcatttcagaacctgagcttttgggggtttttaactgaagttggttgttttatctttcttgttttataattcctattgcaacctcgtgcactgctcgagacacaagtgctgctgtagttagcgcttagtgacacgcgggcctttggtgggtgagcgggactgtgtgtgagtgtgtgcgcgtatgtgcgcacatatgtgtatgtgtggagtatgtgtgtttgcttctccgtggatgaaatagaaactcctcattgtgtgaccaggaatggttaaatcatctttacaaaatgtgtgctttaactgtttacaagtaaaacctaaagttgcaggaaacattttttatttcgtaaagaggtaccaactgtcgctgatgtgatatgtcagaactgaagagtaaatctacttgtttaaatgacttgacagtggtagtgctccatttaataacagtaataagtaataaagtgtttttatttgttaaccagtttaagtggatcctgtggtaacttaaactgttgttctcatcccttatatggggcatttttctttaacaaagaatggtttcagtgaaacaatctagcagagaattaatgtcagaacctttttaaataatagtctgattgatacagtttgtacttatttcatcaagcttttctaagcttaaatattgcatagcttcgagctgtatggactatattatgaaagaatatgtaaagagaacatacagtaatgcacagtccttaatttgtgtataatggaaagttatttacaatataacactgtaaataagaaagcaaagtttatgggaaaattcaatattatctttgtttttgtttaaatatatttttaagataaaggcacaaaaataaaagaagcgtattactgggtatagtatgtgactcctcttctcagactaataaattatcttttgaatccttggaaaaaaaaaaaaaaaaaaaaaaaaaaaaaaaa

SEQ ID NO: 224 - DNA, 741 bp, Homo sapiens
ggaggaggtgaggagggtttgctgggtgggtatgggggagggggagactctgcaggagcctaattccccactctgagctcacccttctgtctgcccgggccctaccccttcccctactctcacccttataatccttttcagcactaggtcttcccgtcacctccacctctctccatgacccggctctgcttacccagacccgaagcacgtgaggatccgatcccagttcctccaaggggcctgggtgctggggaggggtcaggtagtccagtgcgtccacctgtatccacctggggccctagctgggcccagctcctggacagtgtcctatggctgggggcactaggactgacaatccaggcagtcttttccaccactggcccagccctgctgctgcttctggtcagcttcctcacctttgacctgctccataggcccgcaggtcacactctgccacagcgcaaacttctcaccaggggccagagtcagggggccggtgaaggtcctggacagcaggaggctctactcctgcaaatgggtacagtctcaggacaacttagcctccaggacgcactgctgctgctgctcatggggctgggcccgctcctgagagcctgtggcatgcccttgaccctgcttggcctggctttctgcctccatccttgggcctgagagcccctccccacaactcagtgtccttcaaatatacaatgaccacccttcttcaaaaaaaaaaaaaaa

SEQ ID NO: 225 - DNA, 3173 bp, Homo sapiens
tgagcccggcggagccctgcagaacccggccgacctccatgggctgcggggggctgcacccggacccctggggcgcggcgcgcccctgaatgcaccgtgggacgcaggagggtgccatggcctcccggctcctgcaccggctgcggcacgccttggccggcgacggccccggggaggcggcggccagtccagaggccgagcagtttccggagagctcagagctggaggacgacgacgccgagggcctgtcctcccgactcagcggcaccctcagcttcaccagcgccgaggacgacgaggacgacgaggacgaggacgacgaggaggctggccctgaccagctgcccctcggggatgggacgtcaggagaagacgcagaacggagccccccacctgatgggcagtggggcagtcagctcctggcgcggcagctgcaggatttctggaagaagtcccggaacaccttggcaccccagcggctgctcttcgaagtgaccagcgctaacgttgtcaaggacccgccctccaagtacgtgctctacaccctcgccgtgatcggcccaggaccgccagattgccagccagcccagatctctcgccgttactcggactttgagcggctgcaccgaaacctgcagcggcaattccggggcccaatggctgccatctccttcccccgtaagcggctgcgccggaattttactgcagagaccattgcccgccgtagccgggcctttgagcagtttttgggtcacctgcaggcagtgcctgagctgcgccatgccccggacctgcaggacttcttcgtgctgccggagctgcggcgggcacagagcctcacctgtactggcctctatcgtgaggctctggcactctgggccaatgcctggcagctgcaagcccagctgggcaccccctctggcccagaccgccccctgctgaccctggctgggctggccgtgtgccaccaggagctggaagaccctggagaggcccgggcatgctgtgagaaggccctgcagctgcttggggacaagagcctccaccctttgctggcaccctttctggaggcccatgtccggctctcctggcgcctgggcctggacaaacgtcaatcagaggctcggctccaagccctgcaggaggcaggccttacccccacaccaccccccagtctcaaagaattgctcatcaaggaggtgctggactaacccttgcctagatttaaggccactgtgaggagaggggttgccccagaaggcaggggaaggacctgatgagaacagaatagctgggaggctgcagagggtgctgggagcccctagaagttccaaaagagaatgtgaagcagatcaaggaaacttctgttgagctaggctcagggtgagctttggctggggttgcccttgtgtagtacagggaagtctgacacagcctctccagcctataaacagccggggggctgtggcacaggttggggcaatgttcccttgttggtgggcccccaagctggcaaggcctcttggctgaaggccagggactctgcccctggagtcctggagttaagggatgaaggcaaggctgcaggtctggcccaggggaattaaaagccagccactccagtggtatcagtctctttattggatgtgagggccaaaagggactgtaactcctgtctcaggaatggggatagatgggaggttcttgaagccccaggcgaagctggtacctctggctacagcttgctctctgagacctggggcttcactcggatcacgccctcctgggcacaggtcacagctaggactccatcctgacgccacagccgcccatggaccagcccccgagagccacctgtgggtgaggtgaagggtgatgatggcctgcttcagaacagccaaatacactttttttttttttcctgaaacagagtctcactaagttgccaggctggtctcaagcgcctgggttcaagggatcctcccgcctcagcctcctgagcagctgggattacaggcgcacatcaccatgcccaacctccaagtggacttcttgcaaagggtctggcccagggcagggctgccccacacaagggtgcactgagtgtcgtggctgctccaaatgccccttcatgagcttattatggaccgtcattgaggggtaactcctcccacaggaaccccagttgacagtttaaaagcactttcacacctctcctcgcttcctcaaaaagatcacagagggaggagctctgagaacagtctccttcaacagttcggccaagcagaactgctgtacctctgaccacttgtgttaggaaaactatcggctccctgtataataaatcaagccaggtcctccaagtggtaattcatgaaaaatatccccactaccaccaccaaggggaagaaaggactcagaagagaggacttgaggccatgaggtctggcctcttccctccccatctggagactctttctcccttgctggctttgggcccaagtttgatgtttatgaggatgattgctggtttcccttacacatagcagagctcactcagttctcacagtagccaaatgaagcagttatgtgttgtccagttttccagaccaggactgaaatccagagagggtcaggaatttggccccatgatgaagccaaatctgaacccatgtcctcacttcaaggttatcaatcttggattgtgatgctattggtacttgagaataccccttatctgagtataaagaatccttgagttttgtccttggtttatcaagcaaagcttttcttcatttgaaatgtactcccttggaaaggaggtcagggttctgaagctagacattgatgaacgagtcttgtttctctcccctgcaaggaaggtccaagcaggcccttagggaccactgaatgccccgatcccaatcaggttaatcagaatcacttagagaacttaaaaatacagtttcctggaccttatccaagacctactgagtgagaatcttgagggtggaatcagaatctattttgaaaaggcatccccaaatggcagtctgatggactgcgggtttggataccactgctgtaatgtaaccctctttgtttagatgaggaaactgaggttcagatggaagatatgatttgcctattgtaatacaaagaatctgaactgg

SEQ ID NO: 226 - DNA, 1880 bp, Homo sapiens
tgagcccggcggagccctgcagaacccggccgacctccatgggctgcggggggctgcacccggacccctggggcgcggcgcgcccctgaatgcaccgtgggacgcaggagggtgccatggcctcccggctcctgcaccggctgcggcacgccttggccggcgacggccccggggaggcggcggccagtccagaggccgagcagtttccggagagctcagagctggaggacgacgacgccgagggcctgtcctcccgactcagcggcaccctcagcttcaccagcgccgaggacgacgaggacgacgaggacgaggacgacgaggaggctggccctgaccagctgcccctcggggatgggacgtcaggagaagacgcagaacggagccccccacctgatgggcagtggggcagtcagctcctggcgcggcagctgcaggatttctggaagaagtcccggaacaccttggcaccccagcggctgctcttcgaagtgaccagcgctaacgttgtcaaggacccgccctccaagtacgtgctctacaccctcgccgtgatcggcccaggaccgccagattgccagccagcccagatctctcgccgttactcggactttgagcggctgcaccgaaacctgcagcggcaattccggggcccaatggctgccatctccttcccccagtctcactaagttgccaggctggtctcaagcgcctgggttcaagggatcctcccgcctcagcctcctgagcagctgggattacaggcgcacatcaccatgcccaacctccaagtggacttcttgcaaagggtctggcccagggcagggctgccccacacaagggtgcactgagtgtcgtggctgctccaaatgccccttcatgagcttattatggaccgtcattgaggggtaactcctcccacaggaaccccagttgacagtttaaaagcactttcacacctctcctcgcttcctcaaaaagatcacagagggaggagctctgagaacagtctccttcaacagttcggccaagcagaactgctgtacctctgaccacttgtgttaggaaaactatcggctccctgtataataaatcaagccaggtcctccaagtggtaattcatgaaaaatatccccactaccaccaccaaggggaagaaaggactcagaagagaggacttgaggccatgaggtctggcctcttccctccccatctggagactctttctcccttgctggctttgggcccaagtttgatgtttatgaggatgattgctggtttcccttacacatagcagagctcactcagttctcacagtagccaaatgaagcagttatgtgttgtccagttttccagaccaggactgaaatccagagagggtcaggaatttggccccatgatgaagccaaatctgaacccatgtcctcacttcaaggttatcaatcttggattgtgatgctattggtacttgagaataccccttatctgagtataaagaatccttgagttttgtccttggtttatcaagcaaagcttttcttcatttgaaatgtactcccttggaaaggaggtcagggttctgaagctagacattgatgaacgagtcttgtttctctcccctgcaaggaaggtccaagcaggcccttagggaccactgaatgccccgatcccaatcaggttaatcagaatcacttagagaacttaaaaatacagtttcctggaccttatccaagacctactgagtgagaatcttgagggtggaatcagaatctattttgaaaaggcatccccaaatggcagtctgatggactgcgggtttggataccactgctgtaatgtaaccctctttgtttagatgaggaaactgaggttcagatgga

SEQ ID NO: 227 - DNA, 2206 bp, Homo sapiens
ggcgacggagcctggctgtgggcccatctttggaaaaaagatctgggaatgattgtctagcctccagcctcaacttacttgatgcttgagagactcaaagccccgtggtcagctgccctgcaaagaaagtattttgaccttggcatttggacagctcccatctctcccatggccctgacaatgctgaatgggctcctgattaaggactcaagcccacctatgctgctgcaccaggttaacaagactgcccagttagataccttcaactaccagagctgctttatgcaaagtgtctttgaccatttccctgagatcttatttatccaccggacctataacccaaggggtaaggtcttatataccttcctggtggatggacctcgggtgcagctggagggtcatcttgcccgagcagtctactttgccatccctgccaaggaggacactgaaggcctggcccagatgttccaagtattcaagaagtttaatccagcatgggagagagtctgtaccatcctggtggatcctcatttccttccactgcctatcctagctatggagttccccacagctgaggtccttctctcagccttccacatttgtaagttcctccaggccaagttctatcagctgtcccttgaacggcccgtggaaaggctgctcctgacctccctgcagagcacaatgtgctcagccacagcaggcaacctgagaaagttgtatacactcctgagcaactgcatccctccagccaagctgcccgagcttcactcacactggctgctcaacgaccgcatctggctggctcaccgctggagaagccgagctgagagcagccactacttccagagcctcgaggtcaccacccacatcctcagccagttctttggtaccaccccatctgagaaacaaggtatggcttctctgttccgttacatgcagcagaactctgcagacaaggcaaacttcaaccagggcctgtgtgcccagaacaatcatgctccctcagacaccatccccgaaagccccaaactggagcagctggtagaatcccacatccagcactccctcaatgccatctgcacagggccagcagcccaactgtgcctgggcgagcttgctgtggtccagaaatccacacacctcattggctctggctcagaaaagatgaacatacagatcctggaagatacccataaggtgcagccccagccccctgccagctgcagctgctactttaaccaggccttccacctgccctgccgccacatcctagccatgctcagtgcccgccgccaggtgctccagcccgacatgctgccggctcagtggacggcaggctgtgctaccagtctagacagcatcctgggcagcaagtggagtgagaccctggataagcacctggcagtgactcacctcaccgaggaggtgggtcagctgttgcagcactgcaccaaggaggagtttgagcggaggtatagcaccctgcgggaactggccgacagctggattgggccttatgagcaggtccaactctgattattctcgatgcccagagatgctcatgcacctgtgcacactcacatccacccatacacacacacacacacacacacacacacacacacacactcccttacactgttgtacttccgtgggccctccttccagaacaaggacaacaaggacaaggttgaagggtcttctcatctaccatggcctgctacctagcatgtgtctagctcaatgagacaggagtcagcaaatcttaatctgtttagtttactcaggtggccacatacagtctctgttgtatattcttggttttgttttaatattttttttctttttttttttttttttttttttgagagggagtctgtctccagcctgggagggtgagactccatctaaaaaaaataaaataaatggcaacccctggtctaagataagagataaaacatcaggtggtgaggttgaggtttggggcttggtagcagttgccccagtcatgagatgactcacttaacccgtctcctttaagtgagctgggctgggaggcttcctacaggggaagaggcccctctggggagctgactcagccaggctccctgaacttttttccttgtcccatcctggggtcaataaaactgaatgttgcatattctaaaaaaaaaaaaaaaaaaaaaaaaaaaaaaaaaaaaaa

SEQ ID NO: 228 - DNA, 752 bp, Homo sapiens
ggggaagccatgtcctacttcaggactccacaaactcatccaggtcctctgccttccggccaaggtggggctgcttctccaggcttgtcccttggcctctgtagtcctgtagagccagtggtggtggcctctggtggaacaggcccactgagccagaaagctgagcaggtggcacctgctgcccaggcctggggcccagccctggcaatgccacaagccaggggctgccctggggggactagctgggagacactacggaaggaatacagccgaaactgccacaaattcccgcatgtgaggcagctggagagcttgggctgggacaatggctactccagaagcagagcccctgacctgggtggccccagcaggcctaggcccctgatgctgtgtgggctgtcaccacgggttctaccggtaccctctgaggcagtggggaaggaggccagctcccagcctgatatctgcatcctcaccctcgccatgatgatcgctggcatccccaccgtgcccgtcccaggagttcgggaagaggacctgatctgggccgctcaagctttcatgatggcccatccggagccagagggtgctgtggagggggcgcggtgggagcaggcacatgcccacacagcctctgggaagatgcccctagtgagatctaaaaggggccagcctcctggctcctgcttgtagatggatgaaatagcaccagatatgtaaaaaaaaaaaaaaaaaaaaaaaaaaaaaaaaaa

SEQ ID NO: 229 - DNA, 2095 bp, Homo sapiens
gatcagggagtatcggctgcgggtgcgcaaggcgtccaggagtgacctggggctgtggagagcgacccgtggccttgtgtttcaggtacggaggttccggactggacgggcgtcaggaagtcacagacttgtcctctgatgtggccccgcccgccgccgcactaatctcttcggcgtcgtacccgtcggcccagctcgacccgccgcagccccggccccgaccgtggacactgggggtccccgagggcgctgcgacctcctcccggagtttaccacctaggatgacttcagtgactagatcagagatcatagatgaaaaaggaccagtgatgtctaagactcatgatcatcaattggaatcaagtctcagtcctgtggaagtgtttgctaaaacatctgcctccctggagatgaatcaaggcgtttcagaggaaagaattcaccttggctctagccctaaaaaagggggaaattgtgatctcagccaccaggaaagacttcagtcgaagtcccttcatttgtctcctcaagaacaatctgccagttatcaagacaggaggcaatcctggcggcgagcaagtatgaaagaaacgaaccggcggaagtcgctgcatcccattcaccagggcatcacagagctcagccggtctatcagtgtcgatttagcagaaagcaaacggcttggctgtctcctgctttccagttcccagttctctattcagaaacttgaacctttcctaagggacactaagggcttcagtcttgaaagttttagagccaaagcatcttctctttctgaagaattgaaacattttgcagacggactggaaactgatggaactctacaaaaatgttttgaagattcaaatggaaaagcatcagatttttctttggaagcatctgtggctgagatgaaggaatacataacaaagttttctttagaacgtcagacttgggatcagctcttgcttcactaccagcaggaggctaaagagatattgtccagaggatcaactgaggccaaaattactgaggtcaaagtggaacctatgacatatcttgggtcttctcagaatgaagttcttaatacaaaacctgactaccagaaaatattacagaaccagagcaaagtctttgactgtatggagttggtgatggatgaactgcaaggatcagtgaaacagctgcaggcctttatggatgaaagtacccagtgcttccagaaggtgtcagtacagctcggaaagagaagcatgcaacaattagatccctcaccagctcgaaaactgttgaagcttcagctacagaacccacctgccatacatggatctggatctggatcttgtcagtgactttatgagagtttctgccacaaggtgcccaagaggagaggaatgggaagagtgccccagcacgtggtgactgcgtgatttctgctcgttgcctttgaagataactggcaggactgactgtagaacactttgacttttttcaaaaagtgatggaatttgtacatccaaatgaatattgtatagacaattttcccaggaatgtgcaaaatgcttgaaagttcaaacttcttttttgaaatgatcttcagatccagtggcccattcttttatctttatcctgtgaaggtgtttttcaggttttgaaacaatccaaaaatcatttaggaccaagtctaaggaaacattttagtggccaagttggattccgattgtaaaggaatgatactaattttctagcatggctctgaaggtgattttaggtagaagagttttgaggctgggcgcaatggctcacgcctgtaatcctagcattttgggtgactgaggcgggtggattgcttgagcccagaagttgaagaccagcctgagaaataaggtgaaaccctgtctacaaaaaatacaaaaagttagctgggtgtggtggcgtgtgcctgtagtgctagctactcagaaggctgaggtgggaggattgtttgagcccaggaggttgaggctgcagtgagttctaattgcgccactgcactccagcctgagcgacagagtgagacactgtcttaaaaaaaattaaaaattgtaagaaaatg

SEQ ID NO: 230 - DNA, 2682 bp, Homo sapiens
ctttttcctttcctgattccttgtgtatgtgtggctgggccgcccctcttctcggctcagagtcacggagtgccttgaactaggcccacctcgccggggcggctggttctctgtttgtgggacgctggtgtctctggaggcccttcctgagaagccgtcgccagagttacgtcgcggttttcttaactttagagcctgggggccggagaccctgattgcactcgacctggctctgccctactctctgcgtgacttccactgttcatcaaagaaaaagggttcttttggtcacccaccactggccccatggctgccgtgcagatggatcctgagctagccaagcgcctcttctttgaaggggccactgtggtcatcctgaacatgcccaagggaacagagtttgggattgactataactcctgggaggtcgggcccaagttccggggcgtgaagatgatccctccaggcatccacttcctccactacagctctgtggacaaggctaatccgaaggaagtaggccctcgtatgggtttcttccttagcctgcaccagcgggggctgacagtgctgcgctggagcacactcagggaagaggtagacctgtccccagccccagagtctgaggtggaggccatgagggccaacctccaggagctggaccagttcctggggccttacccatatgccaccctgaagaagtggatctcactcaccaacttcatcagcgaagccacagtggagaagctacagcccgagaatcgacagatctgtgccttttccgatgtgctacctgtgctctccatgaagcacaccaaggaccgcgtggggcagaatctaccccgctgtggcattgagtgcaaaagctaccaagagggcctggcccggctaccagagatgaagcccagagccgggacagagatccgcttctcagagctgcccacgcagatgttcccagagggtgccacgccagctgagataaccaagcacagcatggacctgagctatgccctggagactgtgctcaacaagcagttccccagcagcccccaggatgtgcttggtgaactccagtttgcttttgtgtgcttcctgctggggaatgtgtacgaggcatttgagcattggaagcggctcctgaacctcctgtgccggtcagaagcagccatgatgaagcaccacaccctctacatcaacctcatctccatcctgtaccaccagcttggtgagatccccgctgacttcttcgtagacattgtctcccaagacaacttcctcaccagcaccttacaggttttcttttcctctgcctgcagcattgccgtggatgccaccctgagaaagaaagctgaaaagttccaagctcacctgaccaagaagttccggtgggactttgctgcggaacctgaggactgtgccccggtggtggtggagctccctgagggcatcgagatgggctaactcggggagcgctctcagctgcgaggggccccttcccacagggctgcagtcctggcctctccatttacttcttcccatcctgggacctgccagggcagcaatctctccaggtcctgcaaagatggagccagaattccctttttcactgataaatatatttcttcattgccaaagaggctgtacccatcctgaaggcacatttgtgggttccccatcagccaggccttggtgctaacctggctgaatttcacacaggctcttacacacacacgctcctaggagacatctgcctacacggcaaccatatttcctctgaatgagaaggaattgaaccaaaagtccaagaaagaactgattgcttgttccataggagcttaggaaacaagaaaccctggattgcccagggggtctgagaagttggttggtgactttttttgcggttaaatgaagggtgatggggagatcagcccgaattgccgcctgcctcttgctaaataggagcagaggacttggcctgcagctccttgggagcccttgattgggaagagagtttcaagggaggcagctggattcaatctagcaggtggtcagcttcagctttctccatcgaaatcccattctcctgtccagaggcccagtgggtcatctcccaaggtgggtgtggaccctggcctcagaggccttgctggtgctgtcacctcccacctgttccattccgaggcctcacccagaagtgggaccctccccttcctcaccagagccaccgtgactgtttctgatgacctggagagtcaacaacaaccagaaaggtttctgcccagagcaggcttcttaaggcctttacgaagttttgtgccttccaagtgctgaagaagacctggtcagcctaaatcttcccagtcccgctgtggagctgtcagtcaccggagtaatgagctcctggttcctcgggagtccttcgtgctgtgtggcagggttcctctctagacaagtacacaggccctgccaccctgacatcaaactgttgtactatgatcacagtccctgtgccatccttttccaagactggggctcacaccatgtttttgaatgagaatccctgctggttgagacttttgcttccacttgtttccttggagatgtttttccaagagcataatgtacattaaagtcttcgagttgagaccaaaaaaaaaaaaaaaaaaaaaaaaaaaaaaaaaa

SEQ ID NO: 231 - DNA, 1590 bp, Homo sapiens
ggatttcgcgggaaatcccggaagtgacagctttgggggtttgctgctggctctgactcccgtcctgcgatgggttgcgacgggggaacaatccccaagaggcatgaactggtgaaggggccgaagaaggttgagaaggtcgacaaagatgctgaattagtggcccaatggaactattgtactctaagtcaggaaatattaagacgaccaatagttgcctgtgaacttggcagactttataacaaagatgccgtcattgaatttctcttggacaaatctgcagaaaaggctcttgggaaggcagcatctcacattaaaagcattaagaatgtgacagagctgaagctttctgataatcctgcctgggaaggggataaaggaaacactaaaggtgacaagcacgatgacctccagcgggcgcgtttcatctgccccgttgtgggcctggagatgaacggccgacacaggttctgcttccttcggtgctgcggctgtgtgttttctgagcgagccttgaaagagataaaagcggaagtttgccacacgtgtggggctgccttccaggaggatgatgtcatcgtgctcaatggcaccaaggaggatgtggacgtgctgaagacaaggatggaggagagaaggctgagagcgaagctggaaaagaaaccaaagaaacccaaggcagcagagtctgcttcaaaaccagatgtcagtgaagaagccccagggccatcaaaagttaagacagggaagcctgaagaagccagccttgattctagagagaagaaaaccaacttggctcccaaaagcacagcaatgaatgagagctcttctggaaaagctgggaagcctccgtgtggagccacaaagaggtccatcgctgacagtgaagaatcggaggcctacaagtccctctttaccactcacagctccgccaagcgctccaaggaggagtctgcccactgggtcacccacacgtcctactgcttctgaagcccgcactgccaccgctcctgccccagaaggttgtttagtttccacgtaggcaggtcgctttgtgcctctgagtgcgctgctgtgtgttctctctatagttctgtgtcataaagctgtcctgggccagccttcaagctgggtgttggccactcttgatgtgaggcgtgtcggttccaggggggacatgggaggggctgcacagtggcccgaggtcatgcttgcttccacctgcaggtgcatttggtcctttccatggccaggaagccctgtgggctgcactttttatgcttgcagtaacaagagactccagagtcctcaccggtgcagagttggcacatattaattaactaaaattctaatgatcttgctaccagcaataaatcaagtaggccaagtgaaactgggctttaaaaaggatggatttcaaatacactgtgcccactagaagcttcgaagggcctcgtccctctgctacagccctgggaggagccaggatccttgttggtctagctaaatactgttaggggagtgtgccccatctcatcatttcgaagatagcagagtcatagttgggcacccagtgattgggttcaaaaa

SEQ ID NO: 232 - DNA, 3895 bp, Homo sapiens
aggctcgagcggtcaaagctctttccgggggcccggggaactactctccttgcctcgctctgtctccttcgaagtgctctgcgcgaggttcagagcggccgccgcctccaaagggacggttttctagagctccgacgcctctcggtgcccctctgctccggcccttgccctttgacctcgctctcgcggcagggtgagaggtcgggtggccatcttgtggcggcggcgcgggcggctgttactgcggagacccatcccctcccccttctcgcacccctggcagtctgtcagtcggtaaaaagtcccgcagcctgtcaggtgaggccccggcctcgtgccgtcgctcttcccgccgcactgggcggcccaggccgctccctgccgggcctcactgccgccaccatgtcctccttctctgagtcggcgctggagaagaagctctcggagctgagcaactctcagcagagcgtgcagaccctgtccctttggctcatccaccaccgcaagcacgcgggacccatcgtctccgtgtggcaccgcgagctccgcaaagccaaatcaaatagaaagcttacttttctgtatttagcgaatgatgtcatccaaaacagtaaaaggaaaggacctgaattcactagagaatttgaatctgtccttgtggatgctttttctcatgttgccagagaggcagatgaaggctgtaaaaaacctttagaaagattgctgaacatctggcaagaacgaagtgtgtatggcggcgagttcatacagcagctgaagctgtctatggaggactccaagagccctccccccaaagcaacagaagagaagaaatctctgaaacgaacttttcagcaaattcaggaggaggaggatgacgactaccctggcagctactctcctcaggatccttctgcaggacccctcttgactgaggaactaatcaaagctttgcaggatctggaaaatgccgcatcaggggatgctactgtccgacagaaaattgcttctctgccccaggaagtgcaagatgtttctctattggaaaaaataacagacaaagaggcagctgaacgtctttcaaaaacagtagatgaagcatgtctgttactagcagaatataacgggcgcctggcagcagaactggaggaccgtcgccagctggctcggatgttggtggagtatacccagaatcagaaagatgttttgtcggagaaggagaaaaaactagaggaatacaaacagaagcttgcacgagtaacccaggtccgcaaggaactgaaatcccatattcagagcttgccagacctctcactgctgcccaacgtcacagggggcttagcccccctgccctctgctggggacctgttttcaactgactaggatgggtgtcatgtcccagatttctgtttgtaccagcagaaagaagagggcaagtcatggttggaaataaccttctagcccctggttctatcccttcttccgcccagccccccagcctcaagaaagaacctcagactctgattctcctcttcagcctctcatcttgagcacagttcagaacagtggcgactggaatctggtttatattcatatttgcaaagactacagactttttctcccacttcatattttcatgcccccctgttggttttccattcttaactgtctccttatacctaagaagttatgaaaatcatgtgtacttctggaagctttcgaaagaatcttgtccctcatgacagcattttatcatgaaagcagcttctcctttctgggctgggcttgttcaagttcggtgtgggcttccactaaggcacttgtcctggagacgttggctttcccagctgcatctgccccaaaaggttgtaggcacagctgtcgtagcgttgccataaagagtttgccaaatctctgatcctccctttccattgcttctcctagtgatgcacgaagattaggtgcatttattttgtaaacagattggagaatctagcaataagattcaaagctaatctggagcataaaggcacagttcagagacagaataacagggatcacaagcatgaattaaaaggaatttatttgcttcaagttcctagatacaaccttcccatgctgcacttctccactgtcggagcacgttccgaaaaacagaatgccttgatccctggtgggtgcgaaggcagttgttagggatggcaggcattggtgggctccaaaagatgaaggccccacacacaggtgtgctgcatttgggatctgtgtgggtgtttcttggaccctttcttctgggagtagggtacacactaacgtttaatccgctgtctgggtgcatgtccacagtacggtggctaaactcgaacatcactgcaaataggacgctgagcaggtccgtctgtcatgtcacgccactgcacaggtccttgtccccacacgacggggagtacttgcgtcagatgttattgaatagctcgtctcgggcaggggaagcggggagttggggatattaattgggggttttaattctattatcatgtcagctgacattatgactatataatgtagttagagacaatttttatcttgcttatagtaaaggttcagcctgccaattgtaaatcattctaatttggcaggcttatttttgacattggaaagggcagaaagcgatttgccccagtagtgtaataggagttatagaccagaggctgaaacccaaactatataaaaaggaattcagtggagggggctttgtaatctccattaatttgtgttgctacttccaggatcaccaaaaattacatgtaattttacatgttaaacacattgaaacataacctatgtttataaagcataacgggcttcccttccagaagctctcctgcttgtcatgaagtgagaacaatgaaaagtcatagcagatactcagtttaactctgtgtagaacctagtagtgtttgagctgttattcagatttgaattcagactgtgtgttgtttgcttatggacactgcctgtcgttctgtcactgttaaattaatgagtctataaggtttttcttccagaggccataggtgacatcactaaaattgcaagataaattgtaatctttgctgctgctgcactccccaacctctcccccaccccccgtggtgtgctgctttctagatgagcgtgttttggagcaggcccatctgggacactctatgctttcaccaaggaagtgcgatctgagcagccacaatccagccaaaagaggatcgtagatatttgctctgatcaactagatgaaaatatagcagaatggatttagcccactgctctgttttatccaactgagtctctgaccagcaattggtgcataattattacagcaaaagttaagaaatgaaactgtagcaattatgtaaatgaatgtgttggcctcttaatacctgttactagtggacttcctgtgaggaagttagttttttgttttgatgaaatgctttcgttttttaaatcttaattctgctgtccacatcctcccaaagtgtgcttacttcatttgtttaatttaaatgaactttcctccttgtatgtatgaggtgacttggtgggtggggtgggtggtttttgtttttgtgttttttctttcttagggcatctgtaggcctcaaaggacctttcctttaggtcatattcctcagaaagtcttcaatcttcccttgtttttgtttgtttgtttttcttaaagaatattttcaaagcttaaatttgtatattaatttaggactatttagaagtataggctgtcgttggcggcagcagtatattctgaaatgtctcatagatatatatttttgaataaagatggtgttgttgaacaaaaaaaaaaaaaaaaaaaaaaaaa

SEQ ID NO: 233 - DNA, 1270 bp, Homo sapiens
ttggtacccctccctggcgtcagaaagaagccaaacaaggagctttctgcagaatgaaacctttcctttcagaagcactgctgacagtttggtggttgccattggggcagtgagccttttgtccattctgaggttgggctggtttctcctcttggccgtgccctacagaccataaaggaaatcagctagaagtccccagaaacatccacagatggccctggacatcagccacattctgagaaacatgtcatgttctgggaggtctaaggcatcaatgcatgggcgctgtccaacctctggtgctgaagcagccaagagacgcaagcctgcgtggctgcctcttaggatatgacagcacagccactggcctctactgaatcctatgcaacctcagaagacacccaggagtgatgccatcatgtggtgcaagagttctgagggaccacaatcctgaagacattgaatggctgtgttcctgctcattgctggaggtactgtcagggtccctgtcctcaacccctggtctgacacttgcagatcaggcaggacattctggaggaatcatgcccttggaaggatccctgaggagtgactgttgttagattaaaaaacagtggcaaagagcaatacagagagttgccaaaattcacaccgctggtccaggtttgaagcaagcagtctgtacctgcagtccttgtctgtaaccatggcaccctggcttctcacacatctcatcgtggagttccaccatgtgtcaggcatggcactgagcaccttcttttaagaatataatttgtaattatgtagattattaattctacttcaaaatgccacacagccttcatgtgataaaatgaaacaattgctcaactgatctcctgggatctctactaagatgttggcagcccggccagctggtctggccctggacgtgccttcatggtctggttatgcttcatgacctgcactgtggtcagtgccattttgcagactctgatcacagtgaaacgttccatgggaacttgggccatgagaaacatccttcctaaccacgtgactgcagaaacatccttatcgcgtcctcctgggcaaaggcccaacagcctgactgcagggacatccttgccatatcctgctgggcagcaagctctaccacccagatccctccctcccagtcccatgattaccccagcctgtgagtggcagttggtgctggcactaagctggtttcctcctccccagggttttgctggcaataaagatgttgctg

SEQ ID NO: 234 - DNA, 534 bp, Homo sapiens
gagcttccgcagagatcctgcagatgtgattcgagtcttccagcaacaccacctcactctgctttgcacaatcactccacctccccacatgttgcggagattctcctggggattcacactcttcctacttgcagctgtgacacgggaaacatcctccaccaggtcttctctcacagtgtggcctctgcgcacaggttatccacctgtagacctggacgggaccctcgaggctccctactctgaccatctggttttatagttgaggaaccagaagccgaggcagggtctcgacggtgaagaagcaggctgtttccatcttcaggatacaagccatctgcgcataggaagagggtccagaggctcatctggaatccctcctcactcactggacggaggacctgaccccgttcccatcattggttctgaatccatcagcccagcaagacaggtgtctccagcaagttctgtaaaatacaaccatagccgggcctggagtcagccccaataaagggttcaccatgaaaaaaaaaaaaa

SEQ ID NO: 235 - DNA, 1451 bp, Homo sapiens
cagccaactgctcctgcgccgggcggggtcgtcgccgccagcggctccgagcgccggaagggccaggtcgcagggctcctggagctgcaggcggcgggaggggctacaaatgcttgactcagtgatgcagaacctttcagagttagctggaagccacagccctgcctcttgatgcagcctggatccagccggtgtgaagaggagaccccttccctcttgtggggtttggatcctgtgtttctagcctttgcaaaactctacatcagggatatcctggacatgaaggagtcccgccaggtgccaggtgtatttttgtacaatggacatccaataaaacaggtagatgtcttgggaactgtcattggagtgagagaaagagatgctttctacagttatggagtggatgacagcactggagttataaactgcatctgctggaaaaagttgaatactgagtctgtatcagctgctcctagtgcagcaagagagctcagcttaacctcacaacttaagaagctacaagagaccattgagcagaaaacaaagatagagatcggggacacgatccgagtcagaggcagtatccgcacatacagagaagagcgagagattcatgccaccgcttactataaagtggacgacccagtgtggaacattcaaattgcaaggatgcttgagctgcccactatctacaggaaagtttatgaccagccttttcacagctcagccctagagaaagaagaggcactaagcaatccaggcgccctggacctccccagtctcacgagtttgctgagtgaaaaagccaaagaattcctcatggagaacagagtgcagagcttttaccagcaggagctggaaatggtggagtctttgctgtcccttgccaatcagcctgtgattcacagtgcctgctccgaccaagtgaattttaagaaggacaccacttccaaggcaattcatagtatatttaagaatgctatacaactgctgcaggaaaaaggacttgttttccagaaagatgatggttttgataacctatactatgtaaccagagaagacaaagacctgcacagaaagatccaccggatcattcagcaggactgccagaaaccaaatcacatggagaagggctgtcacttcctgcacatcttggcctgtgctcgcctgagcatccgcccgggcctgagcgaggctgtgctgcagcaagttctggagctcctggaggaccagagtgacattgtcagcacaatggagcactactacacagcgttctgagcagagacacgcagaccagctgaggaggacaaagataaggtggcattcacccccaggctctgactttcagcatcatgcaggggcttatctgtctggaggcagttacctcataataaactataaaatatagtcatcttgggaaaaaaaaaaaaaaaaaaaaaaaaaaaaaaaaa

SEQ ID NO: 236 - DNA, 1562 bp, Homo sapiens
ggagcgagaggcgctagctgccagctccagcagcccagatcgcgcagtatttctgcgtggcaccggtgcggatgcggctgtaaagcagtggtcaccgcctccgggagcccacttctatgtggagaggggagcacccagagagggtcttagggtgaaatttcaattttggcatatcactcagtgggtactgttgtgaccatggctgtgttaacactccctcccgaggagacttccctgccacaggcgctggagtcctcccatggcttcacagaagcagatggaggtagtgaccaaaggaactgggttccggcgccgccccaagaccatcacttacaccccggggacctgcgagctgttcagagtgatgatgaaggaatccaaactgacgaacatccagcagcgccacatcatggacatcatgaaaagaggagatgctttgcccctacagtgcagcccaacatccagccagagagtcttaccttccaagcaaatagcctcgcccatctacctgcctcccatcctcgcagcccgtccccacctccggcctgccaacatgtgtcaagccaatggggcctacagccgggagcagttcaagcctcaagccaccagggatttggagaaggagaaacaaagactccaaaatatctttgccacggggaaggacatggaggaacggaaaagaaaggcccctcctgcacgacagaaggctccagcccctgagctagaccgatttgaagagctggtgaaggaaatccaggagaggaaagaattcctggctgacatggaggccctgggacagggcaaacagtaccgaggaatcatccttgctgaaatctcccagaaactccgggaaatggaagacattgaccacagaaggagtgaggaacttaggaagggtcttgccaccacttaatctgtctccagagacgggcagggtagcccaagctcgaccactggagtccactcctctgccaggcagggccatcctcaggccagcccatcctaccagccttctgccacgtcaggtggtggcatagcactgccctgcagtaccccaaggcatactcagcagcctagcccctgccccggaatgcagatggagcctctgagactcacagccccgtccgcagagaagcaaagcccgagcatccctactaggacatgtgtctaaaggtatccactgggcctgcttcccaccacttctgacctgtggcctgttcatttagttttctgaattcaggaatgaatatgattcctttcttcctgttttaggatttacttatttgatttcttaccgccttaggcaagtattcaaccacaatgattaactggccaataaaacatatttaacgtgggtcattacaagcaccattttgttttcagagggataagcttatttgttcaaggcattagactttgtcaagcccagatggtttctagctacctgtttgcatatttcaagtggcaacgggaaccaacctcttgggcaccccatggctggctgctgtggcgggtgctgaattccactctgttaatgatctcaataaacctctgcaacggtt

SEQ ID NO: 237 - DNA, 1738 bp, Homo sapiens
tgctgactaatccgcgggccgcggggaatgggtggcgcgccagccggtcggcaggggtcacgcggccgggtgtgcgcggaatggattcagggttctcgggtcgcgcccgggagctagagtcctgactcccagccggggtccccgaccggcctttcggggttgccgggcgcgctctgcaaaggggaaactgaggcccaaggaaattgagtatctctgcaaagtcaccagctgagttcgaaccagacagatcctgggaccccctactctatccgccaccggaagaatctccgtccttgtctttccattctgccctcccggcttcccagtaagcacacagccccaggaccacccttgaccgtcctcaaccaagcgatgcatgccaggggcccccatggccaactgtccccagcactgcctctggcctcctcagtcctgatgctgctgatgagcaccctgtggctggtgggggccggccccggcctggtcctggccccggagctgttgctggacccctggcaggtgcaccggctgctgacccatgccctgggccacacggccctgccaggcctgctcctgagcctgctgctcctgcccactgtgggctggcagcaggagtgccacctgggcacgctgagattcctgcatgcctcagccctgctcgccctggcttctgggctgctggcagtgctgctggcaggccttgggctgtccagtgcagccggcagctgtggatacatgcctgtccacctggccatgctggctggggagggacaccgccctagacggccccgtggggcactgccaccgtggctgtcgccgtggctgctgcttgccctgaccccactgctcagctctgagccacccttcctgcagctcctttgcggcctccttgccggcctggcctatgcagctggggccttccggtggctggaaccctcagagcgacggctgcaggtgctgcaggagggcgtcttgtgcaggaccttggcggggtgctggcccctgaggctccttgccaccccgggtagcctggcggagctgcctgtcacccatcctgccggagtgaggcctcccatccctggaccgccttatgtggcctcccctgacctctggtcccactgggaagactcagccctgcccccaccaagcctgaggcctgtgcagcccacctgggagggctcctcagaggcaggcctggactgggctggggccagcttctccccagggactccgatgtgggcggccttggatgagcagatgctgcaggagggcatccaggcctcgcttcttgacgggccagcccaggaaccccagagcgcaccatggctgtccaagtcctctgtctcctctctgcggctgcagcagctggagcgcatgggcttccctacggagcaggcggtggtggcactggcagccacaggccgtgtggagggtgccgtgtcactgttggttggaggacaagtgggcactgagaccctggtgacccatggaaagggtgggcctgcccactccgagggtcctgggcctccctagcccaggcagagagtggggcacaggcaggcccttgggtgctaagggctgggctgcatgtgggtagcccgagctcctactctgtctaaagagggccacagtggggagcaggggcacctctggaggcaggagaggccccccagcatgctgccctagtacgtgtttagaataaaaaccagtttgtttttcaacctggacctccttggag

SEQ ID NO: 238 - DNA, 3680 bp, Homo sapiens
gcggttgtggctcaggggtcagctcctgctagtgccaggacactactgggaggctgggacccgaccaaagcccatggtgtctctggcctgagaacaaggtgtcttgggaccataaggccaggccaccaatggccattgggtcataggggctcagccccaatctttgtctttccctggctccttctgattcagtcccatcagggccctggatcccaagactcagcatccaaggtcccctccaggaatcctggcagctcagcatactttatcctgtttcatctgagagcaaaaatgtaaaattggatgcacagaaaagtgactcaaagtgcttaatgactagaagaaatctaggagcagcaagaaggtaatgtggagggagggacctccatgaccggtgtctgcagagccaggggtacaggcacccagtgctgtggcctggcaccacctgcctctcagagggtgggtggcacactccttaaccagaggacagcaggcctggtcaccagcttttctacctgtccctgtaagcatcacattgctggaggaaaatctcatgccagagcttggaccatccctagctcaggggttaggggttgtcccttggtgacctaaatgaaaaaacaggtccagaacagagttcctgatgctggacactcattcagtctttgaatcgtgggaggggaggcctggtactaggtagacctaacctctttgaggaaccacagagcccaaggctggaaatctccagaatcctccaccccctgatcctccctggggacccctgtggcctgtctcactgagaactcttccatctgtagatgtctgggctgctgtacaagggagtcccctttcaggtgtggtgctagacatggtcactcctgctggatgtctaggtggtagaaaccaaggacctagggaaataccaggtacagcctttccccgctcatccagagcaggacaaacaggccaggcggtgtcaggagcccaggtctccagctggagggaacgtcaaccctgcggtgggagcaggggccctttgcacatcctaggcacagatggtaatgtagacaccacaggtaagctgggcttggtacctacccctccccggattcagaaagaaaccaaacaaggagctttgtgcggaatgaaacctcctttcctcccagaagcactgctgactgtttggtggttgccatttgtggcagtgagcctttgtttgttctgaggttgggctggtttctcctcttggtcctgccctacagatcataaaggagaacagcaagaggtccccagcaaacatccacagatggccttggaacctcaccctgcaggaatgccagtgaacatactgctgacatcttggagctcagtaccctcatagtgtaacggcgtcagtagatctgcctgtgcttggacttcctgtactacccattcctgaggggcgatgcttctgcagggcctgtgacttggtgcacaacttcagacaccatcatcttgcagcagcaccgcaccctcactagccagggtgttgatgacttcctcaaggccaaggccacattcaaggcttcggactttattgatgcgcttgtgctgagcaaggtggcttctccaggatcttaattcaggaggtagaatggagcttgagatcaagtgtctgatcaagcctcagtgtatgggcgctgttcatcctctggtgctgaagcagccaagagacccaagtctgcctggctgcctcttaggatatgacagcagagccagtggcctctactagatcctgtacaacctcacaaaacacccagacatcgggagtgctgccagcctgtgatgcaagagtcctaatcctgaagacattgaatgacctgtcattctgctgtttttaccaaaaaggatcatgaggatcagagaggaaaagtcacttgcccaaaatcacacagctgaacagtggtggagttcaactttgaccatgggctgtctggccccaaggtgtatgcttgcttctctcccaagagactcctttcttatcaggctcaaatgaatgaaaggaggatgttaaagttcctagaagctttaattgaatgaaagttcctagtagatctgtacctactaaaaaccacacttctgaagctacgtggccaccagaagacacagctagtctgccatgtaaaaaaggaaaggtggcgtgtgccctgaaggcgcaggggtgagaggcagggaaatggagacccccacagccagcatcagtggccctcatcacagccctccaggagatatcaaaggagacaacgccattattgacgagatcactcccaagcggattggagattgtcccaatacttagacctatagcaaggccttgggagaaatggtggtgcagcaggagagcaggaacctaaccattgccatcctaaggccctccattgtgcggagcaacgtcgcaccagcttttcctgggttgggttgataatctaaatggatgtagccgactcattattgcggctgggaaagggtttcttctgtccataaaagctactccaatggctgtgggagacttaattccaattccaggtgatacagccgtcaatctcccactagctgtaggatggtgtgtgtgctgcagttcacagggcaaaggagatagaagtggatgaaatgagagaattttctttaattgaactctggttaatgccaaaagtgttcaatcactatgtgtggggaagtttcctggtacaaaggaaaaaaaaacaacctaagtcagtgttagtctaccactgtacatctggtaacctcaatccctgcaaccggggcaaaatgggtttccaggtcttggcaacctttgaaattccaattccatttgagagagctttgacgaggccatatgctgatttcaccaccagcaacttcagaacccagtactggaatgccatcagccagcaggcccctgccatcatctatgacttctatctgtggctcactggaaggaaacccagctaccgaaggaagataccctcatcaacccaattttacaaatggagaaatagaagttaagggaagaatctgaagtagtctcaaaggcagtgacaggaaggatgtggagaaagctgagtgtcaaagtcagtattcaggaccggctttactgctactttgagatgaatgaagaaatcagagggaacgcagtgtgctgatgctaaagcagctgtcaccacccagctgtgtgacataggacatattctttctctgtctcacttgactaatatgatatgtcagaggagacatgattgtaattgcctaaagcaattcttgtgatcaagactcagaagcacgaacagtattgccctctgtgttagcccctttataagggaggatatcatcttcagcatgctgaattgtcatctttcttagcagtgcaaatgactaaaacttagccaatgtagagtttgtccaaatttggagctcataactcagttcttgagcaaagtgaaaagaaaacattgtgattatggggaaaatatttgatgggacttatcaaataaagataggaaaagaagaaaacccaaatattataggcagaaatgctaaaggttttaaaatatgtcaggattggaagaaggcatggataaagaacaaagttcagttaggaaagagaaacacagaaggaagagacacaataaaagtcattatgt

SEQ ID NO: 239 - DNA, 2614 bp, Homo sapiens
cgtgacgctcgtccgcaacctctgctgtcctccgcggcgcccccttccgcctgacgcgcccccggcggcggccgcgcagccctggctcctcgcgggctcgggcggcggctgcggcggggctatggcgagcggcggtggcgggggtaacactggcgcgggtggggggccggggatgggcctgagcctgggcctgggtctgggtctgagcctaggcatgagtgaggccaccagtgaggcagaggaggaggcggccacggccgaggcggtgggacgcctggccacgacgctgtggctgcggctccgcggctgggaggcggtgctggcggcggcgcagcggttgctggtgtgggagaagccgctgcacagcctggtcacggcggccgcgctcaacggcctcttctggttgctgtcttcctcgtccctccggcccttcttcctactcagcgtctcacttttggcctattttctgctggatctctggcagcctcgctttctccctgacgtttcagcatcatccccagaggagccacactctgacagtgagggtgcggggtcaggcgcccggccgcacctgctgagtgtgcccgagttgtgcagatacctggctgagagctggctcaccttccagattcacctgcaggagctgctgcagtacaagaggcagaatccagctcagttctgcgttcgagtctgctctggctgtgctgtgttggctgtgttgggacactatgttccagggattatgatttcctacattgtcttgttgagtatcctgctgtggcccctggtggtttatcatgagctgatccagaggatgtacactcgcctggagcccctgctcatgcagctggactacagcatgaaggcagaagccaatgccctgcatcacaaacacgacaagaggaagcgtcaggggaagaatgcacccccaggaggtgatgagccactggcagagacagagagtgaaagcgaggcagagctggctggcttctccccagtggtggatgtgaagaaaacagcattggccttggccattacagactcagagctgtcagatgaggaggcttctatcttggagagtggtggcttctccgtatcccgggccacaactccgcagctgactgatgtctccggggatttggaccagcagagcctgccaagtgaaccagaggagaccctaagccgggacctaggggagggagaggagggagagctggcccctcccgaagacctactaggccgtcctcaagctctgtcaaggcaagccctggactcggaggaagaggaagaggatgtggcagctaaggaaaccttgttgcggctctcatcccccctccactttgtgaacacgcacttcaatggggcagggtccccccaagatggagtgaaatgctcccctggaggaccagtggagacactgagccccgagacagtgagtggtggcctcactgctctgcccggcaccctgtcacctccactctgccttgttggaagtgacccagccccctccccttccattctcccacctgttccccaggactcaccccagcccctgcctgcccctgaggaagaagaggcactcaccactgaggactttgagttgctggatcagggggagctggagcagctgaatgcagagctgggcttggagccagagacaccgccaaaaccccctgatgctccacccctggggcccgacatccattctctggtacagtcagaccaagaagctcaggccgtggcagagccatgagccagccgttgaggaaggagctgcaggcacagtagggcttcttggctaggagtgttgctgtttcctcctttgcctaccactctggggtggggcagtgtgtggggaagctggctgtcggatggtagctattccaccctctgcctgcctgcctgcctgctgtcctgggcatggtgcagtacctgtgcctaggattggttttaaatttgtaaataattttccatttgggttagtggatgtgaacagggctagggaagtccttcccacagcctgcgcttgcctccctgcctcatctctattctcattccactatgccccaagccctggtggtctggccctttctttttcctcctatcctcagggacctgtgctgctctgccctcatgtcccacttggttgtttagttgaggcactttataatttttctcttgtcttgtgttcctttctgctttatttccctgctgtgtcctgtccttagcagctcaaccccatcctttgccagctcctcctatcccgtgggcactggccaagctttagggaggctcctggtctgggaagtaaagagtaaacctggggcagtgggtcaggccagtagttacactcttaggtcactgtagtctgtgtaaccttcactgcatccttgccccattcagcccggcctttcatgatgcaggagagcagggatcccgcagtacatggcgccagcactggagttggtgagcatgtgctctctcttgagattaggagcttccttactgctcctctgggtgatccaagtgtagtgggaccccctactagggttaggaagtggacactaacatctgtgcaggtgttgacttgaaaaataaagtgttgattggctag

SEQ ID NO: 240 - DNA, 2297 bp, Homo sapiens
aatgcgcacgccgtgggcgggccccgagccggaattgggggtgaagcgatagcgttttgcccgcattcggggcgcgcggagctggggggtccctgtggggctcccggagttaagatggcgtcctcagcggagggggacgaggggactgtggtggcgctggcgggggttctgcagtcgggtttccaggagctgagccttaacaagttggcgacgtccctgggcgcgtcagaacaggcgctgcggctgatcatctccatcttcctgggttacccctttgctttgttttatcggcattaccttttctacaaggagacctacctcatccacctcttccatacctttacaggcctctcaattgcttattttaactttggaaaccagctctaccactccctgctgtgtattgtgcttcagttcctcatccttcgactaatgggccgcaccatcactgccgtcctcactaccttttgcttccagatggcctaccttctggctggatactattacactgccaccggcaactacgatatcaagtggacaatgccacattgtgttctgactttgaagctgattggtttggctgttgactactttgacggagggaaagatcagaattccttgtcctctgagcaacagaaatatgccatacgtggtgttccttccctgctggaagttgctggtttctcctacttctatggggccttcttggtagggccccagttctcaatgaatcactacatgaagctggtgcagggagagctgattgacataccaggaaagataccaaacagcatcattcctgctctcaagcgcctgagtctgggccttttctacctagtgggctacacactgctcagcccccacatcacagaagactatctcctcactgaagactatgacaaccaccccttctggttccgctgcatgtacatgctgatctggggcaagtttgtgctgtacaaatatgtcacctgttggctggtcacagaaggagtatgcattttgacgggcctgggcttcaatggctttgaagaaaagggcaaggcaaagtgggatgcctgtgccaacatgaaggtgtggctctttgaaacaaacccccgcttcactggcaccattgcctcattcaacatcaacaccaacgcctgggtggcccgctacatcttcaaacgactcaagttccttggaaataaagaactctctcagggtctctcgttgctattcctggccctctggcacggcctgcactcaggatacctggtctgcttccagatggaattcctcattgttattgtggaaagacaggctgccaggctcattcaagagagccccaccctgagcaagctggccgccattactgtcctccagcccttctactatttggtgcaacagaccatccactggctcttcatgggttactccatgactgccttctgcctcttcacgtgggacaaatggcttaaggtgtataaatccatctatttccttggccacatcttcttcctgagcctactattcatattgccttatattcacaaagcaatggtgccaaggaaagagaagttaaagaagatggaataatccatttccctggtggcctgtgcgggactggtgcagaaactactcgtctcccttttcacagcactcctttgccccagagcagagaatggaaaagccagggaggtggaagatcgatgcttccagctgtgcctctgctgccagccaagtcttcatttggggccaaaggggaaacttttttttggagaaggcgtcttgctttgtcacccacgctggaatgcagtggcgggatctcagctcaccgcaacctccacctcctgggttcaagtgattttcctgcctcagcctcccaagtagctgggaatacaggcacgccaccatgcccagctaatttttgtattttcagtagaaacgggatttcaccacgttggccaggctggtctcgaactcctgaccgcaagtgatccacccgcctccgcctcccaaagtgctgggattacaggcgtgagccaccgtgcccggcccaaaggggaaactcttgtgggaggagcagaggggctcacatctcccctctgattcccccatgcacattgccttatctctccccatctagccaggaatctattgtgtttttcttctgccaatttactatgattgtgtatgtgccgctaccaccaccccccccatgggggggtggagaggggtgcaaggccctgcctgctccactttttctaccttggaactgtattagataaaatcacttctgtttgttcagtttttca

SEQ ID NO: 241 - DNA, 5426 bp, Homo sapiens
agaaggtagcagacagacagacggatctaacctctcttggatcctccagccatgaggctgctctgggggctgatctgggcatccagcttcttcaccttatctctgcagaagcccaggttgctcttgttctctccttctgtggttcatctgggggtccccctatcggtgggggtgcagctccaggatgtgccccgaggacaggtagtgaaaggatcagtgttcctgagaaacccatctcgtaataatgtcccctgctccccaaaggtggacttcacccttagctcagaaagagacttcgcactcctcagtctccaggtgcccttgaaagatgcgaagagctgtggcctccatcaactcctcagaggccctgaggtccagctggtggcccattcgccatggctaaaggactctctgtccagaacgacaaacatccagggtatcaacctgctcttctcctctcgccgggggcacctctttttgcagacggaccagcccatttacaaccctggccagcgggttcggtaccgggtctttgctctggatcagaagatgcgcccgagcactgacaccatcacagtcatggtggagaactctcacggcctccgcgtgcggaagaaggaggtgtacatgccctcgtccatcttccaggatgactttgtgatcccagacatctcagagccagggacctggaagatctcagcccgattctcagatggcctggaatccaacagcagcacccagtttgaggtgaagaaatatgtccttcccaactttgaggtgaagatcacccctggaaagccctacatcctgacggtgccaggccatcttgatgaaatgcagttagacatccaggccaggtacatctatgggaagccagtgcagggggtggcatatgtgcgctttgggctcctagatgaggatggtaagaagactttctttcgggggctggagagtcagaccaagctggtgaatggacagagccacatttccctctcaaaggcagagttccaggacgccctggagaagctgaatatgggcattactgacctccaggggctgcgcctctacgttgctgcagccatcattgagtctccaggtggggagatggaggaggcagagctcacatcctggtattttgtgtcatctcccttctccttggatcttagcaagaccaagcgacaccttgtgcctggggcccccttcctgctgcaggccttggtccgtgagatgtcaggctccccagcttctggcattcctgtcaaagtttctgccacggtgtcttctcctgggtctgttcctgaagtccaggacattcagcaaaacacagacgggagcggccaagtcagcattccaataattatccctcagaccatctcagagctgcagctctcagtatctgcaggctccccacatccagcgatagccaggctcactgtggcagccccaccttcaggaggccccgggtttctgtctattgagcggccggattctcgacctcctcgtgttggggacactctgaacctgaacttgcgagccgtgggcagtggggccaccttttctcattactactacatgatcctatcccgagggcagatcgtgttcatgaatcgagagcccaagaggaccctgacctcggtctcggtgtttgtggaccatcacctggcaccctccttctactttgtggccttctactaccatggagaccacccagtggccaactccctgcgagtggatgtccaggctggggcctgcgagggcaagctggagctcagcgtggacggtgccaagcagtaccggaacggggagtccgtgaagctccacttagaaaccgactccctagccctggtggcgctgggagccttggacacagctctgtatgctgcaggcagcaagtcccacaagcccctcaacatgggcaaggtctttgaagctatgaacagctatgacctcggctgtggtcctgggggtggggacagtgcccttcaggtgttccaggcagcgggcctggccttttctgatggagaccagtggaccttatccagaaagagactaagctgtcccaaggagaagacaacccggaaaaagagaaacgtgaacttccaaaaggcgattaatgagaaattgggtcagtatgcttccccgacagccaagcgctgctgccaggatggggtgacacgtctgcccatgatgcgttcctgcgagcagcgggcagcccgcgtgcagcagccggactgccgggagcccttcctgtcctgctgccaatttgctgagagtctgcgcaagaagagcagggacaagggccaggcgggcctccaacgagccctggagatcctgcaggaggaggacctgattgatgaggatgacattcccgtgcgcagcttcttcccagagaactggctctggagagtggaaacagtggaccgctttcaaatattgacactgtggctccccgactctctgaccacgtgggagatccatggcctgagcctgtccaaaaccaaaggcctatgtgtggccaccccagtccagctccgggtgttccgcgagttccacctgcacctccgcctgcccatgtctgtccgccgctttgagcagctggagctgcggcctgtcctctataactacctggataaaaacctgactgtgagcgtccacgtgtccccagtggaggggctgtgcctggctgggggcggagggctggcccagcaggtgctggtgcctgcgggctctgcccggcctgttgccttctctgtggtgcccacggcagccgccgctgtgtctctgaaggtggtggctcgagggtccttcgaattccctgtgggagatgcggtgtccaaggttctgcagattgagaaggaaggggccatccatagagaggagctggtctatgaactcaaccccttggaccaccgaggccggaccttggaaatacctggcaactctgatcccaatatgatccctgatggggactttaacagctacgtcagggttacagcctcagatccattggacactttaggctctgagggggccttgtcaccaggaggcgtggcctccctcttgaggcttcctcgaggctgtggggagcaaaccatgatctacttggctccgacactggctgcttcccgctacctggacaagacagagcagtggagcacactgcctcccgagaccaaggaccacgccgtggatctgatccagaaaggctacatgcggatccagcagtttcggaaggcggatggttcctatgcggcttggttgtcacgggacagcagcacctggctcacagcctttgtgttgaaggtcctgagtttggcccaggagcaggtaggaggctcgcctgagaaactgcaggagacatctaactggcttctgtcccagcagcaggctgacggctcgttccaggacccctgtccagtgttagacaggagcatgcaggggggtttggtgggcaatgatgagactgtggcactcacagcctttgtgaccatcgcccttcatcatgggctggccgtcttccaggatgagggtgcagagccattgaagcagagagtggaagcctccatctcaaaggcaaactcatttttgggggagaaagcaagtgctgggctcctgggtgcccacgcagctgccatcacggcctatgccctgacactgaccaaggcgcctgtggacctgctcggtgttgcccacaacaacctcatggcaatggcccaggagactggagataacctgtactggggctcagtcactggttctcagagcaatgccgtgtcgcccaccccggctcctcgcaacccatccgaccccatgccccaggccccagccctgtggattgaaaccacagcctacgccctgctgcacctcctgcttcacgagggcaaagcagagatggcagaccaggcttcggcctggctcacccgtcagggcagcttccaagggggattccgcagtacccaagacacggtgattgccctggatgccctgtctgcctactggattgcctcccacaccactgaggagaggggtctcaatgtgactctcagctccacaggccggaatgggttcaagtcccacgcgctgcagctgaacaaccgccagattcgcggcctggaggaggagctgcagttttccttgggcagcaagatcaatgtgaaggtgggaggaaacagcaaaggaaccctgaaggtccttcgtacctacaatgtcctggacatgaagaacacgacctgccaggacctacagatagaagtgacagtcaaaggccacgtcgagtacacgatggaagcaaacgaggactatgaggactatgagtacgatgagcttccagccaaggatgacccagatgcccctctgcagcccgtgacacccctgcagctgtttgagggtcggaggaaccgccgcaggagggaggcgcccaaggtggtggaggagcaggagtccagggtgcactacaccgtgtgcatctggcggaacggcaaggtggggctgtctggcatggccatcgcggacgtcaccctcctgagtggattccacgccctgcgtgctgacctggagaagctgacctccctctctgaccgttacgtgagtcactttgagaccgaggggccccacgtcctgctgtattttgactcggtccccacctcccgggagtgcgtgggctttgaggctgtgcaggaagtgccggtggggctggtgcagccggccagcgcaaccctgtacgactactacaaccccgagcgcagatgttctgtgttttacggggcaccaagtaagagcagactcttggccaccttgtgttctgctgaagtctgccagtgtgctgaggggaagtgccctcgccagcgtcgcgccctggagcggggtctgcaggacgaggatggctacaggatgaagtttgcctgctactacccccgtgtggagtacggcttccaggttaaggttctccgagaagacagcagagctgctttccgcctctttgagaccaagatcacccaagtcctgcacttcaccaaggatgtcaaggccgctgctaatcagatgcgcaacttcctggttcgagcctcctgccgccttcgcttggaacctgggaaagaatatttgatcatgggtctggatggggccacctatgacctcgagggacacccccagtacctgctggactcgaatagctggatcgaggagatgccctctgaacgcctgtgccggagcacccgccagcgggcagcctgtgcccagctcaacgacttcctccaggagtatggcactcaggggtgccaggtgtgagggctgccctcccacctccgctgggaggaacctgaacctgggaaccatgaagctggaagcactgctgtgtccgctttcatgaacacagcctgggaccagggcatattaaaggcttttggcagcaaagtgtcagtgttggc

SEQ ID NO: 242 - DNA, 2256 bp, Homo sapiens
tgaaattcagggactctttggtggagcaattaccagtcaacttcagggtattatgataaactctgatctggggaggaaccaggactacatagatcaaggcagttttcttctttgagaaactatcccagatatcatcatagagtcttctgctcttcctcaactaccaaagaaaaacatcagcgaagcagcaggccatgcaccccccaaaaactccatctggggctcttcatagaaaaaggaaaatggcagcctggcccttctccaggctgtggaaagtctctgatccaattctcttccaaatgaccttgatcgctgctctgttgcctgctgttcttggcaattgtggtcctccacccactttatcatttgctgccccgatggatattacgttgactgagacacgcttcaaaactggaactactctgaaatacacctgcctccctggctacgtcagatcccattcaactcagacgcttacctgtaattctgatggcgaatgggtgtataacaccttctgtatctacaaacgatgcagacacccaggagagttacgtaatgggcaagtagagattaagacagatttatcttttggatcacaaatagaattcagctgttcagaaggatttttcttaattggctcaaccactagtcgttgtgaagtccaagatagaggagttggctggagtcatcctctcccacaatgtgaaattgtcaagtgtaagcctcctccagacatcaggaatggaaggcacagcggtgaagaaaatttctacgcatacggcttttctgtcacctacagctgtgacccccgcttctcactcttgggccatgcctccatttcttgcactgtggagaatgaaacaataggtgtttggagaccaagccctcctacctgtgaaaaaatcacctgtcgcaagccagatgtttcacatggggaaatggtctctggatttggacccatctataattacaaagacactattgtgtttaagtgccaaaaaggttttgttctcagaggcagcagtgtaattcattgtgatgctgatagcaaatggaatccttctcctcctgcttgtgagcccaatagttgtattaatttaccagacattccacatgcttcctgggaaacatatcctaggccgacaaaagaggatgtgtatgttgttgggactgtgttaaggtaccgctgtcatcctggctacaaacccactacagatgagcctacgactgtgatttgtcagaaaaatttgagatggaccccataccaaggatgtgaggcgttatgttgccctgaaccaaagctaaataatggtgaaatcactcaacacaggaaaagtcgtcctgccaatcactgtgtttatttctatggagatgagatttcattttcatgtcatgagaccagtaggttttcagctatatgccaaggagatggcacgtggagtccccgaacaccatcatgtggagacatttgcaattttcctcctaaaattgcccatgggcattataaacaatctagttcatacagctttttcaaagaagagattatatatgaatgtgataaaggctacattctggtcggacaggcgaaactctcctgcagttattcacactggtcagctccagcccctcaatgtaaagctctgtgtcggaaaccagaattagtgaatggaaggttgtctgtggataaggatcagtatgttgagcctgaaaatgtcaccatccaatgtgattctggctatggtgtggttggtccccaaagtatcacttgctctgggaacagaacctggtacccagaggtgcccaagtgtgagtgggagacccccgaaggctgtgaacaagtgctcacaggcaaaagactcatgcagtgtctcccaaacccagaggatgtgaaaatggccctggaggtatataagctgtctctggaaattgaacaactggaactacagagagacagcgcaagacaatccactttggataaagaactataatttttctcaaaagaaggaggaaaaggtgtcttgctggcttgcctcttgcaattcaatacagatcagtttagcaaatctactgtcaatttggcagtgatattcatcataataaatatctagaaatgataatttgctaaagtttagtgctttgagattgtgaaattattaatcatcctctgtgtggctcatgtttttgcttttcaacacacaaagcacaaattttttttcgattaaaaatgtatgtataaaaaactaaaaaaaaaaaaaa

SEQ ID NO: 243 - DNA, 2307 bp, Homo sapiens
ctcgggtcaaatgcgcgcctcggaccctagtgcgcgtgcgcgctggtggctccgcccctttggagctacttcctcatgctgcccgctcgcctaccgttcaggctgctgagccttttccttcgtggatccgctcccacggcagcgcgccatggcctccgggagccgctcctggagaggaggtgcgctgccgcctcctccttccagcactcatcgagtctgggacgcgagcttccttatgaccccgtggacacggagggctttggagaaggtggtgacatgcaggagcgttttctgttcccggagtacatcctggatccggagccgcaacccacccgcgaaaagcagctgcaggagctccagcaacagcaggaggaggaggagcgacagaggcagcagcggcgggaggagcggcgacagcaaaacctacgggccaggtcccgggagcacccggtcgtggggcacccggacccggcattgccgcccagcggcgtgaactgctcgggctgcggggcagagctgcactgccaggacgccggagtgcccggctacctgccccgagagaagttcctccgcacggcggaggcagacggcgggctggcacggaccgtgtgccagcgctgctggctgctgtcgcaccaccggcgcgctctacgcctgcaggtgagccgcgagcagtacctggagctggtgagcgccgcgttgcggcggcccggcccctccctggtgctctacatggtggacctgctggacctgcccgacgccctgctgcccgacttgcccgcgctggtgggccccaagcagctgatcgtgctgggaaacaaagtggacctcctgccccaggatgctcctggctaccggcagaggctgcgggagcgactgtgggaggactgtgcccgcgccgggctcctgctggcccctggccaccaagggccacagcgccccgtcaaggacgagccacaggacggggagaatccgaatccgccgaactggtcccgcacagtggtcagggacgtgcggctgatcagcgccaagaccggctatggagtggaagagttgatctctgcccttcagcgctcctggcgctaccgtggggacgtctacttagtgggcgccaccaacgccggcaaatccactctctttaacacgctcctggagtccgattactgcactgccaagggctccgaggccatcgacagagccaccatctccccttggccaggtactacattaaaccttctgaagtttcctatttgcaacccaactccttacagaatgtttaaaaggcatcaaagacttaaaaaagattcaactcaagctgaagaagatcttagtgagcaagaacaaaatcagcttaatgtcctcaaaaagcatggttatgtcgtaggaagagttggaaggacattcttgtattcagaagaacagaaggataacattccctttgagtttgatgctgattcacttgcctttgacatggaaaatgaccctgttatgggtacacacaaatccaccaaacaagtagaattgactgcacaagatgtgaaagatgcccactggttttatgacacccctggaattacaaaagaaaattgtattttaaatcttctaacagaaaaagaagtaaatattgttttgccaacacagtccattgttccaagaacttttgtgcttaaaccaggaatggttctgtttttgggtgctataggccgcatagatttcctgcagggaaatcagtcagcttggtttacagtcgtggcttccaacatcctccctgtgcatatcacctccttggacagggcagacgctctgtatcagaagcatgcaggtcatacgttactccagattccaatgggtggaaaagaacgaatggcaggatttcctcctcttgttgctgaagacattatgttaaaagaaggactgggggcatctgaagcagtggccgacatcaagttttcctctgcaggttgggtttcagtaacacctaattttaaggacagactgcatctccgaggctatacacctgaaggaacagttttgaccgtccggccccctctcttgccatatattgttaacatcaaaggacagcgcatcaagaaaagtgtggcctataaaaccaagaagcctccttcccttatgtacaacgtgaggaagaagaaaggaaagataaatgtatgagaccgaccttgttcactccagatattaactgtattgaacacaacaaaatacattgaatttgtattaaacatataacgcataaataaagctcccattcttaaaaaaaaaaaaaaaaaaaaaaaaaaaaaaaaaaaa

SEQ ID NO: 244 - DNA, 1613 bp, Homo sapiens
gccacacaggctccttggagtaagagtgtgagaaactggatgaagacagctgtattcttttggaagcgttcgagattggtctgtctctaccaactaaaaacttctagcttaagtgcagagatttaaggagatcaacaaaaactcagtctagacatattatgaggctgggagggtatcaacagacttgagttcttgtcagcaagatcacctgcttttaatattgtcctcagggtctgagcacatctggaagtgaggtcaatcaagttagaccccaaaaacttttgtgacaacagtgaagaggggaaaataaacacaccacaaacatgaacctcaaccccccgacatctgctcttcagatcgagggcaaaggcagccatattatggctagaaatgtaagctgctttctagtcaggcacacccctcatcccagaagagtctgccacatcaaaggcttgaataacattccaatctgtactgtgaatgatgatgagaatgcatttggaacattgtgggaagttggccagtctaactacttagagaagaacaggataccatttgccaattgcagttaccccccgagcactgcagtccagaagagccctgtaagaggaatgtcgccagccccaaacggtgccaaagtgcctccacggcctcattctgagcccagtagaaaaattaaagagtgcttcaaaacttccagtgagaatcccttagtaattaaaaaggaagaaattaaggccaaaagaccaccatcacctccaaaggcatgctctactcctggctcctgttcttcagggatgacaagtaccaagaatgatgtgaaagcaaacaccatttgcataccaaactatctggatcaggaaataaaaatcctggcaaagctctgtagcattttgcatactgattctctggcagaagttttacagtggctgcttcatgcaacttcaaaagaaaaagagtgggtctcagctttgattcattctgagcttgccgagataaacctgttaactcatcacagaagaaacacctcaatggaaccagcagcagagactgggaagccacccacagttaaatcaccacccacagttaaattgcccccaaattttactgcaaaatcaaaagtgctgaccagagatacagaaggggatcaaccaaccagagtgtcaagtcaaggatctgaagaaaacaaggaagtaccaaaagaggctgagcacaagcctccactacttataagaagaaataatatgaaaatacctgttgcagaatatttcagcaaaccaaattctcctcccaggcctaacactcaggagagtggatcagcaaaaccagtgtcagcaaggagtatacaagaatacaacctctgtccccaaagagcatgttatccttcaacacaccggaggtagaagttctagactgggtgaattctttcatgaatatgagcttcacatttacatcatcaaattatttttcaaatgaatatttttggtattgaggaatcaagtggtcctctttatggtggcacatgtaaatctaaaaatacctgtatgtaatgctacaaataaatattactggaaatgatatttccatttgtagttaaaaaaaaaaaaaaaaaa

SEQ ID NO: 245 - DNA, 2939 bp, Homo sapiens
cacgtgtcttagggtagcgcgcgcctgtctctcttcgggtctcgggcccttgggcgcagcggggcgcgcgccatggcgaaggcgaagaaggtcggggcgcgaaggaaggcctccggggcgccggcgggagcgcgagggggcccggcgaaggccaactccaatccgttcgaggtgaaagttaacaggcagaagttccagatcctgggccggaagacgcgccacgacgtgggactgcccggggtgtctcgcgcacgggccctcaggaagcgtacacagactttactaaaagagtacaaagaaagggataaatccaatgtattcagagataaacgcttcggagaatacaacagcaacatgagccccgaggagaagatgatgaagaggtttgctctggaacagcagcgacatcatgagaaaaaaagcatctacaatctaaatgaagatgaagaattgactcattatggccagtctttggcagacatcgagaagcataatgacattgtggacagtgacagcgatgctgaggatcgaggaacgttgtctgctgagctgactgctgcccactttggaggaggcggtgggctccttcacaagaagactcaacaggaaggcgaggagcgggagaaaccgaagtcccggaaagagctgattgaagagctcattgccaagtcaaaacaagagaagagggagagacaagctcaacgagaagatgccctcgagctcacggagaagctagaccaagactggaaagaaattcagactctcctgtcccacaaaactcccaagtcagagaacagagacaaaaaggaaaaacccaagcccgatgcatatgacatgatggttcgcgagcttggctttgaaatgaaggcgcagccctctaacaggatgaagacggaggcagaattggcaaaggaagagcaggagcacctcaggaagctggaggctgagagacttcgaagaatgcttggaaaggatgaggatgaaaatgttaagaaaccaaaacatatgtcagcagatgatctgaatgatggcttcgtgctagataaagatgacaggcgtttgctttcctacaaagatggaaagatgaatgtcgaggaagatgtccaggaagagcaaagcaaggaagccagtgaccctgagagcaacgaggaagaaggtgacagttcaggcggggaggacacagaggagagcgacagcccagatagccacttggacctggaatccaacgtggagagtgaggaagaaaacgagaagccagcaaaagagcagaggcagactcctgggaaagggttgataagcggcaaggaaagagctggaaaagctaccagagacgagctgccctacacgttcgcagcccctgaatcctatgaggaactgagatctctgttgttaggaagatcgatggaagagcagcttttggtggtggagagaattcagaagtgcaaccacccgagtctcgcagaaggaaacaaagcaaaattagaaaaactgtttggctttcttttggaatacgttggcgatttggctacagatgacccaccagacctcacagtcattgataagttggttgtgcacttatatcatctttgccagatgtttcctgaatctgcaagtgacgctatcaaatttgttctccgagatgcgatgcatgagatggaagaaatgattgagaccaaaggccgggcggcattgccagggttggatgtgctcatttatttgaaaatcactgggctgctatttccaacttccgacttctggcacccagtggtgacccctgccctcgtgtgcctcagtcagctgctcaccaagtgccccatcctgtccctccaggacgtggtgaagggcctgttcgtgtgctgcctgttcctggagtatgtggctttgtcccagaggtttatacctgagcttattaattttcttcttgggattctttacatagcaactccaaacaaagcaagccaaggttccactctggtgcaccctttcagagcgcttgggaagaactcggaactgctcgtggtgtctgctagagaggatgtggccacgtggcagcagagcagcctctccctccgctgggcgagtagactgagggccccaacttcgacagaggccaatcacatccgactgtcctgcctggctgtgggcctggccctgctgaagcgctgcgtgctcatgtacgggtccctgccatccttccacgccatcatggggcctctccaagccctcctcacggatcacctggcggactgcagccacccgcaggagctccaggagctgtgtcagagcacactgaccgaaatggaaagccagaagcagctctgccggccgctgacctgtgagaagagcaagcctgtcccactgaagcttttcacaccccggctggtcaaagtcctcgagtttggaagaaaacaaggcagtagtaaggaggaacaggaaaggaagaggctgatccacaaacacaagcgtgaatttaaaggggccgttcgagaaatccgcaaggacaatcagttcctggcgaggatgcaactctcagaaatcatggaacgggatgcggaaagaaagcggaaagtaaagcagctttttaacagcctggctacacaggaaggcgaatggaaggctctgaagaggaaaaagttcaaaaaataaattacattttataaataagctccccccacccgctgcctgcggttttgtttctgttaaaacgtcacctgatgaaatagaatgaatcctgaaatgcacctctgggatcgggaatggtctgtgtgttatcagctgcgactggttcactgcgtctggacaagcctcatggggactggggattctggccagtgtaatttctgtcaaccacggacgtttgccttcatgtgtagaatttactgttgttatgcaaattatattttcaattataaatgaaaaaaaaaaaaaaaaaaaaaaaa

SEQ ID NO: 246 - DNA, 5968 bp, Homo sapiens; identical to SEQ ID NO: 210

SEQ ID NO: 247 - DNA, 3215 bp, Homo sapiens
aacccggggctccgagccggagccgagtctgcgcctgggggaggaccatgcggcagtagcagccatgctgccctttctgctggccacactgggcaccacagccctcaacaacagcaaccccaaggactactgctacagcgcccgcatccgcagcactgtcctgcagggcctgccctttgggggcgtccccaccgtgctggctctcgacttcatgtgcttccttgcactgctgttcttattctctatcctccggaaggtggcctgggactatgggcggctggccttggtgacagatgcagacaggcttcggcggcaggagagggaccgagtggaacaggaatatgtggcttcagctatgcacggggacagccatgaccggtatgagcgtctcacctctgtctccagctccgttgactttgaccaaagggacaatggtttctgttcctggctgacagccatcttcaggataaaggatgatgagatccgggacaaatgtgggggcgatgccgtgcactacctgtcctttcagcggcacatcatcgggctgctggtggttgtgggcgtcctctccgtaggcatcgtgctgcctgtcaacttctcaggggacctgctggagaacaatgcctacagctttgggagaaccaccattgccaacttgaaatcagggaacaacctgctatggctgcacacctccttcgccttcctgtatctgctgctcaccgtctacagcatgcgtagacacacctccaagatgcgctacaaggaggatgatctggtgaagcggaccctcttcatcaatggaatctccaaatatgcagagtcagaaaagatcaagaagcattttgaggaagcctaccccaactgcacagttctcgaagcccgcccgtgttacaacgtggctcgcctaatgttcctcgatgcagagaggaagaaggccgagcggggaaagctgtacttcacaaacctccagagcaaggagaacgtgcctaccatgatcaaccccaagccctgtggccacctctgctgctgtgtggtgcgaggctgtgagcaggtggaggccattgagtactacacaaagctggagcagaagctgaaggaagactacaagcgggagaaggagaaggtgaatgagaagcctcttggcatggcctttgtcaccttccacaatgagactatcaccgccatcatcctgaaggacttcaacgtgtgtaaatgccagggctgcacctgccgtggggagccacgcccctcatcctgcagcgagtccctgcacatctccaactggaccgtgtcctatgcccctgaccctcagaacatctactgggagcacctctccatccgaggcttcatctggtggctgcgctgcctggtcatcaatgtcgtcctcttcatcctcctcttcttcctcaccactccagccatcatcatcaccaccatggacaagttcaacgtcaccaagcctgtggagtacctcaacaaccccatcatcacccagttcttccccaccctgctgctgtggtgcttctcggccctccttcccaccatcgtctactactcagccttctttgaagcccactggacacgctctggggagaacaggacaaccatgcacaagtgctacactttcctcatcttcatggtgctgctcctaccctcgctgggactgagcagcctggacctcttcttccgctggctctttgataagaaattcttggctgaggcagctattcggtttgagtgtgtgttcctgcccgacaacggcgccttcttcgtgaactacgtcattgcctcagcctttatcggcaacgccatggacctgctgcgcatcccaggcctgctcatgtacatgatccggctctgcctggcgcgctcggccgccgagaggcgcaacgtgaagcggcatcaggcctacgagttccagtttggcgcagcctacgcctggatgatgtgcgtcttcacggtggtcatgacctacagtatcacctgccccatcatcgtgcccttcgggctcatgtacatgctgctgaagcacctggtagacaggtacaatctctactacgcctacctgccggccaagctggacaagaagatccactcgggggctgtgaaccaggtggtggccgcgcccatcctctgcctcttctggctgctcttcttttccaccatgcgcacggggttcctagctcccacgtctatgttcacatttgtggtcctggtcatcaccatcgtcatctgtctctgccacgtctgctttggacacttcaaatacctcagtgcccacaactacaagattgagcacacggagacagatactgtggaccccagaagcaatggacggccccccactgctgctgctgtccccaaatctgcgaaatacatcgctcaggtgctgcaggactcagaggtggacggggatggggatggggctcctgggagctcaggggatgagcccccatcatcctcatcccaagatgaggagttgctgatgccacccgacgccctcacggacacagacttccagtcttgcgaggacagcctcatagagaatgagattcaccagtaaggggagggaggggccctggaggccacatcctgccccaccccacccccactcccacggacactaaaacgctaataatttattagatctaaagccccttcctccccagcccctgctttcattaaggtatttaaacttgggggtttcactgctctcccccatgatggagggagggagccccccaacctcagtgaggagagccccgagccggccccggggcaaagaggggtgcagagggagttcccccagatcagtaccccccacccctccccagctagtagcatgaccaggagagggttaatgagagccaagaggagtacctggtgcacctggtgccggtggctggagacctggggggcaggtggatctggggctgttcccccccctccgttttttccaccccacagttcctcctgggatctggccctccagggaagtggagcctccagcccctaggggatgcatgaggggggagggggtgctgagtgggaggaagagtcaggctcacagctggggtggcctgggggtgggggtgggcaaggctgacactggaaaatgggtttttgcactgttttttttttggtttttttgttcttttttgtttttttcctttaaaataaaaacaaagaaaagctctgaaaaaaaaaaaaaaaaa

SEQ ID NO: 248 - DNA, 1753 bp, Homo sapiens
ctctgtttacgaatgtttgggcgcgaattactctaagcgcggctctcagaagggtgcaagaagaatcagtgcactgtgtttagatcaagatgtctggtaaagcaaatgcttccaagaaaaacgctcaacagttaaaaagaaatccaaagagaaaaaaggataatgaggaagttgtgttgtcagagaataaggttagaaacacagtgaaaaaaaataaaaatcatctgaaagatctgtcttctgaaggacaaacaaagcacactaacctaaaacacggaaagacagcagccagcaagagaaaaacctggcaacctctgtcaaagagtaccagagaccatttgcaaactatgatggaatcagtaataatgacaattttgagtaacagtattaaagaaaaagaagaaatacaataccatctcaacttcctgaagaaaagattgctacaacagtgtgaaactctgaaagtccctcccaaaaagatggaagatttaactaatgtatcaagtctactgaatatggaaagggcacgagacaaagctaatgaagaaggtctggcattactacaggaagaaatagataaaatggtagagaccacagagttaatgactgggaatattcagagcctaaagaacaaaattcagattctggcaagtgaggtggaagaagaagaggagagagtaaaacagatgcatcaaataaatagtagtggagtactctctcttccggaactttctcagaaaactctcaaagcacccacacttcagaaagaaattttggcgctaattccaaaccagaatgctcttctaaaggacttggatattcttcataattcatcacagatgaagagcatgtcaaccttcattgaagaagcctataagaaactggatgcatcttaaagagtgttttttttttagattgttccatattaatttaatgttcgtgaatttgtaaaactgttaacctatgattatatgtacagaggctaaggcttctgcaggatttattatctcctgatatgcactttaaaattagtctttgtagttctatcattagcatctaatgtagttctgaagactgtttttagcagttgccaaatctaggaaactaacatttatattgctgtatctataagtatttgcctaaaaccataaaataggaattgccttaaggatctaatagtttataatgcctgaatggaactcatttattggttaacagctcatatcaggagctgtgataagtaagtgtttacatacactgtctagtgcataaaaaccttagtgtttgctatcattcattctgtagccaatggcttacagtttctgtctggtcatctggaacttgaaaaatcctcaaatgccttcactcttttacctaactccctagtctttttgggaagtagttaagatatgcctgctatctttaactttggaggtagtatcaaaattttacttctttggttgtttagtgaattaatgttgaatattttctactgtcatcaaaacatattcccaaaaagtattaaaaaggaaccttagcacatttattttattaaaacaagaaaacccaaaatatataaaccttttcttattatgataataagcttatatatgtgaataagttataacctagtgtataaaaaattatttctaacaaactacagtatactgtcttgggtttttttttttttttttagtctgtaaaataaaatgactgcaattactttttaaaaaaaaaaaaaaaaaaaaaaaaa

SEQ ID NO: 249 - DNA, 3167 bp, Homo sapiens
aaaccttcggcggccggcgctgtgcggcgggcgcggttgcgcgcggcttggggcaaatacttctcaccactgcatgaatggacatttgaaagtgccatagccaaacacttgcaagcatggagacctcatcaatgctttcctcattgaatgatgagtgtaaatctgacaactacattgagcctcactacaaggaatggtatcgagtagccattgatattctgattgaacacgggttagaagcataccaagaatttcttgtccaggaacgagtttcagactttcttgctgaggaagaaattaattatattttgaaaaatgtccagaaagttgcacaaagcacagcacatggtactgatgattcctgtgatgataccttatcttcagggacctactggcctgttgagtctgatgtggaagctccaaatcttgacttaggctggccatatgtgatgcccggactcttagggggcacccatatagatctcctttttcatccaccaagagcacatctacttacgataaaagaaactattcggaagatgataaaagaagcaagaaaggtcattgctttagtgatggatatatttacagatgtggacattttcaaagaaatcgttgaggcatcaactcgaggagtatctgtttacattctgcttgatgagtccaattttaatcattttctaaatatgactgagaaacaaggttgttcagttcagcgtctcaggaatattcgagtgcgaacagtaaaaggccaagattatctttcaaaaacaggggcaaaattccatggaaaaatggaacagaaatttttgttagttgactgccagaaagtgatgtacggttcttacagttatatgtggtcatttgagaaagctcacctcagcatggttcagataattacaggacaacttgttgagtcctttgatgaagaatttagaactctctatgccagatcctgtgtccctagttcatttgctcaggaagaatcagcaagggtgaagcatggaaaagccctctgggaaaatggcacttaccagcattcggtgtcttcattagcatctgtttccagccagagaaacctttttggtagacaagacaagattcataaactagattccagttacttcaaaaacagagggatatatactttaaatgaacatgacaaatataacataagaagtcacggatacaaacctcattttgttcctaactttaatggtccaaacgcaatacgtcagtttcaacccaatcagataaatgaaaattggaaaaggcatagttatgctggggaacagccagaaacagtgccatacctcctgcttaatagggctctgaatagaaccaataatccacctggtaattggaaaaagccatctgatagtctcagtgtggcgtcctcatcacgggaaggctatgtaagccaccacaacacacctgcccagagttttgccaatcggcttgcgcagagaaaaacaacaaatcttgcagacaggaattcaaatgttcggaggtcttttaatgggacagataaccatatccgctttttgcaacaacgaatgccaacccttgaacataccacaaagtcattcctacgtaactggagaattgaatcctacttaaatgatcattcagaagctacaccggactcaaatggatcagctttaggtgaccgatttgagggctatgataatcctgagaatttgaaggccaatgccctttatactcattctcggcttcgttcctctttagtatttaaacccactttacctgagcaaaaggaagttaacagttgtacaactggctcctcaaattcaactatcattggttctcagggaagtgagacacctaaagaggtcccagacacccctacgaatgtacagcatttgacagacaaacccttgccagaatcaatccccaagctcccattgcagtcagaggcaccaaaaatgcacaccttgcaggttcctgaaaaccactcagtagccttaaaccaaactacaaatggccatactgaatcaaataactatatatataaaaccttgggtgtaaataagcagacagaaaatctaaagaatcaacagactgagaatctacttaaaaggcgaagtttcccgttatttgacaactcaaaagccaacttagatcctggaaatagtaagcattatgtatatagtacacttaccaggaatcgagttagacaaccagaaaagcccaaagaagatttgctgaaaagttctaaaagcatgcacaatgtgactcataacttggaggaggatgaggaggaagttaccaagagaaactctccaagtggcactactaccaaatcagtttccattgctgctttacttgatgtgaataaagaggaatctaacaaagaacttgcttcaaagaaggaagttaagggttccccaagttttttgaaaaaggggtctcagaagttaaggtcattacttagccttaccccagataagaaagaaaatctatccaaaaataaagcacctgccttttatagattgtgtagtagctctgacacattagtttctgagggtgaagaaaatcaaaaaccaaagaaatcagacacaaaagttgattcatctcctagaagaaagcattcttcctcatcgaattctcaaggcagcatccacaagagtaaggaagatgtaacagttagcccatctcaagagataaatgctccaccagatgaaaataaaagaacaccttctccaggtccagttgaaagcaagttcttggaaagggcaggagatgcctctgccccaagatttaacactgaacagatccaataccgagattcaagggagattaatgcagttgttacccctgaaagaagacctacttcttctccaaggccaacgtccagtgagcttctacgatctcattcaactgatcggcgtgtttacagtcgttttgagccgttttgtaagattgagagctctattcagccaacaagcaacatgccaaataccagtataaatcgcccagaaataaaatctgcgactatgggcaacagttatggcaggtctagtccattgcttaattacaacactggtgtttatcgctcatatcaacccaatgagaacaagtttcgaggatttatgcaaaagtttggaaactttatacacaaaaataaatagctattaaaatgcaaa

SEQ ID NO: 250 - DNA, 1802 bp, Homo sapiens
agcctggggttccccttcgggtcgcagactcttgtgtgcccgccagtagtgcttggtttccaacagctgctgctggctcttcctcttgcggccttttcctgaaacggattcttctttcggggaacagaaagcgccagccatgcagccttggcacggaaaggccatgcagagagcttccgaggccggagccactgcccccaaggcttccgcacggaatgccaggggcgccccgatggatcccaccgagtctccggctgcccccgaggccgccctgcctaaggcgggaaagttcggccccgccaggaagtcgggatcccggcagaaaaagagcgccccggacacccaggagaggccgcccgtccgcgcaactggggcccgcgccaaaaaggcccctcagcgcgcccaggacacgcagccgtctgacgccaccagcgcccctggggcagaggggctggagcctcctgcggctcgggagccggctctttccagggctggttcttgccgccagaggggcgcgcgctgctccacgaagccaagacctccgcccgggccctgggacgtgcccagccccggcctgccggtctcggcccccattctcgtacggagggatgcggcgcctggggcctcgaagctccgggcggttttggagaagttgaagctcagccgcgatgatatctccacggcggcggggatggtgaaaggggttgtggaccacctgctgctcagactgaagtgcgactccgcgttcagaggcgtcgggctgctgaacaccgggagctactatgagcacgtgaagatttctgcacctaatgaatttgatgtcatgtttaaactggaagtccccagaattcaactagaagaatattccaacactcgtgcatattactttgtgaaatttaaaagaaatccgaaagaaaatcctctgagtcagtttttagaaggtgaaatattatcagcttctaagatgctgtcaaagtttaggaaaatcattaaggaagaaattaacgacattaaagatacagatgtcatcatgaagaggaaaagaggagggagccctgctgtaacacttcttattagtgaaaaaatatctgtggatataaccctggctttggaatcaaaaagtagctggcctgctagcacccaagaaggcctgcgcattcaaaactggctttcagcaaaagttaggaagcaactacgactaaagccattttaccttgtacccaagcatgcaaaggaaggaaatggtttccaagaagaaacatggcggctatccttctctcacatcgaaaaggaaattttgaacaatcatggaaaatctaaaacgtgctgtgaaaacaaagaagagaaatgttgcaggaaagattgtttaaaactaatgaaataccttttagaacagctgaaagaaaggtttaaagacaaaaaacatctggataaattctcttcttatcatgtgaaaactgccttctttcacgtatgtacccagaaccctcaagacagtcagtgggaccgcaaagacctgggcctctgctttgataactgcgtgacatactttcttcagtgcctcaggacagaaaaacttgagaattattttattcctgaattcaatctattctctagcaacttaattgacaaaagaagtaaggaatttctgacaaagcaaattgaatatgaaagaaacaatgagtttccagtttttgatgaattttgagattgtatttttagaaagatctaagaactagagtcaccctaaatcctggagaatacaagaaaaatttgaaaaggggccagacgctgtggctcac

SEQ ID NO: 251 - DNA, 2420 bp, Homo sapiens
ggggcggggcgtctcgggcgaggagaggaggtgaccccgcgaaagataataaatcatcattgatcaagatgtcttcagcacctgagcctccaacattcaaaaaggaaccacccaaagagaaagagtttcaaagcccagggctcagaggggtgcgcacaacaaccttatttcgtgctgtgaatccagagctcttcattaaacctaacaaacctgtaatggctttcggattggtaactctttcactttgcgtggcatatattggttatctacatgcaatacaagagaataaaaaggacctctatgaagctattgatagtgaggggcacagttatatgaggcggaaaacatccaaatgggattagtagtgctggttagtgcagatggacctttattaaaggttctgaaatcttcaaatgaaagaccttgtgagtgtacagtatcatgtttcttgttctagaacatgctaatgaagagagaagatagcagttgcaaccagacaactgtcgtaaattttgtcctttcacagctgcagccattatctcattctttttccacagagtgagcgtcataatatttttctttccttacctcttataaaagtgccatgagaatggaagttgtttttgttaattattaaattctgtataataaaagtacccatgctgttaaatttgcatgatgttttaaatattttaagatgaattatgccggtgcagctgtcgtgaaagtttacttgtgttttgctacttgcaaaggaaatgttcatgttctccctggcatagaacctatatttttaaagaaagataaatagaaattttaaggcctgaagtcaatattaaaaatatgagatatgagaaactgagttggctctgacaagtagtttttatagtgtcacaaatggttcatatatttcagtttccattttagctatttttgggacagaattttattttaatggaaaagatccttccactcagctactaaaataaggattaagaatatcccagagtaattggagtttttctttaaaaaaaaaaaaaaagtatgttttactgaggtatgatgattttgactacaactaaatgttatctattttagtgtttatgttaattaatgttaattaattttgtttatgttaatttgtgttaattaatgttactgtaatgttataaacataagaccaagtgttcttatagttatttaaaaactacaactactcaatggataaggaatagataaggtctccttattgtaccttttttttcttttgaagtttatatgccagcaggcctttttgtttttttccttttcagaatgtttcttattctctgaagcatcagcattttgaagtgtcttttatggaagtggggacagaaatgggggtaaaaatgagtgtaaacaaagcctagccctacggtcagtacccactggaggtgagaagcagaatggccttggttgtcctggcacctggcccaggggcctaggacagaggtcaaggctaggcccctgtgtctggccagattctgccttatagaattcaaatctttcttacaagggttctggacccgtttcatttctagatatatacctaattctccaaatcattgtcattgggcctcagtagtaaatcttacctctgaagtcttgcttcagtcgctattaatattaccaagtaataataacagcacaggcagagtttatcataatgttatttttaatttgtcatactttattatggttttgtaaggtacatgaaaatgtaattatgtgtgatttgtaggtattaaagaacttagctaattgaatttacatgaaactaaataaaatctttactactgagccccaaatatgtatttgctatgcctgtctgtataatgtacttcatatagtttaaaatgcacttcagtgatacaaaatcccttttaaagactcttttgtttttgttttccctgtgtattttggctatcacaaaactagggttcttctgtttttaacttatgcatttaatgacacattgccatcttttagaattttttactattcaacagaataagctgatgtttggtggcagaggagttattagttgcgtgaactgtcaagagattgcagtgcaggagggcaacagaaactgtacaaggtgcagacttgagtcatgtaagatctatgtgaatgaaccaaagtaactagagtcagtcaagcacaaagctgtgaaaagtagtgtgtggaaagaatcatactgaattttaggaacaagtacctgactatgatactttttacagagtgactacaagttgtaggacagtctttgtgtgtgctgagtgtcaacagctgcctgcctatgtgttgatgttttcatcctttctttgttgaatgagggtataaccatcaaaaataaaatacctttcaaatagtcaaaaaaa

SEQ ID NO: 252 - DNA, 8643 bp, Homo sapiens
gtttgcggtttagaccccaaagattcctgttggtggtctgggtcacaggaggcaggtttcgggagctggaaatgtgagcgggtacgacaggcaccgcgggtaaccgacgccccgggtccttgctgcagccgggtacgcgggataccggcaccccgccttctccgcccgagtgctgccaggcgtgggcctggaatctcttcacaccttctctttggagcccttaatgatacgacgaaccccaagtgtttcagaacatgaagtaaacaatggagaactgttctgctgcatcgacgttcctgactgacagcttagagctggagctggggacggaatggtgcaaacctccttacttttcttgtgctgttgacaacagaggaggaggaaaacatttttctggagaatcctacctctgcagcggagcccttaagcgattgattttgaatcttgaccctttaccaactaattttgaagaagataccttggaaatatttggcattcagtgggttactgaaacagcattagtgaattcatctagagaactctttcatttattcaggcaacaactgtacaacttggaaaccttgttacagtccagttgtgattttgggaaggtatcaactctacactgcaaagcagacaatattaggcagcagtgtgtactatttctccattatgttaaagttttcatcttcaggtatctgaaagtacagaatgctgagagtcatgttcctgtccatccttatgaggctttggaggctcagcttccctcagtgttgattgatgagcttcatggattactcttgtatattggacacctatctgaacttcccagtgttaatataggagcatttgtaaatcaaaaccagattaagctttttccaccgtcatggcatttattacatctccacttggatatacattggctggtgctagaaattctttacatgctgggtgaaaaattgaaacaagttgtatatggtcatcagtttatgaatctggcaagtgacaatttaaccaacatcagcctatttgaagaacattgtgaaactctcctttgtgatttaataagcctgtcactcaacaggtacgacaaggttaggtcttctgaatcattaatgagtgaccagtgtccatgtttatgcattaaagaattatgggttctacttattcatcttctagaccacagaagtaaatggtttgtctcggaatcattttggaactggttgaataaactacttaaaacactgcttgaaaaatcaagtgaccgaagaagatcctctatgcctgtaatccagtccagggatccattaggttttagttggtggattattactcatgtagcatcattttacaagtttgatcgccatggagtaccagatgaaatgagaaaagtggaatcaaattggaactttgtagaagaactgctgaaaaagtccatcagtgttcagggtgtcattctagaagaacaattacgaatgtatcttcactgttgtttgacactttgtgatttctgggagccaaacattgcaattgttaccattttatgggaatattatagtaagaacctgaatagttccttcagtatttcttggcttccttttaaaggccttgctaataccatgaagtcacccttgtctatgcttgaaatggtgaagacttgctgttgcgataaacaagatcaggaactatataaatccagcagtagttatactatttttctttgtattctggcaaaagttgttaaaaaagcaatgaagagcaatggccctcatccttggaaacaagtcaaaggaagaatatattcaaaattccatcaaaaaagaatggaagaactaactgaagttggtctacagaacttttttagcctttttctactgttagcagctgttgcagaggtagaagatgttgcaagtcatgttttagacctcctgaatttcctcaagcctgcttttgtaacgtctcagagagccctcatttggaagggtcacatggccttcctcttgatgtatgcccagaaaaatctggacattggtgttttggctgagaaattttcatgtgctttccgggagaaagcaaaggaattcttggtgtctaagaatgaggaaatggtacagagacagactatctggacccttctttccatatacattgatggtgttcaagaagtgtttgagaccagctattgcttgtatccttcccatgaaaaactgcttaatgatggatttagtatgcttctgcgagcatgtcgagaatctgaacttaggacagtattgagcttcctacaagctgttctggccagaatcaggagtatgcatcaacaattgtgtcaggaacttcaaagggacaatgtggacctatttgtacagtcttcattatcggctaaagagcgccaccttgctgcagttgccagtgcactgtggagacatttcttttcatttttgaagagtcagagaatgtcacaggtagtgcctttctcacaacttgcggatgcagctgcagactttactttgctagcaatggacatgccaagcacagctccatcagattttcagcctcagccagttatatcaattattcaactttttggttgggatgatatcatctgccctcaagttgtagcaagatatttaagtcatgtcctacaaaatagcacattatgtgaagcactttctcattcaggctatgtatcttttcaagccttaaccgtaagatcatggattcgttgtgttttgcaaatgtatattaaaaacctctctgggcctgatgatttgctcatagataaaaatctggaagaggcagttgaaaaagagtacatgaaacagttggtcaaactgacaagattactatttaatctctcagaagtaaagagtattttctcaaaggcccaagttgaatatttatccatctcagaagaccctaaaaaagcacttgttcgattctttgaggctgttggtgtaacttacgggaacgtccagacactttctgataaatctgccatggtcacaaagtccttggaataccttggtgaagtattaaaatatattaagccttatttgggaaaaaaagttttcagtgcagggctgcagctgacttatggaatgatgggaattcttgtgaaatcatgggcacaaatctttgccacttctaaagcccaaaaattactattccggatcatagattgtttactgctgccacatgcagtattacagcaagagaaggaactgcctgcacctatgttgtcagcaattcagaaaagtcttcctttgtatctccagggcatgtgtatcgtgtgttgtcaatctcaaaatccgaatgcctatttgaatcaattgctagggaatgttattgagcagtatattgggcgatttcttccagcttcaccatatgtttcagatcttggacaacatcctgttttgctggcattgagaaacacagccactattccaccaatatcatctctaaagaaatgcattgtgcaagtcataaggaaatcctaccttgagtataaggggtcctcacctcctcctcgcttagcatccattctggccttcatcctccaactcttcaaggaaactaacacagacatttatgaagttgaactactcctccctggcattttaaaatgcttggtgttagtcagtgaaccacaagttaaaaggctggccacagagaacctgcaatacatggtaaaagcctgccaagtggggtcagaagaagaaccttcctcccagctgacttctgtgtttaggcagtttatccaggattatggtatgaggtactattaccaggtttacagcattttagaaacagtagcaacattggaccagcaggttgtcatccacttgatttctacccttactcagtctctgaaggattcagagcagaaatggggccttggcaggaatatagcacaaagggaagcctatagcaaacttttgtctcaccttggacagatgggacaagatgagatgcagagactggaaaatgataatacttaatatattttgtgattcatcctgtctattaattatcagtatctaaagccacattgttccactctaattcctacttttaattaattgtataatgttctgtttaaaataatttctaggattttttttccttttatatctgtaagtaaaaaatgtataaataaggaactgaaggttaattagcaactgtgtaataggatccttggaactttttacaaaactgcattctaccttgatgaaattttagttaaactaaattaaagaaacattttctgagagtgttttctgtgtgtgagtattaagcagatacttcatccatagactttttgttgtagtatgacttcctgcctccctgccttgtgactgatttgtcatgtttattttttatttttacaataatagttatgttttaaaatgatactttttcaaagtacctggctaccctatactgtgtttttggtgggggaaaggtgttgggaaatgtgactgtgtatttgtttttcttttttatatgtgtgaggcaagttaacaaagaaaacccttacaaagcacacttaactgtgttaggaatgagactgaatctggctaaaggattatacagctgatatccaaaaagaagtgtaaacatgccaacagggtttatatttaggttccaagagttgccaaattttttttttattcatcctttcttttggagttgtcattaaaaaaaaaatcatatcaggaggaggaaataaaggagactttaagaggagagtaaataaaaatattctagaaaagtaacaatagtagtggtctgagaagtcagctgatccatcttcttgctctttagccagagcttcttataacttagcattttatccaagaaacctgtttagtttcctttaacaacattgtttctcaacttttgaactcttaactcatccagattgttttaccagttggagcttgtccttgactccttttcctattgagcattatttggttgaaagagctccagtcctagttttgggaacccacctgggtctcaaactcagctttgctttatgatcttgagctagttacgtaacctttctcagtctagtttcttcatggagaagaaaagaagaatccctttactatttgacagtgttgttgtgagaatcaatgggataatgtacgtgaaaatatttggtggcccaaattctgttgggaaatgtacagacacgattagtttattactcgtgcacaattaaggcaaagaacacctctcaattttatctttctctaatgatatgtcccagatgaatgatcccactttccaatgttttcttacatcatgttttctaactttgaagtactttgtttccttcttgggattatagtctttatcatggttctactcttccttcaagaaaacatttcaacccttctctggctcaaggagtatctttaaaaatgaaatactttgcaatcagtattctgtagttaatagcgttctcttaattataatctgtgaaatccaaaggagtgtctgttattttcataacatataaatggtccttctctcaaatcagcttcatcaaagggaataaatgaaagcttaaggctgtttaatagacttcataacactgaatttcttttcatcatgatagtgacttactaaacaaataatgtatggcttggaaagttccagcagtcactaaggagttttatctatttaaggtgatgcctttaaagaggttatttatgtgtatatgtgtttttgtgtgtgtgtgtgtgtgtgtgtgtgtgtgtgtgtgtgtgtgggttttttttttccaaaggagattgataaagatacctttgagaatcttgctccttagagtatgaaaacgtttaaaggataggaaaagctgctactgaatcatgctttaggacatatatctatagatactaagaataactaaaatttgtacttaagaatggtaacaacaaagtgtgtaacaatatgtgtgtgtattatatgttttgtatttatgtataagtaactttttttaaagcttttttttaaattgaaaaaagaagaaaatttatggctcagttccttttttttaaaatcttcactgatccttcacttattactacaatcttgccctctttcattcccagacttggagtcccttatacctgcttctttaatagccactttccctaaataccctgtaatttctgaggctgctgcttctaccagtgtaatacaagccattgtcttttggtcaaatctgagtttgttctcctttctcatgttctttgtcctctctgtgacaattgtattttcttttatcttcccatcatttccacaatggtactgctccttcctacatatacagttgacccttgagcaacacaagtttgaactgtgcaggtccacttatatgtggatctaaaatacagtatttgtgggatgcaaaatctgagtatatggaggaccaactttttgtagaggcaggttcctcagggttaactgcaggacttgagtaagtgcagattatggtatgcacaggggatcctggaaccagtccccagaccaaaaatgaccactgtatcttgagagcaccttcatggtcttctttcctgtccccagtcgtaagatacgacccttcatctgctttgtctcaacattctgttagtggtgaactgataactccagcttttctctctctttttttttttttttttttttttgttgttgttgttgttgttgttttgaggcagagtcttgctctgtcgcccaggctggagtgcagtggcacgatctcggctcactgcaagctctgcctcccgggttcacgccattctcctgcctcagcctcccaagtagctgggactacaggtgcccgccaccacgcccggctaattttttttgtatttttagtagagacggggtttcaccatgttgggctcgatctcctgacctcatgatccgcccgcctcggcctcccaaagtgctgggattacaggcgtgatgagccacctagtgctaattcatctctaaacctctgtagttggagtctcctgaaatctcagactacctcctgctttcattttctacccagggaatacactattgtcctaagttatttagccttgaaatgtcagaggcattttaggttcttcatgtttctcccactttcagttgattaccattacaggatcttaggcttctttttatctttttgcagtgccttgcatccactggttgtttgttttttctgttgggcactacttatttccttacctctggtttcttctcctacagcttatgttctgaaatgtgtattcctaaaatactgttttcctcttgttacttttctgctcgaggacttccagtaacttaccattgtttataaggtgatgttcaaacccttcagtctggagactttctgccacctatctgactgtacctttatcttcaagcttatctctttccaaacaagaggctcatttagcagctttctctgattgccatgttcatcctacactcagcctcattcagtttacagcatggaaactgtataggacctctttcctatagaaattgaagacacttaaataggaagaaaattaaaatatacatttggatacatgagtattccagtcaaataatatctataaaataccagatagagtataaaagacaactgaaggacaacagagtgatgaaaggactttattaggcatttggatttggttatgatttaaatttcaatttaattagaacgtttccatggcaaggaaggaagcatggaggactgtggaaaagtcattcagtattgagttcatttgcattagaggaatttcatagtttaaaacttgtatatctttacctatccttcgtatgttttcttcttaagcatatttgactttttctacctcagcatctgtataagaaaatatttgtgagtcagatgtttgtgggttttccttacctattattattttcttccatgctttacaacacattttttaaactaccttgttcttaaataattacacggacctgcttctgtgtactttcacagaatctttgacagttaaaaattgtatgttatataaaaatttgacaagcttctacagttaggaaaagcctttagaaatctgccttccccaaaccgtatgttatcatagcactcatgtctccccatgtctaaaaggtaaatagatacagaaacctcaccaaaagttgaatcatctgtactaaaccactgcttttttatccagactttttatataaatcttttattttccaaaaaactgatcttttacctacccctcttagagttaaaaatattgcctgtcaggcaagagtatagtatgccaatataaataatatgctttatttggttagaaacagttggtttgggaagctagcaacatagcatattctttacaaatttaataaggtgtattttgatactgtgataacctgcattgtaaattaccaaatggttggaattgaccagtttatacttattaaaatttttgatgtgccaatggctatccaattcattgcatttgtgaattgtgcttttagaaaaattgtggacattttagttttatatacatatttatgagttatttgtgcatatgataaaattatatataataataaaagtatatatgtaactta

SEQ ID NO: 253 - DNA, 879 bp, Homo sapiens
gcgagttattggcaagttcccctgcagttgtttgggctgtcgctgtggctggttctgcggtgtgcggccagccatggagcgctctgggcccagcgaagtgacaggctcagacgcatcgggaccggacccgcagcttgtggtcaccatgggcttcacggggttcggtaaaaaagctcacacatttgacttggaagcaatgtttgaacaaactcaaagaacagctgtggaaagaagtcacaaaacactggggctggtgaattaccagatctccatcaagtgcagtaaccagttcaagttggaagtgtgtcttttgaatgcagaaaacaaagtcgtggacaaccaggctgggacccagggccagctgaaggtgctgggtgccaacctctggtggccgtacctgatgcacgaacaccccgcctacctgtactcgtgggaggatggtgattgctcacaccaaagccttggacccctcccagcctgtgacctttgtgaccaacgtcacctatgcagcagacaagggggctctgtatgtggatgtgatccgtgtgaacagctactactcttggtatcgcaactacgggcacctggagttgattcagctgcagctggccacccagtttgagaattggtgtaagacatcacaatcccattattcagagcgcgtatggagtggaaacgcttgtagggtttcaccaggatccacctctgatgttcagtgaagagtaccagaaaagtctgctagagcagtaccatctgggtctggatcaaaaacgcagaaaatacgtggttggagagctcatctggaattttgccgatttcatgactaaccagtttctgcaggctggaaatccaagatgaagtcacctgtagttcagtgtc

SEQ ID NO: 254 - DNA, 2452 bp, Homo sapiens
cgcaagaatgcatacaaactccagggctgctctctcctggagagggagggaggggatttaaaaacctgcagcaacatgggggaggaggctgtttgtccttctctctctggggaagtaactcgctcaaactgccttccttgctgagctgcttcgcgtagctttgaggaaggtctagtgaaattggtctttccattacatctggatgtactaccagagagttctgctgctgttgttttttttagcttttctttctttgagtctttaaagggcaattgtcgacactctgcaaacataccgatttgttgtctgcccactttggagtcttcaatctgggcagtaactatttaccctttttcctgctagcctgtccccctctctggattgaagtcacctgctaagacaatggactaccgaccagactcccggaaatcatgttggtaggatcccagtctttttcgcctggagggcccaatgggatcattagaagccagtcctttgcgggtttcagcggcctccaggaaaggcgatccaggtgtaactccttcattgaaaattcctccgctctcaagaagcctcaggccaaactgaagaaaatgcacaatttaggccacaaaaacaacaatccccccaaagagcctcagcctaaaagggtggaagaagtctacagggccttgaaaaatggacttgatgaatatctggaggttcaccagacggagctggacaagttgacagctcagttaaaagatatgaaaagaaactctcgcctgggtgtactgtatgacctagacaagcaaattaaaacaattgaaagatacatgagacgcctggagtttcatataagtaaggtagatgaactctatgaagcttattgtatccagcgacgcctccaggatggtgccagcaaaatgaagcaagccttcgcaacatcccctgccagcaaagctgcccgggagagtctgacagagatcaatcggagcttcaaggagtacacagagaatatgtgcaccattgaagtggagctagagaatctgctgggagaattctccatcaagatgaaaggtctggctggctttgcacgcctctgtcctggagatcaatatgaaattttcatgaagtatggccggcagcggtggaaactgaaaggcaaaatagaagtaaatggcaagcagagctgggatggagaagaaacagtttttctgcccctgatagttgggttcatctccatcaaggtcacggagctcaaagggctagcaactcacatcctggtaggtagcgtgacctgtgagaccaaagagctgtttgcagcccgacctcaggtagtggctgtcgacatcaatgaccttggtaccatcaaactgaacctggaaatcacctggtatccatttgacgtggaggacatgaccgcatcctcaggcgctgggaacaaggcagcagcccttcagaggagaatgtccatgtacagccagggtaccccggaaacgcccaccttcaaagaccactccttcttttcaaatctacctgatgacatctttgaaaatggaaaggcagccgaggagaaaatgccactgtcgctcagcttcagtgacctgcccaacggggactgcgccctcacctcccactcaacaggctccccttccaactcaacaaatccagaaattaccatcacccctgcggagtttaacctcagcagcttggcctcccagaatgagggtatggatgacaccagctcagcatcttccaggaactccctgggagaaggccaagagccaaagtcacacctgaaggaggaagacccagaggagcccagaaaacctgcctcggccccatctgaggcttgccgccgacagtcctcaggtgctggggctgagcacctgttccttgagaatgatgttgcagaagcacttctgcaagagtctgaggaggcctctgagctcaagcctgtggaactggacacttcggaaggaaacatcacaaagcagctggtcaagaggctcacatctgcagaggtgccaatggccacagacaggctgctctctgagggttctgttggtggagaatctgaaggctgcagatcctttctagatggaagcttagaggatgcttttaatgggcttttacttgcattagaaccacataaagagcagtataaagagtttcaggatctgaaccaagaagtcatgaatttggatgatattctaaaaaagtagagaagatcctctaatggatcccagtgtgcccatccctcaacctcctcagtgatcaactcatggccaatcttgtttcctattcttcaacctgctgacttccctctggattcttctgcaaccagtcccagatattgtgccattttatccatggttgtacttcttttttggatataaagatttttaaatgcattttttaaatgctaacaaaaaataaaaacttgaaacaaaaaaaaaaaaaaaaaaaa

SEQ ID NO: 255 - DNA, 963 bp, Homo sapiens
tctccacgtgggtaccggcgctctcggcgcccgtagccacccgcccgccggaagccgacatctcgagttctggcagaagcaatttgcgcggcgaggagcggagcggcaggaacccaataagctgcttcgcctcggagctgaagcccgtactcaagatggcggctccgggcgggcgtggccagtgactagaaggcgaggcgccgcgggaccatggcggcggcggcggacgagcggagtccagaggacggagaagacgaggaagaggaggagcagttggttctggtggaattatcaggaattattgattcagacttcctctcaaaatgtgaaaataaatgcaaggttttgggcattgacactgagaggcccattctgcaagtggacagctgtgtctttgctggggagtatgaagacactctagggacctgtgttatatttgaagaaaatgttgaacatgctgatacagaaggcaataataaaacagtgctaaaatataaatgccatacaatgaagaagctcagcatgacaagaactctcctgacagagaagaaggaaggagaagaaaacataggtggggtggaatggctgcaaataaaggataatgatttctcctatcgacccaacatgatttgtaactttctacatgaaaatgaagacgaagaagtggtagcttcagccccagataaatctttggaattggaagaggaagagattcaaatgaacgacagttcaaacctgagttgtgaacaggagaaaccaatgcacttggaaatagaagattctggtcctcttattgatataccttctgagacagaaggttctgtttttatggaaactcaaatgctgccttagaaatcactctcctagatgaaatgtttctcataataacttgtcaagaactttttagagttgttacataaaaataattgctgctgtagcttgtcaaaaaaaaaaaaaaaaaaa

SEQ ID NO: 256 - DNA, 1835 bp, Homo sapiens
gtggtgaggcctacagaagcggccttcagctggaccttggtctccccgccggacttcgagggtgtcatcgccgcccctgttgggggtgagcgccgcgcggctgcagcatgcctcacaggaagaaaaagccctttatagagaagaagaaagctgtgtcttttcacttggtccaccggagccaacgagatcctttagcagcagatgagagtgcaccccagagggttctattgcccacacaaaaaatagacaatgaagaaaggcgagcagaacagaggaagtatggagtgttctttgatgacgactatgactacctgcagcacctgaaggaaccatctgggccttcagagcttattccctcaagtaccttcagtgcacacaacaggagagaggagaaagaagaaacgctagtaattccaagcactggaattaagttgccttcatcagtgtttgcttcagagtttgaggaagatgttggattgttaaataaagcagctccagtttcaggacctcgactggattttgatcctgacattgttgcagctcttgatgatgattttgactttgatgatccagataatctgcttgaggatgactttattcttcaggccaataaggcaacaggagaggaagagggaatggatatacagaaatctgagaatgaagatgacagcgagtgggaagatgtggatgatgagaagggagatagcaatgatgactatgactctgcaggcctattgtcagatgaagactgtatgtctgtgcccggaaaaactcacagagctatagcagatcacttgttctggagtgaggaaacaaagagtcgcttcacggagtattcgatgacttcctcagtcatgaggagaaatgaacagctgaccctacatgatgagaggtttgagaagttttatgagcaatatgatgatgatgaaattggagctctggataatgcagaattggaaggttctattcaagtggacagcaatcgcttacaggaagttttgaatgactactataaagagaaggcagagaattgtgtaaaattgaatacccttgaacccttggaggatcaagacctgccaatgaatgagcttgatgagtctgaggaggaagaaatgattactgtagtccttgaagaagccaaagagaagtgggattgtgaatctatttgtagtacatactcaaatttatataaccatccacagcttatcaagtatcaaccaaagcccaaacaaattcgaatatcttctaaaacaggaatacctctcaatgtcttaccaaagaaaggactcacagcaaagcaaactgaaagaatacagatgattaatggcagtgatcttcctaaagtatcaactcagccacgttctaaaaatgaaagcaaagaagataaaagagcaagaaagcaagctataaaagaagagcgcaaggaacgaagagtggagaagaaagctaacaaattagcatttaaactggagaaaagaaggcaagaaaaagagctgctgaacttgaagaagaatgttgagggtctaaagctatagacagtggagcatacagggcaaggcactttattaggggctcctcatctttggttattgactagaaacttcagaaagacaaaactgtttgccatttttactggcagataagaggaaaatacaatatttgtattatttttatactagtaagtgtcccctgccaaccatcttgtaaatattgtaatactttaatttttaatattataagcttacatttgctctgaagtaaatgacttcatgaatgtgaaatgtttgataaattaaaggaaaatatcttcataaaaaaaaaaaaaaaaaaaaaaa

SEQ ID NO: 257 - DNA, 5814 bp, Homo sapiens
ggaggagccgcgggcgcggcgccgcgctgtccccggccgccgcccgccccactccgcaccgcatgtaaacagtcccagccggcccagcccggccccggaggagcccgcgcaggccgagccgagcgccgcgctgcccgcccgggaggagggcgcctaggagcgggagggcgggcggcggcgggaggcgggcgcggggccgcgatggatttccagcagctggccgacgttgcggagaaatggtgctccaacacgcccttcgagctcatcgccaccgaggagaccgaacgcaggatggatttctacgccgaccccggcgtctccttctatgtgctgtgtccggacaacggctgcggcgacaattttcacgtgtggagtgagagcgaggactgcctgcctttcttgcagctagcacaggattacatctcctcctgcggcaagaagacgctccacgaagtcctggaaaaagtcttcaagtctttcagacctttactggggcttccggatgcagatgacgatgcgtttgaagagtacagtgctgacgtggaagaagaggagccagaggcggaccacccccagatgggggtcagccagcagtaaatctgggggctcccctgagaaggagagtgagccccacagtaacctaggtggggtcactgcccctcctgggttagcattttgcattagcacttcgaaataggacatctggctcccagcatccaaattaaaatgaaatacctttttaacgaccacaaaatatctgtgatgagctttgctcagaagtgacctgaatttcactcccgcttcagtggggtttctatggagttgtcttggtagcctttgccattttgaatttagagtccattttgtggctgactattctcttaagtttatgttggagaattaacattcgctgactcgaatgtagagaactctgaatgtattaaggataggttttgagtcctcacaggtgaccttactgagggaaagcatggcagagaagaaatgcagtctgcactttttatgtactttttaagtgtccgtaagtgaaaggttttgcttataaagcatgaattttaatatctagtcattaaactgcacaagtgcaaatacaagggcaggaaaggataatcacttagctttggactaagagggtaagagaggcccagaagcctttaagtgttttgccattactgagttacctgggtatgtagcgactggttcgtggttaggtgtaaatgttacttgcttgttcgactgtttcaaaacatgctaattccaaagccacttttgaagtctatagtggaaaatatagatggggtgaaagatataatgtattgatttttaaagctgtttataagccgtcccacgtataaaatgaaacattttaccttctctctttctaatgagatggccgcttgttaaatcatgaaaacatccagaattcaagtgccgcttaaactttgaagccatagataaatttgttagaaaagtaaaccaggattaaaagtttttaaaaatatggtagaatccttctttactttttaagtcttttatttaaaaaaaaaaagtcaaaaaaaggattccattgtgtaatttatttaaaaatttaatcacatgtttcgagggacttaattgtggtgtatttgtaaagggacacgaaggtaggaatcttttaatcgtgggttagcttggttaacagggaacgttttaataatcaagatactcagacaactcacagaaacaacttctgtaataactggaaatactgctgttatcgtttagccaacaattacttactggggacatcctttgtaatgctaacatggaattattcctggacccttctgcatccctggttttagttaacctaggatgcggaatgcctcctttacaacactagattaaacctagcatctggggtgggtacgtttaaacagtcacacatgtgcctgttaggttgtgaaagttttgaattaaaaacaagcagtagcagcagaggccacagaacttatgggagtcttgtatatcttccaggcatgtcggtgtaaacctgattgtctcgacattttctgtttaattgattggtgctgtgaggagttcggctgctcgtggtaaaacagcgtactccagttttaagtcatcgggtaaaataataggacagtgatttccatctgtgcttcagtacccactttgtgttcttttcttgaaaagtcatactaaaggttaatttcaagtaaaatgaatttccttccaagtagcctattagtaaaacacaacttagtgtttcatccattggggtgagcatatactgccctttgcagccctgcctgtgttctgattggctccattcatgagcaaaggtgattgtgagctgtatattacacaggtgtcgcccaggtttcgtaacctccactttaatgcagtaagccgcaagaatgacttctgcaagtgaaatgaggaagcttcactagcttgctccattggaaggtaaactgaaattttatacgttgaagcttaaaatctaaatttatgtatgtttggaaatggaatggacattaacataaaatgtattttatcaaaaaagtgtttagactttgaccaaatacatgttggtattatcatgttaatgttctctgtttataaaaattgagtggagatagatagactcggccattctgtgggctgatgagaattctgggctttgttttgcaccaggggtaggaaacagagaacatgtctgtatgttacttaatctccatagcaaaatcccaaacagcattagcagatcgaattgtttcttctaagacttcctttttctgaatgtgtgcacatcccttctcgtgctcacacacttgcccacacactcacttcttcctgcgctgtggctgctctaagcagggctgtgcatggtgcaaagctgcagtcagtgagcctggcagcctgtggtttctgttatggaaatggttccatggtgaaacacatccctgacccttcacagacttacacatttactcaccaggaggtggcagcggtgtgggaggaggagtgttgaccttggacgcaggagagacacctgggttctagttcaagtcggccaaggactgtgtgaccttgacaagtctaactggtctgtgaacaaggggcatttgcccttccagctgtaaacactgcccttctgtgcctgccttatgtgtgtgtgtgagtaaggagcaacagtcaaggaaacttttagggattcgagaagaaaatacatgtgggatcttgccaaggtgctgcctttaggatgctgacccctgcactaccttagaacatgttgatctgtgagtgcccaagcccctgagggctcgatctcatggggcagatgaaattctcttccttagaggaaagggaaaggtgaggccccagaggacttatctcagctgtacatgctctgcctgtggagacatggcttttctttgtgctgtggcagactggggctttggaagtggtgtatgtttaacttacctgagagtgagagatgtgtaggaagaatagctggaagaaagtgaaagatgagtgccagtacttttggcctgttatccagtagagagaaagtgacagtgaaagtaacgtgagagagaaagagtgtgtgtgtatatgtgagagagagaaagaaagagaaaggaatgcttgattgcttgttgttcactgggccagctctgaaatccaaaatcatgccttgataacattacaaaaccgtgatcctgggtttgagtgaatcctagagacattgttcttatggccgcctggtttccgcagcctgatcaccatatcgagcagacgtcaaggaatcagagtgaagtacggagccagggagggaggtgaggccccgtgtagtgcctgtcaccactgtggattcacctgcactcaggtgtccactcctgtctcccaggcccaaagcagcacatggtgcaatggaaaagtctcttatgtagggatcctccttgtgtcctggtgccagaattagatttccagtgtacttcaacgaaaacctctctcctttatagttgctgtcatctttcatgtataaacagaaaccgtctctagcacaatatatttctgaatattgtttctgtttcataagagcacaatgtacatggacctaggggagctgtggtcccaagtgtcattggaatttatattttaggaataggctttgcatgttaaaattcacaagttgggaaactggtatgaacagatctgatttcttacagagaggcatgaaggaataggcaggacttaacttggggtgggaggagatgaataagggagaatgggagagttggggtctgacagttaccacctgagccccaggaaaactgttttcattttcacggctgtctcactgggggcctgctttcctcaaaggaactgactgtatgttgagaggcaatgccttgtgttggcatggctttgccactttaaaagtgccccccagccaaggagaccaacaggaaccctgctcatctggtagggctctttccttcagtaaaaccagctgccagcctgagaagcctgtctttcccaaatgcaggcagatctgagaggggctccaggcacccggcaggtaaatcacaaagcaaacttgggtgtccttggcagcggggaggaagcaggagtgccccctcaggccagagggcagggccaacctcctcactgtgcttcaaggttgtagaaagagcacaattaatgcttaagcgatcacagacccctctcccctgcagtgggtgttagctccaaagagatgccattgctgatcacccagtcttcggagaagcctaaaatttctttgaattaaaaactgatcctttttcataaagacccagtcacttctcccagtttagtgataacaggtatgacacaagaagctgaagtcttttagattttatagagagtaattctgaaacctgccagaatgctggtagcctgtggtgtccatggcaatgggtgtccatggtaaaatatctatagcttctgctcactgggcaaatataaaagacaacatattatttaacataatatgttgtcttttatatttttatttaaatctggattacgaaaatatagtacccatgagcatttcatgttagaaaccccatttaaagcactataaggctgaataggcacaagcgattaaaagtagatgccaggccacataaaaataaatgttttaatttacttagagctgtattcaagttgtttgataccagacagaaagctgacagtctgttctttgtaaactgcctttccctgtttttctgttttgttttgtttctcaagtttcattttttactaagccccttctgacacctaggcagataaagataagagtagtgcgcagtacaaatgtcagctctgaagaggaggaagtaaatcttcaatgctagggcagatcttcactatccgtgatccagtcttaatttgagcatgagagcaaaatttagtcatctacacaagaagcaaaagcaaggaatagttgttgggtttttgttttttggttgttgtttttttttttttttaggcaagaagtgttgccggtagggtatgtgtgctttctttgccttcctatttcctttcaaagaaatctcttgtaaattacaaaactgtgaattgggttgccaaaaactgttgcccttcgttagatgcttcaaacagtgtaaatcctatactgcaccctgtccacctctgctccctcctccctcccctgagagtgaggacctcatccgaccatgtaattaccattcgcttgctattaaagagcctttcaaactctgg

SEQ ID NO: 258 - DNA, 4199 bp, Homo sapiens
tggggcgggctgatgagcacctggattttcacccggcgtgctggtaattcctacacttgtgggtgtttgagagacatgaagaggggaggatgacctcttcccggaagcgggacttccataaaagaagcgtggtgggcgggtcccgggcacctgtggtttggtgagtcctccaggtaactgtgatgcgggggtcagcgggagaggcacccggaagctcccggcgtctgcaccccggcagcgcgaggaaatgcccaaagaaactatagtgacactgaaactgaaggagagatttttaattccttagtgcaatactttggtgacaacttggggcgaaaagttaaagcgatgccattagttgaagaaacttctttattggaagattcgtcagtgacttttcctgtggtaataataggaaatggaccctcaggaatatgcctttcttatatgttatcaggctacagaccgtatttatcatcagaagcaatacacccaaatacaatcttaaatagtaaattagaagaagcaagacatctttccattgttgatcaggacttagaatacttgtctgagggccttgagggccgatcatccaatccagttgcagtacttttcgatacacttcttcatccagatgctgactttgggtatgattatccatccgttttgcattggaaattagagcaacatcattatatccctcacgtagttcttggtaaaggtccacctggtggggcttggcataatatggaaggctccatgttgacaatcagctttggaagttggatggaactacctggacttaaatttaaggactgggtatcaagtaaacgaaggagcctaaaaggggatcgagttatgccagaggaaatagctcgctactataaacattatgtaaaagtcatgggtcttcagaagaatttcagagagaatacttacataacttccgtatcaagactctacagagatcaagatgatgatgatattcaagacagagatatttcaacaaagcatttacagatagagaagtcaaactttatcaagagaaactgggaaattaggggttatcagcgaatagctgatggttctcatgttcccttctgcctctttgctgagaatgtagcgctggcaactggaacgctggattctcctgcccatctggaaattgaaggggaagattttccttttgtgtttcattcaatgcctgaatttggagctgctataaacaaaggaaagttgcgtggcaaagtggatccagtgttaattgtaggttctgggcttactgccgctgacgcagtactgtgtgcttacaacagtaatatccctgtgattcatgtgtttcgcagacgagtaactgatccaagcttaattttcaaacagcttcccaaaaagctgtatcctgaatatcataaagtctatcatatgatgtgtactcagtcatattctgtagactcaaatcttttatctgattataccagctttcccgagcaccgtgtgctttcctttaagtcggacatgaaatgtgttctccaaagcgtttctggattgaagaaaatatttaagctgtctgcagcagtagtattgataggttctcatcctaatctgtcttttctgaaggatcaagggtgttacctaggccataagtcaagccagccaatcacatgtaagggtaatcctgtggaaatagatacatatacctatgagtgtattaaagaagccaacctttttgcattgggtcctttggttggagacaattttgttcgatttttaaagggaggggcgctgggtgttacacgctgtttagctacaagacagaagaaaaagcatttgtttgttgaaagaggaggaggagatgggatagcttaaagcaagtttacaagtaattaaaatggacagtttgccattaaagatttttaatagtggttttgcagtgtactggcttgaattttctggacttgagttaactgaaggagagcctcaaactatagtaacttcatttttaaaagttactagaatttggtatcctgatttatattgcagtgtttcaaaggtgtcactgtcagacaaatagaaacactgccaacttggtgtaacttaagctttcatttaactaaaacattcttttcttgcaaaacttatttttcatgatcatttttggttatttattatacttgattccaaaatagtacagccttgaatctataaaactgtgcagtcattatgccagaaattatcttaaatatataatgggtcaccttgctgttcaaagggtggtgcaaggtcctgcagcatcttacatctgtagcttgttagaaatgtaaactctcaggccccacaacttacttcctgcattttaacaagatccccaagggatatgtatgctcataaaaatttgagacactggtttaaatgaaaatggatataaggtatgtataactgggggtggggtgagggtaggaggcatttacaactcagattttatttattttgaaattatcaattgtataaatctaatttattaccaaatagggtcttttaaaaaatatttttatcgttgaaaccttgacaggtacttcatattcttctaataatttaaacagtccaataatgtggtatacactttgacatccaagaactcaccaagatgtttttcagagatttattctcgatttaactatcatagcatttaatgaatctgatttgtagttcaataaattgtgggttgaactacttatccctgtgtgaacattgaattactttctgtcactgaaactgaggtatttgggtgtggtaagtacttcgaaaattgtaatactgtttgggcattgtctaaattattaaaggttaaaatagaaaataaagtcagaatttttcttttccattccaaaggtgtacttagagatctctattagtattcattcgagatgacatagcagctcatatcatggttgtttattggatttatctgttctaattatataagtgtgtttactgtctgtgttttcacacaaactgctagaatttttaatgttaagacgaaaacatctgaagttctccatggcaaattgaatttttcagtcattttcttttctttttttggtacaattacttcatctggaatgtcttcattgaactcgttattctatttttcttagaattaaaagtggattaatgtgggtttttctgttcattttattgcagtattaaatgcttaagcttattaggaccataattcactttaaatataattgtatagaatatatttgcgtcgatcaaataattgcttcagatgaattcttagactcttgataatatcacacctaatttaacttgattttacaagctgtacaatccagttttagttttctattgtgataataacttttttcaaaccagtttcacatcttaatgaaataacattctctgactgcacttgcttcagtactctcttgcctgcctgtttttgacctctgcatgagttggattagatgtttttcttactgtcacttctaaatagaaaatgacagtgttataaaaaagggaaggataaaacctttgacatccccttgtgtctcaaaagtccacagttattcaaacaatggctttttttgtgatgagagtatttgttaaaaaaaaaaaaagacttcaagaaaaataaaagttcagtggagctgcaaataaatctggtgaataatttcatctttggtaatctcccatttcctgagttcttcctcaatccaagctgtcctgtgtagtatataacatttgggcattttctctgatatactatactctcatgttctataaatttctgtcccgtaattctaacactttacattttttctttgctatcagctatagctattcatggaagggaagaatcactaaatacttgtctagttatagcatgatgtgagcatctcctccttatccctcgatgcctggcttggtgtctggcaaacagtccataattagcagatgttgaaagaccgtttacaaagcagaatttggggatttaaagtgcaatgatacaacaaaaagatttaattacagcttccagtgttttgactatgtgaaccatatccaactacttttttgaaaatctagttctatgtaatatatttctgtggcatcaaattttagttgattgtattagtcaataggaagtggtggaaaatttctaaataaattcaactattaaa

SEQ ID NO: 259 - DNA, 1971 bp, Homo sapiens
aattttagctgggattatgctgtgattatgtttggcttaacagtaatgaaaataagtttaggctgggtgcggtggctcatgcctgtaatcccagcactttaggaggctgaggcaagcggatcacctgaggtcaggggttcgagacaagcctgaccaagatggagaaaccccgtctctaccaaaaatacaaaattagccgggtgtggtggcgtctgcctgtaatcccagctactcgggaagcggaggacaatcgcttgaacccagaaggcagaggttgtggtgagccgagatctcgccattgcactccagcctggacaacaacagcgaaacttcatctcaaaacaataataagtttacaacctctgaatatgtaccaaatggagccaggggtggggagtattaggacaagccccgcactgcagagccccccagctctcactcgtggaccaagtgcatgggacacagccattcggaaagctctttcttttggagtgggactgggtgttctggttttggtttgcttgttttatcattttgtgacattggcgcctattcttcagtttgcatccctgccttgcttgcttgaagctggagcacaaatgtcccgtcaccctgtaacaacacaagtatgcatcatgcctgcgaggcttagcttgggaagtggaatctccaggaatctccttcggttgtctgtctgccactttacactgttgctcccatttcggtcactgaggccctgtcccttatcctccagggacatggtgctgtcctatgagctctggctcctttgtgacttttacattgctcctccagatagcagtggcagtggcatttgcaaaaaggctatttgagaacaaataagaaaaaatcttcaaagcgaagatgatagtaaaacagccctcatttttcaaagtccattcttttttctggtccgtgcactgccagctcacttctctggctaaaacccgggggcggcgggggtgtgtgtgggggttagttttgcaaaaagtactgatggcaccgctgtgctccaagttaaccagaacacaagaatcgaaaaagcctgtgagatactggtgctcgtgatcgtaagctccaggtcggggggttttcagatgaacacaaaaagggggctgctcccgtcccaagatgagtgataaatgagtcacttctcatactcgcactcacactcgctccatttcctctgggatgactgtcttccgtcctaccgctgtggctgctgttatttgcctgataaacttctttccctctccctccctctgacacagaaacacacacacacacacacacacagacacacacacacacacacagcccgctggatctataagcagtttgtaacaggatgcaccagttctaatcacgtttcaagtcaaatgaaccagtcgcagcttcctaataagtgaatggctgacataaggagttaattcagaagcagctcaatactatggacaatactagtggacaatattagcatactgctcgtacaacaaagataccgtagtctctggtgctgcctcttcaggacgaatttgctgaaagtgagttgtaattagagatgttaaaaaaaaacattggctgcgcgcgatggcttactcctgtaatcccagcacttttggaggcgaggcaggtggatgacctgaggttaggagttcgagaccagcctggctaacatggcaaaaccccatctctactaaaaatacaaaaaattagccaggcatcgtggtgggcacctgtaatctcagctacttgggaggctgaggccgaagaatttcttgaacctgggaggtggaggttgcagtgacccgagatcatgccattgcactccagcctgggcaacaagagtgaaattgtgtctcaaataataataataataataataaactgagatttatcattcctcctctctccttttccttgagaacttaataaaaatggaaaatatccatt

SEQ ID NO: 260 - DNA, 4957 bp, Homo sapiens
ccgcgcccgcgcccccgccgccgccatgggcgtgcagggcttccaggactacatcgagaagcactgcccgagcgccgtggtgccggtggagctgcagaagctggcccggggcagcctggtgggcggcgggcggcagcggcccccgcagaccccgctgcgcctgctggtggacgccgacaactgcctgcaccgcctctacggcggcttctacaccgactgggtcagcggcggccagtggaaccacatgcttggctacctggcggcgctggccaaggcctgcttcggcggcaacatcgagctcttcgtcttcttcaacggcgcgctcgagaaggcccggctgcacgagtgggtcaagcggcagggcaacgagcgccagacggcacagcagatcgtcagccatgtccagaacaagggcaccccgccgccaaaggtctggttcctgccgcccgtctgcatggcccactgcatccgcctggcgctcatccgcttccacgtcaaggttgcacagagcattgaggatcaccatcaggaagtgattggtttctgcagagagaatggtttccatggcttggttgcgtatgactctgattatgcactgtgcaacatcccctactatttcagtgcccatgccctaaaactgagccggaacgggaaaagtctcaccacaagccaatatctgatgcatgaagttgccaagcaactggacctgaatccaaatcgttttcctatttttgctgctctcttaggaaatcacattctgcctgatgaagatctggcttcctttcactggagtttacttggtccagaacatccactagcctcactaaaggtccgggcccaccagctggtcttgccaccttgcgacgtagtgatcaaagccgttgctgactatgtacgcaacattcaggacacctctgacttggatgccatagctaaagatgttttccagcattcacagtctagaacagatgacaaagttattcgatttaagagagcaattggatattattcagcgactagtaagcctatgtcatttcatccaccacattacttagcagccagacccggtccgtttggaatgcctgggatggtgccgccgcatgttcctcctcagatgctcaacattccgcagacctctctgcaagcaaagcccgtggccccacaggtgcccagcccagggggcgccccgggccagggtccatacccgtacagcctctctgagccagcacctctcactttggacacgagcgggaagaatctgacggagcagaacagctacagcaacattcctcacgaagggaagcacacgccgctgtatgagcggtcctcgcccatcaacccggcccagagcggcagccccaaccacgtggattccgcctacttccctggctcttctacatcgtcatcttccgacaacgacgagggcagcggaggggcgacaaaccatatcagcgggaacaagattggctgggagaagacgggaagccactcagagcctcaggcacgaggagacccaggagaccaaacaaaggcagaaggctcgtccactgcctcttcaggaagccaactagccgaaggcaagggaagccagatgggcactgtccagccaatcccgtgcctcctgtcgatgcccaccaggaaccacatggacatcaccacacctcccctgccccccgtcgcacctgaggtgctgagagtggccgagcacaggcacaagaaggggctgatgtacccctacatcttccatgtcctgacgaagggtgaaatcaaaattgctgtttctattgaagatgaagccaacaaggacctgcctccggccgctctgctctataggccagttcgtcagtatgtttacggagtcctgtttagtttggcagaaagcagaaagaaaactgagagacttgcttttagaaagaacagacttccaccagaattttcaccagtgatcattaaagaatgggcagcttacaaaggaaagtctcctcaaaccccggaactggttgaagctcttgccttcagggagtggacctgccccaacctgaagaggctgtggttgggtaaggcggtagaggacaagaaccgcaggatgagggccttcctggcctgcatgaggtcggacaccccagccatgctcaaccctgccaacgtgcccactcacctcatggtgctctgctgcgtcttacggtacatggtgcagtggccgggagcacgcatccttcggcgtcaggagctagatgccttcctggctcaggcgctgtcccccaaactctacgagcctgatcagctccaggagctcaagattgagaacctagatccccgaggaattcagctatcagctctcttcatgagtggagtagacatggccttgtttgcaaatgatgcatgcggacagccaatcccctgggaacactgttgtccttggatgtattttgatgggaagctcttccaatccaaactcctcaaagccagccgggaaaagaccccactcattgacctctgtgatggtcaggctgatcaggctgccaaggtagagaagatgcgccagagcgtcctcgaggggctcagcttctccaggcagagccacacgctccctttcccgccgccacctgccctgcccttctaccctgcctctgcgtacccccggcactttgggcctgtcccaccctctcagggcaggggcagaggctttgcaggcgtctgtggctttggaggcccctatggggaaacggtagcaacaggcccttaccgtgccttccgtgtggcggcagcatcgggacactgcggagccttctcaggcagtgacagcagcaggactagcaagtcccagggcggagtccaacctataccttctcagggaggcaaactagaaatagctggcactgtggttggccattgggctgggagcaggcggggccgtgggggccgggggcctttccccctgcaggtggtttctgtcggaggaccagctagagggcgtccaagaggagttatttccaccccagtgattagaacatttggaagaggtggaaggtactatggcagaggttacaaaaaccaggcagcaattcagggcagacctccttatgctgcttcagcagaagaagtggccaaagaacttaagtcaaaatctggggaatcgaagtcctctgctatgtcttcagacgggtccctggctgaaaacggagtgatggccgaggagaagccggctccccagatgaacgggagcacgggtgacgccagggcccccagccactctgaaagtgccttgaataatgactctaaaacgtgcaatacaaatcctcatttaaatgcactaagtacagacagcgcttgccgcagagaagctgctctggaggcagctgtcttaaataaagaagagtaaacttattttttatagagggtgaaggatgctggaagggtaaggatttaggaatatctggagagaaagagagcctgcagttatgtacattttgtcctttccgtaagagaaaaatgaggactttggaaattcagatccctctttgatatcagagatttaaacaacacatttttagttttaaccagttgtagtcaaaatgctacaataaaacaaaaaagagaaagaaaatgaagagcatttgactcccgcacttaaaatgaagtacacataaagtttaaactggttatgacaaaagcctttagttgtgtttcttgaactataaagaaaacaaattttggcagtctttaagtatatatagcttaaaatataatttttagcatttggcaccatatgtatgccattatatttgattttgcattactgtttcacaatgaagctttctttaaggctttgatttttatgattatgaaagaaataaggcacaaccacagtttttctttcttaaatttcatcactgttgatgtggttcttttgtgttaaaaaaaaaaagtgcaactatcaaaactaaaaaattatagagtaatattgccgttctgctgattttaaatatacaatacatcatacatactttacaagcaagttaaatggagataaagttgaaatcatagaagatgcaaatgacctttcaaaatcaacacaatgtgttctgaaactttcgtgactaataccatgcatctgtgatcaatgaactatgtggttttgaatcggatgtagaccattagtactactacttgagctaaacttctgcatggttcataatttttaaagtgtgtagttaatatgcatgttatcgtcctttcttccattcttaacagtatgtgcccatttgcaaaacaaaaatgctaataatcagtaatagtcctataaaagatgttaactctgtttagtcattgactgatcttgctctaaccttaaaattttgtgattattgacctctgttgcatttattctaaagccccccaaaaattatctagccgtttcgaatatcaacattaccctggtgtattcactgctgtatgcattattgttctttgttgctgttttatgccttcatattagcaaatatgaaattctgtgaaaaaaaaccctttgatcttaaaaaaaaaaaaaccaccccccccttctgtagcaggaaacaaattgcttgttcttgagaactttcccatcaagaatttagtagaagcaggtatacttctatcattttgatgtttttgttaatgtttccaaacaatgtactttgaaatcagaatcacttcttatcgttttcatatacttctgatgctcttcatcacattagtgatcagaaatgaggtgtaattccccaacccctgcccgcaagagctaagtaggatcttactgtaagttgaagggagttttgccctaactcatggattgtgcaagaatgaactgctgttgggtttgattgactgtcgatggattgtggtgtggtgtatctgaaggctattgaatgcaacttacaatgcttaataaaaatctttattcttttagtataaagta

SEQ ID NO: 261 - DNA, 1242 bp, Homo sapiens
gacagagcggacccaggccctcggccgccccgcgtcatggccgcgccggccccggtcacgcggcaggttagcggcgccgccgccctggtcccggccccgagcggccccgacagcgggcagcccctggcggccgccgtggccgagctgccggtgctggacgcccgcgggcagcgggtaccgttcggcgcgctgttccgggagcgccgcgccgtggtggtgttcgtgcggcatttcctgtgttacatctgcaaggaatacgtagaggatctggccaaaatccccaggagtttcttacaagaagcaaatgtcacccttatagtgattggacagtcatcctaccatcatattgagcctttttgcaagctgactggatattctcatgaaatctatgtcgatcctgagagagaaatttataaaagattgggaatgaaaagaggtgaagaaattgcttcctcaggacagagcccccacataaaatcaaatctactctcaggaagccttcagagcctgtggcgggcagtgactggccctctctttgattttcaaggagacccagctcagcaaggtggaaccctcattttaggtccaggtaacaacatccattttatacaccgcgataggaataggttggatcacaaacctatcaactctgttttacagcttgtaggagttcagcatgtgaactttacaaacagaccttcagttatccatgtgtgacttaaaatgcactcagtcactttcaactggaccttctggaatgtgaccttcaatgcctgggtgtaatatcctcgtgcagtgtctaacctgctgtcccttcccagcctttgaggagttagggaagcataaagggggcttgaacctgttgaattgcatgctgggaagcatcagttgtcaaaatatgttatatacttccattttataacttttaacattttatacaaaaaaaatgaatatacaaaatataactttaaaagctataaaatcataaatactctaaattattttacattatggtatattcagtcaatgaaagagttttttggcaatataaattctgacagtatataaggggacaggagaacaacacaagaccattatattcagtgaagaaggcaaaatatcaaatctgtcaacaatgtaactgcatttttatatgtatatatttgtatttttgtatgctttggaaaaagacaggaaataaacaccaaaatgttgccagtaggtaaaaaaaaaaaaaaaaaa

SEQ ID NO: 262 - DNA, 2834 bp, Homo sapiens
gtctgcggaagtggtgacccgtgggacgcggctgagacaggagactgaaaggaaccataatttgtgacatcagttgttttctttgataagcagctatttatgattctggaagattaaggcagataggaaaccccatctgagattttaataaatccctcaaacaataaaccacatcatggacatacagctggaccctgccagagatgacctgcctctcatggccaacaccagccacatacttgtgaagcactatgtactggatttggatgtggattttgaaagtcaagtcattgaggggaccatagtgcttttcctcgaggatggaaacagattcaagaaacagaatagctctattgaggaagcctgccaatcagaatcaaacaaagcctgcaaatttgggatgcctgaaccctgccatattcccgtgacaaatgcaaggaccttctcatctgaaatggaatataatgattttgcaatctgtagtaaaggtgaaaaagatacttctgataaagatggtaaccatgacaaccaggaacatgcttctgggatttctagctcaaagtactgctgtgacacagggaatcatgggagtgaggattttttgctagtgttggactgctgtgatttatctgtgttaaaagtcgaggaggtggatgttgctgctgtgccaggtctggaaaaatttacaaggtctcctgagctcacggttgtttctgaggagttcaggaatcagattgtacgtgaacttgtgactttgcctgcaaatcgttggagggagcagttagactattacgctcgctgcagccaggctcctggctgtggggaactcctctttgacactgacacttggagcttgcagataaggaagacaggggctcagacagctactgactttcctcatgctatcaggatatggtacaaaactaaacctgaagggcgatcggttacatggacctcagaccagagtggcaggccatgtgtttatactgtgggatctcccataaacaacagggccctttttccatgccaggagccacccgttgccatgtcaacatggcaggctacagttcgagcagctgcatcttttgttgttttaatgagtggggaaaattctgccaaaccaacgcagctttgggaagagtgctcaagctggtattactatgtaactatgccaatgccagcctccaccttcacaattgcagtgggatgctggacagaaatgaagatggagacatggtcatcaaatgatttggcaacagagagacccttctcaccttctgaggccaacttcaggcatgttggtgtttgcagtcacatggaatacccctgccgcttccagaatgcttctgccaccacccaggagatcattcctcatcgggtctttgcccctgtgtgcctcacgggtgcctgccaagagacccttctgcggctgatccctccttgcctctcagcagcacattctgttctgggagcacacccgttctctcggctggatgttctcatcgtccctgccaactttccaagtctggggatggccagacccagtaaagacaaaactggccacacaagtgactcgggagcatctgttatcaagcatggacttaatccggagaagatcttcatgcaggtgcattatttaaagggctacttccttcttcggtttcttgccaaaagacttggagatgaaacctatttttcatttttaagaaaatttgtgcacacatttcatggacagctgattctttcccaggatttccttcaaatgctactggagaacattccagaagaaaaaaggcttgagctgtctgttgaaaacatctaccaagactggcttgagagttccggaataccaaagccgctgcagagggagcgtcgcgccggggcggagtgcgggcttgcgcggcaagtgcgcgccgaggtcacgaaatggattggagtgaaccggagaccccgaaaacggaagcgcagggagaaggaagaggtgtttgaaaagcttcttccagaccagctggtcttgcttctggagcatctcttggagcagaagactctgagcccccgaactctgcaaagcctccagaggacataccacctccaggatcaggatgcagaggttcgccatcggtggtgtgaactcattgttaagcacaagttcacgaaagcctacaaaagtgtggagaggttccttcaggaggatcaggccatgggtgtgtacctctacggggagctgatggtgagtgaggacgccagacagcagcagctcgcccgtaggtgcttcgagcggaccaaggagcagatggataggtcctcagcccaggtggtggccgaaatgttattttaacgaggaaagaccacagcaagattctttcattcgtctcctcctagcctgggggaccaggctcgaactgaccctggacatcaaaggagggattatgtggctgctaaagccatcggcccacagccctgttcacgtcttggtgcttctctttcccagaggctggtcccagccaggcacacacaaaaggcagattctcgtaaacgcagcctccctccctggaggctgcctcctgccctggatctggagtggagctgctctgagattttgagttcttctgcagagatgattaaatatatccaagagacattggaaaacctgctgaacattttacattggtctgctcagcacatggctggatgcggatatttctataattccagaaagtcacacagctcctctgtatgagaccagtgggcgccatttaaaagaacaggatgagaatctaagatatattattaataaatgtaatggattttttttttgtaaaaaaaaaaaaaaa

SEQ ID NO: 263 - DNA, 3646 bp, Homo sapiens
ggggccagcccgctgacagattctcggtggcggcggcagcggcggcggccctggactgcggggaatgggaatcctaggtccctgactgagcacctcccccgcctccctgcccccgacatggctcaggagaagatggagctagacctggagctgcctccgggtacgggcgggagcccggcggagggcggtggcagcggcggcggcgggggcctcaggaggtctaacagcgcccccctgatccacggcctcagtgacacttcgccggtgttccaggccgaggcgccgagcgccaggcggaacagcacaacgttcccgagccgccacggcctgctgctgccggcctcccctgtccgcatgcacagcagccgcttgcaccagatcaaacaagaagagggcatggacttgatcaaccgagagacggtccacgaacgggaggtgcagaccgcaatgcagataagccactcctgggaggaaagtttcagcctgagtgacaacgacgtggagaaatccgcctcccccaagcgcatcgatttcattcctgtgtcaccagcaccgtcacccactcggggaattgggaagcagtgtttttcgccatccttgcaaagttttgtaagtagcaacggattgcctccaagccctattcccagcccaacgacccgatttaccacccggagaagccagagccccatcaattgcattagaccaagtgttcttggaccattgaaaagaaaatgtgaaatggaaactgaatatcagccaaagagatttttccagggcatcaccaacatgctttcttctgacgttgcacagctgtcagatcctggtgtgtgtgtatcttcggatacccttgatggaaacagcagcagtgccggatcttcttgtaactcaccagcgaaagtcagcactaccaccgactctcctgtgtcacctgcccaagcggcttctccatttattccactagatgaactttcgtctaagtgattcactcatcctgagactttctttttgcagtggagagagagaataatctagttggggcaaacactgaactttgtcaattaatttgaggctatttcctatttgaccccttttcttttttgaaattccctgaaatgatgttattctagagaacttctatgtcaggttcctttggatacccttgaattcagtgtagtaatattttcagacgtttccccaataagtgtgttgaagcatacatctttacgctgctaatatgtctaaatacatatgttatcccttgatttttttaaataactgagagctctatttatttatgggattattaagttctgatgaaaatataaatgttgacttaatcagcatagtaaactgatgtttaaaattccatacttcatgcccacactaatttttaatgttattttcagtggttgccgatttccatttgatgaagaactatacagcttaaaaaaatacgttagttatatctatctagtggttgtctgttttacccaggaattcttggatatttagttttctgggtactgaagtggatgggagggggaatgattaaagaacaaattataaaagtttgaacaaatcttttcaaattaagtatataaaagtaaacttttaagaaaaacatttttaatgagattttaatagtaattctagtcagtcatacaactataactactatagagaaaataaaattttttcctttttttttttaaccggaaagtgcatttgcttgggtgtaatcctaaagtgaaatgggacagtgccttgcagtctttgcccactgtacataggctaaggctaagctctttgtactactgcaaacttaaaagtttttcaaatgtgggaaacgtgtgggaaggcttgttgaactttggcgcactcaggtaaacaatactctctcaattgttgatatactttaaaatattcagttgtgcctcagttccagaaattattgccaaacaggagccacagcaatttttggctacttttctgctctgcccatctgtcaccttactggttttcccttgttcaggaaggaagcagctgtttccttgccaacaggtcccttcctctccatctcccaccaaactagggcaccattgattagacaaaggtacagtgtaacttgggtttctgacagcaacaacaggactgtgaattgtttaacctctgtggttaaagctacagcttgagttgactgccttggggatgtcagttaattaaggggtgatgatttgcaagagaaaattagtggagagtcacataggtaaatcattatttaacttaggttttcctaaagttagaatagtcgaatgttcttttctttacctttacaattaagacaaaatgtttaataagaatagcaaaaatttttttatattatgcatccttatacctcacatatcttccttaactagatagtttgacagaaagaatggcatacaaagaggaaaggggaaaaatgactcagaacaagacaaaagctctgactgtttaaagttatcgcttacagagactttaacaattttgtggaatttttacaactatgagagtaaatggaactggtcaactcttgacagttgcctcaagatggagtgaaattgcatcgagggtaagactgtgtccacaggtttaaaattctctcttctgagtaatagtgttcatgtgctcccattctcgaccctgttgttgaaattcaaacttaaatagcctgacttcttgttgggtaacttgccctgcctccagaggtatttgaacttcattatcttcagcacaggaattgttaatcttctcacttcacctgttcttgcattagctcaattgatgtcatcactgatttcctaaactagaaactatggaagcatctttgacttttccttttctctgttggattagcttaatcaccaagtcctgtcaacttctgaaatgaatctcaaatttcttcccttctctatctgttgcccctgattttgccttaagttcttgcctgagtgatctcccagcctgtcttctgtctccttttggttcagtctttatactgcctcttgagtaatctttctgaaatttaaacttgatatttttcgccctcttgcttgaaaacttcacttgcttccccatttcctactctttaaggaatgatttctttagcctcagatagaaggacctttatgatctggccatattctgaaatagcttcaatcctctcctcatctctgttccagtatacatctttccttcttattctgcaaacattagaccacttgatattctttaaatatgtcatgtacttttcttgtgtctgttctttgggataattcctatccttttcagggaggcaaattgcacgtgagtttaagtatgaaggcaatgtatacctgctgattgtaaaatatttaaacattgtacatatctgtgtggttttaaaagtctgcttttaattatgtaaaattcatcttccctttccacagataacttctgttaacaacttgatatctattgtacaagatgtgttactggcatttccatgtatatatgtatataaatgcaggaaaccaacatgtcattgacacctctcttctttacttttccccatatctaatcattcctcaagtcttactgatttttatcagctagaatctatctcctt

SEQ ID NO: 264 - DNA, 8006 bp, Homo sapiens
cgcccctcgggggcggctgtggcggaggaacgatggccgacggcggcggccctaaggacgcgccaagcctgcggagctctcccgggccggcgccgcgggtcccgcgcgcggtcgggccgagtggcggtggcggggagaccccgcggaccgcggcgctggcgctgcgcttcgacaagcccattaagcaggccttctacaacaccggggccgtgctgttcgtgtgcctgtgctgcggcgccgcggtgctggtctacttcatcctggaggccttcctgcggccgctgctctgggccgtgctatgcggcacttttctgcaccccttcaagagctcgctgacgcgcctgggccgccactggctgcagcgcctgcaccgcgcgcacacgcccatcgtcctggccgcgctgctcctgccgctctgcttcgtcgactacggcgtcgaggccctgggcgagcaggcgctgcgccgccgccgcctgctcctgctgctcggcgccggcggcccgctcctgtacggcctctactgcctcggcagctacttgggcgtgcaggtgctgctggtgcacgctgccacgctcatctgccgcgggctggactacttcagcagcctgtggatctggacgttggtggttggctatgtgttgactgtttcattcaagtggaatgcaagcactgaacgctacttgagagcagtttcaattcctgtctggattatattgctttttcatttagcatccctggctggctcatggagaattccagtattcctggttattgttttcctgatgtctgtgggtaccctctatgaaaaacagaatggaaaagagtcttctggggcagagttaccagggcaggttatctccatggcagcttctactctggcaaacttggccatctctatcacagggtatgaatcaagcagtgaagaccagccctccactcagcctgcagaagcagtggacaggggagaatccgctccaacgttgtccacctccccttcaccctcctccccttcacccacttccccttcacctactctgggcagacgaaggcctgaaataggaacgtttcttagaaagaagaaaactagtgacatctactttgtgtctctagtttgggccattgtcgtcatgcagatctggttgaacctgtggattgtgcagttgctgccagtgccgattgcagtctggatactcaaaaagcttgtcattcactttggagttgtggatttcctagagaaacgctaccatgtgtggtggggcattatagaaagcttcctgaaggagcggcagggagctctcgcgccttggcccattgtcgggcttggaaaattcttgttaaaagttgatagcaagctctggcactggctaaataagaagatgatcatctggttggagaagatgttagataaaataattagcattttcatcatatttttgttagtgataggaactcttcttttagccctactcctgactgcaaaggtacatcaagagagtgtacacatgattgaagtcacaagtaatttgattaatgaaactctagcaaatcaccctgagtgggcaaattggcttcctgaggctcaggtagtccaaagagccctgaattctgcggctaacaacgtgtatcagtatggacgagaatggataactcacaagctccataaaattctaggagataaggtgaacaatactgctgtaattgaaaagcaagtactagaactttgggacagactgtatcactcttggtttgtaaagaatgtaacacactctggaaggcacaaaggacagaagttgcatgtcagtcgtcagaatagctggctgggagacattctggactggcaggatattgtttcctttgttcacgagaacattgagacatttctttcgatcttggagtctctgtggatcgttatgagccggaatgtgagcctgctgttcaccactgtcactacactcttgaccatcctcttctacagcgggacagcccttctcaattttgtactctctctgataattttcctgaccacactattttatctattaagttccagtgatgagtactacaagccagtgaagtgggtgataagcctgactccactatctcagccaggtccttcttctaatattattggccagtctgtggaagaagctatcagaggggtgtttgatgcttccctcaaaatggctggcttctatggattgtatacctggctgactcatactatgtttggcatcaatattgtcttcataccatcagcattagcagcaatccttggagcagtgccattcctggggacatactgggcagcagtacctgcagttcttgacctgtggctgacacaagggttaggatgcaaggccattttactgttgatttttcatctcttgccaacatactttgtagatactgcaatctactctgacatatcaggaggtggccatccttacctgacaggcttggcagtggccggtggagcatactacctaggcctggaaggagcaatcatcggtcctattcttctctgcatacttgtggttgcttccaatatctatagtgccatgctagtgagtcccacgaattcagttcccacgccaaaccagaccccatggcctgctcagcctcagcggactttccgtgacatttctgaagatctgaaatcttcagtaggttgatgtggtttcctctgcagtgatttttctaggaagttcaaatttgacagcgagttcagctcagctgtggccctctgcccttccagctgtgcctagcaagcaaaacccaggaaagaagcagaagcctcctggccttacatacagaatgcctggacaagagagaacttgctgcgggctgctttgtattttaaaacacagcttgagagttcagagttggtggtttgctcacttaactgttgttaagatggcttgaaaagtttcattttatacactggtaccctggcttgaaatttttccactttggttatctatgttactatattatatatttataaagttattttaagaactctaaactacctgctgttaaaagaatagatggtgtaattttttcctggtttaagaaatgtattgttaaacttttctaagacagtcacttttcaaggaagagggctttcacttttgagtgtgtagttgagtgagcaggaaaaatgaatcttctacccttctcccacaatgtattatacgctctttaagaaataataaatcataagtataagggtggggtggcttatttgatgttcagttttatattataaccctgggagatacaaagactgaagctcttcctcctcttccttttctcttcacgcttctttacactattgccaaattataaaacttggctgaccacgttgaagtgaaatacttattaagctgctatgaatggtaacagtatgataaaattcatgctgttattaggttttctccttccaggtggttgaagtgaaaaatctcaggtgtagcaatactctgatttgttaaatgtatccgtttcattatttggaactctgccaataagttagttttcagcagaattttgtatttatgtagtattttcccatctcttagcacagtgccttgcacatgactctaaatgaatgcttgttgaattgaattgcaactttaaaaatatctcagatatcacaataaccagcatagtgctttacattttacaaagtccttttgcacatactatttcacaagtacatcacatcagctttcatatagctttatattattttacatcagttttacactgatggagaagctaaggttcagaaaagtgaccaactcaaagtcgtaaagtgtagtaggatttggcctcagatctttgactccgttgtgtgcagattctgctgtattagtgttccttctaaatattgtatgcagttttcccagtgttacgagattggtgttgctatccatttgttgtgaatgaagacttgtcctatagtacatgacagggctgagagtggactgtagttcttagctgaaccctttctactgtttaaaacaatcatcaggcctatcctctgctcccaggggaatgtgggagagaaaagggttcttggccaggctgtaggtggtggctcacatctgtaatcccagcactttggaaggctgaggtgggtggattgcttgagcccagggatttgagatcagcctaggcaacatggcaaaaccccatctctacaaaaaaaaaaaaaaaaaaaaaaaaattagctgggcacggtggtgtggctatagtctgagctactcaggaggctgatgtatgaggatcacctgagtccaggaggtcgaggctgcagtgagccaagatggcgccactgcactccagcctgggtgagagagtgagacactgtcccaaggaaaaaaaaaagtgttggggggtagttcttaagcgttgaagatttcctttttggaaagtatttaaaggtagaaatattaataatttttcctaaaacatctccctaagaagtcactgataattataattagtttaaatttattcttacactacttaagaaaaatttcatttagaaaaggctaccatgagatcttttgactatatggagtagactgcatacagatctctttatttctattatgaatattttagcgattataatcagctattccactgagtattagatttggtcactaagtaactcatgtttttctttagtcaatcattcattcattcactaaaacatttgttgagagttggctaaactctagattctgtgccaggcactgtacagggtgatggagatcactcataagaaggcctcttgctcttagccagatcatatgtaatactaaatttaaattttttgcattaaaaggctaaaaaatcatttgtttttgttaattatatactggttgatttatagatgtaattagcacatattcataagagacaaatatatacaatgagttactatacatatacaaagtgattttagctgtataaagtgatattgcaaaaaactacagctaatgtttcttgctgggtaattattagcataaatatcaggttcttagaggtctttaagagaatactttagagctaccaaaattagcagcagtgatgtaatatcaccctgaaataccaggagcagaggtgccccagagtgcttcacagctatgatcaggaaacttgacctgccccattgctacagcaacggcataaggactaggaaggtccactagctggggaggtcttggaaccctccgagccagaaagaagcattccagcatgattcctcagatgcaatgaggaaggtttacagaattttcacagggcaacagagatcaagtggtatgaaaaggtaggagttttaagctcaagtctcaaagataacctacctttacattctcagtcagaatttgacccagaaagaggaagtttcttcaggaacagaccgtacgttgatgaagtagaagtcatttcagtaaaaacggagtacagaacttggtcataatatcttgcattttatagatttattaaagattagtttcaagttcacattcgctattcagttgtaaaccgaatggatgggaggggagaaaatacaagctctccacacaggtatgctcctctcttttctgagagagaaggcatgggattttcagcataaattccatgttatgtgagtgctgtttgagttctgaagttcctatcaatatctgttcctgcaagtgatctctgtaagaccaccttacatgctggtcttagttattgttaaaattgcaaggtttcttcacaccctctttgataagaagtgtttagctggcagagctttcccttgacttctgagtctagtgtgggttggcccatgacagtgggaagaaatccaacatgttacatggagaccttgtatgtaaacaaactctgtagcctttgaaagtggaactgctttttacagttaaagggctgctaaatggcttgcagatgagatcttctggctcaccttgatcttcacatgaacccattgtgacctatctggatttcctaggacctgtagtttccatttgggttatattagtgcctcaggaatgtgtcactactggtcaagcaatactcagaaattcaggctgtgaggggttagattagaggaaagtaatttaggtgagctatccagagctttcaacctcagggtttataggaaaaaaaaacaaaatacaaaaacccttaggacttctcatactctagccctgaccttgcagtctcctctgaggggcctcctaagacccttaaaataatattacaataggactttgagtgtgcatttcacagtggaaatagcctctggctagcattacttccaaatgctagttccagctaaaaacaagtactttttattagtttcttgtctttcaacattctgccatcaaaatatattcattttattaacttaccgattattgggaacctgcaaaaaaaaaaaaaaaaaaaaacacacatgctgtctgcagccactgtttggttatttttgatagtttaagagaattataaatcaagttgttctgtctactagagtcagaaattctgtgctagaatgggacttctaaaattaggtggtcctgtcactttctagagaaagacccaaattcataggtttaagtggcttgtctgacatacacatacagccagttagtaacagaattcagaatagaatagagttcttttttttctgtcagtccgttgttctacttctctttccttttcttcatggttgagcagcttttggcaaaatgtgttccatatagcagtagttccaagagatgttaatagatgtaagaaaaaaagtgtgtgtgtgttgggggtgggggattgcatggtcaattaaaatgaaggaatgctgagtttgtttccttactgtaggacttctaagagttttgaacatgctattacacattgtgaatttataaaaggggacaaacactgtttgaccttagactgcactccccttctttattcctcagagcatctcaaaggactacagggtcctttgagaaacatggcccttgatcaagtttacaactctttgagaagacatccctaatggaaatactgaatggcagatctattactgtggtaccatgtagtgtgtaataaatcttgaagtccagaaagcaagtatatttgctgtttagagctatacttaaggtatagagattcttttccacctgtggtgtgtaaaatcagtattgtgtttaattttgcaggtttttcaaggatcaactaatgtgcaaatacagtggtgatatattgatattacattttaataatgcttttgtatggcactttatagttttcagacaccttttgtaacagccctgtgagacagacaatattatccttattgtacagatgggggggctctggaggctctgaaaagtttttggtgatattcccctaagtttataccacaaaatgatggagccagaatttagttgcagaacttctgactccaagtccagagttctttactagacatctggtttcttactagctttttgctagctttttattttacagtgaaaagtatggaagcaaatcctgataattttggcttattatcaaatatcatttattttttattgcagagacccagcagatgtaactctcattgtagccatcccaaagaaaacccttctttgccctttgcagtgccacttatttaggtaactgaagtgtatttccagtacaatttgattttgaactaagatttgatatagagttgtaattgcttacataactctttgaaaatgtatcatccctgggttctcaggtgaaggaggcaattcaaaagtaaaaaagaatattcgaatacaataaataccctctgttctcacacaaatgctgtttcttagctaacttgctttgacaacctactgatgtaacttctttattaatgtgaaatatttatattttgaaataaaattactagtgttgaatgaatcatgtggtaaacttaaaaaaaaaaa

SEQ ID NO: 265 - DNA, 3406 bp, Homo sapiens
gcggccacacgcagctagccggagcccggaccaggcgcctgtgcctcctcctcgtccctcgccgcgtccgcgaagcctggagccggcgggagccccgcgctcgccatgtcgggcgagctcagcaacaggttccaaggagggaaggcgttcggcttgctcaaagcccggcaggagaggaggctggccgagatcaaccgggagtttctgtgtgaccagaagtacagtgatgaagagaaccttccagaaaagctcacagccttcaaagagaagtacatggagtttgacctgaacaatgaaggcgagattgacctgatgtctttaaagaggatgatggagaagcttggtgtccccaagacccacctggagatgaagaagatgatctcagaggtgacaggaggggtcagtgacactatatcctaccgagactttgtgaacatgatgctggggaaacggtcggctgtcctcaagttagtcatgatgtttgaaggaaaagccaacgagagcagccccaagccagttggcccccctccagagagagacattgctagcctgccctgaggaccccgcctggactccccagccttcccaccccatacctccctcccgatcttgctgcccttcttgacacactgtgatctctctctctctcatttgtttggtcattgagggtttgtttgtgttttcatcaatgtctttgtaaagcacaaattatctgccttaaaggggctctgggtcggggaatcctgagccttgggtcccctccctctcttcttccctccttccccgctccctgtgcagaagggctgacatcaaaccaaaaactagagggggcagggccagggcagggaggcttccagcctgtgttcccctcacttggaggaaccagcactctccatcctttcagaaagtctccaagccaagttcaggctcactgacctggctctgacgaggaccccaggccactctgagaagaccttggagtagggacaaggctgcagggcctctttcgggtttccttggacagtgccatggctccagtgctctggtgtcacccaggacacagccactcggggccccgctgccccagctgatccccactcattccacacctcttctcatcctcagtgatgtgaaggtgggaaggaaaggagcttggcattgggagcccttcaagaaggtaccagaaggaaccctccagtcctgctctctggccacacctgtgcaggcagctgagaggcagcgtgcagccctactgtcccttactggggcagcagagggcttcggaggcagaagtgaggcctggggttttgggggaaaggtcagctcagtgctgttccaccttttagggaggttactgaggggaccaggatgggagaatgaggagtaaaatgctcacggcaaagtcagcagcactggtaagccaagactgagaaatacaaggttgcttgtctgaccccaatctgcttgaaacctgactctgcttctctcatttgtcttcctaccctactcacataattcactcattgactcactcattcaccagatatttattgacctgctattataagctttacatcctcccatgttgtcctggcatgtgcagtatacacggtctaactcatctctccccagatctctcagaaccttgagcttgggaattgaactggggtcacctgtgtcctttcttatggactcgcaggattttagaaccctaatgcaccctggagggtagctgggccagacttctcatttcacaggtgaggagactggtgccccacagggattaagtgccttgcccaaggtcaggcttatctccagagggaggtgccctggactggggcccagatgttcagggaccctgcctacacctcatttccagtgtgggctgccttagttagttatgagaacagggaagggctgggaagagacagcctccaaggtcaacacttggagagggtttcacttgctctgaagaccctggtccaggattcgccctctcccatgccttcaagtcagcatcaggcttagggcaaagaccaggcctctgaagctgcctcttgtaattcatgcaggaagatgtcaaagtcagccccatcttggctgatcagggtgttcagccttaaccccacctgtgttctgaagtctcttaccctacctgctcaggactgagacagttattcactgaacatatttattaagcacttgctgtaggccaacagttaagaatccaataatgaaatggacagattcatggaacttagagtccaataggaaagtgagacccagacaatgacaatgagataaatgttaggaagggggaggtatggggtgacttccctgcagtcctgggggcctagatgggcccaagactgggtgagagtcttggcagagcctttgcaacaccttaagtggacaggactgggaggtcttggtggttggagccaacgtgggttccctgcggctccttagtcacctctgatagcagattgagggaggaaaacaggtaaggcatgaggaaatggccaggttgggttaacccactggtttcaaccagttcaggaatgaggttatttggccatgactggctgatcttgagctcaaggatctgcttcaaatgcacacaggcctagttgaagtttaaaccccagcaaaacattcctccctgtaaatggaaaatcctacttctacccccaccctgccctgttttttgttttttttttccccaagatcattagatgtcctcacccctcctcactgcctctcctctctgggacaggctgggacctttgaggaagataaagccttccttgactacccatcatattcagtgtccctgttcctcactcagagaggaaggcagaaccagtcaggcttatttcagtaagttccacagttctacaagactgcaggaattctccttaagggaggagagcaagcaggtgtggccccagcttctggaaatggcagaagagagggttttctcattgaatgggggtgggggctcgtgtgtcctgggaaaccccatcagtcccttcatttcttgagactcaactcctgggaggagagggtctcaagagttgtccctggaaggagggcgggggcagtctgcatctatttcaggttgtggctcttggttctaggactcttacttctctggctaagggctcagcttcttgggacttcaaccatcttctttctgaaagaccaaatctaatgtaaccagtaacgtgaggactgccaagtatggctttgtccctatgactcagaggagggtttgtcgggcaaattcaggtggatgaagtatgtgtgtgcgtgtgcatgggagtgtgcgtggactgggatatcatctctacagcctgcaaataaaccagacaaacttaccaacgtcaaaaaaaaaaaaaaaaaa

SEQ ID NO: 266 - DNA, 4007 bp, Homo sapiens
gccaaggcggccggctggagggacggggcccgaccgggagcggagccggagcggaagccgcagccgggcggcgggagcggcgggagcggcgggagcgggggaagcagggcgggccgggctccatggcgccagcggcgtccgcctgagcagcgcgggcaacagcggcggcgtcggccggatcgggccgcgacacctcctggccatgggggacgtgctgtccacgcacctggacgacgcccggcgccagcacatcgcagaaaaaaccgggaagatcctgacggagttcctccagttctatgaagaccagtatggcgtggctctcttcaacagcatgcgccatgagattgagggcacggggctgccgcaggcccagctgctctggcgcaaggtgccactggacgagcgcatcgtcttctcggggaacctcttccagcaccaggaggacagcaagaagtggagaaaccgcttcagcctcgtgccccacaactacgggctggtgctctacgaaaacaaagcggcctatgagcggcaggtcccaccacgagccgtcatcaacagtgcaggctacaaaatcctcacgtccgtggaccaatacctggagctcattggcaactccttaccagggaccacggcaaagtcgggcagtgcccccatcctcaagtgccccacacagttcccgctcatcctctggcatccttatgcgcgtcactactacttctgcatgatgacagaagccgagcaggacaagtggcaggctgtgctgcaggactgcatccggcactgcaacaatggaatccctgaggactccaaggtagagggccctgcgttcacagatgccatccgcatgtaccgacagtccaaggagctgtacggcacctgggagatgctgtgtgggaacgaggtgcagatcctgagcaacctggtgatggaggagctgggccctgagctgaaggcagagctcggcccgcggctgaaggggaaaccgcaggagcggcagcggcagtggatccagatctcggacgccgtgtaccacatggtgtacgagcaggccaaggcgcgcttcgaggaggtgctgtccaaggtgcagcaggtgcagccggccatgcaggccgtcatccgaactgacatggaccaaattatcacctccaaggagcaccttgccagcaagatccgagccttcatcctccccaaggcagaggtgtgcgtgcggaaccatgtccagccctacatcccatccatcctggaggccctgatggtccccaccagccagggcttcactgaggtgcgagatgtcttcttcaaggaggtcacggacatgaacctgaacgtcatcaacgagggcggcattgacaagctgggcgagtacatggagaagctgtcccggctggcgtaccaccccctgaagatgcagagctgctatgagaagatggagtcgctgcgactggacgggctgcagcagcgatttgatgtgtccagcacgtccgtgttcaagcagcgagcccagatccacatgcgggagcaaatggacaatgccgtgtatacgttcgagaccctcctgcaccaggagctggggaaggggcccaccaaggaggagctgtgcaagtccatccagcgggtcctggagcgggtgctgaagaaatacgactacgacagcagctctgtgcggaagaggttcttccgggaggcgctgctgcagatcagcatcccgttcctgctcaagaagctggcccctacctgcaagtcggagctgccccggttccaggagctgatcttcgaggactttgccaggttcatcctggtggaaaacacgtacgaggaggtggtgctgcagaccgtcatgaaggacatcctgcaggctgtgaaggaggccgcggtgcagaggaagcacaacctctaccgggacagcatggtcatgcacaacagcgaccccaacctgcacctgctggccgagggcgcccccatcgactggggcgaggagtacagcaacagcggcgggggcggcagccccagccccagcaccccggagtcagccaccctctcggaaaagcgacggcgcgccaagcaggtggtctctgtggtccaggatgaggaggtggggctgccctttgaggctagccctgagtcaccaccacctgcgtccccggacggtgtcactgagatccgaggcctgctggcccaaggtctgcggcctgagagccccccaccagccggccccctgctcaacggggcccccgctggggagagtccccagcctaaggccgcccccgaggcctcctcgccgcctgcctcacccctccagcatctcctgcctggaaaggctgtggaccttgggccccccaagcccagcgaccaggagactggagagcaggtgtccagccccagcagccaccccgccctccacaccaccaccgaggacagtgcaggggtgcagactgagttctaggccagtgggtccctgactgctgcacatggcacaggccgttcccttccggacccaggcaggctcagctctggggagggcaccctggtctgtgccttgtgggtggaggcggggcagggctgtgtggcaccgccagggagcgggcccacctgagtcactttattgggttcagtcaacactttcttgctccctgttttctcttctgtgggatgatctcagatgcaggggctggttttggggttttcctgcttgtgccaagggctggacactgctggggggctggaaagcccctcccttcctgtccttctgtggcctccatcccctcatgggtgctgccatccttcctggagagagggaggtgaaagctggtgtgagcccagtgggttcccgcccactcacccaggagctggctgggccaggaccgggagagggagcactgctgccctcctggccctgctccttccgcagttaggggtggaccgagcctcgctttccccactgttctggagggaaggggaaggagggggtcttcaggctggagccaggctgggggtgctgggtggagagatgagatttagggggtgcctcatggggtgggcaggcctggggtgaaatgagaaaggcccagaacgtgcaggtctgcggaggggaagtgtcctgagtgaaggaggggacccccatcctgggggatgctgggagtgagtgagtgagatggctgagtgagggttatggggagcctgaggttttatgggcctgtgtatccccttctcccggccccagcctgcctccctcctgcccgcctggcccacaggtctccctctggtccctgtccctctggtggttggggatggagcggcagcaaggggtgtaatggggctgggttctgtcttctacaggccaccccgaggtcctcagtggttgcctggggagccggacggggctcctgaggggtacaggttgggtgggccctccctgagggtctggggtcaggctttggcctctgctgcctctcagtcaccaagtcacctccctctgaaaatccagtcccttctttggatgtccttgtgagtcactctgggcctggctgtcgtccctcctcagcttcttgttcctgggacaagggtcaagccaggatgggcccaggcctgggatcccccaccccaggacccccaggccccctcccctgctgctttgcggggggcagggcagaaatggactccttttgggtccccgaggtggggtcccctcccagccctgcatcctccgtgccctagacctgctccccagaggaggggccttgacccacaggacgtgtggtggcgcctggcactcagggacccccagctgccgcagccctggtctctggcgcatctcttccctcttgtcccgaagatctgcgcctctagtgccttttgaggggttcccatcatccctccctgatattgtattgaaaatattatgcacactgttcatgcttctactaatcaataaacgctttatttaaagccaaaaaaaaaaaaaaaaaaaaaaaaaaaaaaaaaaaaaaaaaaaaaaaaaaaaaaaaaaa

SEQ ID NO: 267 - DNA, 2185 bp, Homo sapiens
cttggccagagccggggagctgggaggggtctaccggggctcgactctaggagttgggctgaggatttccacccgatcctcgaacctccggcccatctcatggacgcccctcccccttcaaacaccctcccccacatttattcccgcgtctgttttaaagatgggtaaactgaggcacagggagccgggccggggagcactgacagaaccagaagcaggttctgcctcccgtcccctcggagggccgacttgccccttctgggtttcgtcgggggtctcagatacgaggaggcccagctggaagccacctgagggtgtcccccgctaagatgcgcaaatgggaaaagcgaggccggggttggggaaagaacttgcccgagccgcagagcgcgtcagccggggaggtcggggcgggggcgacccgcgcgaccgaggatcgggtatctgggcccggcgcggagcctgcagggcggggccgcggcgcgtgctgatgacgcagtcggcgcggcggccctagcgacgcggttactagggagcggcgagccgagacggctacatggacgccactatcgccccgcaccgtatcccccccgagatgccccagtacggggaggagaaccacatcttcgagttgatgcagaacatgctggagcaactcctgatccaccagcccgaagatcccatccccttcatgatccagcacttgcatagagacaacgacaatgtgcccaggattgtaatattaggtccacccgcctcagggaaaacaacaatagcaatgtggctctgcaaacatctgaacagcagtctcctcaccctggagaacctgatcttaaatgagttttcctatacggccaccgaagccagaaggctttatctgcaaaggaagacagttcccagcgcgctgctcgtccagctgattcaggaacgcctggctgaagaggattgcatcaagcagggctggattctggatggcatccctgagacgcgtgagcaggctctgaggatccagaccctggggatcacacccagacacgtcattgtgctgagtgctccagacacggtcctgatcgagagaaacttggggaagagaatcgaccctcaaactggagagatttatcacaccacctttgactggccacccgaatctgaaatccagaaccgtctcatggtgccagaggacatctcagagctggagacggctcagaaactgctggagtatcataggaacatcgtcagggtcattccctcctaccccaaaatcctcaaagtcatcagtgctgaccagccatgtgtggacgtcttctaccaggctctgacctatgtccaaagcaaccatcgtactaatgccccgttcaccccgagggtgctgctgctcgggcctgtgggcagtgggaaaagtctgcaggccgccctcctggcccagaaatacaggcttgtcaatgtctgctgtgggcaactgctgaaagaggctgtggcagataggaccacgtttggcgagctcatccagcccttctttgaaaaggagatggcagttcctgacagcctcctcatgaaggtgctgagccagcgcctggaccagcaggactgcatccagaaaggctgggtgctacacggcgtcccgcgggacctcgaccaggcacacctgctgaaccgcctgggctacaatcccaacagggtgtttttcctgaatgtgccatttgattccatcatggagcggctgactctgagaagaattgatccagtcactggggaaaggtaccacctcatgtacaagccacctcccaccatggagatccaggctcgcctcctgcagaacccaaaggatgctgaagagcaggtcaagctgaaaatggacctgttctacaggaactcagctgacttggagcagttgtatgggtcggccatcaccctcaatggggaccaggacccatacacagtcttcgaatacatcgagagtgggatcattaatcccctgcccaagaaaatcccctgatgggttcagagccaggagcgctgccccagggaaagagttaatcccctgcccccagccccccagcctcggcacagctcccctaaaaagccaataaagcctgctggatacagaaaaaaaaaaaaaaaaaaaaaaaaaaaaaaaaaaaaaaaaaaaaaaaaaaaaaaaaaaaaaaaaaaaaaaaaaaaaaaa

SEQ ID NO: 268 - DNA, 7812 bp, Homo sapiens
cgcaccctccttccgcccctccttctccggggtcagccaggaagatgtcccgagctgctatccccggctcggcccgggcagccgccttctgagcccccgacccgaggcgccgagccgccgccgcccgatgggctgggccgtggagcgtctccgcagtcgtagctccagccgccgcgctcccagccccggcagcctcagcatcagcggcggcggcggcggcggcggcggcgtcttccgcatcgttcgccgcagcgtaacccggagccctttgctctttgcagaatggcccgcttcggagacgagatgccggcccgctacgggggaggaggctccggggcagccgccggggtggtcgtgggcagcggaggcgggcgaggagccgggggcagccggcagggcgggcagcccggggcgcaaaggatgtacaagcagtcaatggcgcagagagcgcggaccatggcactctacaaccccatccccgtccgacagaactgcctcacggttaaccggtctctcttcctcttcagcgaagacaacgtggtgagaaaatacgccaaaaagatcaccgaatggcctccctttgaatatatgattttagccaccatcatagcgaattgcatcgtcctcgcactggagcagcatctgcctgatgatgacaagaccccgatgtctgaacggctggatgacacagaaccatacttcattggaattttttgtttcgaggctggaattaaaatcattgcccttgggtttgccttccacaaaggctcctacttgaggaatggctggaatgtcatggactttgtggtggtgctaacgggcatcttggcgacagttgggacggagtttgacctacggacgctgagggcagttcgagtgctgcggccgctcaagctggtgtctggaatcccaagtttacaagtcgtcctgaagtcgatcatgaaggcgatgatccctttgctgcagatcggcctcctcctattttttgcaatccttatttttgcaatcatagggttagaattttatatgggaaaatttcataccacctgctttgaagaggggacagatgacattcagggtgagtctccggctccatgtgggacagaagagcccgcccgcacctgccccaatgggaccaaatgtcagccctactgggaagggcccaacaacgggatcactcagttcgacaacatcctgtttgcagtgctgactgttttccagtgcataaccatggaagggtggactgatctcctctacaatagcaacgatgcctcagggaacacttggaactggttgtacttcatccccctcatcatcatcggctccttttttatgctgaaccttgtgctgggtgtgctgtcaggggagtttgccaaagaaagggaacgggtggagaaccggcgggcttttctgaagctgaggcggcaacaacagattgaacgtgagctcaatgggtacatggaatggatctcaaaagcagaagaggtgatcctcgccgaggatgaaactgacggggagcagaggcatccctttgatggagctctgcggagaaccaccataaagaaaagcaagacagatttgctcaaccccgaagaggctgaggatcagctggctgatatagcctctgtgggttctcccttcgcccgagccagcattaaaagtgccaagctggagaactcgaccttttttcacaaaaaggagaggaggatgcgtttctacatccgccgcatggtcaaaactcaggccttctactggactgtactcagtttggtagctctcaacacgctgtgtgttgctattgttcactacaaccagcccgagtggctctccgacttcctttactatgcagaattcattttcttaggactctttatgtccgaaatgtttataaaaatgtacgggcttgggacgcggccttacttccactcttccttcaactgctttgactgtggggttatcattgggagcatcttcgaggtcatctgggctgtcataaaacctggcacatcctttggaatcagcgtgttacgagccctcaggttattgcgtattttcaaagtcacaaagtactgggcatctctcagaaacctggtcgtctctctcctcaactccatgaagtccatcatcagcctgttgtttctccttttcctgttcattgtcgtcttcgcccttttgggaatgcaactcttcggcggccagtttaatttcgatgaagggactcctcccaccaacttcgatacttttccagcagcaataatgacggtgtttcagatcctgacgggcgaagactggaacgaggtcatgtacgacgggatcaagtctcaggggggcgtgcagggcggcatggtgttctccatctatttcattgtactgacgctctttgggaactacaccctcctgaatgtgttcttggccatcgctgtggacaatctggccaacgcccaggagctcaccaaggacgagcaagaggaagaagaagcagcgaaccagaaacttgccctacagaaagccaaggaggtggcagaagtgagtcctctgtccgcggccaacatgtctatagctgtgaaagagcaacagaagaatcaaaagccagccaagtccgtgtgggagcagcggaccagtgagatgcgaaagcagaacttgctggccagccgggaggccctgtataacgaaatggacccggacgagcgctggaaggctgcctacacgcggcacctgcggccagacatgaagacgcacttggaccggccgctggtggtggacccgcaggagaaccgcaacaacaacaccaacaagagccgggcggccgagcccaccgtggaccagcgcctcggccagcagcgcgccgaggacttcctcaggaaacaggcccgctaccacgatcgggcccgggaccccagcggctcggcgggcctggacgcacggaggccctgggcgggaagccaggaggccgagctgagccgggagggaccctacggccgcgagtcggaccaccacgcccgggagggcagcctggagcaacccgggttctgggagggcgaggccgagcgaggcaaggccggggacccccaccggaggcacgtgcaccggcaggggggcagcagggagagccgcagcgggtccccgcgcacgggcgcggacggggagcatcgacgtcatcgcgcgcaccgcaggcccggggaggagggtccggaggacaaggcggagcggagggcgcggcaccgcgagggcagccggccggcccggggcggcgagggcgagggcgagggccccgacgggggcgagcgcaggagaaggcaccggcatggcgctccagccacgtacgagggggacgcgcggagggaggacaaggagcggaggcatcggaggaggaaagagaaccagggctccggggtccctgtgtcgggccccaacctgtcaaccacccggccaatccagcaggacctgggccgccaagacccacccctggcagaggatattgacaacatgaagaacaacaagctggccaccgcggagtcggccgctccccacggcagccttggccacgccggcctgccccagagcccagccaagatgggaaacagcaccgaccccggccccatgctggccatccctgccatggccaccaacccccagaacgccgccagccgccggacgcccaacaacccggggaacccatccaatcccggcccccccaagacccccgagaatagccttatcgtcaccaaccccagcggcacccagaccaattcagctaagactgccaggaaacccgaccacaccacagtggacatccccccagcctgcccaccccccctcaaccacaccgtcgtacaagtgaacaaaaacgccaacccagacccactgccaaaaaaagaggaagagaagaaggaggaggaggaagacgaccgtggggaagacggccctaagccaatgcctccctatagctccatgttcatcctgtccacgaccaacccccttcgccgcctgtgccattacatcctgaacctgcgctactttgagatgtgcatcctcatggtcattgccatgagcagcatcgccctggccgccgaggaccctgtgcagcccaacgcacctcggaacaacgtgctgcgatactttgactacgtttttacaggcgtctttacctttgagatggtgatcaagatgattgacctggggctcgtcctgcatcagggtgcctacttccgtgacctctggaatattctcgacttcatagtggtcagtggggccctggtagcctttgccttcactggcaatagcaaaggaaaagacatcaacacgattaaatccctccgagtcctccgggtgctacgacctcttaaaaccatcaagcggctgccaaagctcaaggctgtgtttgactgtgtggtgaactcacttaaaaacgtcttcaacatcctcatcgtctacatgctattcatgttcatcttcgccgtggtggctgtgcagctcttcaaggggaaattcttccactgcactgacgagtccaaagagtttgagaaagattgtcgaggcaaatacctcctctacgagaagaatgaggtgaaggcgcgagaccgggagtggaagaagtatgaattccattacgacaatgtgctgtgggctctgctgaccctcttcaccgtgtccacgggagaaggctggccacaggtcctcaagcattcggtggacgccacctttgagaaccagggccccagccccgggtaccgcatggagatgtccattttctacgtcgtctactttgtggtgttccccttcttctttgtcaatatctttgtggccttgatcatcatcaccttccaggagcaaggggacaagatgatggaggaatacagcctggagaaaaatgagagggcctgcattgatttcgccatcagcgccaagccgctgacccgacacatgccgcagaacaagcagagcttccagtaccgcatgtggcagttcgtggtgtctccgcctttcgagtacacgatcatggccatgatcgccctcaacaccatcgtgcttatgatgaagttctatggggcttctgttgcttatgaaaatgccctgcgggtgttcaacatcgtcttcacctccctcttctctctggaatgtgtgctgaaagtcatggcttttgggattctgaattatttccgcgatgcctggaacatcttcgactttgtgactgttctgggcagcatcaccgatatcctcgtgactgagtttgggaataacttcatcaacctgagctttctccgcctcttccgagctgcccggctcatcaaacttctccgtcagggttacaccatccgcattcttctctggacctttgtgcagtccttcaaggccctgccttatgtctgtctgctgatcgccatgctcttcttcatctatgccatcattgggatgcaggtgtttggtaacattggcatcgacgtggaggacgaggacagtgatgaagatgagttccaaatcactgagcacaataacttccggaccttcttccaggccctcatgcttctcttccggagtgccaccggggaagcttggcacaacatcatgctttcctgcctcagcgggaaaccgtgtgataagaactctggcatcctgactcgagagtgtggcaatgaatttgcttatttttactttgtttccttcatcttcctctgctcgtttctgatgctgaatctctttgtcgccgtcatcatggacaactttgagtacctcacccgagactcctccatcctgggcccccaccacctggatgagtacgtgcgtgtctgggccgagtatgaccccgcagcttgcggtcggattcattataaggatatgtacagtttattacgagtaatatctccccctctcggcttaggcaagaaatgtcctcatagggttgcttgcaagcggcttctgcggatggacctgcccgtcgcagatgacaacaccgtccacttcaattccaccctcatggctctgatccgcacagccctggacatcaagattgccaagggaggagccgacaaacagcagatggacgctgagctgcggaaggagatgatggcgatttggcccaatctgtcccagaagacgctagacctgctggtcacacctcacaagtccacggacctcaccgtggggaagatctacgcagccatgatgatcatggagtactaccggcagagcaaggccaagaagctgcaggccatgcgcgaggagcaggaccggacacccctcatgttccagcgcatggagcccccgtccccaacgcaggaagggggacctggccagaacgccctcccctccacccagctggacccaggaggagccctgatggctcacgaaagcggcctcaaggagagcccgtcctgggtgacccagcgtgcccaggagatgttccagaagacgggcacatggagtccggaacaaggcccccctaccgacatgcccaacagccagcctaactctcagtccgtggagatgcgagagatgggcagagatggctactccgacagcgagcactacctccccatggaaggccagggccgggctgcctccatgccccgcctccctgcagagaaccagaggagaaggggccggccacgtgggaataacctcagtaccatctcagacaccagccccatgaagcgttcagcctccgtgctgggccccaaggcccgacgcctggacgattactcgctggagcgggtcccgcccgaggagaaccagcggcaccaccagcggcgccgcgaccgcagccaccgcgcctctgagcgctccctgggccgctacaccgatgtggacacaggcttggggacagacctgagcatgaccacccaatccggggacctgccgtcgaaggagcgggaccaggagcggggccggcccaaggatcggaagcatcgacagcaccaccaccaccaccaccaccaccaccatcccccgccccccgacaaggaccgctatgcccaggaacggccggaccacggccgggcacgggctcgggaccagcgctggtcccgctcgcccagcgagggccgagagcacatggcgcaccggcagggcagtagttccgtaagtggaagcccagccccctcaacatctggtaccagcactccgcggcggggccgccgccagctcccccagaccccctccaccccccggccacacgtgtcctattcccctgtgatccgtaaggccggcggctcggggcccccgcagcagcagcagcagcagcagcagcagcagcaggcggtggccaggccgggccgggcggccaccagcggccctcggaggtacccaggccccacggccgagcctctggccggagatcggccgcccacggggggccacagcagcggccgctcgcccaggatggagaggcgggtcccaggcccggcccggagcgagtcccccagggcctgtcgacacggcggggcccggtggccggcatctggcccgcacgtgtccgaggggcccccgggtccccggcaccatggctactaccggggctccgactacgacgaggccgatggcccgggcagcgggggcggcgaggaggccatggccggggcctacgacgcgccaccccccgtacgacacgcgtcctcgggcgccaccgggcgctcgcccaggactccccgggcctcgggcccggcctgcgcctcgccttctcggcacggccggcgactccccaacggctactacccggcgcacggactggccaggccccgcgggccgggctccaggaagggcctgcacgaaccctacagcgagagtgacgatgattggtgctaagcccgggcgagg

SEQ ID NO: 269 - DNA, 7807 bp, Homo sapiens
cgcaccctccttccgcccctccttctccggggtcagccaggaagatgtcccgagctgctatccccggctcggcccgggcagccgccttctgagcccccgacccgaggcgccgagccgccgccgcccgatgggctgggccgtggagcgtctccgcagtcgtagctccagccgccgcgctcccagccccggcagcctcagcatcagcggcggcggcggcggcggcggcggcgtcttccgcatcgttcgccgcagcgtaacccggagccctttgctctttgcagaatggcccgcttcggagacgagatgccggcccgctacgggggaggaggctccggggcagccgccggggtggtcgtgggcagcggaggcgggcgaggagccgggggcagccggcagggcgggcagcccggggcgcaaaggatgtacaagcagtcaatggcgcagagagcgcggaccatggcactctacaaccccatccccgtccgacagaactgcctcacggttaaccggtctctcttcctcttcagcgaagacaacgtggtgagaaaatacgccaaaaagatcaccgaatggcctccctttgaatatatgattttagccaccatcatagcgaattgcatcgtcctcgcactggagcagcatctgcctgatgatgacaagaccccgatgtctgaacggctggatgacacagaaccatacttcattggaattttttgtttcgaggctggaattaaaatcattgcccttgggtttgccttccacaaaggctcctacttgaggaatggctggaatgtcatggactttgtggtggtgctaacgggcatcttggcgacagttgggacggagtttgacctacggacgctgagggcagttcgagtgctgcggccgctcaagctggtgtctggaatcccaagtttacaagtcgtcctgaagtcgatcatgaaggcgatgatccctttgctgcagatcggcctcctcctattttttgcaatccttatttttgcaatcatagggttagaattttatatgggaaaatttcataccacctgctttgaagaggggacagatgacattcagggtgagtctccggctccatgtgggacagaagagcccgcccgcacctgccccaatgggaccaaatgtcagccctactgggaagggcccaacaacgggatcactcagttcgacaacatcctgtttgcagtgctgactgttttccagtgcataaccatggaagggtggactgatctcctctacaatagcaacgatgcctcagggaacacttggaactggttgtacttcatccccctcatcatcatcggctccttttttatgctgaaccttgtgctgggtgtgctgtcaggggagtttgccaaagaaagggaacgggtggagaaccggcgggcttttctgaagctgaggcggcaacaacagattgaacgtgagctcaatgggtacatggaatggatctcaaaagcagaagaggtgatcctcgccgaggatgaaactgacggggagcagaggcatccctttgatggagctctgcggagaaccaccataaagaaaagcaagacagatttgctcaaccccgaagaggctgaggatcagctggctgatatagcctctgtgggttctcccttcgcccgagccagcattaaaagtgccaagctggagaactcgaccttttttcacaaaaaggagaggaggatgcgtttctacatccgccgcatggtcaaaactcaggccttctactggactgtactcagtttggtagctctcaacacgctgtgtgttgctattgttcactacaaccagcccgagtggctctccgacttcctttactatgcagaattcattttcttaggactctttatgtccgaaatgtttataaaaatgtacgggcttgggacgcggccttacttccactcttccttcaactgctttgactgtggggttatcattgggagcatcttcgaggtcatctgggctgtcataaaacctggcacatcctttggaatcagcgtgttacgagccctcaggttattgcgtattttcaaagtcacaaagtactgggcatctctcagaaacctggtcgtctctctcctcaactccatgaagtccatcatcagcctgttgtttctccttttcctgttcattgtcgtcttcgcccttttgggaatgcaactcttcggcggccagtttaatttcgatgaagggactcctcccaccaacttcgatacttttccagcagcaataatgacggtgtttcagatcctgacgggcgaagactggaacgaggtcatgtacgacgggatcaagtctcaggggggcgtgcagggcggcatggtgttctccatctatttcattgtactgacgctctttgggaactacaccctcctgaatgtgttcttggccatcgctgtggacaatctggccaacgcccaggagctcaccaaggacgagcaagaggaagaagaagcagcgaaccagaaacttgccctacagaaagccaaggaggtggcagaagtgagtcctctgtccgcggccaacatgtctatagctgtgaaagagcaacagaagaatcaaaagccagccaagtccgtgtgggagcagcggaccagtgagatgcgaaagcagaacttgctggccagccgggaggccctgtataacgaaatggacccggacgagcgctggaaggctgcctacacgcggcacctgcggccagacatgaagacgcacttggaccggccgctggtggtggacccgcaggagaaccgcaacaacaacaccaacaagagccgggcggccgagcccaccgtggaccagcgcctcggccagcagcgcgccgaggacttcctcaggaaacaggcccgctaccacgatcgggcccgggaccccagcggctcggcgggcctggacgcacggaggccctgggcgggaagccaggaggccgagctgagccgggagggaccctacggccgcgagtcggaccaccacgcccgggagggcagcctggagcaacccgggttctgggagggcgaggccgagcgaggcaaggccggggacccccaccggaggcacgtgcaccggcaggggggcagcagggagagccgcagcgggtccccgcgcacgggcgcggacggggagcatcgacgtcatcgcgcgcaccgcaggcccggggaggagggtccggaggacaaggcggagcggagggcgcggcaccgcgagggcagccggccggcccggggcggcgagggcgagggcgagggccccgacgggggcgagcgcaggagaaggcaccggcatggcgctccagccacgtacgagggggacgcgcggagggaggacaaggagcggaggcatcggaggaggaaagagaaccagggctccggggtccctgtgtcgggccccaacctgtcaaccacccggccaatccagcaggacctgggccgccaagacccacccctggcagaggatattgacaacatgaagaacaacaagctggccaccgcggagtcggccgctccccacggcagccttggccacgccggcctgccccagagcccagccaagatgggaaacagcaccgaccccggccccatgctggccatccctgccatggccaccaacccccagaacgccgccagccgccggacgcccaacaacccggggaacccatccaatcccggcccccccaagacccccgagaatagccttatcgtcaccaaccccagcggcacccagaccaattcagctaagactgccaggaaacccgaccacaccacagtggacatccccccagcctgcccaccccccctcaaccacaccgtcgtacaagtgaacaaaaacgccaacccagacccactgccaaaaaaagaggaagagaagaaggaggaggaggaagacgaccgtggggaagacggccctaagccaatgcctccctatagctccatgttcatcctgtccacgaccaacccccttcgccgcctgtgccattacatcctgaacctgcgctactttgagatgtgcatcctcatggtcattgccatgagcagcatcgccctggccgccgaggaccctgtgcagcccaacgcacctcggaacaacgtgctgcgatactttgactacgtttttacaggcgtctttacctttgagatggtgatcaagatgattgacctggggctcgtcctgcatcagggtgcctacttccgtgacctctggaatattctcgacttcatagtggtcagtggggccctggtagcctttgccttcactggcaatagcaaaggaaaagacatcaacacgattaaatccctccgagtcctccgggtgctacgacctcttaaaaccatcaagcggctgccaaagctcaaggctgtgtttgactgtgtggtgaactcacttaaaaacgtcttcaacatcctcatcgtctacatgctattcatgttcatcttcgccgtggtggctgtgcagctcttcaaggggaaattcttccactgcactgacgagtccaaagagtttgagaaagattgtcgaggcaaatacctcctctacgagaagaatgaggtgaaggcgcgagaccgggagtggaagaagtatgaattccattacgacaatgtgctgtgggctctgctgaccctcttcaccgtgtccacgggagaaggctggccacaggtcctcaagcattcggtggacgccacctttgagaaccagggccccagccccgggtaccgcatggagatgtccattttctacgtcgtctactttgtggtgttccccttcttctttgtcaatatctttgtggccttgatcatcatcaccttccaggagcaaggggacaagatgatggaggaatacagcctggagaaaaatgagagggcctgcattgatttcgccatcagcgccaagccgctgacccgacacatgccgcagaacaagcagagcttccagtaccgcatgtggcagttcgtggtgtctccgcctttcgagtacacgatcatggccatgatcgccctcaacaccatcgtgcttatgatgaagttctatggggcttctgttgcttatgaaaatgccctgcgggtgttcaacatcgtcttcacctccctcttctctctggaatgtgtgctgaaagtcatggcttttgggattctgaattatttccgcgatgcctggaacatcttcgactttgtgactgttctgggcagcatcaccgatatcctcgtgactgagtttgggaataacttcatcaacctgagctttctccgcctcttccgagctgcccggctcatcaaacttctccgtcagggttacaccatccgcattcttctctggacctttgtgcagtccttcaaggccctgccttatgtctgtctgctgatcgccatgctcttcttcatctatgccatcattgggatgcaggtgtttggtaacattggcatcgacgtggaggacgaggacagtgatgaagatgagttccaaatcactgagcacaataacttccggaccttcttccaggccctcatgcttctcttccggagtgccaccggggaagcttggcacaacatcatgctttcctgcctcagcgggaaaccgtgtgataagaactctggcatcctgactcgagagtgtggcaatgaatttgcttatttttactttgtttccttcatcttcctctgctcgtttctgatgctgaatctctttgtcgccgtcatcatggacaactttgagtacctcacccgagactcctccatcctgggcccccaccacctggatgagtacgtgcgtgtctgggccgagtatgaccccgcagcttgcggtcggattcattataaggatatgtacagtttattacgagtaatatctccccctctcggcttaggcaagaaatgtcctcatagggttgcttgcaagcggcttctgcggatggacctgcccgtcgcagatgacaacaccgtccacttcaattccaccctcatggctctgatccgcacagccctggacatcaagattgccaagggaggagccgacaaacagcagatggacgctgagctgcggaaggagatgatggcgatttggcccaatctgtcccagaagacgctagacctgctggtcacacctcacaagtccacggacctcaccgtggggaagatctacgcagccatgatgatcatggagtactaccggcagagcaaggccaagaagctgcaggccatgcgcgaggagcaggaccggacacccctcatgttccagcgcatggagcccccgtccccaacgcaggaagggggacctggccagaacgccctcccctccacccagctggacccaggaggagccctgatggctcacgaaagcggcctcaaggagagcccgtcctgggtgacccagcgtgcccaggagatgttccagaagacgggcacatggagtccggaacaaggcccccctaccgacatgcccaacagccagcctaactctcagtccgtggagatgcgagagatgggcagagatggctactccgacagcgagcactacctccccatggaaggccagggccgggctgcctccatgccccgcctccctgcagagaaccagaggagaaggggccggccacgtgggaataacctcagtaccatctcagacaccagccccatgaagcgttcagcctccgtgctgggccccaaggcccgacgcctggacgattactcgctggagcgggtcccgcccgaggagaaccagcggcaccaccagcggcgccgcgaccgcagccaccgcgcctctgagcgctccctgggccgctacaccgatgtggacacaggcttggggacagacctgagcatgaccacccaatccggggacctgccgtcgaaggagcgggaccaggagcggggccggcccaaggatcggaagcatcgacagcaccaccaccaccaccaccaccaccaccatcccccgccccccgacaaggaccgctatgcccaggaacggccggaccacggccgggcacgggctcgggaccagcgctggtcccgctcgcccagcgagggccgagagcacatggcgcaccggcagtagttccgtaagtggaagcccagccccctcaacatctggtaccagcactccgcggcggggccgccgccagctcccccagaccccctccaccccccggccacacgtgtcctattcccctgtgatccgtaaggccggcggctcggggcccccgcagcagcagcagcagcagcagcagcagcagcaggcggtggccaggccgggccgggcggccaccagcggccctcggaggtacccaggccccacggccgagcctctggccggagatcggccgcccacggggggccacagcagcggccgctcgcccaggatggagaggcgggtcccaggcccggcccggagcgagtcccccagggcctgtcgacacggcggggcccggtggccggcatctggcccgcacgtgtccgaggggcccccgggtccccggcaccatggctactaccggggctccgactacgacgaggccgatggcccgggcagcgggggcggcgaggaggccatggccggggcctacgacgcgccaccccccgtacgacacgcgtcctcgggcgccaccgggcgctcgcccaggactccccgggcctcgggcccggcctgcgcctcgccttctcggcacggccggcgactccccaacggctactacccggcgcacggactggccaggccccgcgggccgggctccaggaagggcctgcacgaaccctacagcgagagtgacgatgattggtgctaagcccgggcgagg

SEQ ID NO: 270 - DNA, 7032 bp, Homo sapiens
gctgctgctgcctctccgaagagctcgcggagctccccagaggcggtggtccccgtgcttgtctggatgcggctctgagtctccgtgtgtctttctgcttgttgctgtgtgcgggtgttcggccgcgatcacctttgtgtgtcttctgtctgtttaaacctcaggatggctcgcttcggggaggcggtggtcgccaggccagggtccggcgatggagactcggaccagagcaggaaccggcaaggaacccccgtgccggcctcggggcaggcggccgcctacaagcagacgaaagcacagagggcgcggactatggctttgtacaaccccattcccgtccggcagaactgtttcaccgtcaacagatccctgttcatcttcggagaagataacattgtcaggaaatatgccaagaagctcatcgattggccgccatttgagtacatgatcctggccaccatcattgccaactgcatcgtcctggccctggagcagcatcttcctgaggatgacaagacccccatgtcccgaagactggagaagacagaaccttatttcattgggatcttttgctttgaagctgggatcaaaattgtggccctggggttcatcttccataagggctcttacctccgcaatggctggaatgtcatggacttcatcgtggtcctcagtggcatcctggccactgcaggaacccacttcaatactcacgtggacctgaggaccctccgggctgtgcgtgtcctgcggcctttgaagctcgtgtcagggatacctagcctgcagattgtgttgaagtccatcatgaaggccatggtacctcttctgcagattggccttctgctcttctttgccatcctgatgtttgctatcattggtttggagttctacagtggcaagttacatcgagcgtgcttcatgaacaattcaggtattctagaaggatttgacccccctcacccatgtggtgtgcagggctgcccagctggttatgaatgcaaggactggatcggccccaatgatgggatcacccagtttgataacatcctttttgctgtgctgactgtcttccagtgcatcaccatggaagggtggaccactgtgctgtacaataccaatgatgccttaggagccacctggaattggctgtacttcatccccctcatcatcattggatccttctttgttctcaacctagtcctgggagtgctttccggggaatttgccaaagagagagagagagtggagaaccgaagggctttcatgaagctgcggcgccagcagcagattgagcgtgagctgaatggctaccgtgcctggatagacaaagcagaggaagtcatgctcgctgaagaaaataaaaatgctggaacatccgccttagaagtgcttcgaagggcaaccatcaagaggagccggacagaggccatgactcgagactccagtgatgagcactgtgttgatatctcctctgtgggcacacctctggcccgagccagtatcaaaagtgcaaaggtagacggggtctcttatttccggcacaaggaaaggcttctgcgcatctccattcgccacatggttaaatcccaggtgttttactggattgtgctgagccttgtggcactcaacactgcctgtgtggccattgtccatcacaaccagccccagtggctcacccacctcctctactatgcagaatttctgtttctgggactcttcctcttggagatgtccctgaagatgtatggcatggggcctcgcctttattttcactcttcattcaactgctttgattttggggtcacagtgggcagtatctttgaagtggtctgggcaatcttcagacctggtacgtcttttggaatcagtgtcttgcgagccctccggcttctaagaatatttaaaataaccaagtattgggcttccctacggaatttggtggtctccttgatgagctcaatgaagtctatcatcagtttgcttttcctcctcttcctcttcatcgttgtctttgctctcctaggaatgcagttatttggaggcaggtttaactttaatgatgggactccttcggcaaattttgataccttccctgcagccatcatgactgtgttccagatcctgacgggtgaggactggaatgaggtgatgtacaatgggatccgctcccagggtggggtcagctcaggcatgtggtctgccatctacttcattgtgctcaccttgtttggcaactacacgctactgaatgtgttcttggctatcgctgtggataatctcgccaacgcccaggaactgaccaaggatgaacaggaggaagaagaggccttcaaccagaaacatgcactgcagaaggccaaggaggtcagcccgatgtctgcacccaacatgccttcgatcgagagggagcggaggcgccggcaccacatgtccgtgtgggagcagcgtaccagccagctgaggaagcacatgcagatgtccagccaggaggccctcaacagagaggaggcgccgaccatgaacccgctcaaccccctcaacccgctcagctccctcaacccgctcaatgcccaccccagcctttatcggcgacccagggccattgagggcctggccctgggcctggccctggagaagttcgaggaggagcgcatcagccgtggggggtccctcaagggggatggaggggaccgatccagtgccctggacaaccagaggacccctttgtccctgggccagcgggagccaccatggctggccaggccctgtcatggaaactgtgacccgactcagcaggaggcagggggaggagaggctgtggtgacctttgaggaccgggccaggcacaggcagagccaacggcgcagccggcatcgccgcgtcaggacagaaggcaaggagtcctcttcagcctcccggagcaggtctgccagccaggaacgcagtctggatgaagccatgcccactgaaggggagaaggaccatgagctcaggggcaaccatggtgccaaggagccaacgatccaagaagagagagcccaggatttaaggaggaccaacagtctgatggtgtccagaggctccgggctggcaggaggccttgatgaggctgacacccccctagtcctgccccatcctgagctggaagtggggaagcacgtggtgctgacggagcaggagccagaaggcagcagtgagcaggccctgctggggaatgtgcagctagacatgggccgggtcatcagccagagcgagcctgacctctcctgcatcacggccaacacggacaaggccaccaccgagagcaccagcgtcaccgtcgccatccccgacgtggaccccttggtggactcaaccgtggtgcacattagcaacaagacggatggggaagccagtcccttgaaggaggcagagatcagagaggatgaggaggaggtggagaagaagaagcagaagaaggagaagcgtgagacaggcaaagccatggtgccccacagctcaatgttcatcttcagcaccaccaacccgatccggagggcctgccactacatcgtgaacctgcgctactttgagatgtgcatcctcctggtgattgcagccagcagcatcgccctggcggcagaggaccccgtcctgaccaactcggagcgcaacaaagtcctgaggtattttgactatgtgttcacgggcgtgttcacctttgagatggttataaagatgatagaccaaggcttgatcctgcaggatgggtcctacttccgagacttgtggaacatcctggactttgtggtggtcgttggcgcattggtggcctttgctctggcgaacgctttgggaaccaacaaaggacgggacatcaagaccatcaagtctctgcgggtgctccgagttctaaggccactgaaaaccatcaagcgcttgcccaagctcaaggccgtcttcgactgcgtagtgacctccttgaagaatgtcttcaacatactcattgtgtacaagctcttcatgttcatctttgctgtcatcgcagttcagctcttcaagggaaagttcttttattgcacggacagttccaaggacacagagaaggagtgcataggcaactatgtagatcacgagaaaaacaagatggaggtgaagggccgggaatggaagcgccatgaattccactacgacaacattatctgggccctgctgaccctcttcaccgtctccacaggggaaggatggcctcaagttctgcagcactctgtagatgtgacagaggaagaccgaggcccaagccgcagcaaccgcatggagatgtctatcttttatgtagtctactttgtggtcttccccttcttctttgtcaatatctttgtggctctcatcatcatcaccttccaggagcaaggggataagatgatggaggagtgcagcctggagaagaatgagagggcgtgcatcgacttcgccatcagcgccaaacctctcacccgctacatgccgcagaacagacacaccttccagtaccgcgtgtggcactttgtggtgtctccgtcctttgagtacaccattatggccatgatcgccttgaatactgttgtgctgatgatgaagtattattctgctccctgtacctatgagctggccctgaagtacctgaatatcgccttcaccatggtgttttccctggaatgtgtcctgaaggtcatcgcttttggctttttgaactatttccgagacacctggaatatctttgacttcatcaccgtgattggcagtatcacagaaattatcctgacagacagcaagctggtgaacaccagtggcttcaatatgagctttctgaagctcttccgagctgcccgcctcataaagctcctgcgtcagggctataccatacgcattttgctgtggacctttgtgcagtcctttaaggccctcccttatgtctgccttttaattgccatgcttttcttcatttatgccatcattgggatgcaggtatttggaaacataaaattagacgaggagagtcacatcaaccggcacaacaacttccggagtttctttgggtccctaatgctactcttcaggagtgccacaggtgaggcctggcaggagattatgctgtcatgccttggggagaagggctgtgagcctgacaccaccgcaccatcagggcagaacgagaatgaacgctgcggcaccgatctggcctacgtgtactttgtctccttcatcttcttctgctccttcttgatgctcaacctgtttgtggccgtcatcatggacaactttgagtacctgactcgggactcctccatcctggggcctcaccacttggacgagtttgtccgcgtctgggcagaatatgaccgagcagcatgtggccgcatccattacactgagatgtatgaaatgctgactctcatgtcacctccgctaggcctcggcaagagatgtccctccaaagtggcatataagaggttggtcctgatgaacatgccagtagctgaggacatgacggtccacttcacctccacacttatggctctgatccggacagctctggacattaaaattgccaaaggtggtgcagacaggcagcagctagactcagagctacaaaaggagaccctagccatctggcctcacctatcccagaagatgctggatctgcttgtgcccatgcccaaagcctctgacctgactgtgggcaaaatctatgcagcaatgatgatcatggactactataagcagagtaaggtgaagaagcagaggcagcagctggaggaacagaaaaatgcccccatgttccagcgcatggagccttcatctctgcctcaggagatcattgctaatgccaaagccctgccttacctccagcaggaccccgtttcaggcctgagtggccggagtggatacccttcgatgagtccactctctccccaggatatattccagttggcttgtatggaccccgccgatgacggacagttccaagaacggcagtctctggtggtgacagaccctagctccatgagacgttcattttccactattcgggataagcgttcaaattcctcgtggttggaggaattctccatggagcgaagcagtgaaaatacctacaagtcccgtcgccggagttaccactcctccttgcggctgtcagcccaccgcctgaactctgattcaggccacaagtctgacactcacccctcagggggcagggagcggcgacgatcaaaagagcgaaagcatcttctctctcctgatgtctcccgctgcaattcagaagagcgagggacccaggctgactgggagtccccagagcgccgtcaatccaggtcacccagtgagggcaggtcacagacgcccaacagacagggcacaggttccctaagtgagagctccatcccctctgtctctgacaccagcaccccaagaagaagtcgtcggcagctcccacccgtcccgccaaagccccggcccctcctttcctacagctccctgattcgacacgcgggcagcatctctccacctgctgatggaagcgaggagggctccccgctgacctcccaagctctggagagcaacaatgcttggctgaccgagtcttccaactctccgcacccccagcagaggcaacatgcctccccacagcgctacatctccgagccctacttggccctgcacgaagactcccacgcctcagactgtgttgaggaggagacgctcactttcgaagcagccgtggctactagcctgggccgttccaacaccatcggctcagccccacccctgcggcatagctggcagatgcccaacgggcactatcggcggcggaggcgcggggggcctgggccaggcatgatgtgtggggctgtcaacaacctgctaagtgacacggaagaagatgacaaatgctagaggctgctcccccctccgatgcatgctcttctctcacatggagaaaaccaagacagaattgggaagccagtgcggccccgcggggaggaagagggaaaaggaagatggaag

SEQ ID NO: 271 - DNA, 3600 bp, Homo sapiens
gcgggggagggggcattgatcttcgatcgcgaagatggctgctggctgcctgctggccttgactctgacacttttccaatctttgctcatcggcccctcgtcggaggagccgttcccttcggccgtcactatcaaatcatgggtggataagatgcaagaagaccttgtcacactggcaaaaacagcaagtggagtcaatcagcttgttgatatttatgagaaatatcaagatttgtatactgtggaaccaaataatgcacgccagctggtagaaattgcagccagggatattgagaaacttctgagcaacagatctaaagccctggtgagcctggcattggaagcggagaaagttcaagcagctcaccagtggagagaagattttgcaagcaatgaagttgtctactacaatgcaaaggatgatctcgatcctgagaaaaatgacagtgagccaggcagccagaggataaaacctgttttcattgaagatgctaattttggacgacaaatatcttatcagcacgcagcagtccatattcctactgacatctatgagggctcaacaattgtgttaaatgaactcaactggacaagtgccttagatgaagttttcaaaaagaatcgcgaggaagacccttcattattgtggcaggtttttggcagtgccactggcctagctcgatattatccagcttcaccatgggttgataatagtagaactccaaataagattgacctttatgatgtacgcagaagaccatggtacatccaaggagctgcatctcctaaagacatgcttattctggtggatgtgagtggaagtgttagtggattgacacttaaactgatccgaacatctgtctccgaaatgttagaaaccctctcagatgatgatttcgtgaatgtagcttcatttaacagcaatgctcaggatgtaagctgttttcagcaccttgtccaagcaaatgtaagaaataaaaaagtgttgaaagacgcggtgaataatatcacagccaaaggaattacagattataagaagggctttagttttgcttttgaacagctgcttaattataatgtttccagagcaaactgcaataagattattatgctattcacggatggaggagaagagagagcccaggagatatttaacaaatacaataaagataaaaaagtacgtgtattcaggttttcagttggtcaacacaattatgagagaggacctattcagtggatggcctgtgaaaacaaaggttattattatgaaattccttccattggtgcaataagaatcaatactcaggaatatttggatgttttgggaagaccaatggttttagcaggagacaaagctaagcaagtccaatggacaaatgtgtacctggatgcattggaactgggacttgtcattactggaactcttccggtcttcaacataaccggccaatttgaaaataagacaaacttaaagaaccagctgattcttggtgtgatgggagtagatgtgtctttggaagatattaaaagactgacaccacgttttacactgtgccccaatgggtattactttgcaatcgatcctaatggttatgttttattacatccaaatcttcagccaaagaaccccaaatctcaggagccagtaacattggatttccttgatgcagagttagagaatgatattaaagtggagattcgaaataagatgattgatggggaaagtggagaaaaaacattcagaactctggttaaatctcaagatgagagatatattgacaaaggaaacaggacatacacatggacacctgtcaatggcacagattacagtttggccttggtattaccaacctacagtttttactatataaaagccaaactagaagagacaataactcaggccagatcaaaaaagggcaaaatgaaggattcggaaaccctgaagccagataattttgaagaatctggctatacattcatagcaccaagagattactgcaatgacctgaaaatatcggataataacactgaatttcttttaaatttcaacgagtttattgatagaaaaactccaaacaacccatcatgtaacgcggatttgattaatagagtcttgcttgatgcaggctttacaaatgaacttgtccaaaattactggagtaagcagaaaaatatcaagggagtgaaagcacgatttgttgtgactgatggtgggattaccagagtttatcccaaagaggctggagaaaattggcaagaaaacccagagacatatgaggacagcttctataaaaggagcctagataatgataactatgttttcactgctccctactttaacaaaagtggacctggtgcctatgaatcgggcattatggtaagcaaagctgtagaaatatatattcaagggaaacttcttaaacctgcagttgttggaattaaaattgatgtaaattcctggatagagaatttcaccaaaacctcaatcagagatccgtgtgctggtccagtttgtgactgcaaaagaaacagtgacgtaatggattgtgtgattctggatgatggtgggtttcttctgatggcaaatcatgatgattatactaatcagattggaagattttttggagagattgatcccagcttgatgagacacctggttaatatatcagtttatgcttttaacaaatcttatgattatcagtcagtatgtgagcccggtgctgcaccaaaacaaggagcaggacatcgctcagcatatgtgccatcagtagcagacatattacaaattggctggtgggccactgctgctgcctggtctattctacagcagtttctcttgagtttgacctttccacgactccttgaggcagttgagatggaggatgatgacttcacggcctccctgtccaagcagagctgcattactgaacaaacccagtatttcttcgataacgacagtaaatcattcagtggtgtattagactgtggaaactgttccagaatctttcatggagaaaagcttatgaacaccaacttaatattcataatggttgagagcaaagggacatgtccatgtgacacacgactgctcatacaagcggagcagacttctgacggtccaaatccttgtgacatggttaagcaacctagataccgaaaagggcctgatgtctgctttgataacaatgtcttggaggattatactgactgtggtggtgtttctggattaaatccctccctgtggtatatcattggaatccagtttctactactttggctggtatctggcagcacacaccggctgttatgaccttctaaaaaccaaatctgcatagttaaactccagaccctgccaaaacatgagccctgccctcaattacagtaacgtagggtcagctataaaatcagacaaacattagctgggcctgttccatggcataacactaaggcgcagactcctaaggcacccactggctgcatgtcagggtgtcagatccttaaacgtgtgtgaatgctgcatcatctatgtgtaacatcaaagcaaaatcctatacgtgtcctctattggaaaatttgggcgtttgttgttgcattgttggt

SEQ ID NO: 272 - DNA, 5372 bp, Homo sapiens
acagcttgcaacactcggcatcttttctggaggcgcctccttcagcagccgcagatggcatccggctgcgggctcggggctcgcaattgattctcccccttgcccacctcgagtccacggacgcacctctcccttcccctcctcccttcgcgcttctgggtctgagcccagctcgcgaccgccgggcagaggatcagtcgcggcggccgaggctgagcagcagcgctctcgctccctgacctggggagaagcgcccacccgggagagctgatccccggctgcctccagcgccccccaccttttgcactccaagccgggggctccagagaccccgctccccaggcgccactatgctggacccttcgtccagcgaagaagaatcggatgagatcgtggaggaggagagcggcaaggaggtgctcggctcggccccgtccggcgcgcgcctgtctcccagccgtaccagcgagggctcggccggcagcgccgggctggggggcggcggcgccggcgccggagccggggtgggtgcaggcggcggcgggggcagcggcgcgagcagcggcggcggggccggggggctgcaacccagcagccgcgctggcggcggccggccctccagccccagcccgtcggtggtgagcgagaaggagaaggaagagttggagcggctgcagaaagaggaggaggagaggaagaagaggctgcagctgtatgtgttcgtgatgcgctgcatcgcctacccctttaatgccaagcagcccaccgacatggctcgccggcagcagaagatcagcaaacagcagctgcagacagtcaaggaccggtttcaggctttcctcaatggggaaacccagatcatggctgacgaagccttcatgaacgctgtgcagagttactatgaggtgttcctgaagagcgaccgtgtggcccgcatggttcagagtggaggctgttccgccaacgactcccgggaggtcttcaagaagcacattgagaagagagtgcgcagcctgcctgagattgacggcctcagcaaggagactgtgctgagctcctggatggccaaatttgatgccatctaccgtggagaagaggacccgcggaagcagcaggcccggatgacagccagcgcagcctccgagctgattctgagcaaggagcaactctatgagatgttccagaacattcttgggatcaagaagttcgaacatcagctcctttacaatgcctgccagctggacaatccagatgagcaagcagcccagatcagacgagagctggatggacgtctacaaatggcagaccaaatagccagggaacgcaaatttcccaagtttgtatccaaagaaatggaaaacatgtacattgaggagctgaagtcatctgtcaacctgctcatggccaacttggagagcatgccggtatccaaaggcggggagttcaagctccagaaactcaaacgcagccacaatgcttccatcatcgacatgggcgaggagagtgagaaccagctctccaagtcagatgtcgtgctgtctttctcattggaggtggtaattatggaagtccaaggcctcaaatctttggctccaaatcgcatcgtatattgcacaatggaggtggaaggaggagagaaactacagactgatcaggccgaggcttctaaaccaacctggggcacccagggtgacttctccacaacccatgcactgccagctgtgaaggtgaagctgttcacagagagcacaggcgtcctggcgttggaggacaaggagcttgggcgggttattctccatcccaccccgaacagccccaaacagtcagagtggcacaaaatgacagtctccaaaaactgccccgaccaagatctcaaaatcaaacttgctgtccgaatggataagcctcaaaacatgaagcattctgggtatttatgggccatcggtaagaatgtctggaagagatggaagaaaaggttttttgtattggtgcaggtcagtcagtacacgtttgccatgtgcagttatcgggagaagaaagcggagcctcaggaacttctacaattggatggctacactgtggattacaccgacccccagccaggtttggagggtggccgagccttcttcaatgctgtcaaggagggagacaccgtgatatttgccagtgacgatgaacaagaccgcatcctgtgggtccaggccatgtatcgggccacggggcagtcacacaagcctgtgcccccgacccaagtccagaaactcaacgccaagggaggaaatgtacctcagctggatgcccctatctctcaattttacgcagatagagctcaaaaacatggcatggatgaatttatctcttccaacccctgtaactttgaccacgcttccctctttgagatggtacaacgccttactttggatcacagacttaatgattcctattcttgcctgggctggttcagtcctggccaggtgtttgtactagacgagtattgcgcccgaaatggagtccgggggtgtcaccgacatctctgctacctcagagacttgcttgaacgggcagaaaatggcgccatgatcgaccccacccttcttcactacagctttgccttctgtgcatcccatgtccatgggaacaggcctgatggaattggaactgtgactgttgaagaaaaggaacgttttgaagaaatcaaagagaggctccgagttctgctagaaaatcagattacacattttaggtattgctttccatttggtcgacctgaaggtgctttgaaagctactctctcactcttggaaagggttttgatgaaagatattgttaccccagtgccacaagaggaggtaaaaacagttatccgtaaatgtctggaacaggctgcgttagtcaactattctcggctctcagagtatgccaaaatcgaagggaaaaagagagaaatgtatgagcatcctgtcttctgcttggcctcccaagtgatggatttaaccattcaaaatgtaggccggttaatcactcctgccaaaaagcttgaagatacaatacgtcttgctgaactagtcattgaagttcttcagcaaaatgaggagcaccacgcagaggcctttgcgtggtggtcagatttaatggtggagcatgcggagacgttcctgtcactctttgcagtagacatggatgcagccttagaggtgcaacctccagacacatgggacagttttccactatttcagctgctgaatgattttctccgtactgactataatttgtgcaatggaaaatttcacaaacacctgcaagacctgtttgccccacttgttgttagatatgtggatctgatggagtcctcaattgcacaatccattcacaggggctttgagcgggagtcatgggaaccagtcaataatgggtcaggcacctcagaagatctgttttggaaacttgacgcccttcagaccttcattcgggacctgcactggcctgaagaagagtttggaaagcacctggaacaacggctgaagttgatggcaagtgacatgatcgaatcttgtgtcaaaagaaccaggattgcatttgaagttaagctgcaaaaaaccagtcgatcaacagattttcgagtcccacagtcaatatgcaccatgtttaatgttatggttgatgccaaagctcaatcaacaaaactttgcagcatggaaatgggccaagagcatcaataccattcaaaaatagacgaactaattgaagaaactgttaaagaaatgataacactcttggttgcaaagttcgttactatcttggaaggagtgctggcaaaattatccagatatgacgaagggactttgttttcttcttttctgtcatttaccgtgaaggcagcttccaaatatgtggatgtacctaaacccgggatggacgtggccgacgcctacgtgactttcgtccgccattctcaggatgtcctgcgtgataaggtcaatgaggagatgtacatagaaaggttatttgatcaatggtacaacagctccatgaacgtgatctgcacctggttgacggaccggatggacttacagcttcatatttatcagttgaaaacactaattaggatggtaaagaaaacctacagagatttccgattgcaaggggtcctggactccaccttaaacagcaagacctatgaaacgatccggaaccgtctcactgtggaggaagccacagcatcagtgagtgaaggtgggggactgcagggcatcagcatgaaggacagcgatgaggaagacgaagaagacgattagaccatttggtcctagagtctgctgggacagagtcctgtaatcagtgcatgtccttagtctgttagttaaacccattaggaattttctgtcaactaccatgcccatgagatgtttatcaatacaactgccattttagctatgtggtaccaagattagcaaatgaccttcatatccactgatttcctgatgtccatgtctatatgtttacaagcaatatggagcaccattctttaaatactgttcatggagaatacatagtctaaccactaggcgtgtccctgttatcagcaaagatcaatgatgcttcattcatgtactatgtatgcattggtggtaaatggatgtgagggcaagtacatcaagtacattcactctgtttcacgtatgtggatgccagttaattaaatgagtacgtaaataaattaattaaaacacatagatctgctttgtgtttttatttttattttttgaaaaacaaaaggcaagtctccaacaattaacttttgatgctttctgttcccctaaaaccaaaaaatgaaccccttgtgtcgttgttaacccatcctttcatttactcatataattagccaaaaaaaaaaggatggctacataccaatggattgattctcttaattgccacggcaagggggcgatcctatcatgacttaacatcaagcgcgcagttcaaaactactgtcttctgtcaaagttttctcctcttaaatgttattttgcttttacgtctcaactgtgtatgtaaaaaaaacgaatatttaaattacaaccctagactaaaaatgtgtttataataagatgtggatatttccttcagtagattgtaaccataatttaaattattttgttccacactgttttttatatctgtcatgtacattgcattttgatctgtaactgcacaaccctggggtttgctgcagagctatttctttccatgtaaagtagtggatccatcttgcttttgccttatataaagcctacagttatggaagtgtggaaaactgtggcttctcaataaatattcagatgtcctaagaatataaaaaaaaaaaaaaaaaa

SEQ ID NO: 273 - DNA, 5248 bp, Homo sapiens
acagcttgcaacactcggcatcttttctggaggcgcctccttcagcagccgcagatggcatccggctgcgggctcggggctcgcaattgattctcccccttgcccacctcgagtccacggacgcacctctcccttcccctcctcccttcgcgcttctgggtctgagcccagctcgcgaccgccgggcagaggatcagtcgcggcggccgaggctgagcagcagcgctctcgctccctgacctggggagaagcgcccacccgggagagctgatccccggctgcctccagcgccccccaccttttgcactccaagccgggggctccagagaccccgctccccaggcgccactatgctggacccttcgtccagcgaagaagaatcggatgagatcgtggaggaggagagcggcaaggaggtgctcggctcggccccgtccggcgcgcgcctgtctcccagccgtaccagcgagggctcggccggcagcgccgggctggggggcggcggcgccggcgccggagccggggtgggtgcaggcggcggcgggggcagcggcgcgagcagcggcggcggggccggggggctgcaacccagcagccgcgctggcggcggccggccctccagccccagcccgtcggtggtgagcgagaaggagaaggaagagttggagcggctgcagaaagaggaggaggagaggaagaagaggctgcagctgtatgtgttcgtgatgcgctgcatcgcctacccctttaatgccaagcagcccaccgacatggctcgccggcagcagaagatcagcaaacagcagctgcagacagtcaaggaccggtttcaggctttcctcaatggggaaacccagatcatggctgacgaagccttcatgaacgctgtgcagagttactatgaggtgttcctgaagagcgaccgtgtggcccgcatggttcagagtggaggctgttccgccaacgactcccgggaggtcttcaagaagcacattgagaagagagtgcgcagcctgcctgagattgacggcctcagcaaggagactgtgctgagctcctggatggccaaatttgatgccatctaccgtggagaagaggacccgcggaagcagcaggcccggatgacagccagcgcagcctccgagctgattctgagcaaggagcaactctatgagatgttccagaacattcttgggatcaagaagttcgaacatcagctcctttacaatgcctgccagctggacaatccagatgagcaagcagcccagatcagacgagagctggatggacgtctacaaatggcagaccaaatagccagggaacgcaaatttcccaagtttgtatccaaagaaatggaaaacatgtacattgaggagctgaagtcatctgtcaacctgctcatggccaacttggagagcatgccggtatccaaaggcggggagttcaagctccagaaactcaaacgcagccacaatgcttccatcatcgacatgggcgaggagagtgagaaccagctctccaagtcagatgtcgtgctgtctttctcattggaggtggtaattatggaagtccaaggcctcaaatctttggctccaaatcgcatcgtatattgcacaatggaggtggaaggaggagagaaactacagactgatcaggccgaggcttctaaaccaacctggggcacccagggtgacttctccacaacccatgcactgccagctgtgaaggtgaagctgttcacagagagcacaggcgtcctggcgttggaggacaaggagcttgggcgggttattctccatcccaccccgaacagccccaaacagtcagagtggcacaaaatgacagtctccaaaaactgccccgaccaagatctcaaaatcaaacttgctgtccgaatggataagcctcaaaacatgaagcattctgggtatttatgggccatcggtaagaatgtctggaagagatggaagaaaaggttttttgtattggtgcaggtcagtcagtacacgtttgccatgtgcagttatcgggagaagaaagcggagcctcaggaacttctacaattggatggctacactgtggattacaccgacccccagccaggtttggagggtggccgagccttcttcaatgctgtcaaggagggagacaccgtgatatttgccagtgacgatgaacaagaccgcatcctgtgggtccaggccatgtatcgggccacggggcagtcacacaagcctgtgcccccgacccaagtccagaaactcaacgccaagggaggaaatgtacctcagctggatgcccctatctctcaattttacgcagatagagctcaaaaacatggcatggatgaatttatctcttccaacccctgtaactttgaccacgcttccctctttgagatgggctggttcagtcctggccaggtgtttgtactagacgagtattgcgcccgaaatggagtccgggggtgtcaccgacatctctgctacctcagagacttgcttgaacgggcagaaaatggcgccatgatcgaccccacccttcttcactacagctttgccttctgtgcatcccatgtccatgggaacaggcctgatggaattggaactgtgactgttgaagaaaaggaacgttttgaagaaatcaaagagaggctccgagttctgctagaaaatcagattacacattttaggtattgctttccatttggtcgacctgaaggtgctttgaaagctactctctcactcttggaaagggttttgatgaaagatattgttaccccagtgccacaagaggaggtaaaaacagttatccgtaaatgtctggaacaggctgcgttagtcaactattctcggctctcagagtatgccaaaatcgaagaaaatgtaggccggttaatcactcctgccaaaaagcttgaagatacaatacgtcttgctgaactagtcattgaagttcttcagcaaaatgaggagcaccacgcagaggcctttgcgtggtggtcagatttaatggtggagcatgcggagacgttcctgtcactctttgcagtagacatggatgcagccttagaggtgcaacctccagacacatgggacagttttccactatttcagctgctgaatgattttctccgtactgactataatttgtgcaatggaaaatttcacaaacacctgcaagacctgtttgccccacttgttgttagatatgtggatctgatggagtcctcaattgcacaatccattcacaggggctttgagcgggagtcatgggaaccagtcaataatgggtcaggcacctcagaagatctgttttggaaacttgacgcccttcagaccttcattcgggacctgcactggcctgaagaagagtttggaaagcacctggaacaacggctgaagttgatggcaagtgacatgatcgaatcttgtgtcaaaagaaccaggattgcatttgaagttaagctgcaaaaaaccagtcgatcaacagattttcgagtcccacagtcaatatgcaccatgtttaatgttatggttgatgccaaagctcaatcaacaaaactttgcagcatggaaatgggccaagagcatcaataccattcaaaaatagacgaactaattgaagaaactgttaaagaaatgataacactcttggttgcaaagttcgttactatcttggaaggagtgctggcaaaattatccagatatgacgaagggactttgttttcttcttttctgtcatttaccgtgaaggcagcttccaaatatgtggatgtacctaaacccgggatggacgtggccgacgcctacgtgactttcgtccgccattctcaggatgtcctgcgtgataaggtcaatgaggagatgtacatagaaaggttatttgatcaatggtacaacagctccatgaacgtgatctgcacctggttgacggaccggatggacttacagcttcatatttatcagttgaaaacactaattaggatggtaaagaaaacctacagagatttccgattgcaaggggtcctggactccaccttaaacagcaagacctatgaaacgatccggaaccgtctcactgtggaggaagccacagcatcagtgagtgaaggtgggggactgcagggcatcagcatgaaggacagcgatgaggaagacgaagaagacgattagaccatttggtcctagagtctgctgggacagagtcctgtaatcagtgcatgtccttagtctgttagttaaacccattaggaattttctgtcaactaccatgcccatgagatgtttatcaatacaactgccattttagctatgtggtaccaagattagcaaatgaccttcatatccactgatttcctgatgtccatgtctatatgtttacaagcaatatggagcaccattctttaaatactgttcatggagaatacatagtctaaccactaggcgtgtccctgttatcagcaaagatcaatgatgcttcattcatgtactatgtatgcattggtggtaaatggatgtgagggcaagtacatcaagtacattcactctgtttcacgtatgtggatgccagttaattaaatgagtacgtaaataaattaattaaaacacatagatctgctttgtgtttttatttttattttttgaaaaacaaaaggcaagtctccaacaattaacttttgatgctttctgttcccctaaaaccaaaaaatgaaccccttgtgtcgttgttaacccatcctttcatttactcatataattagccaaaaaaaaaaggatggctacataccaatggattgattctcttaattgccacggcaagggggcgatcctatcatgacttaacatcaagcgcgcagttcaaaactactgtcttctgtcaaagttttctcctcttaaatgttattttgcttttacgtctcaactgtgtatgtaaaaaaaacgaatatttaaattacaaccctagactaaaaatgtgtttataataagatgtggatatttccttcagtagattgtaaccataatttaaattattttgttccacactgttttttatatctgtcatgtacattgcattttgatctgtaactgcacaaccctggggtttgctgcagagctatttctttccatgtaaagtagtggatccatcttgcttttgccttatataaagcctacagttatggaagtgtggaaaactgtggcttctcaataaatattcagatgtcctaagaatataaaaaaaaaaaaaa

SEQ ID NO: 274 - DNA, 5692 bp, Homo sapiens
actcctgaatctaactcgacgtgtccggaaagccctggccagttttcctttcgttctgcggccgctgcagccagccccgcggctccctcagacccgcgggcgcagccgccgggggtgaggcgcttggggaccgcgggccgagcggcggggatccccgagcaccatgctggacccgtcttccagcgaagaggagtcggacgaggggctggaagaggaaagccgcgatgtgctggtggcagccggcagctcgcagcgagctcctccagccccgactcgggaagggcggcgggacgcgccggggcgcgcgggcggcggcggcgcggccagatctgtgagcccgagcccctctgtgctcagcgaggggcgagacgagccccagcggcagctggacgatgagcaggagcggaggatccgcctgcagctctacgtcttcgtcgtgaggtgcatcgcgtaccccttcaacgccaagcagcccaccgacatggcccggaggcagcagaagcttaacaaacaacagttgcagttactgaaagaacggttccaggccttcctcaatggggaaacccaaattgtagctgacgaagcattttgcaacgcagttcggagttattatgaggtttttctaaagagtgaccgagtggccagaatggtacagagtggagggtgttctgctaatgacttcagagaagtatttaagaaaaacatagaaaaacgtgtgcggagtttgccagaaatagatggcttgagcaaagagacagtgttgagctcatggatagccaaatatgatgccatttacagaggtgaagaggacttgtgcaaacagccaaatagaatggccctaagtgcagtgtctgaacttattctgagcaaggaacaactctatgaaatgtttcagcagattctgggtattaaaaaactggaacaccagctcctttataatgcatgtcagctggataacgcagatgaacaagcagcccagatcagaagggaacttgatggccggctgcaattggcagataaaatggcaaaggaaagaaaattccccaaatttatagcaaaagatatggagaatatgtatatagaagagttgcggtcttcagtgaatttgctaatggccaatttggaaagtcttccagtttcgaaaggtggtccggaatttaaattacaaaaattaaaacgttcacagaactctgcatttttggacataggagatgagaatgagattcagctgtcaaagtccgacgtggtactgtcattcaccttagagattgtcataatggaagtgcaaggcctgaagtcagttgctcccaatcgaattgtttactgtacaatggaagtggaaggagaaaaacttcagacagaccaggccgaagcctcaaggccacaatgggggactcaaggagatttcaccaccacccatcctcggcctgtggtcaaagtgaaactcttcacagaaagcactggagttctggccctggaagataaagaactgggaagggtgatattatacccaacttctaatagctccaaatcagctgaattacaccgaatggtagttccaaaaaatagccaggattctgacttaaaaatcaaactggcagtgcgaatggataaaccagcacatatgaagcatagtggatatctgtatgcccttggacagaaggtttggaaaagatggaaaaaacgttactttgttctagttcaggttagccaatatacctttgctatgtgcagttatagagaaaagaagtctgaaccacaagaattaatgcagcttgaaggctatactgtggattataccgatccccacccaggccttcagggtggttgtatgttctttaatgctgttaaagaaggagatactgtaatctttgccagtgatgatgaacaggacagaatattatgggttcaagccatgtatagggccacaggtcaatcatataaaccagttcctgcaattcaaacccagaaactgaatcctaaaggaggaactctccatgcagatgctcagctttatgcagatcgttttcagaaacatggtatggatgagtttatttctgcaaacccctgcaagcttgatcatgccttcctttttagaatactccagaggcagactttggatcacagactgaatgattcctattcttgcttgggatggtttagccctggccaagtctttgtgttagatgagtactgtgcccgttatggtgtgagaggctgtcacagacatctctgctaccttgcagaactgatggaacattcagaaaatggtgctgtcattgaccctaccctgctccattacagctttgcattctgtgcctctcatgtgcacggcaacaggcctgatggaattgggactgtttcagtggaagaaaaagaaagatttgaggagataaaagagagactctcttcccttttagaaaatcagataagccatttcagatactgttttccctttggacgacctgaaggtgctctaaaagctacactttcattacttgaaagggttttaatgaaagatattgccactcccataccagcagaagaggtgaagaaagtggtcagaaaatgtctcgagaaagctgccttgatcaattacactagactcacagaatatgccaaaatagaagagaccatgaaccaggcatctcctgctagaaagctggaagagattcttcatctggcagagctctgcatagaagtcttacagcagaatgaagagcatcatgcagaggcatttgcctggtggcctgatttattggctgaacatgcagagaaattttgggctttatttacagtggatatggacactgcactagaggctcaaccgcaagactcctgggatagttttcctcttttccaactgcttaataatttcctccgaaatgacacacttttgtgtaatggaaaatttcacaaacacttgcaagaaatctttgtacccttggttgtccgctatgtggatctcatggagtcttccatcgcccagtcaattcacagaggttttgagcaggagacatggcagcctgtcaacaatggctcagcaacatcagaagaccttttttggaagcttgatgcactgcaaatgtttgtctttgatctgcactggccagaacaggaatttgcccaccacttagagcaaagacttaaactaatggccagtgatatgctagaggcctgtgtcaaaagaacaagaactgcatttgaactcaagctacaaaaggcaagcaaaacaactgacttgcgcattccagcttccgtttgcactatgtttaatgtattagtcgatgccaaaaagcaaagcaccaaactctgtgccctggatggaggacaagagtttggtagtcaatggcaacagtaccattcaaaaatagatgatctgatcgacaacagtgtaaaagaaatcatttcactgttagtttcaaagtttgtttcagtgttggaaggcgtgttgtctaagctgtcaaggtatgatgaaggcactttcttttcatccattctgtcattcactgtgaaagcagctgcaaaatatgttgatgttccaaaaccaggaatggatctggcagacacctatattatgtttgttcggcaaaaccaagatattcttcgagaaaaggtcaatgaggaaatgtatatagaaaagttatttgatcaatggtacagcagttccatgaaagtcatttgcgtgtggttgactgatagattagacctccaactccatatttaccagctgaagacgctcatcaagattgtgaagaaaacctacagggactttcgattgcagggtgtgttggaaggaacactgaacagtaagacttatgatactgtgcacagacgtttaacagtagaggaggccacagcctctgtttcagaaggaggaggacttcagggcattactatgaaagacagtgacgaagaagaagaaggctgatatcacacagctttgcagaaggaaggaagaccttgatcgacattgttttttatttttttaaccttgtccttgtaattacattcattgtttgttttggccaaataaaaatgcttgtatttctttaaaaagtaagcctgaatgtagagtaaaaggggaaatgccaagattttggggtttttttgtttcctttttttgtttgtttgtttgtttgtttttttggagaagagcatcctcttttgtgtagtttgacctaaaaatgaaccttggctctgcttgtgatcagaacatgaacttttttttttaaagaagatttgagcatttttctgtaatcacatcaaaatgatgttttctgtgtaaagcgagatacatatttctcataatgcagcattgtgagaagtcagttcggaccactgcaccaacactgtcgtatccttgttaaaatggtgtgtaccttacaaattataatttatgtgccaggttcgttttgtacttaatttgctattattgtgatgtgtataaaatctttaatcttggttcttagtactttgaattggtctacaggtatattcctgggatgaaaggattgccaaacccaaatatagactagattatccaatgggtttgtgtctttgttccattctcaacatttcttctttcaactataagtaatccccaggtgtggggtagcaagtgtgcttccgtcaagataccatattctcctgctccagtataacagcttgcaggcaataaaaatctatttgctcataactacttctgtatttattagacttatatagagcaaatgcagtaaaagaggtttgcagtgtttcaaacatcccaactatctgactctgtgtttttgtttcttgagttttttgtttgttttgtttgtaatattttgtttttaatcaaatgagtaaaagatagtaacactgactgttctttgtacctaataggcacatacattgttaaaagaattactatgacagcatatttccatagcagaggaaatatatatttcatatattattagttaatattagtaatcaatgttaactaataattagtaatgttagtaatattaactagtaattcacattattagtggttctctcaaaatattttcttgctagggtttgagagataattgtattatgttgcgtaagttctctatgaattatttttgtgatatttcccaaaacatattggcagattgtgctactgcatttattaataagtaatttttaaatgaaggcagttaatgcagaataagtggaggtatccctgcatttatgaaaacgtttattctgaaactttagaaatgaaacaacttggacctccagattcgttctcccatggtgtaataagtggtcgttaggtacctagactagccttaaaaatctatttaatctacagttactatttagcattgttttggctcattttctgggccctagggctaagataacaaacaaggaaatttcttccttcttccgggattaaagactaactctaccaactcactatctttgaaaggcagtttgggaatgttctccctccttttcttctctattcacacaccaaatactattttctccaaaccctcaaatgtccagtcatgctatcccaaactctccaatggcaccatccccaagcttgctgttccacgacacattgctctgtacttagtaattacccacccttcttttcctttcaataaaatgtccatttccttgatacaaaaaaaaaaaaaaaaaaaaa

SEQ ID NO: 275 - DNA, 11630 bp, Homo sapiens
actcctgaatctaactcgacgtgtccggaaagccctggccagttttcctttcgttctgcggccgctgcagccagccccgcggctccctcagacccgcgggcgcagccgccgggggtgaggcgcttggggaccgcgggccgagcggcggggatccccgagcaccatgctggacccgtcttccagcgaagaggagtcggacgaggggctggaagaggaaagccgcgatgtgctggtggcagccggcagctcgcagcgagctcctccagccccgactcgggaagggcggcgggacgcgccggggcgcgcgggcggcggcggcgcggccagatctgtgagcccgagcccctctgtgctcagcgaggggcgagacgagccccagcggcagctggacgatgagcaggagcggaggatccgcctgcagctctacgtcttcgtcgtgaggtgcatcgcgtaccccttcaacgccaagcagcccaccgacatggcccggaggcagcagaagcttaacaaacaacagttgcagttactgaaagaacggttccaggccttcctcaatggggaaacccaaattgtagctgacgaagcattttgcaacgcagttcggagttattatgaggtttttctaaagagtgaccgagtggccagaatggtacagagtggagggtgttctgctaatgacttcagagaagtatttaagaaaaacatagaaaaacgtgtgcggagtttgccagaaatagatggcttgagcaaagagacagtgttgagctcatggatagccaaatatgatgccatttacagaggtgaagaggacttgtgcaaacagccaaatagaatggccctaagtgcagtgtctgaacttattctgagcaaggaacaactctatgaaatgtttcagcagattctgggtattaaaaaactggaacaccagctcctttataatgcatgtcagctggataacgcagatgaacaagcagcccagatcagaagggaacttgatggccggctgcaattggcagataaaatggcaaaggaaagaaaattccccaaatttatagcaaaagatatggagaatatgtatatagaagagttgcggtcttcagtgaatttgctaatggccaatttggaaagtcttccagtttcgaaaggtggtccggaatttaaattacaaaaattaaaacgttcacagaactctgcatttttggacataggagatgagaatgagattcagctgtcaaagtccgacgtggtactgtcattcaccttagagattgtcataatggaagtgcaaggcctgaagtcagttgctcccaatcgaattgtttactgtacaatggaagtggaaggagaaaaacttcagacagaccaggccgaagcctcaaggccacaatgggggactcaaggagatttcaccaccacccatcctcggcctgtggtcaaagtgaaactcttcacagaaagcactggagttctggccctggaagataaagaactgggaagggtgatattatacccaacttctaatagctccaaatcagctgaattacaccgaatggtagttccaaaaaatagccaggattctgacttaaaaatcaaactggcagtgcgaatggataaaccagcacatatgaagcatagtggatatctgtatgcccttggacagaaggtttggaaaagatggaaaaaacgttactttgttctagttcaggttagccaatatacctttgctatgtgcagttatagagaaaagaagtctgaaccacaagaattaatgcagcttgaaggctatactgtggattataccgatccccacccaggccttcagggtggttgtatgttctttaatgctgttaaagaaggagatactgtaatctttgccagtgatgatgaacaggacagaatattatgggttcaagccatgtatagggccacaggtcaatcatataaaccagttcctgcaattcaaacccagaaactgaatcctaaaggaggaactctccatgcagatgctcagctttctggtaaagatgcagatcgttttcagaaacatggtatggatgagtttatttctgcaaacccctgcaagcttgatcatgccttcctttttagaatactccagaggcagactttggatcacagactgaatgattcctattcttgcttgggatggtttagccctggccaagtctttgtgttagatgagtactgtgcccgttatggtgtgagaggctgtcacagacatctctgctaccttgcagaactgatggaacattcagaaaatggtgctgtcattgaccctaccctgctccattacagctttgcattctgtgcctctcatgtgcacggcaacaggcctgatggaattgggactgtttcagtggaagaaaaagaaagatttgaggagataaaagagagactctcttcccttttagaaaatcagataagccatttcagatactgttttccctttggacgacctgaaggtgctctaaaagctacactttcattacttgaaagggttttaatgaaagatattgccactcccataccagcagaagaggtgaagaaagtggtcagaaaatgtctcgagaaagctgccttgatcaattacactagactcacagaatatgccaaaatagaagagaccatgaaccaggcatctcctgctagaaagctggaagagattcttcatctggcagagctctgcatagaagtcttacagcagaatgaagagcatcatgcagagggaagagaggcatttgcctggtggcctgatttattggctgaacatgcagagaaattttgggctttatttacagtggatatggacactgcactagaggctcaaccgcaagactcctgggatagttttcctcttttccaactgcttaataatttcctccgaaatgacacacttttgtgtaatggaaaatttcacaaacacttgcaagaaatctttgtacccttggttgtccgctatgtggatctcatggagtcttccatcgcccagtcaattcacagaggttttgagcaggagacatggcagcctgtcaagaatatcgccaacagtcttcccaatgtagctcttccaaaagttccaagtctgcctcttaatcttccacagattcctaacatttctactgcttcgtggatgccttctttatatgagtccaccaatggctcagcaacatcagaagaccttttttggaagcttgatgcactgcaaatgtttgtctttgatctgcactggccagaacaggaatttgcccaccacttagagcaaagacttaaactaatggccagtgatatgctagaggcctgtgtcaaaagaacaagaactgcatttgaactcaagctacaaaaggcaagcaaaacaactgacttgcgcattccagcttccgtttgcactatgtttaatgtattagtcgatgccaaaaagcaaagcaccaaactctgtgccctggatggaggacaagagcaacagtaccattcaaaaatagatgatctgatcgacaacagtgtaaaagaaatcatttcactgttagtttcaaagtttgtttcagtgttggaaggcgtgttgtctaagctgtcaaggtatgatgaaggcactttcttttcatccattctgtcattcactgtgaaagcagctgcaaaatatgttgatgttccaaaaccaggaatggatctggcagacacctatattatgtttgttcggcaaaaccaagatattcttcgagaaaaggtcaatgaggaaatgtatatagaaaagttatttgatcaatggtacagcagttccatgaaagtcatttgcgtgtggttgactgatagattagacctccaactccatatttaccagctgaagacgctcatcaagattgtgaagaaaacctacagggactttcgattgcagggtgtgttggaaggaacactgaacagtaagacttatgatactgtgcacagacgtttaacagtagaggaggccacagcctctgtttcagaaggaggaggacttcagggcattactatgaaagacagtgacgaagaagaagaaggctgatatcacacagctttgcagaaggaaggaagaccttgatcgacattgttttttatttttttaaccttgtccttgtaattacattcattgtttgttttggccaaataaaaatgcttgtatttctttaaaaagtaagcctgaatgtagagtaaaaggggaaatgccaagattttggggtttttttgtttcctttttttgtttgtttgtttgtttgtttttttggagaagagcatcctcttttgtgtagtttgacctaaaaatgaaccttggctctgcttgtgatcagaacatgaacttttttttttaaagaagatttgagcatttttctgtaatcacatcaaaatgatgttttctgtgtaaagcgagatacatatttctcataatgcagcattgtgagaagtcagttcggaccactgcaccaacactgtcgtatccttgttaaaatggtgtgtaccttacaaattataatttatgtgccaggttcgttttgtacttaatttgctattattgtgatgtgtataaaatctttaatcttggttcttagtactttgaattggtctacaggtatattcctgggatgaaaggattgccaaacccaaatatagactagattatccaatgggtttgtgtctttgttccattctcaacatttcttctttcaactataagtaatccccaggtgtggggtagcaagtgtgcttccgtcaagataccatattctcctgctccagtataacagcttgcaggcaataaaaatctatttgctcataactacttctgtatttattagacttatatagagcaaatgcagtaaaagaggtttgcagtgtttcaaacatcccaactatctgactctgtgtttttgtttcttgagttttttgtttgttttgtttgtaatattttgtttttaatcaaatgagtaaaagatagtaacactgactgttctttgtacctaataggcacatacattgttaaaagaattactatgacagcatatttccatagcagaggaaatatatatttcatatattattagttaatattagtaatcaatgttaactaataattagtaatgttagtaatattaactagtaattcacattattagtggttctctcaaaatattttcttgctagggtttgagagataattgtattatgttgcgtaagttctctatgaattatttttgtgatatttcccaaaacatattggcagattgtgctactgcatttattaataagtaatttttaaatgaaggcagttaatgcagaataagtggaggtatccctgcatttatgaaaacgtttattctgaaactttagaaatgaaacaacttggacctccagattcgttctcccatggtgtaataagtggtcgttaggtacctagactagccttaaaaatctatttaatctacagttactatttagcattgttttggctcattttctgggccctagggctaagataacaaacaaggaaatttcttccttcttccgggattaaagactaactctaccaactcactatctttgaaaggcagtttgggaatgttctccctccttttcttctctattcacacaccaaatactattttctccaaaccctcaaatgtccagtcatgctatcccaaactctccaatggcaccatccccaagcttgctgttccacgacacattgctctgtacttagtaattacccacccttcttttcctttcaataaaatgtccatttccttgatacaaaaaaaaaaaaaaaaaaaaaactcctgaatctaactcgacgtgtccggaaagccctggccagttttcctttcgttctgcggccgctgcagccagccccgcggctccctcagacccgcgggcgcagccgccgggggtgaggcgcttggggaccgcgggccgagcggcggggatccccgagcaccatgctggacccgtcttccagcgaagaggagtcggacgaggggctggaagaggaaagccgcgatgtgctggtggcagccggcagctcgcagcgagctcctccagccccgactcgggaagggcggcgggacgcgccggggcgcgcgggcggcggcggcgcggccagatctgtgagcccgagcccctctgtgctcagcgaggggcgagacgagccccagcggcagctggacgatgagcaggagcggaggatccgcctgcagctctacgtcttcgtcgtgaggtgcatcgcgtaccccttcaacgccaagcagcccaccgacatggcccggaggcagcagaagcttaacaaacaacagttgcagttactgaaagaacggttccaggccttcctcaatggggaaacccaaattgtagctgacgaagcattttgcaacgcagttcggagttattatgaggtttttctaaagagtgaccgagtggccagaatggtacagagtggagggtgttctgctaatgacttcagagaagtatttaagaaaaacatagaaaaacgtgtgcggagtttgccagaaatagatggcttgagcaaagagacagtgttgagctcatggatagccaaatatgatgccatttacagaggtgaagaggacttgtgcaaacagccaaatagaatggccctaagtgcagtgtctgaacttattctgagcaaggaacaactctatgaaatgtttcagcagattctgggtattaaaaaactggaacaccagctcctttataatgcatgtcagctggataacgcagatgaacaagcagcccagatcagaagggaacttgatggccggctgcaattggcagataaaatggcaaaggaaagaaaattccccaaatttatagcaaaagatatggagaatatgtatatagaagagttgcggtcttcagtgaatttgctaatggccaatttggaaagtcttccagtttcgaaaggtggtccggaatttaaattacaaaaattaaaacgttcacagaactctgcatttttggacataggagatgagaatgagattcagctgtcaaagtccgacgtggtactgtcattcaccttagagattgtcataatggaagtgcaaggcctgaagtcagttgctcccaatcgaattgtttactgtacaatggaagtggaaggagaaaaacttcagacagaccaggccgaagcctcaaggccacaatgggggactcaaggagatttcaccaccacccatcctcggcctgtggtcaaagtgaaactcttcacagaaagcactggagttctggccctggaagataaagaactgggaagggtgatattatacccaacttctaatagctccaaatcagctgaattacaccgaatggtagttccaaaaaatagccaggattctgacttaaaaatcaaactggcagtgcgaatggataaaccagcacatatgaagcatagtggatatctgtatgcccttggacagaaggtttggaaaagatggaaaaaacgttactttgttctagttcaggttagccaatatacctttgctatgtgcagttatagagaaaagaagtctgaaccacaagaattaatgcagcttgaaggctatactgtggattataccgatccccacccaggccttcagggtggttgtatgttctttaatgctgttaaagaaggagatactgtaatctttgccagtgatgatgaacaggacagaatattatgggttcaagccatgtatagggccacaggtcaatcatataaaccagttcctgcaattcaaacccagaaactgaatcctaaaggaggaactctccatgcagatgctcagctttctggtaaagatgcagatcgttttcagaaacatggtatggatgagtttatttctgcaaacccctgcaagcttgatcatgccttcctttttagaatactccagaggcagactttggatcacagactgaatgattcctattcttgcttgggatggtttagccctggccaagtctttgtgttagatgagtactgtgcccgttatggtgtgagaggctgtcacagacatctctgctaccttgcagaactgatggaacattcagaaaatggtgctgtcattgaccctaccctgctccattacagctttgcattctgtgcctctcatgtgcacggcaacaggcctgatggaattgggactgtttcagtggaagaaaaagaaagatttgaggagataaaagagagactctcttcccttttagaaaatcagataagccatttcagatactgttttccctttggacgacctgaaggtgctctaaaagctacactttcattacttgaaagggttttaatgaaagatattgccactcccataccagcagaagaggtgaagaaagtggtcagaaaatgtctcgagaaagctgccttgatcaattacactagactcacagaatatgccaaaatagaagagaccatgaaccaggcatctcctgctagaaagctggaagagattcttcatctggcagagctctgcatagaagtcttacagcagaatgaagagcatcatgcagagggaagagaggcatttgcctggtggcctgatttattggctgaacatgcagagaaattttgggctttatttacagtggatatggacactgcactagaggctcaaccgcaagactcctgggatagttttcctcttttccaactgcttaataatttcctccgaaatgacacacttttgtgtaatggaaaatttcacaaacacttgcaagaaatctttgtacccttggttgtccgctatgtggatctcatggagtcttccatcgcccagtcaattcacagaggttttgagcaggagacatggcagcctgtcaagaatatcgccaacagtcttcccaatgtagctcttccaaaagttccaagtctgcctcttaatcttccacagattcctaacatttctactgcttcgtggatgccttctttatatgagtccaccaatggctcagcaacatcagaagaccttttttggaagcttgatgcactgcaaatgtttgtctttgatctgcactggccagaacaggaatttgcccaccacttagagcaaagacttaaactaatggccagtgatatgctagaggcctgtgtcaaaagaacaagaactgcatttgaactcaagctacaaaaggcaagcaaaacaactgacttgcgcattccagcttccgtttgcactatgtttaatgtattagtcgatgccaaaaagcaaagcaccaaactctgtgccctggatggaggacaagagcaacagtaccattcaaaaatagatgatctgatcgacaacagtgtaaaagaaatcatttcactgttagtttcaaagtttgtttcagtgttggaaggcgtgttgtctaagctgtcaaggtatgatgaaggcactttcttttcatccattctgtcattcactgtgaaagcagctgcaaaatatgttgatgttccaaaaccaggaatggatctggcagacacctatattatgtttgttcggcaaaaccaagatattcttcgagaaaaggtcaatgaggaaatgtatatagaaaagttatttgatcaatggtacagcagttccatgaaagtcatttgcgtgtggttgactgatagattagacctccaactccatatttaccagctgaagacgctcatcaagattgtgaagaaaacctacagggactttcgattgcagggtgtgttggaaggaacactgaacagtaagacttatgatactgtgcacagacgtttaacagtagaggaggccacagcctctgtttcagaaggaggaggacttcagggcattactatgaaagacagtgacgaagaagaagaaggctgatatcacacagctttgcagaaggaaggaagaccttgatcgacattgttttttatttttttaaccttgtccttgtaattacattcattgtttgttttggccaaataaaaatgcttgtatttctttaaaaagtaagcctgaatgtagagtaaaaggggaaatgccaagattttggggtttttttgtttcctttttttgtttgtttgtttgtttgtttttttggagaagagcatcctcttttgtgtagtttgacctaaaaatgaaccttggctctgcttgtgatcagaacatgaacttttttttttaaagaagatttgagcatttttctgtaatcacatcaaaatgatgttttctgtgtaaagcgagatacatatttctcataatgcagcattgtgagaagtcagttcggaccactgcaccaacactgtcgtatccttgttaaaatggtgtgtaccttacaaattataatttatgtgccaggttcgttttgtacttaatttgctattattgtgatgtgtataaaatctttaatcttggttcttagtactttgaattggtctacaggtatattcctgggatgaaaggattgccaaacccaaatatagactagattatccaatgggtttgtgtctttgttccattctcaacatttcttctttcaactataagtaatccccaggtgtggggtagcaagtgtgcttccgtcaagataccatattctcctgctccagtataacagcttgcaggcaataaaaatctatttgctcataactacttctgtatttattagacttatatagagcaaatgcagtaaaagaggtttgcagtgtttcaaacatcccaactatctgactctgtgtttttgtttcttgagttttttgtttgttttgtttgtaatattttgtttttaatcaaatgagtaaaagatagtaacactgactgttctttgtacctaataggcacatacattgttaaaagaattactatgacagcatatttccatagcagaggaaatatatatttcatatattattagttaatattagtaatcaatgttaactaataattagtaatgttagtaatattaactagtaattcacattattagtggttctctcaaaatattttcttgctagggtttgagagataattgtattatgttgcgtaagttctctatgaattatttttgtgatatttcccaaaacatattggcagattgtgctactgcatttattaataagtaatttttaaatgaaggcagttaatgcagaataagtggaggtatccctgcatttatgaaaacgtttattctgaaactttagaaatgaaacaacttggacctccagattcgttctcccatggtgtaataagtggtcgttaggtacctagactagccttaaaaatctatttaatctacagttactatttagcattgttttggctcattttctgggccctagggctaagataacaaacaaggaaatttcttccttcttccgggattaaagactaactctaccaactcactatctttgaaaggcagtttgggaatgttctccctccttttcttctctattcacacaccaaatactattttctccaaaccctcaaatgtccagtcatgctatcccaaactctccaatggcaccatccccaagcttgctgttccacgacacattgctctgtacttagtaattacccacccttcttttcctttcaataaaatgtccatttccttgatacaaaaaaaaaaaaaaaaaaaaa

SEQ ID NO: 276 - DNA, 4824 bp, Homo sapiens
gcggaaaagaggccgtggggggcctcccagcgctggcagacaccgtgaggctggcagccgccggcacgcacacctagtccgcagtcccgaggaacatgtccgcagccagggcgcggagcagagtcccgggcaggagaaccaagggagggcgtgtgctgtggcggcggcggcagcggcagcggagccgctagtcccctccctcctgggggagcagctgccgccgctgccgccgccgccaccaccatcagcgcgcggggcccggccagagcgagccgggcgagcggcgcgctagggggagggcgggggcggggaggggggtgggcgaagggggcgggagggcgtggggggagggtctcgctctcccgactaccagagcccgagagggagaccctggcggcggcggcggcgcctgacactcggcgcctcctgccgtgctccggggcggcatgtccgaggctggcggggccgggccgggcggctgcggggcaggagccggggcaggggccgggcccggggcgctgcccccgcagcctgcggcgcttccgcccgcgcccccgcagggctccccctgcgccgctgccgccgggggctcgggcgcctgcggtccggcgacggcagtggctgcagcgggcacggccgaaggaccgggaggcggtggctcggcccgaatcgccgtgaagaaagcgcaactacgctccgctccgcgggccaagaaactggagaaactcggagtgtactccgcctgcaaggccgaggagtcttgtaaatgtaatggctggaaaaaccctaacccctcacccactccccccagagccgacctgcagcaaataattgtcagtctaacagaatcctgtcggagttgtagccatgccctagctgctcatgtttcccacctggagaatgtgtcagaggaagaaatgaacagactcctgggaatagtattggatgtggaatatctctttacctgtgtccacaaggaagaagatgcagataccaaacaagtttatttctatctatttaagctcttgagaaagtctattttacaaagaggaaaacctgtggttgaaggctctttggaaaagaaacccccatttgaaaaacctagcattgaacagggtgtgaataactttgtgcagtacaaatttagtcacctgccagcaaaagaaaggcaaacaatagttgagttggcaaaaatgttcctaaaccgcatcaactattggcatctggaggcaccatctcaacgaagactgcgatctcccaatgatgatatttctggatacaaagagaactacacaaggtggctgtgttactgcaacgtgccacagttctgcgacagtctacctcggtacgaaaccacacaggtgtttgggagaacattgcttcgctcggtcttcactgttatgaggcgacaactcctggaacaagcaagacaggaaaaagataaactgcctcttgaaaaacgaactctaatcctcactcatttcccaaaatttctgtccatgctagaagaagaagtatatagtcaaaactctcccatctgggatcaggattttctctcagcctcttccagaaccagccagctaggcatccaaacagttatcaatccacctcctgtggctgggacaatttcatacaattcaacctcatcttcccttgagcagccaaacgcagggagcagcagtcctgcctgcaaagcctcttctggacttgaggcaaacccaggagaaaagaggaaaatgactgattctcatgttctggaggaggccaagaaaccccgagttatgggggatattccgatggaattaatcaacgaggttatgtctaccatcacggaccctgcagcaatgcttggaccagagaccaattttctgtcagcacactcggccagggatgaggcggcaaggttggaagagcgcaggggtgtaattgaatttcacgtggttggcaattccctcaaccagaaaccaaacaagaagatcctgatgtggctggttggcctacagaacgttttctcccaccagctgccccgaatgccaaaagaatacatcacacggctcgtctttgacccgaaacacaaaacccttgctttaattaaagatggccgtgttattggtggtatctgtttccgtatgttcccatctcaaggattcacagagattgtcttctgtgctgtaacctcaaatgagcaagtcaagggctatggaacacacctgatgaatcatttgaaagaatatcacataaagcatgacatcctgaacttcctcacatatgcagatgaatatgcaattggatactttaagaaacagggtttctccaaagaaattaaaatacctaaaaccaaatatgttggctatatcaaggattatgaaggagccactttaatgggatgtgagctaaatccacggatcccgtacacagaattttctgtcatcattaaaaagcagaaggagataattaaaaaactgattgaaagaaaacaggcacaaattcgaaaagtttaccctggactttcatgttttaaagatggagttcgacagattcctatagaaagcattcctggaattagagagacaggctggaaaccgagtggaaaagagaaaagtaaagagcccagagaccctgaccagctttacagcacgctcaagagcatcctccagcaggtgaagagccatcaaagcgcttggcccttcatggaacctgtgaagagaacagaagctccaggatattatgaagttataaggttccccatggatctgaaaaccatgagtgaacgcctcaagaataggtactacgtgtctaagaaattattcatggcagacttacagcgagtctttaccaattgcaaagagtacaacccccctgagagtgaatactacaaatgtgccaatatcctggagaaattcttcttcagtaaaattaaggaagctggattaattgacaagtgattttttttcccctctgcttcttagaaactcaccaagcagtgtgcctaaagcaaggtggtttagttttttacaaagaattggacatgatgtattgaagagacttgtaaatgtaataattagcacttttgaaaaaacaaaaaacctccttttagcttttcagatatgtatttaaattgaagtcataggacatttttattttatggaatagattttaatctatttactactattaaggtaaattttctatggcatgtccattagctatttcatgatagatgattaggggtttcctcaaaacctgtgtgtgaggaaattgcacacagtagcaaaatttggggaaatccataacattttcagaccatgaatgaatgtttccatttttttctaatggaatgtgagagtttacttttattttattctgaaggactttaaggaagggatacatgattttaaaaaagcctgtaagaggtgaaatatgtgatgtttgaagtctctttatagactttttatatatattttttaaaacactcatctagatgaggtgctttgagcagttctgaaaaatgcagttccaggaaagcaactgctttggttcctaaggaagaaattctaaataatgcaaacttttaaaataagcatctaggtttttgataattctgtctacttacaacaaacttgttagtacataaccactattttaataattattttctctacacaaatgtgtaatatcatatttgactttgcttatgcaggccataagttccaaaagataatttccctgcccacaaaggcataaacttgaaaacacatgagattgaatcaacatgctttaataggaaaagatgtatggtctatatatgtatcaatctggtgaatcctcgttctaataaaggttctttttcttttctatgatacacacagccacgctgataatatgcaaatgaacattttcctttatgtctctccagataatgtttattgtctgaggtaaattaaattcccaccagggtttgctgtcagtattttaacacccacattagtatatgcgtccagggtcataaccccctaaaatccatcatgcaaccttattaatctgtcttgggattccagtttagtgcttggatttatttcctgattacactacatagaaaagtgagacatctgccattcccaactctgggaaaaccaactaatatacaaccatataaatgaaggccatcttgatggtctcaacactaatttttatgatgcaaatttatacactgatttttgtaaaggacaaagttttaaaagcgtatttaacttgatgttttctatcagcataaataaaatggtcatgaatagtcattaaaaacagttgccagtgataatctgcatgaaggaaaaagaaccctgcaaatggctattgagttggaagtattgtttttgatatgtaagagatattcagaatgctcacactgaaaatgcctcaactttttaaagtgtaagaaaccaccatgagtggtgtctagatttctaatgaagaatcatgatacagtttggattaagtatcttggactggttttaaacagtgctttgtaccggatctgctgaagcatctgtccagctggtatcctgtgaaagtttgttattttctgagtagacattcttatagagtattgtctttaaaatcagattgtctcttctatattgaaagcatttttatgttttctaatttaaaaattaatattttcttatagatattgtgcaataaagctgaagtagaatgtgtggtttttgcaaatgctttaacagctgataaaaattttacatttgtaaaattaatatattgtactggtacaaaatagttttaaattatattttaaaaagcttccaa

SEQ ID NO: 277 - DNA, 4655 bp, Homo sapiens
ggggctgagggtggagagaggaagggaaggaagaaaaggggagccttcctggccagggtaaccggcactaagaggcctcactccaagcccccgaggagcctgtggtggggctggagacccggctcaggcccctccaccacccttaaagtcctcagaaggtgggaactgaactggcacaggatgggaaccggctgtgcgctggccacttgattttgccagctgccctgtaattcagctggtgaggaaactgaggcacagactgaggtagaatgattcgccagtcactcagcaagtcagcagacggggaggactgaatcccagcctgagagcaccgaagcttgtatccctgcaataccgagccccaagcctgcgagccccggtgcccatctctgagttaggccgtcttggaagggttcccttcctcctacaagatggtgtgtgaggagccttcaatacgacccggggtgtaaagtgtccaactctagtaggggcctgatggcatccccgccgagtcccaggagagagagagaagaccccttcctggagtccagggctcccgggaagaaacactggcatttgtccctttgcttcggcttctggaggcagagactctgagcccagggagagccttctgcagccccatttcctcaaaaatccaacctgcccaggtggcgggtcatgagctgtgctcaggaagctggaatctgaccctggtggcgtcgggcccagtctccatggcagccgagcatttattacccgggcctccacccagcttggcagactttagacttgaggctggaggaaagggaactgaacgcggttctgggagcagcaagcccacgggtagcagccgaggccccagaatggccaagtttctttcccaagaccaaattaatgagtacaaggaatgcttctccctgtatgacaagcagcagagggggaagataaaagccaccgacctcatggtggccatgaggtgcctgggggccagcccgacgccaggggaggtgcagcggcacctgcagacccacgggatagacggaaatggagagctggatttctccacttttctgaccattatgcacatgcaaataaaacaagaagacccaaagaaagaaattcttctagccatgttgatggtggacaaggagaagaaaggttacgtcatggcgtccgacctgcggtcaaaactcacgagtctgggggagaagctcacccacaaggaagtggatgatctcttcagggaagcagatatcgaacccaatggcaaagtgaagtatgatgaatttatccacaagatcacccttcctggacgggactattgaaggaggagaatgggagagcctcccctgggcctgaaaacttggagcaattaattttttttaaaaagtgttcttttcacttgggagagatggcaaacacagtggcaagacaacattacccaactatagaagagaggctaactagcaacaataatagatgatttcagccatggtatgagtagatctttaataaaagatttgtattgattttattaactaccgtgagtccggccctttcaagcatggaaggagcctgcggtttggagtctggcctgggttccagtcctggctctgctgcttcccactgtgactttgggcaaatcatttcactcctcaaagcccccccacacaagctggattcccacttcttacctcatggagcctgttgaggaaggattgagctgatgacttaagggcaatctaccaagagacttattctgtatttgggggctagaaccatcttccatatttccaagattttccaagatgaagccagtgctagctgagaagcagcaatgaacagaaagctgtaacacttatgacaacaattcttgcagtgccagaggcccatttacaaattctcatttccatctcaacagatatagtgacatagctcaggctattcattcataaacacagagtgtagagtgaaaacactagagtgaaaacacatgctacaatgaggcagcatcagctgagagcaggaagagcgatctactttacaccccacaccaaaggaaaccagatgtgagctgctaaattgactggccttgcagagctcaagaagggggcttccaatgctgtgagaattccgagctgttccctgggctctgttaacaggcagagaggttccgggatggtctgctcaagtggcccacactggtcattgccttaagccacctccccaggacttacggagagaaataaggggatgtaaccagcaatggccagggtacaacagccctggaaaacagtagtaggagcactaggctttctgggagtccatccagctggagtggctttgagtgagttacacagctagaaggtgccaggttggtgctgccagagattcagaggtgccatacacttgtcaaatctggatcattcgtagtgccagcacagtcctaaaagggctggagtaccacaccaacacaggtaggggtgcagggcttcaagtacaaagatttgcatccatgtatgtatcaaaagtgggttctctgggctgtggctttgtctagtagtaccacagtggctaaagtagaagaaaaccaaatcaaatgggatgtgtcttttgggaggatgtacaagacacaaatctttcactaggcaccgggcacagggaaaactgcagggaacaagagttgtagtgttagtgcaactgtctcaacgatgctgtgtggcttcagacccaaacaaggccctgaggaaggagactctcatttccccaagcataactgcaaggagaggaggaattcctaggagccaaagagttttgtggggtgagggtaaataaatggcccaaatgccaactaggtgaagttgtgaccatctggctgggaagcccaggtccacacagtgtaggagcagatgttttgtggggtctgaggtttacgagatttggctgccttaagaatacaaaaacagaaatgcagaatttctggggctgctcctaggaccagaacaagtgaagggtcctggtgcttaaacttcattaccttcatggtaaatccaccagagggccggttagatgctggccccgccgagagaactgctgtcactttcaggcaaagctcaaaggtcctaggcccacagttcttttgagctccagtcatggacattaggaagtaaatcctgcacagccaacctggaataccaaagattagatgggagatagataccaatgatttagatggcacaggaagagcaagttctggatataataaatgagggtactttccgtcaaagcttttctatgtctatatttatcactgaatagtcccagtatggttttaaagcaagttttatgaatctcatttgcctaacaggaatctgaaatataacttgccaaaaacacacagttggtgtggaatggtcattagaacctggggctcctcttcacggactccctgctcattaagggattcagtggtccagagtctaagatcctattaagtgtttgattcaaacctctacccgaggaagggctgttaccttactcctggtcctggtttcaagctcattcctgaaattccagctggtttctctagcacctagtgttgtttacaagaaggccacggtgctcttagcattcaaactgcagatactaaacagatgctgtgatttattaaagagttagccatatttcaacaagaaagggaaatgatggctatattcattacttacctcaaagcatgctgcaagaaaattagttagttacttgtcatgctttgaaatctctggatgaaaggtgctttggaagcacaaaccattatcacttgtctcatagggattgtccccttgaacatccagcagtgttattttacagaagacaaattaactgaaggcttttcttttattacatctaaagagctctacataaacaggtaacattcaataggtaaacaatttttttccaatgcatgtaataaatattttcacttggtacttttatacaaactgacattgtctactatacatttttaaaagccattttactggtttggcatgcggtatggaaattctaagagagaaagttttaaggcaatgaatcacagatttaagttcatggaatttatggtaactttatctgtttatgtacattttcccctttgttaaacaattaacagcagcacactctgggaccaccagctattttccctctctttctgaaatctaagctttgtatttaattaaaaaacagaattcaacatctattgataaaacaaaattcttactaaaataatttcaaatgtgctttaaaaagtcctgaagatcttgaaagttttatgtgtttaaaattgaaattgtctaaaaaaatgctctttccacattaatttagttaggatatattttcactccatttcagacacttgactcaaaggaaaatctgccaaagaatccgatttttcagagcttacgtgaatctttcctcagtaaagatacagaattgtgatcatgtctaaataattagtaaagcaattttaatgctcaaaatagtcaaccaagtatggcatggttctggttcagattttttttttttaagatgtatccaataacactcacgaagtaattaaaagccactttaaccctgctaaaaaaaaaaaaaaaaaaaaa

SEQ ID NO: 278 - DNA, 4514 bp, Homo sapiens
ggggctgagggtggagagaggaagggaaggaagaaaaggggagccttcctggccagggtaaccggcactaagaggcctcactccaagcccccgaggagcctgtggtggggctggagacccggctcaggcccctccaccacccttaaagtcctcagaaggtgggaactgaactggcacaggatgggaaccggctgtgcgctggccacttgattttgccagctgccctgtaattcagctggtgaggaaactgaggcacagactgaggtagaatgattcgccagtcactcagcaagtcagcagacggggaggactgaatcccagcctgagagcaccgaagcttgtatccctgcaataccgagccccaagcctgcgagccccggtgcccatctctgagttaggccgtcttggaagggttcccttcctcctacaagatggtgtgtgaggagccttcaatacgacccggggtgtaaagtgtccaactctagtaggggcctgatggcatccccgccgagtcccaggagagagagagaagaccccttcctggagtccagggctcccgggaagaaacactggcatttgtccctttgcttcggcttctggaggcagagactctgagcccagggagagccttctgcagccccatttcctcaaaaatccaacctgcccaggtggcgggtcatgagctgtgctcaggaagctggaatctgaccctggtggcgtcgggcccagtctccatggcagccgagcatttattacccgggcctccacccagcttggcagactttagacttgaggctggaggaaagggaactgaacgcggttctgggagcagcaagcccacgggtagcagccgaggccccagaatggccaagtttctttcccaagaccaaattaatgacggaaatggagagctggatttctccacttttctgaccattatgcacatgcaaataaaacaagaagacccaaagaaagaaattcttctagccatgttgatggtggacaaggagaagaaaggttacgtcatggcgtccgacctgcggtcaaaactcacgagtctgggggagaagctcacccacaaggaagtggatgatctcttcagggaagcagatatcgaacccaatggcaaagtgaagtatgatgaatttatccacaagatcacccttcctggacgggactattgaaggaggagaatgggagagcctcccctgggcctgaaaacttggagcaattaattttttttaaaaagtgttcttttcacttgggagagatggcaaacacagtggcaagacaacattacccaactatagaagagaggctaactagcaacaataatagatgatttcagccatggtatgagtagatctttaataaaagatttgtattgattttattaactaccgtgagtccggccctttcaagcatggaaggagcctgcggtttggagtctggcctgggttccagtcctggctctgctgcttcccactgtgactttgggcaaatcatttcactcctcaaagcccccccacacaagctggattcccacttcttacctcatggagcctgttgaggaaggattgagctgatgacttaagggcaatctaccaagagacttattctgtatttgggggctagaaccatcttccatatttccaagattttccaagatgaagccagtgctagctgagaagcagcaatgaacagaaagctgtaacacttatgacaacaattcttgcagtgccagaggcccatttacaaattctcatttccatctcaacagatatagtgacatagctcaggctattcattcataaacacagagtgtagagtgaaaacactagagtgaaaacacatgctacaatgaggcagcatcagctgagagcaggaagagcgatctactttacaccccacaccaaaggaaaccagatgtgagctgctaaattgactggccttgcagagctcaagaagggggcttccaatgctgtgagaattccgagctgttccctgggctctgttaacaggcagagaggttccgggatggtctgctcaagtggcccacactggtcattgccttaagccacctccccaggacttacggagagaaataaggggatgtaaccagcaatggccagggtacaacagccctggaaaacagtagtaggagcactaggctttctgggagtccatccagctggagtggctttgagtgagttacacagctagaaggtgccaggttggtgctgccagagattcagaggtgccatacacttgtcaaatctggatcattcgtagtgccagcacagtcctaaaagggctggagtaccacaccaacacaggtaggggtgcagggcttcaagtacaaagatttgcatccatgtatgtatcaaaagtgggttctctgggctgtggctttgtctagtagtaccacagtggctaaagtagaagaaaaccaaatcaaatgggatgtgtcttttgggaggatgtacaagacacaaatctttcactaggcaccgggcacagggaaaactgcagggaacaagagttgtagtgttagtgcaactgtctcaacgatgctgtgtggcttcagacccaaacaaggccctgaggaaggagactctcatttccccaagcataactgcaaggagaggaggaattcctaggagccaaagagttttgtggggtgagggtaaataaatggcccaaatgccaactaggtgaagttgtgaccatctggctgggaagcccaggtccacacagtgtaggagcagatgttttgtggggtctgaggtttacgagatttggctgccttaagaatacaaaaacagaaatgcagaatttctggggctgctcctaggaccagaacaagtgaagggtcctggtgcttaaacttcattaccttcatggtaaatccaccagagggccggttagatgctggccccgccgagagaactgctgtcactttcaggcaaagctcaaaggtcctaggcccacagttcttttgagctccagtcatggacattaggaagtaaatcctgcacagccaacctggaataccaaagattagatgggagatagataccaatgatttagatggcacaggaagagcaagttctggatataataaatgagggtactttccgtcaaagcttttctatgtctatatttatcactgaatagtcccagtatggttttaaagcaagttttatgaatctcatttgcctaacaggaatctgaaatataacttgccaaaaacacacagttggtgtggaatggtcattagaacctggggctcctcttcacggactccctgctcattaagggattcagtggtccagagtctaagatcctattaagtgtttgattcaaacctctacccgaggaagggctgttaccttactcctggtcctggtttcaagctcattcctgaaattccagctggtttctctagcacctagtgttgtttacaagaaggccacggtgctcttagcattcaaactgcagatactaaacagatgctgtgatttattaaagagttagccatatttcaacaagaaagggaaatgatggctatattcattacttacctcaaagcatgctgcaagaaaattagttagttacttgtcatgctttgaaatctctggatgaaaggtgctttggaagcacaaaccattatcacttgtctcatagggattgtccccttgaacatccagcagtgttattttacagaagacaaattaactgaaggcttttcttttattacatctaaagagctctacataaacaggtaacattcaataggtaaacaatttttttccaatgcatgtaataaatattttcacttggtacttttatacaaactgacattgtctactatacatttttaaaagccattttactggtttggcatgcggtatggaaattctaagagagaaagttttaaggcaatgaatcacagatttaagttcatggaatttatggtaactttatctgtttatgtacattttcccctttgttaaacaattaacagcagcacactctgggaccaccagctattttccctctctttctgaaatctaagctttgtatttaattaaaaaacagaattcaacatctattgataaaacaaaattcttactaaaataatttcaaatgtgctttaaaaagtcctgaagatcttgaaagttttatgtgtttaaaattgaaattgtctaaaaaaatgctctttccacattaatttagttaggatatattttcactccatttcagacacttgactcaaaggaaaatctgccaaagaatccgatttttcagagcttacgtgaatctttcctcagtaaagatacagaattgtgatcatgtctaaataattagtaaagcaattttaatgctcaaaatagtcaaccaagtatggcatggttctggttcagattttttttttttaagatgtatccaataacactcacgaagtaattaaaagccactttaaccctgctaaaaaaaaaaaaaaaaaaaaa

SEQ ID NO: 279 - DNA, 1501 bp, Homo sapiens
ggagagagccgccgagccgagccgagccccagctccagcaagagcgcgggcgggtggcccaggcacgcagcggtgaggaccgcggccacagctcggcgccaaccaccgcgggcctcccagccagccccgcggcggggcagccgcaggagccctggctgtggtcggggggcagtgggccatgctgggggcagtggaaggccccaggtggaagcaggcggaggacattagagacatctacgacttccgagatgttctgggcacgggggccttctcggaggtgatcctggcagaagataagaggacgcagaagctggtggccatcaaatgcattgccaaggaggccctggagggcaaggaaggcagcatggagaatgagattgctgtcctgcacaagatcaagcaccccaacattgtagccctggatgacatctatgagagtgggggccacctctacctcatcatgcagctggtgtcgggtggggagctctttgaccgtattgtggaaaaaggcttctacacggagcgggacgccagccgcctcatcttccaggtgctggatgctgtgaaatacctgcatgacctgggcattgtacaccgggatctcaagccagagaatctgctgtactacagcctggatgaagactccaaaatcatgatctccgactttggcctctccaagatggaggacccgggcagtgtgctctccaccgcctgtggaactccgggatacgtggcccctgaagtcctggcccagaagccctacagcaaggctgtggattgctggtccataggtgtcatcgcctacatcttgctctgcggttaccctcccttctatgacgagaatgatgccaaactctttgaacagattttgaaggccgagtacgagtttgactctccttactgggacgacatctctgactctgccaaagatttcatccggcacttgatggagaaggacccagagaaaagattcacctgtgagcaggccttgcagcacccatggattgcaggagatacagctctagataagaatatccaccagtcggtgagtgagcagatcaagaagaactttgccaagagcaagtggaagcaagccttcaatgccacggctgtggtgcggcacatgaggaaactgcagctgggcaccagccaggaggggcaggggcagacggcgagccatggggagctgctgacaccagtggctggggggccggcagctggctgttgctgtcgagactgctgcgtggagccgggcacagaactgtcccccacactgccccaccagctctagggccctggacctcgggtcatgatcctctgcgtgggagggcttgggggcagcctgctccccttccctccctgaaccgggagtttctctgccctgtcccctcctcacctgcttccctaccactcctcactgcattttccatacaaatgtttctattttattgttccttcttgtaataaagggaagataaaaccaaaaaaaaaaaaaaaaaaa

SEQ ID NO: 280 - DNA, 4836 bp, Homo sapiens
agaagccccgggctcgtcagtcaaaccggttctctgtttgcactcggcagcacgggcaggcaagtggtccctaggttcgggagcagagcagcagcgcctcagtcctggtcccccagtcccaagcctcacctgcctgcccagcgccaggatggccaccatcacctgcacccgcttcacggaagagtaccagctcttcgaggaattgggcaagggagccttctcggtggtgcgaaggtgtgtgaaggtgctggctggccaggagtatgctgccaagatcatcaacacaaagaagctgtcagccagagaccatcagaagctggagcgtgaagcccgcatctgccgcctgctgaagcaccccaacatcgtccgactacatgacagcatctcagaggagggacaccactacctgatcttcgacctggtcactggtggggaactgtttgaagatatcgtggcccgggagtattacagtgaggcggatgccagtcactgtatccagcagatcctggaggctgtgctgcactgccaccagatgggggtggtgcaccgggacctgaagcctgagaatctgttgctggcctccaagctcaagggtgccgcagtgaagctggcagactttggcctggccatagaggtggagggggagcagcaggcatggtttgggtttgcagggactcctggatatctctccccagaagtgctgcggaaggacccgtacgggaagcctgtggacctgtgggcttgtggggtcatcctgtacatcctgctggttgggtaccccccgttctgggatgaggaccagcaccgcctgtaccagcagatcaaagccggcgcctatgatttcccatcgccggaatgggacactgtcaccccggaagccaaggatctgatcaataagatgctgaccattaacccatccaaacgcatcacagctgccgaagcccttaagcacccctggatctcgcaccgctccaccgtggcatcctgcatgcacagacaggagaccgtggactgcctgaagaagttcaatgccaggaggaaactgaagggagccattctcaccacgatgctggccaccaggaacttctccggagggaagagtgggggaaacaagaagagcgatggtgtgaagaaaagaaagtccagttccagcgttcagttaatggaatcctcagagagcaccaacaccaccatcgaggatgaagacaccaaagtgcggaaacaggaaattataaaagtgacagagcagctgattgaagccataagcaatggagattttgagtcctacacgaagatgtgcgaccctggcatgacagccttcgaacctgaggccctggggaacctggttgagggcctggacttccatcgattctattttgaaaacctgtggtcccggaacagcaagcccgtgcacaccaccatcctgaatccccacatccacctgatgggcgacgagtcagcctgcatcgcctacatccgcatcacgcagtacctggacgctggcggcatcccacgcaccgcccagtcggaggagacccgtgtctggcaccgccgggatggcaaatggcagatcgtccacttccacagatctggggcgccctccgtcctgccccactgagggaccaggctggggtcgctgcgttgctgtgccgcagagatccactctgtccgtggagtggagctgctggttctcccaggtggattttgctggaattctcccatgtcatcaccccaccaccgtcacttctgtacctgcatcaagaaaacctgcttgttcacaaaagtcatcgcaacttcagagcgaacggccacatctccccacctctcacccccaccctctcccctgccaggctggggcttcctcaggcatgggtgtccacagcactggccccctctccccagcctcagctgctgtccgcctgatctgtcttgggctgtaggctagaatgcccgggctggtgcccaccaggggctggggagaaggaggggtggcatgatgaggaaggcagcatccgtccgtccctctcccagacctctcctcttccagtgtccccggggaagggcagatgacactcccttccccctaagccaaccgcactgaaggagtggggagaagagcatacgccaggagcctcctgcctcaaagtgctcccctaagtcttcttcctcctgtgctgacctcagggtggtctgacccttccctcggtgtgggggatgtggccctctcaggtgcccctacttgctttctgcttccttctggtgaagtccacctccaacattaacctgcccaccccacccccgtcatccctggagaattccagctttgtcgtatctcagagagggaatctaattgtttttggggggcaaaagaaagcaacgtttaggtatcacttctacttggaccgcatgcctttttatagccaaatttctgtgtatttcgtaaatggatttcgcgttaatggatatttatgtaataactagacttctcagattattgtgagaagggtcaggttggaaggggtgtaggaagaggggtgaggggtagtttttttctgttctagtttttttttttttttttgtcatctctgaggtggaccttgtcacctgtggttattggggccaaggtggactcagctccggggagaagggcctctctgccatttcggtcccaaggtgagctgacacaggcgttccttttgggactgtggaagcatcagatgccagcactgactcaggaacagcaagtcagggcagagaggaggagggaggctgtcaggatggaaatacctggacttttctttgcttccctcgcaaactggggtcttctctaccgaacttcccaggatttcatctcaccatatctgtgtgccgcccccagcaccccccacccacctctggggggcccgtgagcgtgtgtcttcattgcctctctccccttggcgtctgatgaccacagcaaagcactgggaatttctactcttcatgcctcatcctgcagcctcgggttcgcattctctctttcttttcctctttccctctttccctgggattgactctgagtggaataccttggcacatccactaggatctactgtctgcactgttttctttgcatgactttatacgcagtaagtatgttgaaaacaaacaaaaagaagaaaacactcaacaaaaccaatctacatgttttggactaaaaaaaaaaatagaggttgtattctcagtgtccgactcggaattatgttgctgcctctctgtgcttttggcctctgtgtggccgtgttttgccagcatgagatactgtcccctctggaggattttaggggaggaagagccacgtccccagggattggaggaggctccggtaccctcgaccctcctgggtgttggttggagcagaactggtgaggatgtttgatccgagattttctgagctctccccaatcaccagctgtctgctgggttcttttctcaagtcctgctgcccaggcccaggtgagacaggcaacgccaggtctgcaggccaggagagatgctgcccaggcctcctggtttccaagctggtccatcactggcctctgtccttggcagagaccttgctgcccaggcccaggggcaggctcttggcctgccccaggcccagagggcttcccagtaaggcccagtgatcccattatcccaggggcaaaaccacctgtccccttttgagctgccagttccctacagccatccccagtcaagggtgagggtgtggccttcaccaggggctgctgtaattaccgagcaaggtctgagctcttcttcagcctcagttccctcattggttaaaagggttctttgttcccatccagccgatgaaggagcaaacgtctggctatgtgaagcctaatttacctgcaggaactggcagggatagtcactggctggactcctgtttacttctagacctggtcaggctccatcccctcccccacctgcccctgattcccctcgtcggtgcctgtcaactgcttttcagcagtggactgcaggggaaagagcagtgatttggggtgagtaggcttcaattcccagctctgaccagacttgctgtgtgaccttgggcaagttcctttccctctttggagcttggtttccctgccagaggaaactgagctggaggagcctgaggtcctgcctttcattggctgacacacctcctgtccactgtgtcactctccaagtgccagagaagtggaggcagatcgctaccccaggctgagatggcccccactgtgaaggccacgcctgtgggtgggcagccacctggtgccaccacagggcaccagggatgatcctgatgtggcaggcaggggagactcacagaaaaatctgcccagagcctaccctcaccagacaaactctgtgctcctccaaaacatcctttagatgcaaaataataataataataataataaataaataaataaaaatccaaacccaagtcaaaaccttggctccagcatgaaaacacgtttacaggaaagtgttctcctgggtttgtgcccaccatggtgcgaatcctgacccaaggcctcctgtctcccttcaaagggagacccttttgggggatgagtttgccagactccccgtgctggtttctttgttactatttgtttggggttttgttttagttctttttttttttcttttcttttttaaaaatatgtggctgtgaacttgaatgaacactgctcaaactttctgctattggggggggcgggtgggatgggaagaaggggcgtttgttttattcttggtgttttcagtgcaataaatagctacaaacttctgtgc

SEQ ID NO: 281 - DNA, 4803 bp, Homo sapiens
agaagccccgggctcgtcagtcaaaccggttctctgtttgcactcggcagcacgggcaggcaagtggtccctaggttcgggagcagagcagcagcgcctcagtcctggtcccccagtcccaagcctcacctgcctgcccagcgccaggatggccaccatcacctgcacccgcttcacggaagagtaccagctcttcgaggaattgggcaagggagccttctcggtggtgcgaaggtgtgtgaaggtgctggctggccaggagtatgctgccaagatcatcaacacaaagaagctgtcagccagagaccatcagaagctggagcgtgaagcccgcatctgccgcctgctgaagcaccccaacatcgtccgactacatgacagcatctcagaggagggacaccactacctgatcttcgacctggtcactggtggggaactgtttgaagatatcgtggcccgggagtattacagtgaggcggatgccagtcactgtatccagcagatcctggaggctgtgctgcactgccaccagatgggggtggtgcaccgggacctgaagcctgagaatctgttgctggcctccaagctcaagggtgccgcagtgaagctggcagactttggcctggccatagaggtggagggggagcagcaggcatggtttgggtttgcagggactcctggatatctctccccagaagtgctgcggaaggacccgtacgggaagcctgtggacctgtgggcttgtggggtcatcctgtacatcctgctggttgggtaccccccgttctgggatgaggaccagcaccgcctgtaccagcagatcaaagccggcgcctatgatttcccatcgccggaatgggacactgtcaccccggaagccaaggatctgatcaataagatgctgaccattaacccatccaaacgcatcacagctgccgaagcccttaagcacccctggatctcgcaccgctccaccgtggcatcctgcatgcacagacaggagaccgtggactgcctgaagaagttcaatgccaggaggaaactgaagggagccattctcaccacgatgctggccaccaggaacttctccggagggaagagtgggggaaacaagaagagcgatggtgtgaaggaatcctcagagagcaccaacaccaccatcgaggatgaagacaccaaagtgcggaaacaggaaattataaaagtgacagagcagctgattgaagccataagcaatggagattttgagtcctacacgaagatgtgcgaccctggcatgacagccttcgaacctgaggccctggggaacctggttgagggcctggacttccatcgattctattttgaaaacctgtggtcccggaacagcaagcccgtgcacaccaccatcctgaatccccacatccacctgatgggcgacgagtcagcctgcatcgcctacatccgcatcacgcagtacctggacgctggcggcatcccacgcaccgcccagtcggaggagacccgtgtctggcaccgccgggatggcaaatggcagatcgtccacttccacagatctggggcgccctccgtcctgccccactgagggaccaggctggggtcgctgcgttgctgtgccgcagagatccactctgtccgtggagtggagctgctggttctcccaggtggattttgctggaattctcccatgtcatcaccccaccaccgtcacttctgtacctgcatcaagaaaacctgcttgttcacaaaagtcatcgcaacttcagagcgaacggccacatctccccacctctcacccccaccctctcccctgccaggctggggcttcctcaggcatgggtgtccacagcactggccccctctccccagcctcagctgctgtccgcctgatctgtcttgggctgtaggctagaatgcccgggctggtgcccaccaggggctggggagaaggaggggtggcatgatgaggaaggcagcatccgtccgtccctctcccagacctctcctcttccagtgtccccggggaagggcagatgacactcccttccccctaagccaaccgcactgaaggagtggggagaagagcatacgccaggagcctcctgcctcaaagtgctcccctaagtcttcttcctcctgtgctgacctcagggtggtctgacccttccctcggtgtgggggatgtggccctctcaggtgcccctacttgctttctgcttccttctggtgaagtccacctccaacattaacctgcccaccccacccccgtcatccctggagaattccagctttgtcgtatctcagagagggaatctaattgtttttggggggcaaaagaaagcaacgtttaggtatcacttctacttggaccgcatgcctttttatagccaaatttctgtgtatttcgtaaatggatttcgcgttaatggatatttatgtaataactagacttctcagattattgtgagaagggtcaggttggaaggggtgtaggaagaggggtgaggggtagtttttttctgttctagtttttttttttttttttgtcatctctgaggtggaccttgtcacctgtggttattggggccaaggtggactcagctccggggagaagggcctctctgccatttcggtcccaaggtgagctgacacaggcgttccttttgggactgtggaagcatcagatgccagcactgactcaggaacagcaagtcagggcagagaggaggagggaggctgtcaggatggaaatacctggacttttctttgcttccctcgcaaactggggtcttctctaccgaacttcccaggatttcatctcaccatatctgtgtgccgcccccagcaccccccacccacctctggggggcccgtgagcgtgtgtcttcattgcctctctccccttggcgtctgatgaccacagcaaagcactgggaatttctactcttcatgcctcatcctgcagcctcgggttcgcattctctctttcttttcctctttccctctttccctgggattgactctgagtggaataccttggcacatccactaggatctactgtctgcactgttttctttgcatgactttatacgcagtaagtatgttgaaaacaaacaaaaagaagaaaacactcaacaaaaccaatctacatgttttggactaaaaaaaaaaatagaggttgtattctcagtgtccgactcggaattatgttgctgcctctctgtgcttttggcctctgtgtggccgtgttttgccagcatgagatactgtcccctctggaggattttaggggaggaagagccacgtccccagggattggaggaggctccggtaccctcgaccctcctgggtgttggttggagcagaactggtgaggatgtttgatccgagattttctgagctctccccaatcaccagctgtctgctgggttcttttctcaagtcctgctgcccaggcccaggtgagacaggcaacgccaggtctgcaggccaggagagatgctgcccaggcctcctggtttccaagctggtccatcactggcctctgtccttggcagagaccttgctgcccaggcccaggggcaggctcttggcctgccccaggcccagagggcttcccagtaaggcccagtgatcccattatcccaggggcaaaaccacctgtccccttttgagctgccagttccctacagccatccccagtcaagggtgagggtgtggccttcaccaggggctgctgtaattaccgagcaaggtctgagctcttcttcagcctcagttccctcattggttaaaagggttctttgttcccatccagccgatgaaggagcaaacgtctggctatgtgaagcctaatttacctgcaggaactggcagggatagtcactggctggactcctgtttacttctagacctggtcaggctccatcccctcccccacctgcccctgattcccctcgtcggtgcctgtcaactgcttttcagcagtggactgcaggggaaagagcagtgatttggggtgagtaggcttcaattcccagctctgaccagacttgctgtgtgaccttgggcaagttcctttccctctttggagcttggtttccctgccagaggaaactgagctggaggagcctgaggtcctgcctttcattggctgacacacctcctgtccactgtgtcactctccaagtgccagagaagtggaggcagatcgctaccccaggctgagatggcccccactgtgaaggccacgcctgtgggtgggcagccacctggtgccaccacagggcaccagggatgatcctgatgtggcaggcaggggagactcacagaaaaatctgcccagagcctaccctcaccagacaaactctgtgctcctccaaaacatcctttagatgcaaaataataataataataataataaataaataaataaaaatccaaacccaagtcaaaaccttggctccagcatgaaaacacgtttacaggaaagtgttctcctgggtttgtgcccaccatggtgcgaatcctgacccaaggcctcctgtctcccttcaaagggagacccttttgggggatgagtttgccagactccccgtgctggtttctttgttactatttgtttggggttttgttttagttctttttttttttcttttcttttttaaaaatatgtggctgtgaacttgaatgaacactgctcaaactttctgctattggggggggcgggtgggatgggaagaaggggcgtttgttttattcttggtgttttcagtgcaataaatagctacaaacttctgtgc

SEQ ID NO: 282 - DNA, 3698 bp, Homo sapiens
ggtaaagtctcgcggtgctgccgggctcagccccgtctcctcctcttgctccctcggccgggcggcggtgactgtgcaccgacgtcggcgcgggctgcaccgccgcgtccgcccgcccgccagcatggccaccaccgccacctgcacccgtttcaccgacgactaccagctcttcgaggagcttggcaagggtgctttctctgtggtccgcaggtgtgtgaagaaaacctccacgcaggagtacgcagcaaaaatcatcaataccaagaagttgtctgcccgggatcaccagaaactagaacgtgaggctcggatatgtcgacttctgaaacatccaaacatcgtgcgcctccatgacagtatttctgaagaagggtttcactacctcgtgtttgaccttgttaccggcggggagctgtttgaagacattgtggccagagagtactacagtgaagcagatgccagccactgtatacatcagattctggagagtgttaaccacatccaccagcatgacatcgtccacagggacctgaagcctgagaacctgctgctggcgagtaaatgcaagggtgccgccgtcaagctggctgattttggcctagccatcgaagtacagggagagcagcaggcttggtttggttttgctggcaccccaggttacttgtcccctgaggtcttgaggaaagatccctatggaaaacctgtggatatctgggcctgcggggtcatcctgtatatcctcctggtgggctatcctcccttctgggatgaggatcagcacaagctgtatcagcagatcaaggctggagcctatgatttcccatcaccagaatgggacacggtaactcctgaagccaagaacttgatcaaccagatgctgaccataaacccagcaaagcgcatcacggctgaccaggctctcaagcacccgtgggtctgtcaacgatccacggtggcatccatgatgcatcgtcaggagactgtggagtgtttgcgcaagttcaatgcccggagaaaactgaagggtgccatcctcacgaccatgcttgtctccaggaacttctcagctgccaaaagcctattgaacaagaagtcggatggcggtgtcaagccacagagcaacaacaaaaacagtctcgtaagcccagcccaagagcccgcgcccttgcagacggccatggagccacaaaccactgtggtacacaacgctacagatgggatcaagggctccacagagagctgcaacaccaccacagaagatgaggacctcaaagtgcgaaaacaggagatcattaagattacagaacagctgattgaagccatcaacaatggggactttgaggcctacacgaagatttgtgatccaggcctcacttcctttgagcctgaggcccttggtaacctcgtggaggggatggatttccataagttttactttgagaatctcctgtccaagaacagcaagcctatccataccaccatcctaaacccacacgtccacgtgattggggaggacgcagcgtgcatcgcctacatccgcctcacccagtacatcgacgggcagggtcggcctcgcaccagccagtcagaagagacccgggtctggcaccgtcgggatggcaagtggctcaatgtccactatcactgctcaggggcccctgccgcaccgctgcagtgagctcagccacaggggctttaggagattccagccggaggtccaaccttcgcagccagtggctctggagggcctgagtgacagcggcagtcctgtttgtttgaggtttaaaacaattcaattacaaaagcggcagcagccaatgcacgcccctgcatgcagccctcccgcccgcccttcgtgtctgtctctgctgtaccgaggtgttttttacatttaagaaaaaaaaaaaagaaaaaaagattgtttaaaaaaaaaaggaatccataccatgatgcgttttaaaaccaccgacagcccttgggttggcaagaaggcaggagtatgtatgaggtccatcctggcatgagcagtggctcacccaccggccttgaagaggtgagcttggcctctctggtccccatggacttagggggaccaggcaagaactctgacagagctttgggggccgtgatgtgattgcagctcctgaggtggcctgcttaccccaggtctaggaatgaacttctttggaacttgcataggcgcctagaatggggctgatgagaacatcgtgaccatcagacctacttgggagagaacgcagagctcccagcctgctgtggaggcagctgagaagtggtggcctcaggactgagagcccggacgttgctgtactgtcttgtttagtgtagaagggaagagaattggtgctgcagaagtgtacccgccatgaagccgatgagaaacctcgtgttagtctgacatgcactcactcatccatttctataggatgcacaatgcatgtgggccctaatattgaggccttatccctgcagctaggagggggaggggttgttgctgctttgcttcgtgttttcttctaacctggcaaggagagagccaggccctggtcagggctcccgtgccgcctttggcggttctgtttctgtgctgatctggaccatctttgtcttgccttttcacggtagtggtccccatgctgaccctcatctgggcctgggccctctgccaagtgcccctgtgggatgggaggagtgaggcagtgggagaagaggtggtggtcgtttctatgcattcaggctgcctttggggctgcctcccttcttattcttccttgctgcacgtccatctcttttcctgtctttgagattgacctgactgctctggcaagaagaagaggtgtccttacagaggcctctttactgaccaactgaagtatagacttactgctggacaatctgcatgggcatcacccctccccgcatgtaacccaaaagaggtgtccagagccaaggcttctaccttcattgtccctctctgtgctcaaggagttccattccaggaggaagagatctataccctaagcagatagcaaagaagataatggaggagcaattggtcatggccttggtttccctcaaaacaacgctgcagatttatctgcacaaacatctccacttttgggggaaaggtgggtagattccagttccctggactaccttcaggaggcacgagagctgggagaagaggcaaagctacaggtttacttgggagccagctgagaagagagcagactcacaggtgctggtgcttggatttagccaggctcctccgagcacctcatgcatgtcccagcccctgggccctagccctttcctgccctgcagtctgcagtgccagcacgcaaatcccttcaccacagggtttcgttttgctggcttgaagacaaatggtcttagaattcattgagacccatagcttcatatggctgctccagccccacttcttagcattcttactcctcttctggggctaatgtcagcatctatagacaatagactattaaaaaatcaccttttaaacaagaaacggaaggcatttgatgcagaatttttgcatgacaacatagaaataatttaaaaatagtgtttgttctgaatgttggtagacccttcatagctttgttacaatgaaaccttgaactgaaaatatttaataaaataacctttaaacagtc

SEQ ID NO: 283 - DNA, 4953 bp, Homo sapiens
agggccgggcttcgtgcggtggggctcgctcgcgcggcagcggtggccgaggcctcttggttctgcggcacgtgacggtcgggccgcctccgcctctctctttactgcggcgcggggcaaggtgtgcgggcgggaaggggcacgggcacccccgcggtccccgggaggctagagatcatggaagggaagtggttgctgtgtatgttactggtgcttggaactgctattgttgaggctcatgatggacatgatgatgatgtgattgatattgaggatgaccttgacgatgtcattgaagaggtagaagactcaaaaccagataccactgctcctccttcatctcccaaggttacttacaaagctccagttccaacaggggaagtatattttgctgattcttttgacagaggaactctgtcagggtggattttatccaaagccaagaaagacgataccgatgatgaaattgccaaatatgatggaaagtgggaggtagaggaaatgaaggagtcaaagcttccaggtgataaaggacttgtgttgatgtctcgggccaagcatcatgccatctctgctaaactgaacaagcccttcctgtttgacaccaagcctctcattgttcagtatgaggttaatttccaaaatggaatagaatgtggtggtgcctatgtgaaactgctttctaaaacaccagaactcaacctggatcagttccatgacaagaccccttatacgattatgtttggtccagataaatgtggagaggactataaactgcacttcatcttccgacacaaaaaccccaaaacgggtatctatgaagaaaaacatgctaagaggccagatgcagatctgaagacctattttactgataagaaaacacatctttacacactaatcttgaatccagataatagttttgaaatactggttgaccaatctgtggtgaatagtggaaatctgctcaatgacatgactcctcctgtaaatccttcacgtgaaattgaggacccagaagaccggaagcccgaggattgggatgaaagaccaaaaatcccagatccagaagctgtcaagccagatgactgggatgaagatgcccctgctaagattccagatgaagaggccacaaaacccgaaggctggttagatgatgagcctgagtacgtacctgatccagacgcagagaaacctgaggattgggatgaagacatggatggagaatgggaggctcctcagattgccaaccctagatgtgagtcagctcctggatgtggtgtctggcagcgacctgtgattgacaaccccaattataaaggcaaatggaagcctcctatgattgacaatcccagttaccagggaatctggaaacccaggaaaataccaaatccagatttctttgaagatctggaacctttcagaatgactccttttagtgctattggtttggagctgtggtccatgacctctgacattttttttgacaactttatcatttgtgctgatcgaagaatagttgatgattgggccaatgatggatggggcctgaagaaagctgctgatggggctgctgagccaggcgttgtggggcagatgatcgaggcagctgaagagcgcccgtggctgtgggtagtctatattctaactgtagcccttcctgtgttcctggttatcctcttctgctgttctggaaagaaacagaccagtggtatggagtataagaaaactgatgcacctcaaccggatgtgaaggaagaggaagaagagaaggaagaggaaaaggacaagggagatgaggaggaggaaggagaagagaaacttgaagagaaacagaaaagtgatgctgaagaagatggtggcactgtcagtcaagaggaggaagacagaaaacctaaagcagaggaggatgaaattttgaacagatcaccaagaaacagaaagccacgaagagagtgaaacaatcttaagagcttgatctgtgatttcttctccctcctcccctgcaagagtggtcctaggagaggacctggcacaccttaggttgacattcagaaaacttcaagacatcaccatcagcaggctccagttgaacactagtctgtgtaactttaaacatctagcagtaaatacttgcagttgtgatataaaggaccctgtttctgtagaaaagaaaacatttaacataatggttgtgaaatgtaacatgaagcaaactaacttttttttttttaacatctttgtttttaaaatagaatgatagaactttgccagtctttaagatcttggcttaatttaatgtattaatctgtttgtgcaaacataataccaccatttaaaaatgttagggagatgagttgcagtttttataatagattttttttaaagtttggtattgtaaaacattcacacctctgtccctcaaaattgataattacgtttaaagtgcagtcatttgtggttagaatcttgttttgtttgcttccattattgagttcctcctaaggaaattgaggagagggactgaatagaagcccaaattcatataaaagttgcgtttaagttgtattaaaaatagatatataagaaaaaattctttcacttgatgtttgttagaccagaaagtgtgtgtgttctgtagctcagttcccagacagctttttaggtagtggaggaggtggcttcatgtggcacttgggcatttatattccacttgggagggtcaggctgtggccttctggagcaggtggcttgttaaggaatgctagcagggcatggcacgtgagctccggaatagatgtcttcatcacttcttccactgtgtgttgacactgttttccttacctatttcctcagatccccagctttctcctctgctatgcattttcttcacagtgcagcttgcagtccgttgctgaaaatgattataagccctgcataatgttaagctttattgtgattacgtgtatgtttcttctttcttttaagcagacccatacctttccagggtcaaagtacagaatagaatacattgatacaaagtacagaaaaatactttgatttttatccatttcttttactctgtgtaaagacttgagaagtctaattcacaggcaaaccaatacagaattgactgcagttgaacagactagaagtatttgtgggaggagtgacatgaagcatgagttatctgattttttttgtagctgctatatattttaagccttcatttgcaattcatgtaacagttgtgtcataaattacacaataaagcagtcctgttcaaatttttttttaacgtggcttgtagaatttttaaaaaagtgatcttaggtttgttttttcatgcgggatgcagatgggtgctatcagagcctctcccacaccactatagtgtaataatgttattattactctacactgaaacgtattcagagttagatattattttagcttcagttgttctttagaggctttcaaatgtaccgatgatactgtttcttgcactgaatatataaacactccacagtgtttatattgggaagatattgggaaggaaatatatttgtaaaagatgaaggctgtatctatttttttttctttttaaagtttgttcacttaaattcttttgaggatgggatgtatttttcttgctgttcagtgctttttccttttcatctgttgttctgtggtcacagtgaccttagctacatagcagactttcccaaatgtattgattacaaataaacagttgttacttagcaagacctgaaaatatgtctgcaggtttctccttgaagcaaatgtgtgggatcattgcatttccagaaatctgcctccttcaccctccgttgacagtatatgtcatgcctcactttcttctagctgagctttaaatcattagagcttaaattgtcagatcgttcattgcctttccagggttatttagtaaagtttgttgaaaacaaaaacgccttttcttggttcttttttcagttattttgaaggtccagcatcctgattaaatgtctgacacattaatgaatgaccagcagcagctttcagctcttaaaaagacacttatattttgattttacatgctggttacctgttccattgttgtcaaatgcccactctccatcagatgtgttcctccattttcttatccacaaagtactcctcacttttcaatttgtcatgttactaaatggtgttacattaaagccctgtgttaagtgtctgcttttgactgaatttcttcatagtaaccttcagtgtgtgtgtgtgactatgttcaattagtgggttgatcttcgtataattggccactatgtgagagttcactactaggcagaaactattatggacagtgaaataatgacttttatctcaccacgtgagtttgatgcagtcttttctgtctagcccttgcctcttcctgcccatgtgattgcggtgcagtagtttctgttgtataatagtgtggacagcagctcagaaaaggagggaatgctactgataatttgtagataatattctttaagacttaggggaaccattgaactttgaaatttttattagaaaattatttgttcagaatcagactccattattttacatatacttaaatactttaggggtatttttgaaagttagcccagttttttatgtgctattaaatttttagattacatactaaagaaaagtatgtacacagaatgtagtgctcctagttactattttttctattaagaaatagtttagttctggtgtaaaatttgtttgaatgctaaaaaaaaaaaagcaggactgcattatggcacttttgccttggtggcccactttctccatttaaaacattaggatttgtatttttctgctgcgtttgtatgaagacatatttgattgttgttttctcttgattttaaaataaaacctcatgagccctagtaaaaa

SEQ ID NO: 284 - DNA, 1085 bp, Homo sapiens
ggaggctcagaccttgccagactgcctgctttcatggatagacataaaaaccttcagcttgaatgttaacaccttgatgggaaaggtggctcatggaatgttttcttatcctttgaacactcctcatttcagaagctttgcttctgttgcaaccaaacatgacacttagcgtgctgagcaggaaggacaaggaaagagtaattcgcagactgttattacaggcccctccaggggaatttgtaaatgcctttgatgatctctgtctgcttatccgtgatgaaaaacttatgcaccaccaaggtgagtgtgcaggccaccaacactgccaaaaatattctgtaccactctgcatcgatggaaatccagtactcttgtctcaccacaatgtaatgggcgactaccgattttttgaccatcaaagcaaactttctttcaaatatgacctgcttcaaaatcagctgaaagacatccaaagtcatggtatcattcagaatgaggcagaatacctgagagttgttcttctgtgcgccttaaaactgtatgtgaatgaccactatccaaaaggaaattgcaacatgctgagaaaaactgtcaaaagtaaggagtacttgatagcttgcattgaagatcacaactatgaaacaggagagtgctggaacggactttggaaatctaaatggattttccaagttaacccatttctaacccaagtaacgggaagaatatttgtgcaagctcacttcttcaggtgtgtcaaccttcatattgaaatatccaaggacctgaaagaaagcttggaaatagttaaccaagctcaactggctctaagttttgcaaggcttgtggaagagcaagagaacaaatttcaagctgcagtcttggaagaattacaggagttatccaatgaagccctgagaaaaattctacgaagggatcttccagtgacccgcactcttattgactggcacaggatactctctgacttgaatctggtgatgtatcctaaattaggatatgtcatttattcaagaagtgtgttgtgcaactggataatataaagaattgctcctggtaactaaaaaaaa

SEQ ID NO: 285 - DNA, 1085 bp, Homo sapiens; identical to SEQ ID NO: 284

SEQ ID NO: 286 - DNA, 908 bp, Homo sapiens
ggttgacccgggccctcctccacacccccttccttcttcgcctcctccctctttcctgcacgggggctcgggctcactataaaaggtgggagcgcgtggtgccccagcaacgacgagtttcagaacgatggagagctcccgcgtgaggctgctgcccctcctgggcgccgccctgctgctgatgctacctctgttgggtacccgtgcccaggaggacgccgagctccagccccgagccctggacatctactctgccgtggatgatgcctcccacgagaaggagctgatcgaagcgctgcaagaagtcttgaagaagctcaagagtaaacgtgttcccatctatgagaagaagtatggccaagtccccatgtgtgacgccggtgagcagtgtgcagtgaggaaaggggcaaggatcgggaagctgtgtgactgtccccgaggaacctcctgcaattccttcctcctgaagtgcttatgaaggggcgtccattctcctccatacatccccatccctctactttccccagaggaccacaccttcctccctggagtttggcttaagcaacagataaagtttttattttcctctgaagggaaagggctcttttcctgctgtttcaaaaataaaagaacacattagatgttactgtgtgaagaataatgccttgtatggtgttgatacgtgtgtgaagtattcttattttatttgtctgacaaactcttgtgtacctttgtgtaaagaagggaagctttgtttgaaaattgtatttttgtatgtggcatggcagaatgaaaattagatctagctaatctcggtagatgtcattacaacctggaaaataaatcaccctaagtgacacaaattgaagcatgtacaaattatacataataaagtgtttttaataatt

SEQ ID NO: 287 - DNA, 7607 bp, Homo sapiens
agatttgaatacttcactgaggcgagccgggcgttgtgagcggactgctagaggcggctgtctgtttccgctctaaggaaactcagagcgtgtggaccccaaacaagtctgcgcaaaatttgtcgaggaggtttgccgcggcagaaaagttttcttcaaaaatggatggggtgtcttcagaggctaatgaagaaaatgacaatatagagagacctgttagaagacggcattcttcaatattgaaacccccaaggagtcctcttcaggacctcagaggtgggaatgaaagagttcaggaatccaatgctttgagaaataagaaaaactctcgtcgagtcagctttgcagatactataaaggtattccagacggagtctcatatgaaaatagtgagaaagtcagaaatggaagaaacagaaacaggagaaaatcttcttttgatacagaataagaaattagaagataattactgtgaaattactgggatgaacacattgctttctgctcccattcatacccagatgcaacagaaggagttttcaattatagaacatacccgtgaaaggaaacatgcaaatgaccagacagtcattttttcagatgaaaaccagatggacctgacatcaagtcacactgtaatgattaccaaaggccttttagataatcccataagtgaaaagtccaccaagatagataccacatcatttctagctaatttaaagcttcacaccgaggactcaagaatgaaaaaagaagtaaatttttccgtggatcaaaacacttcttcagaaaataaaatagatttcaatgacttcataaaaagattgaaaacaggaaaatgtagtgcttttcctgatgtgcctgataaagaaaattttgagatacctatttattccaaggaaccgaacagtgcctcttctacacatcaaatgcatgtatctcttaaggaagatgaaaataacagtaatattactaggctctttagagaaaaagatgatgggatgaatttcacccagtgtcatacagccaatattcagacattgattcccacatccagtgagaccaactcacgggaatctaaaggtaatgatattacaatttatggcaatgactttatggacttgacatttaaccacactttgcagatcttacctgcaacaggtaatttttctgaaatagaaaatcaaactcagaatgccatggatgtaacaacaggttatggaactaaagcttcaggaaataaaacagtttttaagagtaaacaaaatactgcttttcaagacctttccataaactctgcagacaaaatacatattaccagaagtcatattatgggggcagaaactcacatagtctcacagacttgtaatcaggatgccagaatattagccatgaccccagaatctatatattctaatccatctattcaaggttgtaagactgttttctattctagttgtaatgatgccatggaaatgaccaaatgtctctcaaatatgagagaggagaaaaatttgctaaagcatgacagtaattatgctaaaatgtattgcaatccagatgctatgtcttctctcacagagaaaactatttattccggagaggagaacatggacattaccaagagtcatacagttgcaatagataatcaaatttttaaacaagatcaatcaaatgtgcaaatagcagctgcaccaacacccgaaaaagaaatgatgctccaaaatcttatgaccacatcagaagatgggaaaatgaatgtaaattgtaactcagttcctcatgtatctaaggaaagaatacagcagagcctgtcaaatcctttgtctatttcattgactgatagaaagactgaactcttatcaggtgaaaatatggatttgactgaaagtcacacaagtaacttaggaagtcaggttcctcttgcagcttataatctagcaccggagagtaccagtgaatctcactctcagagcaaaagctcttcagatgaatgtgaagaaattaccaaaagtcgtaatgaaccatttcagcgatcagacataatagccaaaaacagcttaaccgacacctggaacaaagacaaagattgggttttgaagattttgccctaccttgataaagattctcctcagtcagctgattgtaatcaggagatagcaacaagccataatatagtctactgtggtggagttcttgataaacaaataactaatagaaatacagtatcatgggaacaatctttgttttctaccacaaagccattattttcatcaggacagttctctatgaaaaatcatgatactgctataagtagtcatacagtgaaatctgtactaggccagaattctaaactggctgagccactgaggaaaagtttaagcaatcccacacctgactattgccatgacaagatgattatatgttcagaggaagagcaaaatatggatctaacaaagagccacactgtcgtcattggatttggtccttctgaactacaagaacttggtaaaactaatttagaacacactactggccagctaacaacaatgaacagacagatagctgtaaaagttgaaaaatgtggtaaaagtcccatagaaaaaagtggagtgcttaaatctaactgtattatggatgtgttagaggacgaaagtgtacagaaacctaaatttccaaaggaaaagcaaaatgtcaaaatttggggaaggaaaagtgttggtggaccaaaaattgataagactattgtattttcagaagacgataagaatgatatggatatcactaagagttatacaatagaaataaaccatagacctttattagagaaacgtgattgtcatttggtgccattggcaggaacttctgaaactattttatatacatgtgggcaggatgacatggagatcactagaagtcacacaactgccttagaatgtaaaactgtctcaccagatgaaataactactaggcctatggacaaaactgtagtgtttgtagataatcatgttgaactagaaatgacagagtcccatactgttttcattgactaccaagaaaaggaaagaacagacagacctaactttgaactatcccaaaggaaaagcctaggaacaccaacagtgatatgtactcctactgaggagagtgttttctttccaggaaatggtgaaagtgaccgtctagtagcaaatgacagccagctaacccctctggaggaatggtctaataataggggccctgtagaggtagctgataacatggaattgtctaaatcagccacttgcaaaaacatcaaagatgtacaaagtcctggatttctgaatgaacctctatcaagcaaaagtcagagaagaaaaagccttaagctaaaaaatgacaagaccattgtattttcagagaatcataaaaatgatatggatattacccagagttgtatggtggaaatagataacgaaagtgccctggaggataaagaggacttccatttggcaggggcttctaaaactattttgtattcatgtgggcaggatgacatggagatcactaggagtcacacaactgccttagaatgtaaaactctcctgccaaatgaaatagctattaggcccatggacaaaaccgtattgttcacagataattacagtgatctggaagtcaccgattcccatactgttttcattgactgtcaagccacagagaaaatacttgaagaaaaccctaaatttggaataggaaaaggaaaaaacttgggtgtttcctttcctaaggataatagctgtgttcaagaaatcgctgaaaaacaagcactggctgtaggaaacaaaatagttcttcacaccgagcaaaagcaacaactctttgctgctactaatagaactactaatgaaatcatcaaatttcatagtgctgctatggatgaaaaggtcatagggaaagttgtagaccaggcctgtacattggaaaaagcgcaagttgaaagctgtcagttaaataatagagatagaagaaatgtggactttacaagtagtcatgcaactgctgtttgtggatccagtgataattattcctgtttaccaaatgttatttcctgtactgataatttggagggtagtgccatgctcttatgtgataaagatgaggaaaaagccaattattgcccagtgcaaaatgatcttgcttatgcaaatgattttgccagtgaatattacttggaatctgagggacagcctctctctgctccttgtcctttgttagagaaggaagaagttattcaaaccagtaccaaaggacagttagactgtgttataacactgcacaaagatcaagatctgattaaggatccacgaaatctattggctaatcaaactttagtatatagtcaagatctgggggagatgactaaacttaattcaaagcgagtatcttttaagcttccaaaggatcaaatgaaagtctatgttgatgacatttatgttattcctcagcctcatttctcaaccgaccaacctccattacctaaaaaaggacagagtagtatcaataaagaagaagtaatactgtctaaagctggaaataagagtttaaatattatagaaaattcctctgcacccatatgtgaaaacaagcccaaaatactcaatagtgaggaatggtttgctgcagcctgtaaaaaagaactgaaggaaaatattcaaacaactaactataatacagctctagatttccacagtaactcagacgtaactaagcaagtcattcaaactcatgtcaatgctggagaagcaccagatcctgtaattacatctaatgttccatgttttcatagtatcaaaccaaatctgaataatttgaatggaaaaactggagagtttttagcctttcaaactgttcatctaccaccccttccagagcaattacttgaattaggaaataaggcacacaatgatatgcatatagtgcaagctacagaaatacataatattaacataatctccagcaatgctaaagatagtagagatgaggaaaataaaaagtctcataatggagctgaaaccacctctctaccgccaaagacagtttttaaagataaagtaaggagatgttctttgggaatctttttgcctagattgcccaacaagagaaattgtagtgtcactggtattgatgacctggaacagattccagcagacacaactgatataaatcacttagaaactcagccggtctctagcaaagattcaggcattggatctgttgcaggtaaactgaacctaagtccttctcaatatataaatgaggaaaatcttcctgtatatcctgatgagatcaattcttcagactctattaacatagaaactgaggaaaaggccttgattgagacataccaaaaagagatttcaccatatgaaaataaaatgggaaaaacttgcaatagccaaaaaagaacgtgggtacaagaagaagaagatattcataaggagaaaaaaatcagaaaaaatgagattaagtttagtgatacgacacaagatcgggagatttttgatcaccatactgaagaggatatagataaaagtgctaacagtgtattgataaaaaacctgagcaggaccccatctagttgcagcagctctctggattcaatcaaggctgatgggacctctctggacttcagcacttaccgcagtagtcaaatggaatcacagtttctcagagatactatttgtgaagagagcttgagggagaaactccaagatgggagaataacaataagggagttctttatacttctccaggtccacatcttgatacagaaaccccgacagagcaatctcccaggcaattttactgtaaacacaccacctactccagaagacctgatgttaagtcaatatgtttaccgacccaagatacagatttatagagaagattgtgaggctcgtcgccaaaagattgaagaattaaagctttctgcatcgaaccaagataagctgttggttgatataaataagaacctgtgggaaaaaatgagacactgctctgacaaagagctgaaggcctttggaatttatcttaacaaaataaagtcatgttttaccaagatgactaaagtcttcactcaccaaggaaaagtggctctgtatggcaagctggtgcagtcagctcagaatgagagggagaaacttcaaataaagatagatgagatggataaaatacttaagaagatcgataactgcctcactgagatggaaacagaaactaagaatttggaggatgaagagaaaaacaatcctgtggaagaatgggattctgaaatgagagctgcagaaaaagaattggaacagctgaaaactgaagaagaggagcttcaaagaaatctcttagaactggaggtacaaaaagagcagacccttgctcaaatagactttatgcaaaaacaaagaaatagaactgaagagctactggatcagttgagcttgtctgagtgggatgtcgttgagtggagtgatgatcaagctgtattcacctttgtttatgacacgatacaactcaccatcacctttgaagagtcagttgttggtttccctttcctggacaagcgttataggaagattgttgatgtcaattttcaatctctgttagatgaggatcaagctcctccttcctcccttttagttcataagcttattttccagtacgttgaagaaaaggaatcctggaagaagacatgtacaacccagcatcagttacccaagatgcttgaagaattctcactggtagtgcaccattgcagactccttggagaggagattgagtatttaaagagatggggaccaaattataacctaatgaacatagatattaataataatgaattgagacttttattctctagctccgcagcatttgcaaagtttgaaataactttgtttctctcagcctattatccatctgtaccattaccttccaccattcagaatcacgttgggaacactagccaagatgatattgctaccattctatctaaagtgccactggagaacaactacctgaagaatgtagtcaagcaaatttaccaagatctgtttcaggactgccatttctaccactagacccttggaccaccattggaacaaccaagcagaatgtacttgatattatttcagggtcccattgctgttcagcctttgtttttacgtcattacaagctgagtaaaattccttctgatgatgttatagttaatctgtatgttttttatatctctgcagaatgatggtgatgaagtctggatggtaggcctcatagcctactatcaacttactcatctttgtaccaaaggtttaagtaataggacacttaggaaaaatgtctcctaactaaactagtgctttctgctttagtacaagccctaaggattaacttaagtataagaagtgttatcactgacaagaacattagccattttcccataactagatagagctatgattttttaggttgcctggcttctgcctagcagatatttctggagtagaaatgtatctgtctacaaactattatcctttttctccgttactaaaatgctattaagagaaagtagggctgg

SEQ ID NO: 288 - DNA, 7685 bp, Homo sapiens
agatttgaatacttcactgaggcgagccgggcgttgtgagcggactgctagaggcggctgtctgtttccgctctaaggaaactcagagcgtgtggaccccaaacaagtctgcgcaaaatttgtcgaggaggtttgccgcggcagaaaagttttcttcaaaaatggatggggtgtcttcagaggctaatgaagaaaatgacaatatagagagacctgttagaagacggcattcttcaatattgaaacccccaaggagtcctcttcaggacctcagaggtgggaatgaaagagttcaggaatccaatgctttgagaaataagaaaaactctcgtcgagtcagctttgcagatactataaaggtattccagacggagtctcatatgaaaatagtgagaaagtcagaaatggaaggctgcagtgcaatggtgccatctcagctgcaacttctgcctcctgggtttaagcgattctcctgcctcagcctcccagaaacagaaacaggagaaaatcttcttttgatacagaataagaaattagaagataattactgtgaaattactgggatgaacacattgctttctgctcccattcatacccagatgcaacagaaggagttttcaattatagaacatacccgtgaaaggaaacatgcaaatgaccagacagtcattttttcagatgaaaaccagatggacctgacatcaagtcacactgtaatgattaccaaaggccttttagataatcccataagtgaaaagtccaccaagatagataccacatcatttctagctaatttaaagcttcacaccgaggactcaagaatgaaaaaagaagtaaatttttccgtggatcaaaacacttcttcagaaaataaaatagatttcaatgacttcataaaaagattgaaaacaggaaaatgtagtgcttttcctgatgtgcctgataaagaaaattttgagatacctatttattccaaggaaccgaacagtgcctcttctacacatcaaatgcatgtatctcttaaggaagatgaaaataacagtaatattactaggctctttagagaaaaagatgatgggatgaatttcacccagtgtcatacagccaatattcagacattgattcccacatccagtgagaccaactcacgggaatctaaaggtaatgatattacaatttatggcaatgactttatggacttgacatttaaccacactttgcagatcttacctgcaacaggtaatttttctgaaatagaaaatcaaactcagaatgccatggatgtaacaacaggttatggaactaaagcttcaggaaataaaacagtttttaagagtaaacaaaatactgcttttcaagacctttccataaactctgcagacaaaatacatattaccagaagtcatattatgggggcagaaactcacatagtctcacagacttgtaatcaggatgccagaatattagccatgaccccagaatctatatattctaatccatctattcaaggttgtaagactgttttctattctagttgtaatgatgccatggaaatgaccaaatgtctctcaaatatgagagaggagaaaaatttgctaaagcatgacagtaattatgctaaaatgtattgcaatccagatgctatgtcttctctcacagagaaaactatttattccggagaggagaacatggacattaccaagagtcatacagttgcaatagataatcaaatttttaaacaagatcaatcaaatgtgcaaatagcagctgcaccaacacccgaaaaagaaatgatgctccaaaatcttatgaccacatcagaagatgggaaaatgaatgtaaattgtaactcagttcctcatgtatctaaggaaagaatacagcagagcctgtcaaatcctttgtctatttcattgactgatagaaagactgaactcttatcaggtgaaaatatggatttgactgaaagtcacacaagtaacttaggaagtcaggttcctcttgcagcttataatctagcaccggagagtaccagtgaatctcactctcagagcaaaagctcttcagatgaatgtgaagaaattaccaaaagtcgtaatgaaccatttcagcgatcagacataatagccaaaaacagcttaaccgacacctggaacaaagacaaagattgggttttgaagattttgccctaccttgataaagattctcctcagtcagctgattgtaatcaggagatagcaacaagccataatatagtctactgtggtggagttcttgataaacaaataactaatagaaatacagtatcatgggaacaatctttgttttctaccacaaagccattattttcatcaggacagttctctatgaaaaatcatgatactgctataagtagtcatacagtgaaatctgtactaggccagaattctaaactggctgagccactgaggaaaagtttaagcaatcccacacctgactattgccatgacaagatgattatatgttcagaggaagagcaaaatatggatctaacaaagagccacactgtcgtcattggatttggtccttctgaactacaagaacttggtaaaactaatttagaacacactactggccagctaacaacaatgaacagacagatagctgtaaaagttgaaaaatgtggtaaaagtcccatagaaaaaagtggagtgcttaaatctaactgtattatggatgtgttagaggacgaaagtgtacagaaacctaaatttccaaaggaaaagcaaaatgtcaaaatttggggaaggaaaagtgttggtggaccaaaaattgataagactattgtattttcagaagacgataagaatgatatggatatcactaagagttatacaatagaaataaaccatagacctttattagagaaacgtgattgtcatttggtgccattggcaggaacttctgaaactattttatatacatgtgggcaggatgacatggagatcactagaagtcacacaactgccttagaatgtaaaactgtctcaccagatgaaataactactaggcctatggacaaaactgtagtgtttgtagataatcatgttgaactagaaatgacagagtcccatactgttttcattgactaccaagaaaaggaaagaacagacagacctaactttgaactatcccaaaggaaaagcctaggaacaccaacagtgatatgtactcctactgaggagagtgttttctttccaggaaatggtgaaagtgaccgtctagtagcaaatgacagccagctaacccctctggaggaatggtctaataataggggccctgtagaggtagctgataacatggaattgtctaaatcagccacttgcaaaaacatcaaagatgtacaaagtcctggatttctgaatgaacctctatcaagcaaaagtcagagaagaaaaagccttaagctaaaaaatgacaagaccattgtattttcagagaatcataaaaatgatatggatattacccagagttgtatggtggaaatagataacgaaagtgccctggaggataaagaggacttccatttggcaggggcttctaaaactattttgtattcatgtgggcaggatgacatggagatcactaggagtcacacaactgccttagaatgtaaaactctcctgccaaatgaaatagctattaggcccatggacaaaaccgtattgttcacagataattacagtgatctggaagtcaccgattcccatactgttttcattgactgtcaagccacagagaaaatacttgaagaaaaccctaaatttggaataggaaaaggaaaaaacttgggtgtttcctttcctaaggataatagctgtgttcaagaaatcgctgaaaaacaagcactggctgtaggaaacaaaatagttcttcacaccgagcaaaagcaacaactctttgctgctactaatagaactactaatgaaatcatcaaatttcatagtgctgctatggatgaaaaggtcatagggaaagttgtagaccaggcctgtacattggaaaaagcgcaagttgaaagctgtcagttaaataatagagatagaagaaatgtggactttacaagtagtcatgcaactgctgtttgtggatccagtgataattattcctgtttaccaaatgttatttcctgtactgataatttggagggtagtgccatgctcttatgtgataaagatgaggaaaaagccaattattgcccagtgcaaaatgatcttgcttatgcaaatgattttgccagtgaatattacttggaatctgagggacagcctctctctgctccttgtcctttgttagagaaggaagaagttattcaaaccagtaccaaaggacagttagactgtgttataacactgcacaaagatcaagatctgattaaggatccacgaaatctattggctaatcaaactttagtatatagtcaagatctgggggagatgactaaacttaattcaaagcgagtatcttttaagcttccaaaggatcaaatgaaagtctatgttgatgacatttatgttattcctcagcctcatttctcaaccgaccaacctccattacctaaaaaaggacagagtagtatcaataaagaagaagtaatactgtctaaagctggaaataagagtttaaatattatagaaaattcctctgcacccatatgtgaaaacaagcccaaaatactcaatagtgaggaatggtttgctgcagcctgtaaaaaagaactgaaggaaaatattcaaacaactaactataatacagctctagatttccacagtaactcagacgtaactaagcaagtcattcaaactcatgtcaatgctggagaagcaccagatcctgtaattacatctaatgttccatgttttcatagtatcaaaccaaatctgaataatttgaatggaaaaactggagagtttttagcctttcaaactgttcatctaccaccccttccagagcaattacttgaattaggaaataaggcacacaatgatatgcatatagtgcaagctacagaaatacataatattaacataatctccagcaatgctaaagatagtagagatgaggaaaataaaaagtctcataatggagctgaaaccacctctctaccgccaaagacagtttttaaagataaagtaaggagatgttctttgggaatctttttgcctagattgcccaacaagagaaattgtagtgtcactggtattgatgacctggaacagattccagcagacacaactgatataaatcacttagaaactcagccggtctctagcaaagattcaggcattggatctgttgcaggtaaactgaacctaagtccttctcaatatataaatgaggaaaatcttcctgtatatcctgatgagatcaattcttcagactctattaacatagaaactgaggaaaaggccttgattgagacataccaaaaagagatttcaccatatgaaaataaaatgggaaaaacttgcaatagccaaaaaagaacgtgggtacaagaagaagaagatattcataaggagaaaaaaatcagaaaaaatgagattaagtttagtgatacgacacaagatcgggagatttttgatcaccatactgaagaggatatagataaaagtgctaacagtgtattgataaaaaacctgagcaggaccccatctagttgcagcagctctctggattcaatcaaggctgatgggacctctctggacttcagcacttaccgcagtagtcaaatggaatcacagtttctcagagatactatttgtgaagagagcttgagggagaaactccaagatgggagaataacaataagggagttctttatacttctccaggtccacatcttgatacagaaaccccgacagagcaatctcccaggcaattttactgtaaacacaccacctactccagaagacctgatgttaagtcaatatgtttaccgacccaagatacagatttatagagaagattgtgaggctcgtcgccaaaagattgaagaattaaagctttctgcatcgaaccaagataagctgttggttgatataaataagaacctgtgggaaaaaatgagacactgctctgacaaagagctgaaggcctttggaatttatcttaacaaaataaagtcatgttttaccaagatgactaaagtcttcactcaccaaggaaaagtggctctgtatggcaagctggtgcagtcagctcagaatgagagggagaaacttcaaataaagatagatgagatggataaaatacttaagaagatcgataactgcctcactgagatggaaacagaaactaagaatttggaggatgaagagaaaaacaatcctgtggaagaatgggattctgaaatgagagctgcagaaaaagaattggaacagctgaaaactgaagaagaggagcttcaaagaaatctcttagaactggaggtacaaaaagagcagacccttgctcaaatagactttatgcaaaaacaaagaaatagaactgaagagctactggatcagttgagcttgtctgagtgggatgtcgttgagtggagtgatgatcaagctgtattcacctttgtttatgacacgatacaactcaccatcacctttgaagagtcagttgttggtttccctttcctggacaagcgttataggaagattgttgatgtcaattttcaatctctgttagatgaggatcaagctcctccttcctcccttttagttcataagcttattttccagtacgttgaagaaaaggaatcctggaagaagacatgtacaacccagcatcagttacccaagatgcttgaagaattctcactggtagtgcaccattgcagactccttggagaggagattgagtatttaaagagatggggaccaaattataacctaatgaacatagatattaataataatgaattgagacttttattctctagctccgcagcatttgcaaagtttgaaataactttgtttctctcagcctattatccatctgtaccattaccttccaccattcagaatcacgttgggaacactagccaagatgatattgctaccattctatctaaagtgccactggagaacaactacctgaagaatgtagtcaagcaaatttaccaagatctgtttcaggactgccatttctaccactagacccttggaccaccattggaacaaccaagcagaatgtacttgatattatttcagggtcccattgctgttcagcctttgtttttacgtcattacaagctgagtaaaattccttctgatgatgttatagttaatctgtatgttttttatatctctgcagaatgatggtgatgaagtctggatggtaggcctcatagcctactatcaacttactcatctttgtaccaaaggtttaagtaataggacacttaggaaaaatgtctcctaactaaactagtgctttctgctttagtacaagccctaaggattaacttaagtataagaagtgttatcactgacaagaacattagccattttcccataactagatagagctatgattttttaggttgcctggcttctgcctagcagatatttctggagtagaaatgtatctgtctacaaactattatcctttttctccgttactaaaatgctattaagagaaagtagggctgg

SEQ ID NO: 289 - DNA, 3927 bp, Homo sapiens
gggtggcctggtgtgtgggcgcggcagggcgcaggcgcaggcgcagtgtgcgtccgcgtctgaggggagggatgtgggggaagcgacggcccccggtttgtttgggctgtgggcggtgcgcagcggagagcccgggaaaagcgggaaatggcggcgccgagcgcggggtcttggtccaccttccagcacaaggagctgatggccgctgacaggggacgcaggatattgggagtgtgtggcatgcatcctcatcatcaggaaactctaaaaaagaaccgagtggtgctagccaaacagctgttgttgagcgaattgttagaacatcttctggagaaggacatcatcaccttggaaatgagggagctcatccaggccaaagtgggcagtttcagccagaatgtggaactcctcaacttgctgcctaagaggggtccccaagcttttgatgccttctgtgaagccttgcactcctgaattttatcaaacacacttccagctggcatataggttgcagtctcggcctcgtggcctagcactggtgttgagcaatgtgcacttcactggagagaaagaactggaatttcgctctggaggggatgtggaccacagtactctagtcaccctcttcaagcttttgggctatgacgtccatgttctatgtgaccagactgcacaggaaatgcaagagaaactgcagaattttgcacagttacctgcacaccgagtcacggactcctgcatcgtggcactcctctcgcatggtgtggagggcgccatctatggtgtggatgggaaactgctccagctccaagaggtttttcagctctttgacaacgccaactgcccaagcctacagaacaaaccaaaaatgttcttcatccaggcctgccgtggagatgagactgatcgtggggttgaccaacaagatggaaagaaccacgcaggatcccctgggtgcgaggagagtgatgccggtaaagaaaagttgccgaagatgagactgcccacgcgctcagacatgatatgcggctatgcctgcctcaaagggactgccgccatgcggaacaccaaacgaggttcctggtacatcgaggctcttgctcaagtgttttctgagcgggcttgtgatatgcacgtggccgacatgctggttaaggtgaacgcacttatcaaggatcgggaaggttatgctcctggcacagaattccaccggtgcaaggagatgtctgaatactgcagcactctgtgccgccacctctacctgttcccaggacaccctcccacatgatgtcacctccccatcatccacgccaagtggaagccactggaccacaggaggtgtgatagagcctttgatcttcaggatgcacggtttctgttctgccccctcagggatgtgggaatctcccagacttgtttcctgtgcccatcatctctgcctttgagtgtgggactccaggccagctccttttctgtgaagccctttgcctgtagagccagccttggttggacctattgccaggaatgtttcagctgcagttgaagagcctgacaagtgaagttgtaaacacagtgtggttatggggagagggcatataaattccccatatttgtgttcagttccagcttttgtagatggcactttagtgattgcttttattacattagttaagatgtctgagagaccatctcctatcttttatttcattcatatcctccgccctttttgtcctagagtgagagtttggaaggtgtccaaatttaatgtagacattatcttttggctctgaagaagcaaacatgactagagacgcaccttgctgcagtgtccagaagcggcctgtgcgttcccttcagtactgcagcgccacccagtggaaggacactcttggctcgtttgggctcaaggcaccgcagcctgtcagccaacattgccttgcatttgtaccttattgatctttgcccatggaagtctcaaagatctttcgttggttgtttctctgagctttgttactgaaatgagcctcgtggggagcatcagagaaggccaggaagaatggtgtgtttccctagactctgtaaccacctctctgtctttttccttcctgagaaacgtccatctctctcccttactattcccactttcattcaatcaacctgcacttcatatctagatttctagaaaagcttcctagcttatctccctgcttcatatctctcccttctttaccttcatttcatcctgttggctgctgccaccaaatctgtctagaatcctgctttacaggatcatgtaaatgctcaaagatgtaatgtagttctttgttcctgctttctctttcagtattaaactctcctttgatattatgtggcttttatttcagtgccatacatgttattgttttcaacctagaaacctttatccctgcttatctgaaacttcccaacttccctgttctttaagactttttttttttttttttttttttttgagacagagtctcgctctgtcgcccaggctggagggcagtggcacgatctcagctcactgcaagctccaactcccgggttcacgccattctcctgcctcagccttccaagtagctgggactacaggtgcccgccaccgtgcccggctaatttttttgtatttttagtagagacagggtttcaccatgttagccgggatggtcttgatctcctgacctcatgatccacccacctcagcctcccaaagtgttgggattacaggcgtgagccactgcgcccgggcaagacctttttttaaaaaaaaaaaaaaaaaaacttccattctttcttcctccagtctgttctcacataacagagtagttttggtttttaattttttttggttgtttgctgttttttgttttttaaggtgagttctcactatgtttctcagactggtctcgaactcctggcctcaagccatcttcccgcctcagcctctcaaatagctgggcttacaggcatgagccaccacacctggccaggatttggttgtttaaatataaatctgatcacccccctgcttagaacccttctgctttctattacccctcatttaaaatgtaaactcttcaccttggtttatgagaactggttcttgccttccccttgaacctcattaaatggtgatttcttgctaagctccagcccgagtggtctcctctcagcttctaattttgtgctctttcctgcccttttcctgggccttctcagctctccacccccaccactcttgactcaggtggtgtccttcttcctcaagtcttgacaattcccgggcccttcagtccctgagcagtctacttctgtgtctgtcaccacatcttgtcttttcccctcattgcatttattgcagtttatatatatgctacttttacttgttcatttctgtctcccctaccaggctgtaaatgagggcagaaaccttgtttgttttattcaccatcatgtaccaagtgcttggcacatagtgggccttcattaaatgtttgttgaataaaagagggaagaaggcaagccaaccttagctacaatcctaccttttgataaaatgttccttttgacaatatacacggattattatttgtactttgtttttccatgtgttttgcttttatccactggcatttttagctccttgaagacatatcatgtgtgagataacttccttcacatctcccatggtccctagcaaaatgctaggcctgtagtagtcaaggtgctcaataaatatttgtttgggtggtttgtgagccttgctgccaagtcctgcctttgggtcgacatagtatggaagtatttgagagagagaacctttccactcccactgccaggattttgtattgccatcgggtgccaaataaatgctcatatttattaaaaaaaaaaaaaaaaaaa

SEQ ID NO: 290 - DNA, 6782 bp, Homo sapiens
gttgtcgtaggggcccggtccgtgagggactgctaaggaagaggctgcatggcgcggtagtcccccgagtggaggtcggctgcccctgggaaaccagagagtcggagggagtccatctggagcggccaagtaggtcggggaagggccgcgcctgacgtctggccgcaggtggtgactctcaaaaggaaataggatcatggcagcagatgatgacaatggtgatggaacaagtttatttgatgtcttttctgcttctcctcttaagaacaatgatgaaggctcactggacatatacgctgggttggacagtgctgtttctgacagcgcttccaaatcctgtgtaccatcaagaaattgtttggacttatatgaagagatcctgactgaagaaggaactgcaaaggaggcaacatataatgatttgcaagtagaatatggaaaatgtcaactacaaatgaaagagctgatgaaaaaatttaaagaaatacagacacagaatttcagcttaataaacgaaaaccagtctcttaagaagaatatttcagcacttatcaaaactgccagagtggaaataaaccgcaaggatgaagaaataagtaatcttcaccaaagattgtctgagtttccacattttcgaaataatcataaaactgcaaggacatttgatacagttaaaacaaaagatcttaaatctagatctccacatttggatgattgttcaaagactgatcacagagctaaaagtgatgtttctaaagatgtacatcatagcacttcactgccaaatctggaaaaggaaggaaaaccacattctgataaaaggagtacttcacatttacctacatctgttgagaaacactgcactaatggtgtttggtcacgttctcattatcaggttggcgagggtagctcaaatgaggatagtagaagaggaagaaaagatattagacatagccagtttaacagaggaactgaaagagtacgaaaagacttaagtactggctgtggtgatggtgaaccaaggatattggaggctagtcaaaggctacaaggacatcctgagaaatatggtaaaggtgaaccaaagactgaaagcaaaagttcgaagtttaaaagtaactcagattctgactataaaggtgaacgcattaactcttcttgggagaaagagacccctggagaaaggtcacacagtcgagtagactctcaaagtgacaaaaaactagaaagacaaagtgaaagatcacaaaatataaataggaaagaagttaaatcacaagacaaagaagaaagaaaagttgatcaaaaacctaaatcagtagtaaaggaccaagatcactggagaagatctgaacgagcatcacttcctcattccaagaatgaaataacattttctcataattcaagtaaataccatctagaagagagaagaggatgggaagattgtaaaagagacaagagtgtaaacagtcatagttttcaagatggaagatgtccatcttctctttcaaacagtagaactcacaaaaacattgactctaaggaagttgatgccatgcatcagtgggaaaatacacctttaaaagcagaaagacatagaactgaagataagaggaaaagagaacaagaaagcaaagaagaaaataggcatattagaaatgaaaaaagagtacctacagaacatttgcagaagactaataaggaaactaagaaaaccactactgatttaaagaaacagaatgaaccaaagactgataagggagaagtccttgataatggtgtttctgaaggagcagataataaagagcttgcaatgaaagctgagagtggtccaaatgaaacaaaaaacaaggacctaaaattgagttttatgaaaaaattgaacttaactctttctcctgctaaaaagcaacctgtttcccaggataatcagcataaaataactgatattcccaagtccagtggtgtatgtgattcagagtcttcaatgcaagttaaaacagtggcatatgttccctccataagtgaacatatcttgggggaagcagctgtcagtgaacataccatgggggaaaccaagtcaacgttattggaaccaaaggttgctcttctagcagtgactgaacccaggatcggtatctcagaaaccaacaaggaagacgaaaatagtttgttagttaggtctgttgacaatactatgcattgtgaagagcccatttgtggtacagagacttccttcccatctcctatggaaatacaacagacagaatccttgtttccatcaacaggaatgaaacaaaccattaataatggaagggcagcagctcctgtggtaatggatgtattacaaacagatgtgtctcaaaactttggcttggaattggataccaaaagaaatgataattcagattattgtggtatttctgaaggtatggagatgaaggtggcactttcaacaacagtgagtgaaaccactgaaagcattttgcagccttcaattgaggaagctgatattttgccaataatgctttcagaagataataacccaaaatttgagccttctgttatagttacaccactggttgagagtaagtcgtgtcatctggagccttgcttacctaaagagactctagattcttcacttcagcagactgagttaatggaccacagaatggcaactggtgaaacaaactcagtatatcatgatgatgataactcggttttgagcattgaccttaatcacctgagacctattccagaagccatcagtcctctgaatagtccagtgagacctgtagcaaaagttcttagaaatgaaagcccacctcaagttccagtgtataataacagtcataaagatgtgtttttaccaaattcagctcattctacctctaagagtcagtctgatctcaataaggaaaatcaaaagccaatttacaaatctgacaaatgtacagaagcagacacatgtaagaattcaccattagatgaattagaagaaggagaaattagaagtgatagtgaaacatctaaaccacaagaaagttttgaaaaaaattccaaacgtagagtgtcagctgatgtgcggaagtcaaagactatcccacgacgtgggaaaagtactgtgtgtttagataaagacagtaggaaaacacatgtaagaatccatcagaccaataacaaatggaataaaagacctgataaatctagcagatcttcaaaaacagagaagaaagataaagtgatgagcacttccagcttggaaaaaatagttccaattattgctgtaccctcttctgaacaagagatcatgcacatgttacgaatgataagaaaacatgtaagaaaaaattatatgaaattcaaggcaaaattttcattaatacaatttcacagaattattgagtcagcaattttgagttttacatctttaattaaacatctcaacttacacaaaatctctaagtcagtgactaccttacagaagaatctctgtgatattatagagtctaaacttaagcaagttaaaaagaatggcatagttgatcgtttatttgaacagcaactaccagatatgaaaaaaaaattgtggaagtttgtagatgaccaacttgattatttgtttgcaaagcttaagaaaatcttagtatgtgattccaaaagctttggaagagatagtgatgaaggcaaacttgaaaaaacaagtaaacagaatgcacagtattcaaatagtcagaaaaggagtgtggacaactccaacagagaattgctgaaagaaaaattatcaaaatcagaagaccctgttcattataagtctttagtgggatgtaaaaaatctgaggaaaattatcaagaccaaaataactccagtattaacactgtaaagcatgacattaaaaaaaattttaacatctgctttgataatataaagaactctcaatccgaagagcgctccttggaagtacactgtccaagcaccccaaagtcagaaaaaaacgaaggaagcagcatagaggatgcacagacatcccagcatgcaactttgaagccagaacgaagtttcgagattcttaccgaacagcaagcatcgagccttacttttaatttagtgagtgatgcacaaatgggtgaaatatttaaaagtttgttgcaaggttctgatcttttagacagcagtgttaactgtactgaaaaaagtgagtgggagttaaagactccagagaagcagctgctagagactcttaagtgcgagtctataccagcttgtacaacagaagagctagtttcaggggtggcttctccatgtcctaaaatgattagtgatgataattggtcattattatcatctgaaaaaggtccatctctgtcttcagggctttcattgccggttcatcctgatgtgttggatgaaagttgtatgtttgaagtgtctactaacctacctttaagtaaagataatgtgtgtagtgtagaaaagagcaagccctgcgtttcttccatacttcttgaagatctagcagtctctttaacagtaccatcgcctctgaagtcagatggtcatctcagttttttaaagcctgatatgtcgtccagttcaactcctgaagaagtcattagtgctcattttagtgaagatgccttacttgaggaagaggatgcatctgagcaagatattcatttagctctggagtctgataattcaagcagtaaatcaagttgttcttcttcctggacaagccgatctgttgctccaggctttcagtaccaccctaatctacctatgcatgccgtcataatggaaaagtccaatgatcatttcattgtgaaaatacgacgtgcaacaccatctacctcttctggccttaaacagagtatgatgcctgatgaattattgacatctttgcccagacatggaaaggaagctgatgaaggaccagagaaagaatatatttcatgtcagaacacagtttttaaatctgtggaggaattggaaaactccaacaaaaatgttgatggcagcaagtcaactcatgaagaacagagctctatgatacaaacacaggttcctgatatatatgaatttcttaaagatgcttcagataagatgggtcatagtgatgaagtggctgatgaatgtttcaaattgcatcaagtatgggaaacaaaagtgcctgaaagcattgaagaattgccttcaatggaagaaatctcacactctgttggggaacatcttccaaacacatacgtagatctaacgaaagatccagtcactgaaaccaaaaacttgggggaattcatagaagtaacagttttacatattgatcagttgggatgttctggaggcaatttaaatcagagtgctcaaatattagacaattctttgcaggctgatactgtaggtgcttttattgatttgacacaagatgcttcaagtgaggctaaaagtgaaggtaatcatcctgcattagctgtggaagacttgggatgtggggtgatacaggtagatgaagataattgtaaggaagaaaaggcacaagtggcaaacaggcctttaaaatgcattgttgaggaaacctatatcgacttgaccacagaatctcccagttcatgtgaagtaaaaaaagatgagttaaaatcagagccaggatcaaattgtgataactcggagttgcctgggactttgcataattctcacaaaaagagaagaaacatttctgatctaaatcatcctcataaaaaacaaagaaaggaaacagacttaactaataaggaaaagaccaagaaacctacccaagattcttgtgagaatactgaagctcaccaaaagaaagccagtaagaagaaggcccctcctgtgactaaagatccctcatcattaaaggcaaccccagggattaaggattcatcagcagcacttgccacttctacaagtctttctgcaaaaaatgttattaaaaagaagggagaaattatcattttatggacaagaaatgatgaccgggaaattttattggagtgtcagaaaagagggccatcatttaaaacatttgcatatttagccgccaagttggataaaaatccaaatcaggtctcagaaagattccagcagctaatgaagctctttgaaaagtcaaaatgcagataagttgctgaattcctgggactcttaactgatattgcatactacacagaagcttcaaattcctcatgttttaaatgagcactagagggaggtttatcacctttttggttaccagatgataatctatatttgttattactcagtgactctctaatttcacatcagcatgttcagcttgtgctagtcatcattctgatttgcttatctgtttttggtcaaaatatttatttttaaacatgttagaacttaccaaaatgaaagcaacagtgatgtattgaaatcttagttttgatattttaaagaaatgactttctagattaaaaaaatagttttgtagcattttaaacttagtgactatttagttcaattgttcatccattttttatttgcttttataattgcctccttgttttggtatattgtaaaataatttaaataatgtatttataaatatgtataattatgatgtaaaataccgtgtgtatatgtatgtatgtgtgtttctgtatatgcacacacataaacggctttgcctagccaaggattttttttatctgtataaaactttttgtataaagtttgctttcaataacagtaatgtataataaaaccatgtaaagttttgttgtaaaaaaaaaaa

SEQ ID NO: 291 - DNA, 11242 bp, Homo sapiens
cccggatagccggcggcggcggcggcggcggcggcggcggcggccgggagaggcccctccttcacgccctgcttctctccctcgctcgcagtcgagccgagccggcggacccgcctgggctccgaccctgcccaggccatggccggcaacgtgaagaagagctctggggccgggggcggcagcggctccgggggctcgggttcgggtggcctgattgggctcatgaaggacgccttccagccgcaccaccaccaccaccaccacctcagcccccacccgccggggacggtggacaagaagatggtggagaagtgctggaagctcatggacaaggtggtgcggttgtgtcagaacccaaagctggcgctaaagaatagcccaccttatatcttagacctgctaccagatacctaccagcatctccgtactatcttgtcaagatatgaggggaagatggagacacttggagaaaatgagtattttagggtgtttatggagaatttgatgaagaaaactaagcaaaccataagcctcttcaaggagggaaaagaaagaatgtatgaggagaattctcagcctaggcgaaacctaaccaaactgtccctcatcttcagccacatgctggcagaactaaaaggaatctttccaagtggactctttcagggagacacatttcggattactaaagcagatgctgcggaattttggagaaaagcttttggggaaaagacaatagtcccttggaagagctttcgacaggctctacatgaagtgcatcccatcagttctgggctggaggccatggctctgaaatccactattgatctgacctgcaatgattatatttcggtttttgaatttgacatctttacccgactctttcagccctggtcctctttgctcaggaattggaacagccttgctgtaactcatcctggctacatggcttttttgacgtatgacgaagtgaaagctcggctccagaaattcattcacaaacctggcagttatatcttccggctgagctgtactcgtctgggtcagtgggctattgggtatgttactgctgatgggaacattctccagacaatccctcacaataaacctctcttccaagcactgattgatggcttcagggaaggcttctatttgtttcctgatggacgaaatcagaatcctgatctgactggcttatgtgaaccaactccccaagaccatatcaaagtgacccaggaacaatatgaattatactgtgagatgggctccacattccaactatgtaaaatatgtgctgaaaatgataaggatgtaaagattgagccctgtggacacctcatgtgcacatcctgtcttacatcctggcaggaatcagaaggtcagggctgtcctttctgccgatgtgaaattaaaggtactgaacccatcgtggtagatccgtttgatcctagagggagtggcagcctgttgaggcaaggagcagagggagctccctccccaaattatgatgatgatgatgatgaacgagctgatgatactctcttcatgatgaaggaattggctggtgccaaggtggaacggccgccttctccattctccatggccccacaagcttcccttcccccggtgccaccacgacttgaccttctgccgcagcgagtatgtgttccctcaagtgcttctgctcttggaactgcttctaaggctgcttctggctcccttcataaagacaaaccattgccagtacctcccacacttcgagatcttccaccaccaccgcctccagaccggccatattctgttggagcagaatcccgacctcaaagacgccccttgccttgtacaccaggcgactgtccctccagagacaaactgccccctgtcccctctagccgccttggagactcatggctgccccggccaatccccaaagtaccagtatctgccccaagttccagtgatccctggacaggaagagaattaaccaaccggcactcacttccattttcattgccctcacaaatggagcccagaccagatgtgcctaggctcggaagcacgttcagtctggatacctccatgagtatgaatagcagcccattagtaggtccagagtgtgaccaccccaaaatcaaaccttcctcatctgccaatgccatttattctctggctgccagacctcttcctgtgccaaaactgccacctggggagcaatgtgagggtgaagaggacacagagtacatgactccctcttccaggcctctacggcctttggatacatcccagagttcacgagcatgtgattgcgaccagcagattgatagctgtacgtatgaagcaatgtataatattcagtcccaggcgccatctatcaccgagagcagcacctttggtgaagggaatttggccgcagcccatgccaacactggtcccgaggagtcagaaaatgaggatgatgggtatgatgtcccaaagccacctgtgccggccgtgctggcccgccgaactctctcagatatctctaatgccagctcctcctttggctggttgtctctggatggtgatcctacaacaaatgtcactgaaggttcccaagttcccgagaggcctccaaaaccattcccgcggagaatcaactctgaacggaaagctggcagctgtcagcaaggtagtggtcctgccgcctctgctgccaccgcctcacctcagctctccagtgagatcgagaacctcatgagtcaggggtactcctaccaggacatccagaaagctttggtcattgcccagaacaacatcgagatggccaaaaacatcctccgggaatttgtttccatttcttctcctgcccatgtagctacctagcacaccatctccctgctgcaggtttagaggaccagtgagttgggagttattactcaagtggcacctagaagggcaggagttcctttggtgacttcacagtgaagtcttgccctctctgtgggatatcacatcagtggttccaagatttcaaagtggtgaaatgaaaatggagcagctagtatgttttattattttatgggtcttgagtgcatttgaaggtgtccttcagttcccacgtagagagagtgtggattatattacatgataacctacctggggaacagtccagaaagctatagaacaagtattttgctggaaatcctaattgaggacttaagacttcctgggttaaggatgtggccgtgtgtgtgtgtgtctgcctgtggttgtatgtgtccttgtgattataagattaacctgctgtgtgtgttaattccaggcagggaattagcacaaaaggtttaggaaggaatctttttttaaagacttccatctactgtggtattatacccaagcctagtgtgtattacaacttcaacactcccctttggcttatattaccatgtgcatagctaaagtcttctatttttagaacaccttctgtctgttctttccccatcaactccttcctcatccttcttggtgttctgtcatgggccatgggcttgctatggccagccttactgaggccaagcagcttatgggatgttctttattgtgtgtgatggtattggtttgtttggtagataagtgggaggaaaagtactgttgctacactattataggcatgtttgatactagcagctaacactggtcactccaaagcactgtttctataggaacattgaagctattaagatgttttgattatcctaattacataatgaccgatttgagatagaggcctttaaatacattccatgccctccccagaaaatagtctgtgggagtcagttgccttggtgccaggtatgtgttctgatgtaggtcatgagtctttctacttaatgggaagggaagaacatttgtttccaggatgactttctggccagaataccggaaagcttttaggaagcttcgttcacatgctatttaaatgcacaaaatagacagtaaggatttatctgttcagtttttcttcccagtgaattaatttcagcttatatgggtgtcttcatttgaacatgaggaatattaggttatattttcagcagtggttttttcctttgccctttaaggagtggggataatgtccacggtggcccagcctcttgctgatggcaccttccctgcattgctgcctcccgatgatgtggttcttttcttgtgcctgtggctttgggaatgtaacatctctttcctcctttccttcccttttcctcttcacctgaggtcctaaatactctctgtaattactgtgttcttcacggtaattagacatcattcagtgaataaattactgtagtcaaagacagtatgggctggcagtttgtgtaattgcaagttcataaagagaattgagggtccagttgggagaactattagtcagttcttttatatgctgataaatgatccctcgagttcagttagtattctgtccagagtgtttagctcactttcttagcagtgtgtaagctttctccatgtcagaagcaagcctgctctttgataaatctgtcttcctgaaaatctaaatcatgcttttgtctttagatctacacagaaatgaccctccttggatcagttttctttccagtctaatcatctttggaactaaaacttgttctaactcgtctcttggcattcagctactcctagatcttttggttttatcccctggcctcagagccatttatattcccagagtaggcagtacaggatctcgtgttgatttgctgtggttacccagtgtcttctctacatggcataaagcggcaaagcccaccattaggtgaggcggtcccgagttgaggtagagtggggcagaggaagatggcagtgaatatcaaacagtagaccgccatcaacttctaacagccagtacacacactgtttcattttgaggtaacgttcagttttgcattttgtttaaatattgaaggcctagacaaagaactagaaaaaaaaaagcagtttccaggcccatccatattgtaatttttctttatctgcagatattgcctgtagtctaaagatctctttggaagacaaagcattggctatatatcttttgccttttccatgcatctaaatcttctctggagattatctccctactgtgtaggttaagggcagtctcgacttttccttttttgagtcctgtgtggctctttgaatcagcgtgaaactgaggctccagctccctgtgttgtgtgtgtgtgccatccatgggcttgggtgtcagtttgtcacaggtatctgccagcattcaaggttttggatcatttcatgaggatctttcctttgactgggtgctgtgaggacacacctgggtctgtgcctgagattgccaggcaagattaaggaaagttttcatgtggcttttgttttgaggttattctcaaaaccttaatttcttatattttctgttgactaaggcaccagtaacccattcttcaccctccatttgtatggcaatttaaaagtctttggctttgctctgaatttaattaaaactgccttttatgaacagacttcgagttttgccattttgggcaagcccttccgcttgtcccttcctagtggctaataaagtaaaaaaacccacactactttgttctctttttctcatattcattgggctgttgtattcagccagtctcatgctttccctgggtcttcacggattgctttccaagctgccttgttgcggggttgctgcagagcagcaactggacctttccagctgtcgccatgttccttccactaaagtagagggttcttaaaatggaaaaacctgtgggctcttcatatacctccctttagttaagtaatagaccaggcagcttctcatctcagcatttacctgttaatatttttgtgaatagtgctctctacctgtgggtggccgttctcttccacttgctcgtctccccccagccccattctgcataatctaccattcttctcctctctttctcttcttatacagaccctcattactggggcccaagatgtgggatactactgttagtattatttaactattttgtagatttaaaagatttctggttaagggaggtgggggtcactgttcatcactcttaaaatatgtgttttctctatagaaaagtaaaatgtgtttatggtcccaaacagtcaactcacaaatttttataacaaaatttccttgtaaaaactagggaccatctatatattccctttaagatctagttctttttgtaggtgttcagcaatggtgataaagcagaatattctcctacctcacgtcattaaagtcagaagattatagaccttctcaaactataagtccctcttcttgccgttggcctttctgactctggaatgaccactgttcattgaaaaatagttttctgactattggtctggctctaacagtttgtttgttcatccagcaaatgtttatgagtgatgaccatgtgccagaaatgtcaggtatgtgtccttcccttggcgccacatagtagtttactaatgtttgggggattgtacttggactgtcatagcctctgcgtttgaccttaaaatagctcttcccagtaagattgtgcaatttttattcacagctcttccatgtagacttacctttcctcatagagctatcctggttaataacaggccaagattctcccattatcccctgttgtctcctgtagctttgataatgcctgggagattccttggtgtaagtgtcatggataccgactgtttttatgttggaatttgttccaacataattagaatctgtttggtgagttgaaaggtaagttggctcagagttgcacagtagggcattaaatgtttaagcaaagcatctgcccacactcccctttccaatctagtgccttccttgaactttttcctgagctgctacgtccctaatcccccttgttgggaggattttcgtatcacccttatgggacctgtcaccatgtcctgtactatttggaattggttttccagtctttcaacaaccgttgtggctaactatgttttagaagggctggaggtgtgggccctgtcttcgggtctcaggacccaaagatcctttagtcagttgttgggtcttccaagagccagacattaatacagattgaactccatcagtcccctaattgtcagcctttacctccctcccagagcaaggagtttagggattctaaagcttagtgtccacacatcattctaccagaccttagagctttagaagctcaatctaaaatactgtaactcagcataaactattactatcactcctttgaactcagtctccatgagcagtgttttgttggaaatacatagaacggcttaatgcctagagggtggtggatagtgaaggacggtcaaggttatatttttgactgcttagggattctttggatccaagaaacagaaatgttcaagcggaataaaggagggagtggagttgtggtaaggatgcagggtatttcgcagaacccaggacgggaagtgcctttggttcttgggtggagctggaactgcagagctttgcacctagtcctttctcccgcttcacagtctgcttatggtatatgtggcccccaaataggcactctagtcctcaagtctacaccaccttccaactctggggatcaccatgaacaaattctcaatttcccatacttaattttttttttttttgagatggagtctcgctgtgtcgcccaggctggagtgcagtggtgcagtctcaactcaccacaacctctgcctcccaggttcaagcagttctctgcctcaacctcccgagtagctgggattacaggcgcctgccaccatgcccagctaatgttcatatttttagtagagacagggtttcaccgtcttggctaggctggtcttgaactcctgaccctcatgatccacccacctcggcctcccaaagtgctaagattacaggcgtgagccaccgcgcccggcccatacttcgtattcttaaaaaaaactacactcagcccagcacattgatcaagtatctatctctgagcagttggccttgccagggagagcagagatgtggcaggctccttcagctggagacagggagcttctcagagaagtgagcagagactccacagacaccctaaaaaggcttctactcaagaagtaaagccactactcctgcctttttgcttagtggacaggaaggcacaggagtttgtctgggacatcatagaaattcttaggtttaacttaattctggtcattgtcttctttatttcctgtttttcttccctttgtcagtcttcgcatccaagatttcttccctccctcttgtgggccagcctgtcctgttccagagctagcctgttcctgggtagccttccttagcctccattcagcctcaggtcttttgccttcttccgtgtttatttagagagcagaatctaataacgggttccactgtagccactatccatggacttctgggtcctcttcaggtttgagtgcttgaaaatgttcattctctgggcttgtggcctgtctcctccactctcctcctcaccctctcgctccttcctgtgtgagggccgctctgcagtaatgttctcaggcaagccttcctaggcacctcagaaactactttgccagagccagtaagaatatataatattggagcagttgccaggatagaaattaaatatagattccagtttaggatagagtttttaccgagagctctttagacagtatacctgtgtcttctctggcaattgctttcattttagtcctatataaaagctttccttttctgtttttttttaaaactatgcttttgcttgcctaaatcttttgatcttatatttctctcatctcagagcctgtcctgagttgtaaggtatttcatactgccttacttaaaagttttttaaactactagagtcatttgatacacacagaagttacctaataatccaaagatgtccatcaagggaggaagggtgggtcatcagactttgcctttgatgttgtagactaggctcctgagttaagcagcagagggacagcagtgccatgtgccttcactgtgtcccaggaaatctgggttggttccagtgggaaataccagtatttcttggttctggaaagtagcaaaagagtaggagatggggaaatagggatggggagagcaagccccgcatgtccatggcgagtcaggtggggagcacgggtggaagggccggctgttgacagacagactaagctgtgtggtgctcttgccgccccttcctgggtacagagcttgagaaaaatgcagccgaccactccctgtgtttgtacagagcaaagcccaaaagccaacctcagatctcctgatttggcagctgaagaaatcagcagagtcctgattgcctgattcagtcccaaaaatgaatgtcaggccccgccccctccccaccaacattgcctctcctacattctccttctgcccctaaatcagacaggaggccagagaggagtattgctcaatgcgtgctatgtgcaactcctcaggccttgtgccacctccatgctgagccctgaagcagggtgtcctgggtgcctgtgtgtcagctccctcctctctacctacctctgaccttcttgtgggtgagggtggccatgcttatggccatcttaaaactggagaggcagagaactacttatgagtctgtagaccacgtgttgtcttccatggcctgtttctcctgctgtctgggtgagtgagcctgcaacgcaatgcccatgagagtaaatgcctcctgacctaccctgctcagcactgttctagtgtcttggccttgaaagaaaagcctgacttcctgctgacacatgtggtaggggcatggcagctatgaggcacctcctacgtctgttttctggctgtggtgacttgggatttttaaccttatatatctttttcctttactcaaaacaaaacaatttttagcacactgaaaaaaaaaaaaagccaaatgttttgtgcctttctaaggcagcactgtatcccaggctgcattttaggacttaatatggaaataccagagtctgagctcctctaccttgagtttcattagtccttagtgtctaggagacaggaaagaatgctctctgtgactggagaggtgacatgcaggtgcagtgtgtctggagtccctttcccctgctgtgagacttcagtggaggagagaagcattgtaccctgggatcatttggttggttccaatcacaagcttagttatcaggttgcatgccttgtctcctgcaaaagacagaatgtttcacaattcccaggtaaactctggaccattccaagtgtcctagccttctgatgacattaattacctagttgtgtcgaggagtataggatggactctcctgagaaggggaggttggtggctttgtcttttctttttgctggatcctgaactggtctagacctcctgcccccaccccccagcccccatcagatgtggctggcctttcatttgaaggcttcagacttaaagcattaagcagctagtgccctctgcagggcctggtttccccagggaagggcagcaaggaacatgggaccagaagcctgtcctcagtaatgtgactatagtgagctttagcaaaagtttttctatataatgacatcttacttatcttttaccctttcctcagttttcccctgcctttaactaataaagaattgggagacagaaattttaaagtcctccttattcaagattttgaaattcttagcctgggagtgctggagagaacctgatgctttctccagaatgaagagtcccaatttgtatatcagtgttaagaagaaaacaaaacaaacacataggtgagattttcgtggactattttaaaaatgtgtcattaatataaaaaatttatattagcagtatttaatcattctcacctgtaaagaataagaaaaacagaaggtaaatattcttacagagaatagcagagctttaagattcattttcattttaagtccattttattttgccagtgtattaatgtttagaagtctgttttactaatgttatttattaattttttttcatttccatacacagttagttaactaaagagctttttcaagcacccatgtctgtaaaaaaatatttttaaataaagtttcttttgttgtagcagaaaaaaaaaaaaaaaa

SEQ ID NO: 292 - DNA, 2544 bp, Homo sapiens
ctgcagggccaggacgcacgtttcaagctcatcagtaaaggttccttaaattcccgaagcaagaagttaaccaagtaaaacagcatcggaacaccaggatcccatgacagattctgttgtcacgtctccttacagagtttgagcggtgctgaactgtcagcaccatctgtccggtcccagcatgccttctgagaccccccaggcagaagtggggcccacaggctgcccccaccgctcagggccacactcggcgaaggggagcctggagaaggggtccccagaggataaggaagccaaggagcccctgtggatccggcccgatgctccgagcaggtgcacctggcagctgggccggcctgcctccgagtccccacatcaccacactgccccggcaaaatctccaaaaatcttgccagatattctgaagaaaatcggggacacccctatggtcagaatcaacaagattgggaagaagttcggcctgaagtgtgagctcttggccaagtgtgagttcttcaacgcgggcgggagcgtgaaggaccgcatcagcctgcggatgattgaggatgctgagcgcgacgggacgctgaagcccggggacacgattatcgagccgacatccgggaacaccgggatcgggctggccctggctgcggcagtgaggggctatcgctgcatcatcgtgatgccagagaagatgagctccgagaaggtggacgtgctgcgggcactgggggctgagattgtgaggacgcccaccaatgccaggttcgactccccggagtcacacgtgggggtggcctggcggctgaagaacgaaatccccaattctcacatcctagaccagtaccgcaacgccagcaaccccctggctcactacgacaccaccgctgatgagatcctgcagcagtgtgatgggaagctggacatgctggtggcttcagtgggcacgggcggcaccatcacgggcattgccaggaagctgaaggagaagtgtcctggatgcaggatcattggggtggatcccgaagggtccatcctcgcagagccggaggagctgaaccagacggagcagacaacctacgaggtggaagggatcggctacgacttcatccccacggtgctggacaggacggtggtggacaagtggttcaagagcaacgatgaggaggcgttcacctttgcccgcatgctgatcgcgcaagaggggctgctgtgcggtggcagtgctggcagcacggtggcggtggccgtgaaggctgcgcaggagctgcaggagggccagcgctgcgtggtcattctgcccgactcagtgcggaactacatgaccaagttcctgagcgacaggtggatgctgcagaagggctttctgaaggaggaggacctcacggagaagaagccctggtggtggcacctccgtgttcaggagctgggcctgtcagccccgctgaccgtgctcccgaccatcacctgtgggcacaccatcgagatcctccgggagaagggcttcgaccaggcgcccgtggtggatgaggcgggggtaatcctgggaatggtgacgcttgggaacatgctctcgtccctgcttgccgggaaggtgcagccgtcagaccaagttggcaaagtcatctacaagcagttcaaacagatccgcctcacggacacgctgggcaggctctcgcacatcctggagatggaccacttcgccctggtggtgcacgagcagatccagtaccacagcaccgggaagtccagtcagcggcagatggtgttcggggtggtcaccgccattgacttgctgaacttcgtggccgcccaggagcgggaccagaagtgaagtccggagcgctgggcggtgtggagcgggcccgccacccttgcccacttctccttcgctttcctgagccctaaacacacgcgtgattggtaactgcctggcctggcaccgttatccctgcacacggcacagagcatccgtctcccctcgttaacacatggcttcctaaatggccctgtttacggcctatgagatgaaatatgtgattttctctaatgtaacttcctcttaggatgtttcaccaaggaaatattgagagagaagtcggccaggtaggatgaacacaggcaatgactgcgcagagtggattaaaggcaaaagagagaagagtccaggaaggggcggggagaagcctgggtggctcagcatcctccacgggctgcgcgtctgctcggggctgagctggcgggacgagtttgcgtgtttgggttttttaattgagatgaaattcaaataacctaaaaatcaatcacttgaaagtgaacaatcagcggcatttagtacatccagaaagttgtgtaggcaccacctctgtcacgttctggaacattctgtcatcaccccgtgaagcaatcatttcccctcccgtcttcctcctcccctggcaactgctgatcgactttgtgtctctgttgtctaaaataggttttccctgttctggacatttcatataaatggaatcacacaaaaaaaaaaaaaaaaaaaaa

SEQ ID NO: 293 - DNA, 1851 bp, Homo sapiens
tccccccggcggccccgcgcgcagctcccggctccctcccccttcggatgtggcttgagctgtaggcgcggagggccggagacgctgcagacccgcgacccggagcagctcggaggcggtgaataatagctcttcaagtctgcaataaaaaatggcctccaacaaaactacattgcaaaaaatgggaaaaaaacagaatggaaagagtaaaaaagttgaagaggcagagcctgaagaatttgtcgtggaaaaagtactagatcgacgtgtagtgaatgggaaagtggaatatttcctgaagtggaagggatttacagatgctgacaatacttgggaacctgaagaaaatttagattgtccagaattgattgaagcgtttcttaactctcagaaagctggcaaagaaaaagatggtacaaaaagaaaatctttatctgacagtgaatctgatgacagcaaatcaaagaagaaaagagatgctgctgacaaaccaagaggatttgccagaggtcttgatcctgaaagaataattggtgccacagacagcagtggagaattgatgtttctcatgaaatggaaagattcagatgaggcagacttggtgctggcgaaagaggcaaatatgaagtgtcctcaaattgtaattgctttttatgaagagagactaacttggcattcttgtccagaagatgaagctcaataattgttcacattgttcttttatatatatttatatatatatataaaaattgggtcttagattttgatttactagtgtgacaaaataactacatcctaatgaaaatcaagtttgatatgtttgttttgaaagtagcgttggaagagttgttgggggttttttgcatccatagcactggttactttgaacaaataaataaaagctttctgtagttgcttcctttatcagaaaagaacatttgataccatggtatatcatttcctcttcattaaagaacagcttttctaaatgttgggggaaatgtccatagtcattactcagtcaaaacttgtgttctcatgagcctaaggaccattctagatttattacgtgttttttgtgtgtgtgtgtgtgtgtgtgtgtgtgtgtatccataaaatgcatatgtaaatttttttttgtttttaagcattcacccaaacaaaaaaatcacaggtaaacccatgtttctgagatgccattattccaagcaaaataagagataatcccttcaagttaaattgaaaattttcctgaaaccatacatttcaagtgaaataagtaattctagataggacaatttaaattggataattttaaagtgtctataattgcagtggtttatttgcaaaattcctaaaaggaaaaattttatcactgccatcacagcaggtttcctcatccagatgaggaaactagacaaatgctagtgtgttttaactagctaaacaaaactaagttaaatgaacatttaaaagtttccctagcgggccattccttagcaaaatgttggaatccctgttgctacattgactaaaaggtcatgatgaatggaatatgtaagacttggctcatagaaacctaatcagatggttagaggtgttggcagtttaggacctgctgtcataaatgtgtgaacaaccttttgtaacctaacctattgacctgcatgttttttctttaccccaattcattacatggaggctcaatcttgagtttgctttactggttcagcaaaagccaggaagaacaactttgtagtaatcaaaatgttatccaactgtatattgtttactttattgtaaatactggtgaacagtggttaataaatagttttatattcctttatgcaa

SEQ ID NO: 294 - DNA, 3284 bp, Homo sapiens
gagcggtgccgcaccggccgcgggcgcagggagtattatgggctgtgggtgccgctgagcaagatggagctgtctgcagtgggcgagcgggtcttcgcggccgaatccatcatcaaacggcggatccgaaagggacgcatcgagtacctggtgaaatggaaggggtgggcgatcaagtacagcacttgggagcccgaggagaacatcctggactcgcggctcattgcagccttcgaacaaaaggagagggagcgtgagctgtatgggcccaagaagaggggacccaaacccaaaactttcctcctgaaggcgcgggcccaggccgaggccctccgcatcagtgatgtgcatttctctgtcaagccgagcgccagtgcctcctcgcccaagctgcactccagcgcagccgtgcaccggctcaagaaggacatccgccgctgccaccgtatgtcccgccgtcccctgccccgcccggacccgcaggggggcagccccggactgcgcccgcccatttcgcccttctcggagacggtgcgcatcatcaaccgcaaggtgaagccgcgggagcccaagcggaaccgcatcatcctgaacctgaaggtgatcgacaagggcgctggcggcgggggcgccgggcagggggccggggcgctggcccgccccaaagtcccctcgcggaaccgcgttataggcaagagcaagaagttcagcgagagcgtcctgcgtacacagatccgccacatgaagttcggcgcctttgcgctgtacaagcctccgcccgcccccctggtagccccgtcccccggcaaggctgaggcctcagccccgggccctgggctacttctggccgcccccgccgccccctacgacgcccgcagctctggctcctccggctgcccctcgcctacaccacagtcctctgaccccgacgacacgccccccaagctcctccccgagaccgtgagcccatccgcccccagctggcgcgagccggaggtgctcgacctgtccctccctcccgagtcggcagccaccagcaagcgggcaccgcctgaggtcacagctgctgccggcccggcacctcccacggcccctgagcccgccggtgcctcctccgagcccgaggctggggactggcgccccgagatgtcaccctgctccaatgtggtcgtcaccgatgtcaccagcaacctcctgacggtcacaatcaaggaattctgcaaccctgaggatttcgagaaggtggctgctggggtagcaggcgccgctgggggcggtggcagcattggggcgagcaagtgagggggctccaccaaggaggggggcttgggggggccctcctgcccgaagtcatactcttgctcccaccccacccttgcccccagccctctctccctgtgctttgcttgtctcaaatggctcggtgttgacccagggatggggctgggtagttggggtcccagaaagccgggggtaggggccaccctggaatggggcaggggaagggcacaccccctgcccatgcatggtagcccactgggtggtttctggaaagccctagaaactagggttcctctgccccttccacatcccacctgtctctctagcttgcttcctgctctcctgtgcggcgtctgatttctcggtgctaacctggcagctgtggggcccttaggagccccccaccgagggtggacacagtccctttccttcctgcagatgcctaggcaggaggagggcttcctgcctgtttggcaaagtcccaggcagaggccaaggatgaggcctgactcggctcctccctccacatcagccagggcatcagaagttgggccagggcggggtcttccctgctcgattttggacgaggcctaagtagaccccctatgccctgccccagccctggctctttcctaaccccctcaacggtgggaggaactggcagagggtgcgcctggccacagcctccccgcatctaaaggccccttcagttcttgaccaaaggtgctacgagaacctgccgtggaaacttccagttgtgcgtctgccccactcgctgtgtttgtccgtgggttcatacatgcattgggtgctaggccccaggctgccgggtggcaccctttacagttcctttgaacaggggcattgaaggcctggactgcctctcgcctcagtaggcctggggaccaggcttgggtctggaggtttgctgtggaagtcaccaggcctcccctcctggcccaggtgtgctgggggcaccgtgccccccacccccctgccctcctcagggtggtcagcccaacctgtcggaccttcacttcacatcatggtggggaccgagatagagagggagaccccattccaagctccctcttcctcccggtgtttggggaggatgctgaagaatccattcccgagggcctcccggcttgtcccagcccctcttttgcttctgaccacggaggctttctcacagcccagcctgcctgaagcaaaggaggctcccgtgtcctgggcagcttctgtttccctctgctgcctgggagctgaggcacccgtgccagtggcagaggccacagccccagccttaggccaggccctgggagggcaggcaggcaaaggggagaccagagggtctgtgttctccaggagaatgagggtgttggtcccagaattgggaccggggccccgctggccagccctgggccacttcccgggtctccattgtgcgtgggtggcgtgttccaggcgtggctggagctggcttcctggctgtgctgccatgggcccctccctcagaagcacgttggcaggaggccgatcagaaccctagcgcctttggtcctaagaatgggaggctgccttccttcccaatctccctgccagggcccacagcgtggccctagccctcccctccccgggatgtagaacggggaccctcgcagggttggggcgggggctgatactcctcggcccctccctaccctgccctgtgtgttggctttgtggccgtccaagtgccaattggcttttcgcccaaataagggctggtatttctcctctgtccttggaggtgatttccccctgaccccctcccccaggtgagtgaccacctgggtgccagttacaggtgtttccagagaccatagaaatgtgttttcctgagagttcgtgtcattcgtgacttttttgtaaagaagttgtgttttcagaggtgattttatgacaggaaagtgaaagaattagttttgcaaaaaaacaaaaacaaaaaaaaaaaaaaaaaa

SEQ ID NO: 295 - DNA, 3233 bp, Homo sapiens
gccgggagcttccctgatggtgccgccgcctccgagccggggaggagctgccaggggccagctgggcaggagcctgggtccgctgctgctgctcctggcgttgggacacacgtggacctacagagaggagccggaggacggcgacagagaaatctgctcagagagcaaaatcgcgacgactaaatacccgtgtctgaagtcttcaggcgagctcaccacatgctacaggaaaaagtgctgcaaaggatataaatttgttcttggacaatgcatcccagaagattacgacgtttgtgccgaggctccctgtgaacagcagtgcacggacaactttggccgagtgctgtgtacttgttatccgggataccgatatgaccgggagagacaccggaagcgggagaagccatactgtctggatattgatgagtgtgccagcagcaatgggacgctgtgtgcccacatctgcatcaataccttgggcagctaccgctgcgagtgccgggaaggctacatccgggaagatgatgggaagacatgtaccaggggagacaaatatcccaatgacactggccatgagaagtctgagaacatggtgaaagccggaacttgctgtgccacatgcaaggagttctaccagatgaagcagaccgtgctgcagctgaagcaaaagattgctctgctccccaacaatgcagctgacctgggcaagtatatcactggtgacaaggtgctggcctcaaacacctaccttccaggacctcctggcctgcctgggggccagggccctcccggctcaccaggaccaaagggaagcccaggcttccccggtatgccaggccctcctgggcagcccggcccacggggctcaatgggacccatgggaccatctcctgatctgtcccacattaagcaaggccggaggggccctgtgggtccaccaggggcaccaggaagagatggttctaagggggagagaggagcgcctgggcccagagggtctccaggaccccctggttctttcgacttcctgctacttatgctggctgacatccgcaatgacatcactgagctgcaggaaaaggtgttcgggcaccggactcactcttcagcagaggagttccctttacctcaggaatttcccagctacccagaagccatggacctgggctctggagatgaccatccaagaagaactgagacaagagacttgagagcccccagagacttctacccatagcacatcccaacaccgtcacgccaaaggaagagaaagatcaactcacctgcagttaaaccatctaaagagaagaaagaccactggagacctagaaaacatacatttttctcttctcttctcctgacgtctctccactcctcttcttccaaatacgatgctattttcagagtcccctcctaggcctgcagacatgagggagtgaatgattgatttacctgcttctcactaagagtccattggggtggtttgcattgtaacttttcttttacatcctatttttccaggaactttggatttaagtactctcacagtgtcttaaatcataaattcttgaagttaaatttggcagagtatcaaaagggggaaaatgacaaagtgagctctaagaaaatgtgaggctacttctaagatgtgtgttcacaatagaccataactcctctagtatcaaaattggggctcttcagttaaaaaggggtggggaggacaaacgtgtcgatgtgctttggtggagaattttttccttgtgcttctagtagactttaaatattgtatccctttgtcaaaccttgtttcccaaattcaattaaagagaggagagaattgaatggcgtttagagaagatagaaaagaatcacagtcatatatttactgttatatagattgccacattctaaaattcaaatacggtgcttaaggtttcatgccatgcttatctgtaagtatcctatttagggaagaagattaaactctcttttcaaaaaaacaaagtgaaatgcctggattcacattaaaacaatgggctctcgtttgctataatattttaaagctgtttaatcaacagtggagtctgctctataaatatagattatttgttcaataaactggctgagcttagagagaggtgcagaattcctggttctgagcaggtgcccagaaggtaccattaggtgccatgatccaggctgaaccaatatacagtggggctgaagtctgcaaggaggttgctggcttgggctgacctcactaatgccatcagcagcggtaggtaaattttttctccttgggtattacaagtttttgtctggagccaaccaagcttgccaccaacatattgagagtaatacactattgaaagttatcttggatggggagaaaaaaaaatagtggttttccttgtttgcaaaaacttccttcctattctcattttttcttaattttctttaatttagtccaagttccagttcttttaggccttctctttgatttattttcccctgcatgtgagaagcagttcagaaaaaggtctatatctccacctcctagtgagttagagtgttttctcagagcacctctgggtggcaaagggaagcatgttcctgccaaggtttgctgtggattcagaagcaccaggagcaagagaccagaaggatgatctgctcctttgtaacgttgttgagggccctcttgtttccaatgagcagcttataggttactcacagtccactttctcactggacacacaaagtggctctttatctacctttgcgggagattttcactctcctgcaaatgatcgttctcacactcatattagctcatgttggaatttcccatcctgccatgtcctttcccatttctttttggcttttttgcctccaccttttagcccacatcatttaactccactactgtgaaagcttgcttaaagaaaatccctcttggccgggtgtggtagcccacgcctctaatcccagcactttgggaggctgaggcggggagatcacaaggtcaggagatcgagaccagcctgaccaacatggtgaaaccctgtctctactaaaaatacaaaaattagctgggcgtgttggcacacacctgtaatcccagctactcaggaggctgaggcaggagaattactttaacctgcggggggagcctagattgcgctactgcactccagcctaggcaacagagggagactctgtctcattaaaaa

SEQ ID NO: 296 - DNA, 878 bp, Homo sapiens
atcccagcccacgcacagacccccaacttgcagctgcccacctcaccctcagctctggcctcttactcaccctctaccacagacatggctcagtcactggctctgagcctccttatcctggttctggcctttggcatccccaggacccaaggcagtgatggaggggctcaggactgttgcctcaagtacagccaaaggaagattcccgccaaggttgtccgcagctaccggaagcaggaaccaagcttaggctgctccatcccagctatcctgttcttgccccgcaagcgctctcaggcagagctatgtgcagacccaaaggagctctgggtgcagcagctgatgcagcatctggacaagacaccatccccacagaaaccagcccagggctgcaggaaggacaggggggcctccaagactggcaagaaaggaaagggctccaaaggctgcaagaggactgagcggtcacagacccctaaagggccatagcccagtgagcagcctggagccctggagaccccaccagcctcaccagcgcttgaagcctgaacccaagatgcaagaaggaggctatgctcaggggccctggagcagccaccccatgctggccttgccacactctttctcctgctttaaccaccccatctgcattcccagctctaccctgcatggctgagctgcccacagcaggccaggtccagagagaccgaggagggagagtctcccagggagcatgagaggaggcagcaggactgtccccttgaaggagaatcatcaggaccctggacctgatacggctccccagtacaccccacctcttccttgtaaatatgatttatacctaactgaataaaaagctgttctgtcttcccacccaa

SEQ ID NO: 297 - DNA, 562 bp, Homo sapiens
ctggaattgaggctgagccaaagaccccagggccgtctcagtctcataaaaggggatcaggcaggaggagtttgggagaaacctgagaagggcctgatttgcagcatcatgatgggcctctccttggcctctgctgtgctcctggcctccctcctgagtctccaccttggaactgccacacgtgggagtgacatatccaagacctgctgcttccaatacagccacaagccccttccctggacctgggtgcgaagctatgaattcaccagtaacagctgctcccagcgggctgtgatattcactaccaaaagaggcaagaaagtctgtacccatccaaggaaaaaatgggtgcaaaaatacatttctttactgaaaactccgaaacaattgtgactcagctgaattttcatccgaggacgcttggaccccgctcttggctctgcagccctctggggagcctgcggaatcttttctgaaggctacatggacccgctggggaggagagggtgtttcctcccagagttactttaataaaggttgttcatagagttgacttgttcat

SEQ ID NO: 298 - DNA, 2811 bp, Homo sapiens
ccatttcaatagtcgcgggatacttgaactgcaagaacagccgccgctccggcgggctgctcgctgcatctctgggcgtctttggctcgccacgctgggcagtgcctgcctgcgcctttcgcaacctcctcggccctgcgtggtctcgagctgggtgagcgagcgggcgggctggtaggctggcctgggctgcgaccggcggctacgactattctttggccgggtcggtgcgagtggtcggctgggcagagtgcacgctgcttggcgccgcaggctgatcccgccgtccactcccgggagcagtgatgttgggcaactctgcgccggggcctgcgacccgcgaggcgggctcggcgctgctagcattgcagcagacggcgctccaagaggaccaggagaatatcaacccggaaaaggcagcgcccgtccaacaaccgcggacccgggccgcgctggcggtactgaagtccgggaacccgcggggtctagcgcagcagcagaggccgaagacgagacgggttgcaccccttaaggatcttcctgtaaatgatgagcatgtcaccgttcctccttggaaagcaaacagtaaacagcctgcgttcaccattcatgtggatgaagcagaaaaagaagctcagaagaagccagctgaatctcaaaaaatagagcgtgaagatgccctggcttttaattcagccattagtttacctggacccagaaaaccattggtccctcttgattatccaatggatggtagttttgagtcaccacatactatggacatgtcaattgtattagaagatgaaaagccagtgagtgttaatgaagtaccagactaccatgaggatattcacacataccttagggaaatggaggttaaatgtaaacctaaagtgggttacatgaagaaacagccagacatcactaacagtatgagagctatcctcgtggactggttagttgaagtaggagaagaatataaactacagaatgagaccctgcatttggctgtgaactacattgataggttcctgtcttccatgtcagtgctgagaggaaaacttcagcttgtgggcactgctgctatgctgttagcctcaaagtttgaagaaatataccccccagaagtagcagagtttgtgtacattacagatgatacctacaccaagaaacaagttctgagaatggagcatctagttttgaaagtccttacttttgacttagctgctccaacagtaaatcagtttcttacccaatactttctgcatcagcagcctgcaaactgcaaagttgaaagtttagcaatgtttttgggagaattaagtttgatagatgctgacccatacctcaagtatttgccatcagttattgctggagctgcctttcatttagcactctacacagtcacgggacaaagctggcctgaatcattaatacgaaagactggatataccctggaaagtcttaagccttgtctcatggaccttcaccagacctacctcaaagcaccacagcatgcacaacagtcaataagagaaaagtacaaaaattcaaagtatcatggtgtttctctcctcaacccaccagagacactaaatctgtaacaatgaaagactgcctttgttttctaagatgtaaatcactcaaagtatatggtgtacagtttttaacttaggttttaattttacaatcatttctgaatacagaagttgtggccaagtacaaattatggtatctattactttttaaatggttttaatttgtatatcttttgtatatgtatctgtcttagatatttggctaattttaagtggttttgttaaagtattaatgatgccagctgtcaggataataaattgatttggaaaactttgcaagtcaaatttaacttcttcaggattttgcttagtaaagaagtttacttggtttactatataatgggaagtgaaaagccttcctctaaaattaaagtaggtttaggaaaacagaccctcaaattctgacattcattttcctaagcaactggatcaatttgctgacttgggcataatctaatctaagcatatctgaatacagtattcagagatagatacagtagagattccccagactttttcgctctttgtaaaacctgtttgtttaggttttgcgaggtaaactcaacagaggttgggagtggaagagggtgggaagcttatatgcaaattaacagacgagaaatgctccagaaggtttattattttaaagcacattaaaaacaaaaaactatttttaaaatcctgctagattttataatggatttgtgaataaaaaatacccagggttctcagaatggaataaatatcccttttaatagttatatatacagatatacaactgttagctttaattggcagctctcttcttttttcttcttttcactggctttttacttggtgctttttcttgttttgcactggtggtctgtgttctgtgaataaagcaaagtaagaatttactaagagtatgttaagttttggattattgaaataagaggcatttcttagttttccagtaggatctaaaatgtgtcagctatgagtaagactggcatccaagaagtttatattatagatttaggtcctaatttttataaatcacaaggtaaaaaaatcacagaacagatggatctctaatgaaaaagggatgtctttttgtttatagtcatgtggcaagatgagagtaaaaccagagagcaaacctctataagtgttgagtatatgtatacatttgaaataaaccagaaatttgttaccttaaaaaaaaaaaaaa

SEQ ID NO: 299 - DNA, 1958 bp, Homo sapiens
agcagccggcgcggccgccagcgcggtgtagggggcaggcgcggatcccgccaccgccgcgcgctcggcccgccgactcccggcgccgccgccgccactgccgtcgccgccgccgcctgccgggactggagcgcgccgtccgccgcggacaagaccctggcctcaggccggagcagccccatcatgccgagggagcgcagggagcgggatgcgaaggagcgggacaccatgaaggaggacggcggcgcggagttctcggctcgctccaggaagaggaaggcaaacgtgaccgtttttttgcaggatccagatgaagaaatggccaaaatcgacaggacggcgagggaccagtgtgggagccagccttgggacaataatgcagtctgtgcagacccctgctccctgatccccacacctgacaaagaagatgatgaccgggtttacccaaactcaacgtgcaagcctcggattattgcaccatccagaggctccccgctgcctgtactgagctgggcaaatagagaggaagtctggaaaatcatgttaaacaaggaaaagacatacttaagggatcagcactttcttgagcaacaccctcttctgcagccaaaaatgcgagcaattcttctggattggttaatggaggtgtgtgaagtctataaacttcacagggagaccttttacttggcacaagatttctttgaccggtatatggcgacacaagaaaatgttgtaaaaactcttttacagcttattgggatttcatctttatttattgcagccaaacttgaggaaatctatcctccaaagttgcaccagtttgcgtatgtgacagatggagcttgttcaggagatgaaattctcaccatggaattaatgattatgaaggcccttaagtggcgtttaagtcccctgactattgtgtcctggctgaatgtatacatgcaggttgcatatctaaatgacttacatgaagtgctactgccgcagtatccccagcaaatctttatacagattgcagagctgttggatctctgtgtcctggatgttgactgccttgaatttccttatggtatacttgctgcttcggccttgtatcatttctcgtcatctgaattgatgcaaaaggtttcagggtatcagtggtgcgacatagagaactgtgtcaagtggatggttccatttgccatggttataagggagacggggagctcaaaactgaagcacttcaggggcgtcgctgatgaagatgcacacaacatacagacccacagagacagcttggatttgctggacaaagcccgagcaaagaaagccatgttgtctgaacaaaatagggcttctcctctccccagtgggctcctcaccccgccacagagcggtaagaagcagagcagcgggccggaaatggcgtgaccaccccatccttctccaccaaagacagttgcgcgcctgctccacgttctcttctgtctgttgcagcggaggcgtgcgtttgcttttacagatatctgaatggaagagtgtttcttccacaacagaagtatttctgtggatggcatcaaacagggcaaagtgttttttattgaatgcttataggttttttttaaataagtgggtcaagtacaccagccacctccagacaccagtgcgtgctcccgatgctgctatggaaggtgctacttgacctaagggactcccacaacaacaaaagcttgaagctgtggagggccacggtggcgtggctctcctcgcaggtgttctgggctccgttgtaccaagtggagcaggtggttgcgggcaagcgttgtgcagagcccatagccagctgggcagggggctgccctctccacattatcagttgacagtgtacaatgcctttgatgaactgttttgtaagtgctgctatatctatccattttttaataaagataatactgtttttgagacaaaaaaaa

SEQ ID NO: 300 - DNA, 1962 bp, Homo sapiens
agggcgtgtggcgtcacttccggcttccttcagtccgctggtcccgagcacgagctgtgaggggattcacttgtgtgcggaactcctcggaaccatggcgtccctttcccttgcacctgttaacatctttaaggcaggagctgatgaagagagagcagagacagctcgtctgacttcttttattggtgccatcgccattggagacttggtaaagagcaccttgggacccaaaggcatggacaaaattcttctaagcagtggacgagatgcctctcttatggtaaccaatgatggtgccactattctaaaaaacattggtgttgacaatccagcagctaaagttttagttgatatgtcaagggttcaagatgatgaagttggtgatggcactacctctgttaccgttttagcagcagaattattaagggaagcagaatctttaattgcaaaaaagattcatccacagaccatcatagcgggttggagagaagccacgaaggctgcaagagaggcgctgttgagttctgcagttgatcatggttccgatgaagttaaattccgtcaagatttaatgaatattgcgggcacaacattatcctcaaaacttcttactcatcacaaagaccactttacaaagttagctgtagaagcagttctcagactgaaaggctctggcaacctggaggcaattcatattatcaagaagctaggaggaagtttggcagattcctatttagatgaaggcttcctgttggataaaaaaattggagtaaatcaaccaaaacgaattgaaaatgctaaaattcttattgcaaatactggtatggatacagacaaaataaagatatttggttcccgggtaagagttgactctacagcaaaggttgcagaaatagaacatgcggaaaaggaaaaaatgaaggagaaagttgaacgtattcttaagcatggaataaattgctttattaacaggcaattaatttataattatcctgaacagctctttggtgctgctggtgtcatggctattgagcatgcagattttgcaggtgtggaacgcctagctcttgtcacaggtggtgaaattgcctctacctttgatcacccagaactggtgaagcttggaagttgcaaacttatcgaggaagtcatgattggagaagacaaactcattcacttttctggggttgcccttggtgaggcttgtaccattgttttgcgtggtgccactcaacaaattttagatgaagcagaaagatcattgcatgatgctctttgtgttcttgcgcaaactgtaaaggactctagaacagtttatggaggaggctgttctgagatgttgatggctcatgctgtgacacagcttgccaatagaacaccaggcaaagaagctgttgcaatggagtcttatgctaaagcactgagaatgttgccaaccatcatagctgacaatgcaggctatgacagtgcagacctggtggcacagctcagggctgctcacagtgaaggcaataccactgctggattggatatgagggaaggcaccattggagatatggctatcctgggtataacagaaagttttcaagtgaagcgacaggttcttctgagtgcagctgaagcagcagaggtgattctgcgtgtggacaacatcatcaaagcggcacccaggaaacgtgtccctgatcaccacccctgttaagcattcccacgtgctgtcgatctttggaccagtttctagcaaagttgtgtttgaaagatactctattaaagaagactgtggaatctgtttatcggtgcccattatatccttaagtttggatatttagctgaccttcgctttaacataggtctaatttatttgccgtgtcattttccatacaaatcagttgatttaaaaaagttcatttctcatactgtgcattaaaataaaaatttgaacaattacttggttaaaaaaaa

SEQ ID NO: 301 - DNA, 2096 bp, Homo sapiens
ggccgttcttgcgtagggggcgggactaaggctgtcaattggtctgtttttgtgccgatcaatgagatgggtgcggtgattggcgactaccttgagagtagcgggttgaggtgtaagccctgaggaggcagcgttttctgggcttctgtctggttctctctctccagaaggttctgccggttcccccagctctgggtacccggctctgcatcgcgtcgccatgatgggccatcgtccagtgctcgtgctcagccagaacacaaagcgtgaatccggaagaaaagttcaatctggaaacatcaatgctgccaagactattgcagatatcatccgaacatgtttgggacccaagtccatgatgaagatgcttttggacccaatgggaggcattgtgatgaccaatgatggcaatgccattcttcgagagattcaagtccagcatccagcggccaagtccatgatcgaaattagccggacccaggatgaagaggttggagatgggaccacatcagtaattattcttgcaggggaaatgctgtctgtagctgagcacttcctggagcagcagatgcacccaacagtggtgatcagtgcttaccgcaaggcattggatgatatgatcagcaccctaaagaaaataagtatcccagtcgacatcagtgacagtgatatgatgctgaacatcatcaacagctctattactaccaaagccatcagtcggtggtcatctttggcttgcaacattgccctggatgctgtcaagatggtacagtttgaggagaatggtcggaaagagattgacataaaaaaatatgcaagagtggaaaagatacctggaggcatcattgaagactcctgtgtcttgcgtggagtcatgattaacaaggatgtgacccatccacgtatgcggcgctatatcaagaaccctcgcattgtgctgctggattcttctctggaatacaagaaaggagaaagccagactgacattgagattacacgagaggaggacttcacccgaattctccagatggaggaagagtacatccagcagctctgtgaggacattatccaactgaagcccgatgtggtcatcactgaaaagggcatctcagatttagctcagcactaccttatgcgggccaatatcacagccatccgcagagtccggaagacagacaataatcgcattgctagagcctgtggggcccggatagtcagccgaccagaggaactgagagaagatgatgttggaacaggagcaggcctgttggaaatcaagaaaattggagatgaatactttactttcatcactgactgcaaagaccccaaggcctgcaccattctcctccggggggctagcaaagagattctctcggaagtagaacgcaacctccaggatgccatgcaagtgtgtcgcaatgttctcctggaccctcagctggtgccagggggtggggcctccgagatggctgtggcccatgccttgacagaaaaatccaaggccatgactggtgtggaacaatggccatacagggctgttgcccaggccctagaggtcattcctcgtaccctgatccagaactgtggggccagcaccatccgtctacttacctcccttcgggccaagcacacccaggagaactgtgagacctggggtgtaaatggtgagacgggtactttggtggacatgaaggaactgggcatatgggagccattggctgtgaagctgcagacttataagacagcagtggagacggcagttctgctactgcgaattgatgacatcgtttcaggccacaaaaagaaaggcgatgaccagagccggcaaggcggggctcctgatgctggccaggagtgagtgctaggcaaggctacttcaatgcacagaaccagcagagtctccccttttcctgagccagagtgccaggaacactgtggacgtctttgttcagaagggatcaggttggggggcagcccccagtccctttctgtcccagctcagttttccaaaagacactgacatgtaattcttctctattgtaaggtttccatttagtttgcttccgatgattaaatctaagtcatttgagaaagtt

SEQ ID NO: 302 - DNA, 2349 bp, Homo sapiens
cttctccgcctccgcctcctcccgacgccggcgccgctttctggaaggttcgtgaaggcagtgagggcttaccgttattacactgcggccggccagaatccgggtccatccgtccttcccgagccaacccagacacagcggagtttgccatgcccgagaatgtggcaccccggagcggggcgactgccggggctgccggcggccgcgggaaaggcgcctatcaggaccgcgacaagccagcccagatccgcttcagcaacatttccgccgccaaagcggttgctgatgctattagaacaagccttggaccaaaaggaatggataaaatgattcaagatggaaaaggtgatgtaaccattacaaatgatggtgctaccattctgaaacaaatgcaagtattacatccagcagccagaatgctggtggagctgtctaaggctcaagatatagaagcaggagatggcaccacatcagtagtcatcattgctggctccctcttagattcttgtaccaagcttcttcagaaagggattcatccaaccatcatttctgagtcattccagaaggccctggaaaagggcattgaaatcttgactgacatgtctcgacctgtggaactgagtgacagagaaactttgttaaatagtgcaaccacttcactgaactcaaaggtggtttctcagtattcaagtctgctttctccaatgagtgtaaatgcagtgatgaaagtgattgacccagccacagccaccagtgtagatcttagagatattaaaatagttaagaagcttggtgggacaattgatgactgtgagttggtggaagggctggttctcacccaaaaagtgtcaaattctggcataaccagagttgaaaaggccaagattgggcttattcagttttgcttatctgctcccaaaacagacatggataatcaaatagtggtttctgactatgcccagatggaccgagtgctgcgagaagagagagcctatattttaaatttagtgaagcaaattaaaaaaacaggatgtaatgtccttctcatacagaaatctattctaagagatgctcttagtgatcttgcattacactttctgaataaaatgaagatcatggtgattaaggatattgaaagagaagacattgaattcatttgtaagacaattggaaccaagccagttgctcatattgaccaatttactgctgacatgctgggttctgctgagttagctgaggaggtcaatttaaatggttctggcaaactgctcaagattacaggctgtgccagccctggaaaaacagttacaattgttgttcgtggttctaacaaactggtgattgaagaagctgagcgctccattcatgatgccctatgtgttattcgttgtttagtgaagaagagggctcttattgcaggaggtggtgctccagaaatagagttggccctacgattaactgaatattcacgaacactgagtggtatggaatcctactgcgttcgtgcttttgcagatgctatggaggtcattccatctacactagctgaaaatgccggcctgaatcccatttctacagtaacagaactaagaaaccggcatgcccagggagaaaaaactgcaggcattaatgtccgaaagggtggtatttccaacattttggaggaactggttgtccagcctctgttggtatcagtcagtgctctgactcttgcaactgaaactgttcggagcattctgaaaatagatgatgtggtaaacactcgataatctggataactgactagcaccattatgatcaccagtattgtggctggaatggaagaagatcaccttggtgttccttgtttggaagattatttcctctgaatttctgggcttggtcttccagttggcatttgcctgaagttgtattgaaacaatttaatgaaaatattaaatatttggtttcaaaaggcagatttatcttctcccaacattctgttatttctgatacttttgaaaaactaataaaaactaataaaagaagcgtaaaaagtgagtttacatgttgaggaaaaaaatggcccaatatgctcatcactgataaatgctccctggccttaaaaactaccaacatataatatatatgctgtcttaaaagttaatgatccaagtggcacctctctgaacctactttggcttgggaggctgcccagttaaaacaaaaataagttaatggtacagaaagagaatgaaaaatgaaagcctccttttatcctatcatcctaattccttttcccagtaataatgactgctgtgttggattccttctgcaaataaaagtgtatacataaaaaaaaaaaaaaaa

SEQ ID NO: 303 - DNA, 1892 bp, Homo sapiens
caagcttctgggtatttctattgcgcgaggcattgtgggttgctgggcggcccggtctcggagaagaggggagagtggcgggccgctgaataagcttccaaaatgatgcccacaccagttatcctattgaaagaggggactgatagctcccaaggcatcccccagcttgtgagtaacatcagtgcctgccaggtgattgctgaggctgtaagaactaccctgggtccccgtggcatggacaagcttattgtagatggcagaggcaaagcaacaatttctaatgatggggccacaattctgaaacttcttgatgttgtccatcctgcagcaaagactttggtagacattgccaaatcccaagatgctgaggtgggtgatggcaccacctcagtgaccttgctggctgcagagtttctgaagcaggtgaaaccctatgtggaggaaggtttacacccccagatcatcattcgagctttccgcacagccacccagctggcagttaacaagatcaaagagattgctgtgaccgtgaagaaggcagataaagtggagcagaggaagctgctggaaaagtgtgccatgaccgctctgagctccaagctgatctcccagcagaaagctttctttgctaagatggtggtggatgcagtgatgatgctcgatgatttgctgcagcttaaaatgattggaatcaagaaggtacagggtggagccctcgaggattctcagctggtagctggtgttgcattcaagaagactttctcttacgctgggtttgaaatgcaacccaaaaagtaccacaatcccaagattgcccttttgaatgtcgagctcgagttgaaagctgagaaagacaatgctgagataagagtccacacagttgaggattatcaggcaattgttgatgctgagtggaacattctctatgacaagttagagaagatccatcattctggagccaaagttgtcttgtccaaactccccattggggatgtggccacccagtactttgctgacagggacatgttctgtgctggccgagtacctgaggaggatctgaagaggacaatgatggcctgtggaggctcaatccagaccagtgtgaatgctctgtcagcagatgtgctgggtcgatgccaggtgtttgaagagacccagattggaggcgagaggtacaatttttttactggctgccccaaggccaagacatgcaccttcattctccgtggcggcgccgagcagtttatggaggagacagagcggtccctgcatgatgccatcatgatcgtcaggagggccatcaagaatgattcagtggtggctggtggcggggccattgagatggaactctccaagtacctgcgggattactcaaggactattccaggaaaacagcagctgttgattggggcatatgccaaggccttggagattatcccacgccagctgtgtgacaatgctggctttgatgccacaaacattctcaacaagctgcgggctcggcatgcccaggggggtacatggtatggagtagacatcaacaacgaggacattgctgacaactttgaagctttcgtgtgggagccagctatggtgcggatcaatgcgctgacagcagcctctgaggctgcgtgcctgatcgtgtctgtagatgaaaccatcaagaacccccgctcgactgtggatgctcccacagcagcaggccggggccgtggtcgtggccgcccccactgagaggcaccccacccatcacatggctggctggctgctgggtgcacttaccctccttggcttggttacttcattttacaaggaaggggtagtaattggcccactctcttcttactggaggctatttaaataaaatgtaagacttcagataactttgtaaa

SEQ ID NO: 304 - DNA, 1895 bp, Homo sapiens
gaggcggccccacgctgctttcccagaaggctgtgcgtgctcctcgcttcctccgcggtcttccgagcggtcgcgtgaactgcttcctgcaggctggccatggcgcttcacgttcccaaggctccgggctttgcccagatgctcaaggagggagcgaaacacttttcaggattagaagaggctgtgtatagaaacatacaagcttgcaaggagcttgcccaaaccactcgtacagcatatggaccaaatggaatgaacaaaatggttatcaaccacttggagaagttgtttgtgacaaacgatgcagcaactattttaagagaactagaagtacagcatcctgctgcaaaaatgattgtaatggcttctcatatgcaagagcaagaagttggagatggcacaaactttgttctggtatttgctggagctctcctggaattagctgaagaacttctgaggattggcctgtcagtttcagaggtcatagaaggttatgaaatagcctgcagaaaagctcatgagattcttcctaatttggtatgttgttctgcaaaaaaccttcgagatattgatgaagtctcatctctacttcgtacctccataatgagtaaacaatatggtaatgaagtatttctggccaagcttattgctcaggcatgcgtatctatttttcctgattccggccatttcaatgttgataacatcagagtttgtaaaattctgggctctggtatcagttcctcttcagtattgcatggcatggtttttaagaaggaaaccgaaggtgatgtaacatctgtcaaagatgcaaaaatagcagtgtactcttgtccttttgatggcatgataacagaaactaagggaacagtgttgataaagactgctgaagaattgatgaattttagtaagggagaagaaaacctcatggatgcacaagtcaaagctattgctgatactggtgcaaatgtcgtagtaacaggtggcaaagtggcagacatggctcttcattatgcaaataaatataatatcatgttagtgaggctaaactcaaaatgggatctccgaagactttgtaaaactgttggtgctacagctcttcctagattgacacctcctgtccttgaagaaatgggacactgtgacagtgtttacctctcagaagttggagatactcaggtggtggtttttaagcatgaaaaggaagatggcgccatttctaccatagtacttcgaggctctacagacaatctgatggatgacatagaaagggcagtagacgatggtgttaatactttcaaagttcttacaagggataaacgtcttgtacccggaggtggagcaacagaaattgaattagccaaacagatcacatcatatggagagacatgtcctggacttgaacagtatgctattaagaagtttgctgaggcatttgaagctattccccgcgcactggcagaaaactctggagttaaggccaatgaagtaatctctaaactttatgcagtacatcaagaaggaaataaaaacgttggattagatattgaggctgaagtccctgctgtaaaggacatgctggaagctggtattctagatacttacctgggaaaatattgggctatcaaactcgctactaatgctgcagtcactgtacttagagtggatcagatcatcatggcaaaaccagctggtgggcccaagcctccaagtgggaagaaagactgggatgatgaccaaaatgattgaaattggcttaatttttactgtaggtgaaggctgtatttgtagtagtactcaagaatcacctgatgttttcttattctccttaaattaagagttattttgtgtttgtattcttggctggatgttataataaacatattgttactgtcaaa

SEQ ID NO: 305 - DNA, 2592 bp, Homo sapiens
accactttgtctaaggcagttgaggaagggaagtagatataatggagcttagtggcagagcagctggaatcctgagagaagagaataactttagttcagagcaggtggggaaatgagagattgagtaggaggaccaaggttgagggaagcagatcttcttagttgctgtcagcggctgatggggaagattgttggtagaaggaagtcagaatataggtacagagggataagtttgctaagaacagagatcagcaaacagcttttctgagagaaagaaacatctgcaaatgacatgctgtttctgcagtttctgctgctagctcttcttctcccaggtggtgacaatgcagacgcatcccaggaacacgtctccttccatgtcatccagatcttctcatttgtcaaccaatcctgggcacgaggtcagggctcaggatggctggacgagttgcagactcatggctgggacagtgaatcaggcacaataattttcctgcataactggtccaagggcaacttcagcaatgaagagttgtcagacctagagttgttatttcgtttctacctctttggattaactcgggagattcaagaccatgcaagtcaagattactcgaaatatccctttgaagtacaggtgaaagcgggctgtgagctgcattctggaaagagcccagaaggcttctttcaggtagctttcaacggattagatttactgagtttccagaatacaacatgggtgccatctccaggctgtggaagtttggcccaaagtgtctgtcatctactcaatcatcagtatgaaggcgtcacagaaacagtgtataatctcataagaagcacttgcccccgatttctcttgggtctcctggatgcagggaagatgtatgtacacaggcaagtgaggccagaagcctggctgtccagtcgccccagccttgggtctggccagctgttgctggtttgtcatgcctccggcttctacccaaagcctgtttgggtgacatggatgcggaatgaacaggagcaactgggcactaaacatggtgatattcttcctaatgctgatgggacatggtatcttcaggtgatcctggaggtggcatctgaggagcctgctggcctgtcttgtcgagtgagacacagcagtctaggaggccaggacatcatcctctactggggacaccacttttccatgaattggattgccttggtagtgatagtgcccttggtgattctaatagtccttgtgttatggtttaagaagcactgctcatatcaggacatcctgtgagactcttccccctgactcccccattgtgttaagaacccagcaacccaggagcctagtacaatatagtgatgccatcccgtcgactctccatttaaattgtttctctttctgcataataaacatttgttaataaaaaccaaattctaatttggaatgtttttcttggaatctccactttttatatagcactcaaccttcaaagcccatttctgatgtcatttcctccaacgatcttccttgacccatactgaacccagagagcccctcaactgttatgtgcatgcaacacttcctaccctgtgttgcagctacttgagtctttcatttcacatttttaagcttttaggaggcaaggatcatgataaatgtgcctttcctgcatatgataggctcagtgaaacacaaaacaaaacatcatatctaagttggattaactgtcatgttgacaatttttctcattatattccttcccaatgttgttgtagcattggaaatattcatgcttctctttttgtttaaatgcttcatacctagcagataaattccactctcctttagctccctcattttctccttaaacatttaaggaaaagtgcagccttgtgccttgatacacttattttctaaacacagagaattacaaatgcaaatagacagagagtgtgcaagttacatgtgatgatcagtggtgcagatatgtcacagaatacttaagaaaaggaacaagagatttggtcctcagggttggagtgggatcaaggcaaccgttgtgctgtatatggaagacaaatttcctaaaggactgtgttatctgagatagccttggctaaactttagtccctttaggtttcattcactaattcaactaatattttttgggtactgagttgagacaggcacatacagcttctaaactggtggtggataaaacaaatgagattgtgtccactctcctgaagttgcaatgtttgcttcctcaatctgtccatgtttcttttctattgttttcatgtttttatttatttcaaaaaattttaaatagattttattgatgtataatttatagtaaaatttgaatctttaagtgtacagttctatttattttgataattatataagcccatgtaaacaaaatcacaatcaagatattaaatgtcataacccctcatacctgtttgtagtcaagcacaccaacaacctggcattcttgcaactactgatatactttatgtcacttaagcttaaacttgtattttctatgattttattaagatggaaataaacatatctacttggta

SEQ ID NO: 306 - DNA, 1290 bp, Homo sapiens
tgtgctgctctctgtggggtcctgtagacccagagaggctcagctgcactcgcccggctgggagagctgggtgtggggaacatggccgggcctccgaggctcctgctgctgcccctgcttctggcgctggctcgcggcctgcctggggccctggctgcccaagaggtgcagcagtctccccactgcacgactgtccccgtgggagcctccgtcaacatcacctgctccaccagcgggggcctgcgtgggatctacctgaggcagctcgggccacagccccaagacatcatttactacgaggacggggtggtgcccactacggacagacggttccggggccgcatcgacttctcagggtcccaggacaacctgactatcaccatgcaccgcctgcagctgtcggacactggcacctacacctgccaggccatcacggaggtcaatgtctacggctccggcaccctggtcctggtgacagaggaacagtcccaaggatggcacagatgctcggacgccccaccaagggcctctgccctccctgccccaccgacaggctccgccctccctgacccgcagacagcctctgccctccctgacccgccagcagcctctgccctccctgcggccctggcggtgatctccttcctcctcgggctgggcctgggggtggcgtgtgtgctggcgaggacacagataaagaaactgtgctcgtggcgggataagaattcggcggcatgtgtggtgtacgaggacatgtcgcacagccgctgcaacacgctgtcctcccccaaccagtaccagtgacccagtgggcccctgcacgtcccgcctgtggtccccccagcaccttccctgccccaccatgccccccaccctgccacacccctcaccctgctgtcctcccacggctgcagcagagtttgaagggcccagccgtgcccagctccaagcagacacacaggcagtggccaggccccacggtgcttctcagtggacaatgatgcctcctccgggaagccttccctgcccagcccacgccgccaccgggaggaagcctgactgtcctttggctgcatctcccgaccatggccaaggagggcttttctgtgggatgggcctgggcacgcggccctctcctgtcagtgccggcccacccaccagcaggcccccaacccccaggcagcccggcagaggacgggaggagaccagtcccccacccagccgtaccagaaataaaggcttctgtgcttcctttaaaaaaaaaaaaaaaaaaaaaaaaaaaaaaaaaaa

SEQ ID NO: 307 - DNA, 2475 bp, Homo sapiens
gacgggggcgccccggcctaagcgggactaggagggcgcgccacccgcttccgctgcccgccggggaatcccccgggctggcgcgcagggaagttcccgaacgcgcgggcataaaagggcagccggcgcccgcgcgccacagctctgcagctcgtggcagcggcgcagcgctccagccatgtcgcgcggcctccagcttctgctcctgagctgcgcctacagcctggctcccgcgacgccggaggtgaaggtggcttgctccgaagatgtggacttgccctgcaccgccccctgggatccgcaggttccctacacggtctcctgggtcaagttattggagggtggtgaagagaggatggagacaccccaggaagaccacctcaggggacagcactatcatcagaaggggcaaaatggttctttcgacgcccccaatgaaaggccctattccctgaagatccgaaacactaccagctgcaactcggggacatacaggtgcactctgcaggacccggatgggcagagaaacctaagtggcaaggtgatcttgagagtgacaggatgccctgcacagcgtaaagaagagacttttaagaaatacagagcggagattgtcctgctgctggctctggttattttctacttaacactcatcattttcacttgttttgcacggctacagagtatcttcccagatttttctaaagctggcatggaacgagcttttctcccagttacctccccaaataagcatttagggctagtgactcctcacaagacagaactggtatgagcaggatttctgcaggttcttcttcctgaagctgaggctcaggggtgtgcctgtctgttacactggaggagagaagaatgagcctacgctgaagatggcatcctgtgaagtccttcacctcactgaaaacatctggaaggggatcccaccccattttctgtgggcaggcctcgaaaaccatcacatgaccacatagcatgaggccactgctgcttctccatggccaccttttcagcgatgtatgcagctatctggtcaacctcctggacattttttcagtcatataaaagctatggtgagatgcagctggaaaagggtcttgggaaatatgaatgcccccagctggcccgtgacagactcctgaggacagctgtcctcttctgcatcttggggacatctctttgaattttctgtgttttgctgtaccagcccagatgttttacgtctgggagaaattgacagatcaagctgtgagacagtgggaaatatttagcaaataatttcctggtgtgaaggtcctgctattactaaggagtaatctgtgtacaaagaaataacaagtcgatgaactattccccagcagggtcttttcatctgggaaagacatccataaagaagcaataaagaagagtgccacatttatttttatatctatatgtacttgtcaaagaaggtttgtgtttttctgcttttgaaatctgtatctgtagtgagatagcattgtgaactgacaggcagcctggacatagagagggagaagaagtcagagagggtgacaagatagagagctatttaatggccggctggaaatgctgggctgacggtgcagtctgggtgctcgcccacttgtcccactatctgggtgcatgatcttgagcaagttccttctggtgtctgctttctccattgtaaaccacaaggctgttgcatgggctaatgaagatcatatacgtgaaaattatttgaaaacatataaagcactatacagattcgaaactccattgagtcattatccttgctatgatgatggtgttttggggatgagagggtgctatccatttctcatgttttccattgtttgaaacaaagaaggttaccaagaagcctttcctgtagccttctgtaggaattcttttggggaagtgaggaagccaggtccacggtctgttcttgaagcagtagcctaacacactccaagatatggacacacgggagccgctggcagaagggacttcacgaagtgttgcatggatgttttagccattgttggctttcccttatcaaacttgggcccttcccttcttggtttccaaaggcattttattgcttgagttatatgttcactgtccccctaatattagggagtaaaacggataccaagttgatttagtgtttttacctctgtcttggctttcatgttattaaacgtatgcatgtgaagaaagggtgtttttctgttttatattcaactcataagactttgggataggaaaaatgagtaatggttactaggcttaatacctgggtgattacataatctgtacaatgaacccccatgatgtaagtttacctatgtaacaaacctgcacttatacccatgaacttaaaatgaaagttaaaaataaaaaacatatacaaataaaaaaatcccgactttgggatgagtgctaggatgttgtaaa

SEQ ID NO: 308 - DNA, 1424 bp, Homo sapiens
gcgactgtctccgccgagcccccggggccaggtgtcccgggcgcgccacgatgcggccgcggctgtggctcctcttggccgcgcagctgacagttctccatggcaactcagtcctccagcagacccctgcatacataaaggtgcaaaccaacaagatggtgatgctgtcctgcgaggctaaaatctccctcagtaacatgcgcatctactggctgagacagcgccaggcaccgagcagtgacagtcaccacgagttcctggccctctgggattccgcaaaagggactatccacggtgaagaggtggaacaggagaagatagctgtgtttcgggatgcaagccggttcattctcaatctcacaagcgtgaagccggaagacagtggcatctacttctgcatgatcgtcgggagccccgagctgaccttcgggaagggaactcagctgagtgtggttgatttccttcccaccactgcccagcccaccaagaagtccaccctcaagaagagagtgtgccggttacccaggccagagacccagaagggcccactttgtagccccatcacccttggcctgctggtggctggcgtcctggttctgctggtttccctgggagtggccatccacctgtgctgccggcggaggagagcccggcttcgtttcatgaaacaattttacaaatgagcagagaatacggttttggtgtcctgctacaaaaagacatcggtcagtaacgagcacgatgtggaaaaatgagagaagggacacattcaaccctggagagttcaatggctgctgaagctgcctgcttttcactgctgcaaggcctttctgtgtgtgatgtgcatgggagcaacttgttcgtgggtcatcgggaatactagggagaaggtttcattgcccccagggcacttcacagagtgtgctggaggactgagtaagaaatgctgcccatgccaccgcttccggctcctgtgctttccctgaactgggacctttagtggtggccatttagccaccatctttgcaggttgctttgccctggtagggcagtaacattgggtcctgggtctttcatggggtgatgctgggctggctccctcttggtcttcccaggctggggctgaccttcctcgcagagaggccaggtgcaggttgggaatgaggcttgctgagaggggctgtccagttcccagaaggcatatcagtctctgagggcttcctttggggccgggaacttgcgggtttgaggataggagttcacttcatcttctcagctcccatttctactcttaagtttctcagctcccatttctactctcccatggcttaatgcttctttcattttctgtttgttttatacaaatgtcttagttgtacaaataaagtcccaggttaaagataacaaacggctcctgtgacata

SEQ ID NO: 309 - DNA, 1482 bp, Homo sapiens
gcgactgtctccgccgagcccccggggccaggtgtcccgggcgcgccacgatgcggccgcggctgtggctcctcttggccgcgcagctgacagttctccatggcaactcagtcctccagcagacccctgcatacataaaggtgcaaaccaacaagatggtgatgctgtcctgcgaggctaaaatctccctcagtaacatgcgcatctactggctgagacagcgccaggcaccgagcagtgacagtcaccacgagttcctggccctctgggattccgcaaaagggactatccacggtgaagaggtggaacaggagaagatagctgtgtttcgggatgcaagccggttcattctcaatctcacaagcgtgaagccggaagacagtggcatctacttctgcatgatcgtcgggagccccgagctgaccttcgggaagggaactcagctgagtgtggttgatttccttcccaccactgcccagcccaccaagaagtccaccctcaagaagagagtgtgccggttacccaggccagagacccagaagggcccactttgtagccccatcacccttggcctgctggtggctggcgtcctggttctgctggtttccctgggagtggccatccacctgtgctgccggcggaggagagcccggcttcgtttcatgaaacagaaattcaatatcgtttgcctgaaaataagtggtttcacaacttgctgttgttttcagattttacaaatgagcagagaatacggttttggtgtcctgctacaaaaagacatcggtcagtaacgagcacgatgtggaaaaatgagagaagggacacattcaaccctggagagttcaatggctgctgaagctgcctgcttttcactgctgcaaggcctttctgtgtgtgatgtgcatgggagcaacttgttcgtgggtcatcgggaatactagggagaaggtttcattgcccccagggcacttcacagagtgtgctggaggactgagtaagaaatgctgcccatgccaccgcttccggctcctgtgctttccctgaactgggacctttagtggtggccatttagccaccatctttgcaggttgctttgccctggtagggcagtaacattgggtcctgggtctttcatggggtgatgctgggctggctccctcttggtcttcccaggctggggctgaccttcctcgcagagaggccaggtgcaggttgggaatgaggcttgctgagaggggctgtccagttcccagaaggcatatcagtctctgagggcttcctttggggccgggaacttgcgggtttgaggataggagttcacttcatcttctcagctcccatttctactcttaagtttctcagctcccatttctactctcccatggcttaatgcttctttcattttctgtttgttttatacaaatgtcttagttgtacaaataaagtcccaggttaaagataacaaacggctcctgtgacata

SEQ ID NO: 310 - DNA, 1255 bp, Homo sapiens
ggaggccggggcggggcgggcgcagccggcgctgagcttgcagggccgctcccctcacccgcccccttcgagtccccgggcttcgccccacccggcccgtgggggagtatctgtcctgccgccttcgcccacgccctgcactccgggaccgtccctgcgcgctctgggcgcaccatggcccgcggggctgcgctggcgctgctgctcttcggcctgctgggtgttctggtcgccgccccggatggtggtttcgatttatccgatgcccttcctgacaatgaaaacaagaaacccactgcaatccccaagaaacccagtgctggggatgactttgacttaggagatgctgttgttgatggagaaaatgacgacccacgaccaccgaacccacccaaaccgatgccaaatccaaaccccaaccaccctagttcctccggtagcttttcagatgctgaccttgcggatggcgtttcaggtggagaaggaaaaggaggcagtgatggtggaggcagccacaggaaagaaggggaagaggccgacgccccaggcgtgatccccgggattgtgggggctgtcgtggtcgccgtggctggagccatctctagcttcattgcttaccagaaaaagaagctatgcttcaaagaaaatgcagaacaaggggaggtggacatggagagccaccggaatgccaacgcagagccagctgttcagcgtactcttttagagaaatagaagattgtcggcagaaacagcccaggcgttggcagcagggttagaacagctgcctgaggctcctccctgaaggacacctgcctgagagcagagatggaggccttctgttcacggcggattctttgttttaatcttgcgatgtgctttgcttgttgctgggcggatgatgtttactaacgatgaattttacatccaaagggggataggcacttggacccccattctccaaggcccgggggggcggtttcccatgggatgtgaaaggctggccattattaagtccctgtaactcaaatgtcaaccccaccgaggcacccccccgtcccccagaatcttggctgtttacaaatcacgtgtccatcgagcacgtctgaaacccctggtagccccgacttctttttaattaaaataaggtaagcccttcaatttgtttcttcaatatttctttcatttgtagggatatttgtttttcatatcagactaataaaaagaaattagaaaccaaaaaaaaaaaaaaaaaaaa

SEQ ID NO: 311 - DNA, 2235 bp, Homo sapiens
gagcctgggcagtgcacggggcctgggtggggggtgcgggtgtgggtggggacctgcggccttcgagtccgcggccttcgagtcctggggcggcggcggcggctgcaggcacgggcacgggcacggggcggggtgcttagggtgcaggaggcgcgcgcctagcggcggagtgtggcgtgaggccgggcccgcgccgccatgaacctagagcggctgcggaagcgcgtccggcagtacctcgaccagcaacagtatcaaagtgctctattttgggcagataaagtagcttcactctctcgtgaagaaccccaggacatctattggttggctcagtgtctttacctgacagcacaatatcacagagccgcccatgcacttcggtcacgaaaactggacaaattgtatgaagcatgtcgttaccttgcagctaggtgccattatgctgcaaaagagcaccagcaggcccttgatgttcttgacatggaagagcccatcaataaaagattatttgaaaaatacttgaaggacgaaagtggcttcaaagatccttccagcgactgggaaatgtcacagtcttcaataaagagttctatctgtcttctacgcgggaaaatctatgatgctctagataaccgaaccctggctacctacagctacaaagaagctttgaagcttgatgtctactgttttgaagcgttcgatcttttaacatcacatcacatgctgacagcacaagaagaaaaagaacttcttgaatcactaccccttagcaagctgtgtaatgaagaacaggaattgctgcgttttctatttgagaacaaattgaaaaaatataataagcctagtgaaacggtcatccctgaatctgtagatggcttgcaagagaatctggatgtggtagtgtctttagctgagagacattattataactgtgattttaaaatgtgctacaagcttacttctgtagtaatggagaaagatcctttccatgcaagttgtttacctgtacatatagggacgcttgtagagctgaataaagccaatgaacttttctatctttctcataaactggtggatttatatcctagtaatcctgtgtcttggtttgcagtgggatgttactatctcatggtcggtcataaaaatgaacatgccagaagatatctcagcaaagccacaacacttgagaaaacctatggacctgcatggatagcctatggacattcatttgcggtggagagtgagcacgaccaagcgatggctgcttacttcacagcagcacagctgatgaaagggtgtcatttgcctatgctgtatattggattagaatatggtttgaccaataactcaaaactagctgaaaggttcttcagccaagctctgagcattgcaccggaagacccttttgttatgcatgaggtcggcgtggttgcatttcagaatggagaatggaaaacagccgaaaaatggtttcttgatgctttggaaaaaattaaagcaattgggaacgaggtaacagttgacaaatgggaacctttgttgaacaacttggggcatgtctgcagaaaacttaaaaagtatgctgaggccttggattaccaccgtcaggcactggtgttgattcctcagaacgcatccacctactctgctattggatatatccacagtctgatgggcaactttgaaaatgctgtggactacttccacacagcccttggtcttaggcgagatgatacattttctgttacaatgcttggtcattgcatcgaaatgtacattggtgattctgaagcttatattggagcagacattaaagacaaattaaaatgttatgactttgatgtgcatacaatgaagacactaaaaaacattatttcacctccgtgggatttcagggaatttgaagtagaaaaacagactgcagaagaaacggggcttacgccattggaaacctcaaggaaaactccagattccagaccttccttggaagaaacctttgaaattgaaatgaatgaaagtgacatgatgttagagacatctatgtcagaccacagcacgtgactccagtcagtggtcctggtcccactgtcccagtgtaggaacagagacccgccttaagagactggatcgcacacctttgcaacagatgtgttctgattctctgaacctacaaaatagttatacatagtggaataaagaaggtaaaccatcaaaaaaaaaaaaaaaaaaaaaaaa

SEQ ID NO: 312 - DNA, 1235 bp, Homo sapiens
ggggggggggggcacttggcttcaaagctggctcttggaaattgagcggagagcgacgcggttgttgtagctgccgctgcggccgccgcggaataataagccgggatctaccatacccattgactaactatggaagattataccaaaatagagaaaattggagaaggtacctatggagttgtgtataagggtagacacaaaactacaggtcaagtggtagccatgaaaaaaatcagactagaaagtgaagaggaaggggttcctagtactgcaattcgggaaatttctctattaaaggaacttcgtcatccaaatatagtcagtcttcaggatgtgcttatgcaggattccaggttatatctcatctttgagtttctttccatggatctgaagaaatacttggattctatccctcctggtcagtacatggattcttcacttgttaagagttatttataccaaatcctacaggggattgtgttttgtcactctagaagagttcttcacagagacttaaaacctcaaaatctcttgattgatgacaaaggaacaattaaactggctgattttggccttgccagagcttttggaatacctatcagagtatatacacatgaggtagtaacactctggtacagatctccagaagtattgctggggtcagctcgttactcaactccagttgacatttggagtataggcaccatatttgctgaactagcaactaagaaaccacttttccatggggattcagaaattgatcaactcttcaggattttcagagctttgggcactcccaataatgaagtgtggccagaagtggaatctttacaggactataagaatacatttcccaaatggaaaccaggaagcctagcatcccatgtcaaaaacttggatgaaaatggcttggatttgctctcgaaaatgttaatctatgatccagccaaacgaatttctggcaaaatggcactgaatcatccatattttaatgatttggacaatcagattaagaagatgtagctttctgacaaaaagtttccatatgttatgtcaacagatagttgtgtttttattgttaactcttgtctatttttgtcttatatatatttctttgttatcaaacttcagctgtacttcgtcttctaatttcaaaaatataacttaaaaatgtaaatattctatatgaatttaaatataattctgtaaatgtgaaaaaaaaaaaaaaaaaaaaa

SEQ ID NO: 313 - DNA, 948 bp, Homo sapiens
ccattgactaactatggaagattataccaaaatagagaaaattggagaaggtacctatggagttgtgtataagggtagacacaaaactacaggtcaagtggtagccatgaaaaaaatcagactagaaagtgaagaggaaggggttcctagtactgcaattcgggaaatttctctattaaaggaacttcgtcatccaaatatagtcagtcttcaggatgtgcttatgcaggattccaggttatatctcatctttgagtttctttccatggatctgaagaaatacttggattctatccctcctggtcagtacatggattcttcacttgttaaggtagtaacactctggtacagatctccagaagtattgctggggtcagctcgttactcaactccagttgacatttggagtataggcaccatatttgctgaactagcaactaagaaaccacttttccatggggattcagaaattgatcaactcttcaggattttcagagctttgggcactcccaataatgaagtgtggccagaagtggaatctttacaggactataagaatacatttcccaaatggaaaccaggaagcctagcatcccatgtcaaaaacttggatgaaaatggcttggatttgctctcgaaaatgttaatctatgatccagccaaacgaatttctggcaaaatggcactgaatcatccatattttaatgatttggacaatcagattaagaagatgtagctttctgacaaaaagtttccatatgttatgtcaacagatagttgtgtttttattgttaactcttgtctatttttgtcttatatatatttctttgttatcaaacttcagctgtacttcgtcttctaatttcaaaaatataacttaaaaatgtaaatattctatatgaatttaaatataattctgtaaatgtgaaaaaaaaaaaaaaaaaaaaa

SEQ ID NO: 314 - DNA, 1697 bp, Homo sapiens
gaggcgtaagccaggcgtgttaaagccggtcggaactgctccggagggcacgggctccgtaggcaccaactgcaaggacccctccccctgcgggcgctcccatggcacagttcgcgttcgagagtgacctgcactcgctgcttcagctggatgcacccatccccaatgcaccccctgcgcgctggcagcgcaaagccaaggaagccgcaggcccggccccctcacccatgcgggccgccaaccgatcccacagcgccggcaggactccgggccgaactcctggcaaatccagttccaaggttcagaccactcctagcaaacctggcggtgaccgctatatcccccatcgcagtgctgcccagatggaggtggccagcttcctcctgagcaaggagaaccagcctgaaaacagccagacgcccaccaagaaggaacatcagaaagcctgggctttgaacctgaacggttttgatgtagaggaagccaagatccttcggctcagtggaaaaccacaaaatgcgccagagggttatcagaacagactgaaagtactctacagccaaaaggccactcctggctccagccggaagacctgccgttacattccttccctgccagaccgtatcctggatgcgcctgaaatccgaaatgactattacctgaaccttgtggattggagttctgggaatgtactggccgtggcactggacaacagtgtgtacctgtggagtgcaagctctggtgacatcctgcagcttttgcaaatggagcagcctggggaatatatatcctctgtggcctggatcaaagagggcaactacttggctgtgggcaccagcagtgctgaggtgcagctatgggatgtgcagcagcagaaacggcttcgaaatatgaccagtcactctgcccgagtgggctccctaagctggaacagctatatcctgtccagtggttcacgttctggccacatccaccaccatgatgttcgggtagcagaacaccatgtggccacactgagtggccacagccaggaagtgtgtgggctgcgctgggccccagatggacgacatttggccagtggtggtaatgataacttggtcaatgtgtggcctagtgctcctggagagggtggctgggttcctctgcagacattcacccagcatcaaggggctgtcaaggccgtagcatggtgtccctggcagtccaatgtcctggcaacaggagggggcaccagtgatcgacacattcgcatctggaatgtgtgctctggggcctgtctgagtgccgtggatgcccattcccaggtgtgctccatcctctggtctccccattacaaggagctcatctcaggccatggctttgcacagaaccagctagttatttggaagtacccaaccatggccaaggtggctgaactcaaaggtcacacatcccgggtcctgagtctgaccatgagcccagatggggccacagtggcatccgcagcagcagatgagaccctgaggctatggcgctgttttgagttggaccctgcgcggcggcgggagcgggagaaggccagtgcagccaaaagcagcctcatccaccaaggcatccgctgaagaccaacccatcacctcagttgttttttatttttctaataaagtcatgtctcccttcatgttttttttttaaaaaaaaaaaaaaaaaaaaaaaaa

SEQ ID NO: 315 - DNA, 3717 bp, Homo sapiens
gaacagcgaagacagcgtgagcctgggccgttgcctcgaggctctcgcccggcttctcttgccgacccgccacgtttgtttggatttaatcttcaggttgccggcgcccgcccgcccgctggcctcgcggtgtgagagggaagcacccgtgcctgtggctggtggctggcgcctggagggtccgcacacccgcccggccgcgccgcttgcccgcggcagccgcgtccctgaaccgcggagtcgtgtttgtgtttgacccgcgggcgccggtggcgcgcggccgaggccggtgtcggcggggcggggcggtcgcggcggaggcagaggaagagggagcgggagctctgcgaggccgggcgccgccatggaactgggcccggagcccccgcaccgccgccgcctgctcttcgcctgcagcccccctcccgcgtcgcagcccgtcgtgaaggcgctatttggcgcttcagccgccgggggactgtcgcctgtcaccaacctgaccgtcactatggaccagctgcagggtctgggcagtgattatgagcaaccactggaggtgaagaacaacagtaatctgcagagaatgggctcctccgagtcaacagattcaggtttctgtctagattctcctgggccattggacagtaaagaaaaccttgaaaatcctatgagaagaatacattccctacctcagaagctgttgggatgtagtccagctctgaagaggagccattctgattctcttgaccatgacatctttcagctcatcgacccagatgagaacaaggaaaatgaagcctttgagtttaagaagccagtaagacctgtatctcgtggctgcctgcactctcatggactccaggagggtaaagatctcttcacacagaggcagaactctgccccagctcggatgctttcctcaaatgaaagagatagcagtgaaccagggaatttcattcctctttttacaccccagtcacctgtgacagccactttgtctgatgaggatgatggcttcgtggaccttctcgatggagagaatctgaagaatgaggaggagaccccctcgtgcatggcaagcctctggacagctcctctcgtcatgagaactacaaaccttgacaaccgatgcaagctgtttgactccccttccctgtgtagctccagcactcggtcagtgttgaagagaccagaacgatctcaagaggagtctccacctggaagtacaaagaggaggaagagcatgtctggggccagccccaaagagtcaactaatccagagaaggcccatgagactcttcatcagtctttatccctggcatcttcccccaaaggaaccattgagaacattttggacaatgacccaagggaccttataggagacttctccaagggttatctctttcatacagttgctgggaaacatcaggatttaaaatacatctctccagaaattatggcatctgttttgaatggcaagtttgccaacctcattaaagagtttgttatcatcgactgtcgatacccatatgaatacgagggaggccacatcaagggtgcagtgaacttgcacatggaagaagaggttgaagacttcttattgaagaagcccattgtacctactgatggcaagcgtgtcattgttgtgtttcactgcgagttttcttctgagagaggtccccgcatgtgccggtatgtgagagagagagatcgcctgggtaatgaataccccaaactccactaccctgagctgtatgtcctgaaggggggatacaaggagttctttatgaaatgccagtcttactgtgagccccctagctaccggcccatgcaccacgaggactttaaagaagacctgaagaagttccgcaccaagagccggacctgggcaggggagaagagcaagagggagatgtacagtcgtctgaagaagctctgagggcggcaggaccagccagcagcagcccaagcttccctccatccccctttaccctctttgctgcagagaaacttaagcaaaggggacagctgtgtgacatttggagagggggcctgggacttccatgccttaaacctacctcccacactcccaaggttggagcccagggcatcttgctggctacgcctcttctgtccctgttagacgtcctccgtccatatcagaactgtgccacaatgcagttctgagcaccgtgtcaagctgctctgagccacagtgggatgaaccagccggggccttatcgggctccagccatctcatgaggggagaggagacggaggggagtagagaagttacacagaaatgctgctggccaaatagcaaagacaacctgggaaggaaaggtctttgtgggataatccatatgtttaatttattcaacttcatcaatcactttattttatttttttttctaactcctggagacttattttactgcttcattaggttgaaatactgccattctaggtagggttttattatcccagggactacctcggcttttaatttaaaaaaaaaaaagaagtgggtaagaaaatgcaaacctgttataagttatcggacagaaagctaggtgctctgtcacccccaggaggcgctgtggtactggggctgctgctatttaagccaagaactgaggtcctggtgagagcgttggacccaggcttggctgcctgacataagctaaatctcccagacccaccactggctaccgatatctatttggtgggaggtgtggccctgttcttcctcaccccagttccatgacattggctggtataggagccacagtcaggaaagcacttgaggcagcatctgttgggccacccccggctcagtgctggaatgttgcagtgtaggtttcccagggaaggggggtgggggtaggtgggctccacaggatgggggaggagcatgtccactgagtatcttccttatgttgctgtgatattgatagcttttattttctaatttttaaaaaatggtcatattatgagtcaaagagtatcaaatcagtgttggatggaccacccaagggtgaggagaggggctggaagccctgggcattaggagaagggagtgggtgctggcatggacatgactggatagaattttctcaggagggagcttggtggattttgaaggtaaaactttctgggtttatcatgttttaattttagagacagggagtgatgaatcatcaccggttgtccccttatctaactccataaaagtgggaatttcaaaagaacacctcatccaaggagctggggcagacttcattgattctagagagacctgtttcagtgcctactcatccctgccctctggtgccagcctccttaccatcacggcttcactgaggtgtaggtgggtttttcttaaacaggagacagtctctcccctcttacctcaacttcttggggtgggaatcagtgatactggagatggctagttgctgtgttacgggtttgagttacatttggctataaaacaatcttgttgggaaaaatgtgggggagaggacttcttcctacacgcgcattgagacagattccaactggttaatgatattgtttgtaagaaagagattctgttggttgactgcctaaagagaaaggtgggatggccttcagattataccagcttagctagcattactaaccaactgttggaagctctgaaaataaaagatcttgaacccataaaaaaaaaaa

SEQ ID NO: 316 - DNA, 3597 bp, Homo sapiens
gaacagcgaagacagcgtgagcctgggccgttgcctcgaggctctcgcccggcttctcttgccgacccgccacgtttgtttggatttaatcttcaggttgccggcgcccgcccgcccgctggcctcgcggtgtgagagggaagcacccgtgcctgtggctggtggctggcgcctggagggtccgcacacccgcccggccgcgccgcttgcccgcggcagccgcgtccctgaaccgcggagtcgtgtttgtgtttgacccgcgggcgccggtggcgcgcggccgaggccggtgtcggcggggcggggcggtcgcggcggaggcagaggaagagggagcgggagctctgcgaggccgggcgccgccatggaactgggcccggagcccccgcaccgccgccgcctgctcttcgcctgcagcccccctcccgcgtcgcagcccgtcgtgaaggcgctatttggcgcttcagccgccgggggactgtcgcctgtcaccaacctgaccgtcactatggaccagctgcagggtctgggcagtgattatgagcaaccactggaggtgaagaacaacagtaatctgcagagaatgggctcctccgagtcaacagattcaggtttctgtctagattctcctgggccattggacagtaaagaaaaccttgaaaatcctatgagaagaatacattccctacctcagaagctgttgggatgtagtccagctctgaagaggagccattctgattctcttgaccatgacatctttcagctcatcgacccagatgagaacaaggaaaatctttcctcaaatgaaagagatagcagtgaaccagggaatttcattcctctttttacaccccagtcacctgtgacagccactttgtctgatgaggatgatggcttcgtggaccttctcgatggagagaatctgaagaatgaggaggagaccccctcgtgcatggcaagcctctggacagctcctctcgtcatgagaactacaaaccttgacaaccgatgcaagctgtttgactccccttccctgtgtagctccagcactcggtcagtgttgaagagaccagaacgatctcaagaggagtctccacctggaagtacaaagaggaggaagagcatgtctggggccagccccaaagagtcaactaatccagagaaggcccatgagactcttcatcagtctttatccctggcatcttcccccaaaggaaccattgagaacattttggacaatgacccaagggaccttataggagacttctccaagggttatctctttcatacagttgctgggaaacatcaggatttaaaatacatctctccagaaattatggcatctgttttgaatggcaagtttgccaacctcattaaagagtttgttatcatcgactgtcgatacccatatgaatacgagggaggccacatcaagggtgcagtgaacttgcacatggaagaagaggttgaagacttcttattgaagaagcccattgtacctactgatggcaagcgtgtcattgttgtgtttcactgcgagttttcttctgagagaggtccccgcatgtgccggtatgtgagagagagagatcgcctgggtaatgaataccccaaactccactaccctgagctgtatgtcctgaaggggggatacaaggagttctttatgaaatgccagtcttactgtgagccccctagctaccggcccatgcaccacgaggactttaaagaagacctgaagaagttccgcaccaagagccggacctgggcaggggagaagagcaagagggagatgtacagtcgtctgaagaagctctgagggcggcaggaccagccagcagcagcccaagcttccctccatccccctttaccctctttgctgcagagaaacttaagcaaaggggacagctgtgtgacatttggagagggggcctgggacttccatgccttaaacctacctcccacactcccaaggttggagcccagggcatcttgctggctacgcctcttctgtccctgttagacgtcctccgtccatatcagaactgtgccacaatgcagttctgagcaccgtgtcaagctgctctgagccacagtgggatgaaccagccggggccttatcgggctccagccatctcatgaggggagaggagacggaggggagtagagaagttacacagaaatgctgctggccaaatagcaaagacaacctgggaaggaaaggtctttgtgggataatccatatgtttaatttattcaacttcatcaatcactttattttatttttttttctaactcctggagacttattttactgcttcattaggttgaaatactgccattctaggtagggttttattatcccagggactacctcggcttttaatttaaaaaaaaaaaagaagtgggtaagaaaatgcaaacctgttataagttatcggacagaaagctaggtgctctgtcacccccaggaggcgctgtggtactggggctgctgctatttaagccaagaactgaggtcctggtgagagcgttggacccaggcttggctgcctgacataagctaaatctcccagacccaccactggctaccgatatctatttggtgggaggtgtggccctgttcttcctcaccccagttccatgacattggctggtataggagccacagtcaggaaagcacttgaggcagcatctgttgggccacccccggctcagtgctggaatgttgcagtgtaggtttcccagggaaggggggtgggggtaggtgggctccacaggatgggggaggagcatgtccactgagtatcttccttatgttgctgtgatattgatagcttttattttctaatttttaaaaaatggtcatattatgagtcaaagagtatcaaatcagtgttggatggaccacccaagggtgaggagaggggctggaagccctgggcattaggagaagggagtgggtgctggcatggacatgactggatagaattttctcaggagggagcttggtggattttgaaggtaaaactttctgggtttatcatgttttaattttagagacagggagtgatgaatcatcaccggttgtccccttatctaactccataaaagtgggaatttcaaaagaacacctcatccaaggagctggggcagacttcattgattctagagagacctgtttcagtgcctactcatccctgccctctggtgccagcctccttaccatcacggcttcactgaggtgtaggtgggtttttcttaaacaggagacagtctctcccctcttacctcaacttcttggggtgggaatcagtgatactggagatggctagttgctgtgttacgggtttgagttacatttggctataaaacaatcttgttgggaaaaatgtgggggagaggacttcttcctacacgcgcattgagacagattccaactggttaatgatattgtttgtaagaaagagattctgttggttgactgcctaaagagaaaggtgggatggccttcagattataccagcttagctagcattactaaccaactgttggaagctctgaaaataaaagatcttgaacccataaaaaaaaaaa

SEQ ID NO: 317 - DNA, 5593 bp, Homo sapiens
aatcgctcggcctcccccatcccccggtaacggtcgctggtgagtttaaatgagcaggggctggccgggccggagccgctacagggggggcctgaggcactgcagaaagtgggcctgagcctcgaggatgacggtgctgcaggaacccgtccaggctgctatatggcaagcactaaaccactatgcttaccgagatgcggttttcctcgcagaacgcctttatgcagaagtacactcagaagaagccttgtttttactggcaacctgttattaccgctcaggaaaggcatataaagcatatagactcttgaaaggacacagttgtactacaccgcaatgcaaatacctgcttgcaaaatgttgtgttgatctcagcaagcttgcagaaggggaacaaatcttatctggtggagtgtttaataagcagaaaagccatgatgatattgttactgagtttggtgattcagcttgctttactctttcattgttgggacatgtatattgcaagacagatcggcttgccaaaggatcagaatgttaccaaaagagccttagtttaaatcctttcctctggtctccctttgaatcattatgtgaaataggtgaaaagccagatcctgaccaaacatttaaattcacatctttacagaactttagcaactgtctgcccaactcttgcacaacacaagtacctaatcatagtttatctcacagacagcctgagacagttcttacggaaacaccccaggacacaattgaattaaacagattgaatttagaatcttccaattcaaagtactccttgaatacagattcctcagtgtcttatattgattcagctgtaatttcacctgatactgtcccactgggaacaggaacttccatattatctaaacaggttcaaaataaaccaaaaactggtcgaagtttattaggaggaccagcagctcttagtccattaaccccaagttttgggattttgccattagaaaccccaagtcctggagatggatcctatttacaaaactacactaatacacctcctgtaattgatgtgccatccaccggagccccttcaaaaaagtctgttgccagaatcggccaaactggaacaaagtctgtcttctcacagagtggaaatagccgagaggtaactccaattcttgcacaaacacaaagttctggtccacaaacaagtacaacacctcaggtattgagccccactattacatctcccccaaacgcactgcctcgaagaagttcacgactctttactagtgacagctccacaaccaaggagaatagcaaaaaattaaaaatgaagtttccacctaaaatcccaaacagaaaaacaaaaagtaaaactaataaaggaggaataactcaacctaacataaatgatagcctggaaattacaaaattggactcttccatcatttcagaagggaaaatatccacaatcacacctcagattcaggcctttaatctacaaaaagcagcagcagaaggtttgatgagccttcttcgtgaaatggggaaaggttatttagctttgtgttcatacaactgcaaagaagctataaatattttgagccatctaccttctcaccactacaatactggttgggtactgtgccaaattggaagggcctattttgaactttcagagtacatgcaagctgaaagaatattctcagaggttagaaggattgagaattatagagttgaaggcatggagatctactctacaacactttggcatcttcaaaaagatgttgctctttcagttctgtcaaaagacttaacagacatggataaaaattcgccagaggcctggtgtgctgcagggaactgtttcagtctgcaacgggaacatgatattgcaattaaattcttccagagagctatccaagttgatccaaattacgcttatgcctatactctattagggcatgagtttgtcttaactgaagaattggacaaagcattagcttgttttcgaaatgctatcagagtcaatcctagacattataatgcatggtatggtttaggaatgatttattacaagcaagaaaaattcagccttgcagaaatgcatttccaaaaagcgcttgatatcaaccctcaaagttcagttttactttgccacattggagtagttcaacatgcactgaaaaaatcagagaaggctttggataccctaaacaaagccattgtcattgatcccaagaaccctctatgcaaatttcacagagcctcagttttatttgcaaatgaaaaatataagtctgctttacaagaacttgaagaattgaaacaaattgttcccaaagaatccctcgtttacttcttaataggaaaggtttacaagaagttaggtcaaacgcacctcgccctgatgaatttctcttgggctatggatttagatcctaaaggagccaataaccagattaaagaggcaattgataagcgttatcttccagatgatgaggagccaataacccaagaagaacagatcatgggaacagatgaatcccaggagagcagcatgacagatgcggatgacacacaacttcatgcagctgaaagtgatgaattttaacttctggaaatcagacttttacaactggatgtgtgactagtgctgacgtgtttcttgtccctctgtatactgagtctttactcttgagctggcggtgtcatcgtccgtcacttataccatgagtgtgccactttcattggaccctgactgtatacagaatgaaaggcagtgcaatatttagctgctaacaagactggctcttttaccagtatgaatgacaatttatggggggtagggtggggaactttcttttctgtttttctttaatctccctttgttggaaagtatcatgaaaggaagagttatgctttatcttgaaggaaccattagatatggaaaatagtgatgaaccagagtttcttggttgctttttcaaaaatttgtttttatttggttctgttcctgataaacagagtaactgaccttcatttctaggttcttcaagaatggtgtttgcaagtgccagatggaacaataaaagacgttgcctataacagtgacttgattgccaaggaatgtaaattaccttaaacttgcagtatctcccataaacaaatgtaatgggcatattgggactcgtatgtaggaatcaaatatccctccatacagtgtactcttattcttggcaagaatgctttaatgtctaaccaagaattttaatttattcatcttgcttcaaagtgttgatcattgttgtcttggtattgcaaactttaaaattgtttcttaccatattgcctcttctctttgagctctgtgggatcacctttaacattcagagatgatagagtggttccccactgagaagccaaaacaaggcccttaataaccccttaagttcaccatatgaatcagaaggagaacactaaagtggagagacttttaagagatcatgatagtgaaagccttaatataatcagaattgtaccataaccttgaatctatatttgttcaaaacatccctttgacttttctaagtgtttgcttaagcagagtgtaagaatgtgtggttacctttggttgagatcctttccattctttttgactctctgcttcagattttttcagtagtgtgagtcaccaaaacatttactaagagtaattgggtttaggatgttggaaatttttagcttgggggaaaaaacattcttatgaaggagataggttctcttctgagtttgtcataatatagattggtgtctttggaaaatggccacaattttaagaattcaattatgcatataaaatgataattattggaattccacagtaacagatttaaacagtcttaaattgtttatctcctttactgtaatgtattgaaatttttagagaaattttagttgttaacattttattaagtgccagtgtcagaatataacaaattatagtttcttatgaatgacaggcctacagttattattctggattatttgatggaggacaaacttacctgtatttgttagtcaagctgtgaaaataaggtggattacaaaagatgtgaaaaaaattttagtctgtagactcagtaattttctataatttactgttaatctcatttgaacatggattaggtacaatttataaattaattcaagtcagggtctttaggtatcaggtgccagagagatatttaacagatttccctacctaaatttatgtatatgtactgtctaaaacaatacttttttaaaaaaaaggaacagttgggagaaaataaatataatgaaaaattcccagaggctagcacttggattctaacacgtatgctattgtattatccattagttctgtaatatttaattttagattcttttatttttttaattggcaaagcacaaggtgctgtataacagtgtcatttagagttttatagaaagcttcaacctgagttctgcgttataaagcctggagaaagctaagcttagaacataacttgctgaagtataattatctttttgtagcaggaatttatgtgccagaggtgagagtctttctggtactgattttttgagaccaaggataaaaggatcgttttgtaagacatgccatggcaatggctggttgggggacagtttccgcccaagcttggcctattttatttttcctcatacctactttcaaagtcatttaggtatttgaagccttatttcccacgtagtaacactttctggcttttgcagtttctttttttgtttggttttgttttttgcatggaatggggatcaaacaacccgaagaagaacacattttgatcaagcaaaatgtttgcttcaaatttcagaagtttattttacagaaattaaattaagtagtttgacatccttttctctgtttcacacatatattaggttggtgcataagtaattgtggtttttgccatgacttttatggcaaaacctgcaattacttttgcaccaacttaatacatctatatacatatatatatacgcgcacacacttgttcagaagttatgttgtggccttggatttgtttttccccttggaaatggttcttaactctgggattttagaaggttagaatattttttcaagagaacagtggtactcaaaagaatgaaaggtggtccctacattttctgtattcatcacttaaaatttttaatttttccgagaactacaagtaacatttgaaccatgctgctgttgtaccttaaacaaaaactcagtgataaccagtatttagtctattaaaaatgctctttttgaagaaaaaagtttggaagtctctgattagccagagtatagtatgagtcttcactgagaaatatggtgacccattttctttgtgaaaacctgggaaaatgcaagtgtgggtatgaagtgtgtgttctgtttgcattgaaacaatgtaattttgtgtcttctttttgctttaactgacttatttcagaaattgtacagtgttgagggggaaagtcttttctgttaatatatttgcaattcattaaaggatatggaaaatccaaa

SEQ ID NO: 318 - DNA, 5396 bp, Homo sapiens
gcatctggtgttttcgctgccgaggataggacgacgagcgcaatcgggagctccgccgcccggattcctgcttccctggggcccggaggctgctgcgtaccccactgtgacctggaacccagggacccgagtcccgacccggattatcgtggcgcttttcccggccggctctggtgctcggtgtccctccgccgccgctcccgtttccggcgggggagatggccaggatctgacccgggaggaggccgcacccgcgccgcgctctgcggctggctctaggcgatgccgagcagctcggacacggcgctggggggaggcgggggcctgagctgggcggagaagaagttggaggaacgccgcaagcggaggcgattcctgtcccctcagcagccgccgctgctgttgccgctcctgcagccgcagctcctgcaaccgccgccgcccccgccgcctctgctcttcctggctgctcccggcacggccgccgccgcagccgccgccgccgcggcctcctcctcttgcttcagcccgggcccccctctggaggtcaagcggctggcgagaggcaagaggcgcgcaggagggcggcagaagcggcgtcgcgggccccgcgccgggcaggaggcggagaagcgtcgggtcttctcgctgccccagccgcagcaggacggcggtggcggtgctagtagcggcgggggtgtgaccccgctggtggaatacgaggatgtgagctcccagtccgagcaggggctgctgctggggggggccagcgcggcaacggcggcgacggctgccgggggaacggggggcagcggcgggagtccggcctcctcctccggcacccagcggcgcggggaggggtcggagcgcaggccccgccgggaccgccgcagcagcagtggccgcagcaaggagcgccaccgcgagcaccggcggcgggatgggcagcgcggtggcagcgaggcctccaagtcccgcagccgccacagccacagcggcgaggaacgggccgaggtcgccaagagcggcagcagcagcagcagcggcggccgccggaaaagcgcttcggccacatccagcagcagtagcagccgcaaggaccgggactcgaaggcccaccgcagccggactaagtcgtccaaggagccgccttcggcctacaaggaaccgcccaaggcctaccgggaggacaagaccgagcctaaggcctacaggcggcggcggtccctcagcccactgggaggccgggacgacagcccggtgtcccacagggcctctcagagcctgaggagccgcaagtcccccagcccggcaggaggtggcagcagcccctattctcggcggctgccgcgctccccgagcccctacagtcgccgccgctcccccagctacagccgccacagctcctacgagcggggcggcgacgtgtcccctagtccctacagcagcagcagctggcgccgctctcgcagtccctacagccctgtgctcagacggtctggaaaatcccgaagcagaagcccgtattcatctaggcattcaagatctcgtagcaggcacagattgtctagatccagaagtcgtcattctagtatttctcctagcacactaactctgaagagtagcctggcagctgaattgaacaagaataaaaaagcacgagcagcagaggcagcaagagccgcagaagcagcgaaagctgcagaagcaactaaggctgctgaggctgctgccaaggctgcaaaagcttcaaacacttctacacctaccaaggggaacacggaaactagtgccagtgcatcacaaacaaaccatgtgaaggatgtgaagaaaattaaaattgaacatgcaccttctccctcaagtggtggaactttaaaaaatgacaaagcaaaaacaaagccacctcttcaggtaacgaaggtggaaaataatttgattgtagataaagccaccaagaaagcagtcatagttggaaaggagagtaaatctgctgctacaaaggaggaatcagtatctcttaaagagaaaaccaaaccacttacaccaagcataggagccaaggagaaggagcaacatgtagctttagtcacctctacattaccaccgttacctttgcctcccatgctgcctgaagataaagaagctgatagcttacgaggaaatatttcagtaaaagcagttaaaaaagaagtagaaaagaaactccgatgtcttcttgctgatttaccgctgccccctgagctaccaggaggagatgatctttcaaagagtccagaggaaaagaaaacagcaacacagttacatagtaaaaggaggcctaaaatatgtgggcctcgctatggtgaaaccaaagaaaaagatattgactggggaaaacgctgcgtggataaatttgatatcatcggaattattggagaaggtacttacggacaagtttacaaagccagggataaagacactggagaaatggtagccttaaaaaaagtacgtctggataatgaaaaggaaggctttccaattacagcaattcgagaaattaaaattctccggcagcttacccatcagagtattatcaatatgaaggaaatagtgactgataaagaagatgctttggatttcaagaaggacaaaggtgcattttatctggtgtttgaatatatggaccatgatctgatgggactactggaatcaggcttggttcattttaatgaaaatcacataaagtcatttatgagacagctcatggagggtctggattattgtcataagaagaactttttgcatagagatattaaatgttccaatatccttctaaataatagagggcagataaaacttgcagactttggacttgctcgattgtatagctcagaagaaagtcggccgtatactaacaaggtaattactttatggtaccgtccacctgaactgctactgggagaagaacgatacacaccagccattgatgtatggagctgtggctgtatccttggcgaactcttcactaaaaaacctatatttcaagcaaatcaggaacttgcacaactagaattaataagccgaatatgtgggagtccatgtcctgcagtgtggcctgatgtaatcaaactaccatatttcaacaccatgaaaccaaagaagcaatatcgtcgaaagttaagagaagaatttgtttttattcctgcagctgcgctagacttatttgattacatgcttgccttggatcctagtaagcgctgcactgctgaacaggctcttcagtgcgagttcctccgagatgtggaaccctcaaaaatgcctccaccagatctccctttatggcaagattgtcatgagttatggagtaaaaagcgaagaagacagaagcagatgggcatgactgatgatgtttccacaattaaagcccccaggaaggacttgtctctgggcttggatgacagcagaaccaacacaccccagggtgtgctgccatcttcacagctgaaatctcagggcagctcaaatgtggcacctgtaaaaacaggccctggacagcacttaaaccacagtgaattggcaattctactaaacctactacaatctaaaacaagtgttaatatggctgattttgtccaagtgttgaacattaaggtaaactctgagactcaacagcagctaaataaaataaaccttcctgctggaattttggcaacaggtgaaaaacagacagatccatcaacaccacaacaggagtcttcgaaaccgttgggaggaattcagccttcttctcagaccatccagcctaaagtggagactgatgctgcccaggcggctgtgcagagtgcatttgcagttctgttgactcagttaataaaggctcagcagtcaaagcagaaagatgtgctactagaagagagggaaaatggatcgggacatgaagcgtcattacaactcaggccacctccagaacctagcactccggtgtcgggacaagatgacctcatccagcatcaagatatgaggatcttggagctaacgccagaaccagaccggcctcgaattctgcctcctgaccaacgacctcccgagcctcctgaaccaccaccagtcactgaggaagatctagattatcggacagaaaaccagcatgtacccaccaccagttcttcattaactgaccctcatgccggagtgaaggcagccctgttacagctgcttgctcagcatcagccccaggatgaccccaaaagagaaggtgggattgattatcaagcaggagacacttacgtgtccacttcagactacaaggacaactttggatcctcttctttctcttctgctccttatgttagcaatgatggtctaggaagcagttctgctccaccactagaacgacgtagtttcattggaaattcagatattcagtctttggataactacagtactgcttcatctcattctggtggtccacctcagccttctgccttttctgagtcatttcccagttcagtagctggatatggagacatttacctcaatgctggtcccatgttgtttagtggagacaaggaccatagatttgaatatagccatggtcctattgcagtcctggcaaacagcagtgacccttccacggggccagagagtactcatcctttgccagcaaagatgcacaactataactatggtggtaacttacaggaaaatccgagtggccccagcctcatgcatggacagacctggacttctcctgcccaaggacctggatattcacaaggatacaggggacatattagcacatcaactggcagaggcagaggcagagggttaccatactgagtatctgtttttcctcaggcacatcatttttatctggaaagacttttctagctgcaatttaaggcagcaatccaagagacttgaataataataattcaacaacagctttatttttatgtggagaagggtcttgcatacaatagtttaaaaaagacaaaaaaaacctttgcttaaattcatgctgttctaaaaactagatcgattgtacatcttcacaaattctagttaacaattttattttgtattcttgcagttttaagtggatgctaattttaggggcataagccttttatggccctcttgcagatcttctgaactatgcacatttgtgctttttttgtaagtttggaccaacttttatgtaacaaacagcccctccccacctccagttttacaacaatcagaaagggcactgatttatttggtatttttctttttacaaagctacctttagtcaaaggtcactgtcagtctttgcacctgctttcagtgttattgtgaaaggtgtactttgtgctcatttcagaaaataaaacacaacctttctcttgatgcaacagttttataaaaaaaaa

SEQ ID NO: 319 - DNA, 5216 bp, Homo sapiens
gcatctggtgttttcgctgccgaggataggacgacgagcgcaatcgggagctccgccgcccggattcctgcttccctggggcccggaggctgctgcgtaccccactgtgacctggaacccagggacccgagtcccgacccggattatcgtggcgcttttcccggccggctctggtgctcggtgtccctccgccgccgctcccgtttccggcgggggagatggccaggatctgacccgggaggaggccgcacccgcgccgcgctctgcggctggctctaggcgatgccgagcagctcggacacggcgctggggggaggcgggggcctgagctgggcggagaagaagttggaggaacgccgcaagcggaggcgattcctgtcccctcagcagccgccgctgctgttgccgctcctgcagccgcagctcctgcaaccgccgccgcccccgccgcctctgctcttcctggctgctcccggcacggccgccgccgcagccgccgccgccgcggcctcctcctcttgcttcagcccgggcccccctctggaggtcaagcggctggcgagaggcaagaggcgcgcaggagggcggcagaagcggcgtcgcgggccccgcgccgggcaggaggcggagaagcgtcgggtcttctcgctgccccagccgcagcaggacggcggtggcggtgctagtagcggcgggggtgtgaccccgctggtggaatacgaggatgtgagctcccagtccgagcaggggctgctgctggggggggccagcgcggcaacggcggcgacggctgccgggggaacggggggcagcggcgggagtccggcctcctcctccggcacccagcggcgcggggaggggtcggagcgcaggccccgccgggaccgccgcagcagcagtggccgcagcaaggagcgccaccgcgagcaccggcggcgggatgggcagcgcggtggcagcgaggcctccaagtcccgcagccgccacagccacagcggcgaggaacgggccgaggtcgccaagagcggcagcagcagcagcagcggcggccgccggaaaagcgcttcggccacatccagcagcagtagcagccgcaaggaccgggactcgaaggcccaccgcagccggactaagtcgtccaaggagccgccttcggcctacaaggaaccgcccaaggcctaccgggaggacaagaccgagcctaaggcctacaggcggcggcggtccctcagcccactgggaggccgggacgacagcccggtgtcccacagggcctctcagagcctgaggagccgcaagtcccccagcccggcaggaggtggcagcagcccctattctcggcggctgccgcgctccccgagcccctacagtcgccgccgctcccccagctacagccgccacagctcctacgagcggggcggcgacgtgtcccctagtccctacagcagcagcagctggcgccgctctcgcagtccctacagccctgtgctcagacggtctggaaaatcccgaagcagaagcccgtattcatctaggcattcaagatctcgtagcaggcacagattgtctagatccagaagtcgtcattctagtatttctcctagcacactaactctgaagagtagcctggcagctgaattgaacaagaataaaaaagcacgagcagcagaggcagcaagagccgcagaagcagcgaaagctgcagaagcaactaaggctgctgaggctgctgccaaggctgcaaaagcttcaaacacttctacacctaccaaggggaacacggaaactagtgccagtgcatcacaaacaaaccatgtgaaggatgtgaagaaaattaaaattgaacatgcaccttctccctcaagtggtggaactttaaaaaatgacaaagcaaaaacaaagccacctcttcaggtaacgaaggtggaaaataatttgattgtagataaagccaccaagaaagcagtcatagttggaaaggagagtaaatctgctgctacaaaggaggaatcagtatctcttaaagagaaaaccaaaccacttacaccaagcataggagccaaggagaaggagcaacatgtagctttagtcacctctacattaccaccgttacctttgcctcccatgctgcctgaagataaagaagctgatagcttacgaggaaatatttcagtaaaagcagttaaaaaagaagtagaaaagaaactccgatgtcttcttgctgatttaccgctgccccctgagctaccaggaggagatgatctttcaaagagtccagaggaaaagaaaacagcaacacagttacatagtaaaaggaggcctaaaatatgtgggcctcgctatggtgaaaccaaagaaaaagatattgactggggaaaacgctgcgtggataaatttgatatcatcggaattattggagaaggtacttacggacaagtttacaaagccagggataaagacactggagaaatggtagccttaaaaaaagtacgtctggataatgaaaaggaaggctttccaattacagcaattcgagaaattaaaattctccggcagcttacccatcagagtattatcaatatgaaggaaatagtgactgataaagaagatgctttggatttcaagaaggacaaaggtgcattttatctggtgtttgaatatatggaccatgatctgatgggactactggaatcaggcttggttcattttaatgaaaatcacataaagtcatttatgagacagctcatggagggtctggattattgtcataagaagaactttttgcatagagatattaaatgttccaatatccttctaaataatagagggcagataaaacttgcagactttggacttgctcgattgtatagctcagaagaaagtcggccgtatactaacaaggtaattactttatggtaccgtccacctgaactgctactgggagaagaacgatacacaccagccattgatgtatggagctgtggctgtatccttggcgaactcttcactaaaaaacctatatttcaagcaaatcaggaacttgcacaactagaattaataagccgaatatgtgggagtccatgtcctgcagtgtggcctgatgtaatcaaactaccatatttcaacaccatgaaaccaaagaagcaatatcgtcgaaagttaagagaagaatttgtttttattcctgcagctgcgctagacttatttgattacatgcttgccttggatcctagtaagcgctgcactgctgaacaggctcttcagtgcgagttcctccgagatgtggaaccctcaaaaatgcctccaccagatctccctttatggcaagattgtcatgagttatggagtaaaaagcgaagaagacagaagcagatgggcatgactgatgatgtttccacaattaaagcccccaggaaggacttgtctctgggcttggatgacagcagaaccaacacaccccagggtgtgctgccatcttcacagctgaaatctcagggcagctcaaatgtggcacctggtgaaaaacagacagatccatcaacaccacaacaggagtcttcgaaaccgttgggaggaattcagccttcttctcagaccatccagcctaaagtggagactgatgctgcccaggcggctgtgcagagtgcatttgcagttctgttgactcagttaataaaggctcagcagtcaaagcagaaagatgtgctactagaagagagggaaaatggatcgggacatgaagcgtcattacaactcaggccacctccagaacctagcactccggtgtcgggacaagatgacctcatccagcatcaagatatgaggatcttggagctaacgccagaaccagaccggcctcgaattctgcctcctgaccaacgacctcccgagcctcctgaaccaccaccagtcactgaggaagatctagattatcggacagaaaaccagcatgtacccaccaccagttcttcattaactgaccctcatgccggagtgaaggcagccctgttacagctgcttgctcagcatcagccccaggatgaccccaaaagagaaggtgggattgattatcaagcaggagacacttacgtgtccacttcagactacaaggacaactttggatcctcttctttctcttctgctccttatgttagcaatgatggtctaggaagcagttctgctccaccactagaacgacgtagtttcattggaaattcagatattcagtctttggataactacagtactgcttcatctcattctggtggtccacctcagccttctgccttttctgagtcatttcccagttcagtagctggatatggagacatttacctcaatgctggtcccatgttgtttagtggagacaaggaccatagatttgaatatagccatggtcctattgcagtcctggcaaacagcagtgacccttccacggggccagagagtactcatcctttgccagcaaagatgcacaactataactatggtggtaacttacaggaaaatccgagtggccccagcctcatgcatggacagacctggacttctcctgcccaaggacctggatattcacaaggatacaggggacatattagcacatcaactggcagaggcagaggcagagggttaccatactgagtatctgtttttcctcaggcacatcatttttatctggaaagacttttctagctgcaatttaaggcagcaatccaagagacttgaataataataattcaacaacagctttatttttatgtggagaagggtcttgcatacaatagtttaaaaaagacaaaaaaaacctttgcttaaattcatgctgttctaaaaactagatcgattgtacatcttcacaaattctagttaacaattttattttgtattcttgcagttttaagtggatgctaattttaggggcataagccttttatggccctcttgcagatcttctgaactatgcacatttgtgctttttttgtaagtttggaccaacttttatgtaacaaacagcccctccccacctccagttttacaacaatcagaaagggcactgatttatttggtatttttctttttacaaagctacctttagtcaaaggtcactgtcagtctttgcacctgctttcagtgttattgtgaaaggtgtactttgtgctcatttcagaaaataaaacacaacctttctcttgatgcaacagttttataaaaaaaaa

SEQ ID NO: 320 - DNA, 10284 bp, Homo sapiens
gcggcccggtgcgggtgtcggggagaccgggctctctgcccggcgcggcgcggcgcggctcggcccacgagcgaccaccgacatggagtgggctcgggcggccaagtagccgcttctccggagcccggtgccagtgccgcccgcagcccgccttccacccccggccgcgccgccggtcaggccctagggtgaagccgggaggaaaatgaagagttttcaccggaatccgttgaaaataggactgactgcaaagccttaaagaaagaaggacctcgggaggagaaacgaaaagccgcctccgggcaagacttggcgtgctccgagccgaggggctgcttcagggacctcgccccctccctttcccgctggagaaattgccgctgatgcattatccaagtggtggttgggaggatttgcagcaacatttttggttttccctcccccttctatgcattctgtttttttcctcccttttctgtttttcttcttcccgggaagtgaattgctgatgcaaatcggactttattcattaatgatgcaaccggattcgtttcaggattacgttgcacgagttgaattttgaatgaaggagaagagtttttttttttttttttaaagaagtgttgactctctagttcgttgtacttttaattattattttatttaaatatacgacttaattgtattcttttaaaaatgcattaagtatatattttatggtaatttaccctcaaaatatatgtatatgggtgaaattgaagacgcttcagttaagtgaggttactggtgtgttggatgtttaattcagcaccagcattgcatgacagttgtttgaataacaagtggtttatttttaaaaccataccttttaaaatttaggttcagataatagtaaaagtcatcataataatttaaaggaaaaccagcagaaatcgaagcaaacatgtctggagaagtgcgtttgaggcagttggagcagtttattttggacgggcccgctcagaccaatgggcagtgcttcagtgtggagacattactggatatactcatctgcctttatgatgaatgcaataattctccattgagaagagagaagaacattctcgaatacctagaatgggctaaaccatttacttctaaagtgaaacaaatgcgattacatagagaagactttgaaatattaaaggtgattggtcgaggagcttttggggaggttgctgtagtaaaactaaaaaatgcagataaagtgtttgccatgaaaatattgaataaatgggaaatgctgaaaagagctgagacagcatgttttcgtgaagaaagggatgtattagtgaatggagacaataaatggattacaaccttgcactatgctttccaggatgacaataacttatacctggttatggattattatgttggtggggatttgcttactctactcagcaaatttgaagatagattgcctgaagatatggctagattttacttggctgagatggtgatagcaattgactcagttcatcagctacattatgtacacagagacattaaacctgacaatatactgatggatatgaatggacatattcggttagcagattttggttcttgtctgaagctgatggaagatggaacggttcagtcctcagtggctgtaggaactccagattatatctctcctgaaatccttcaagccatggaagatggaaaagggagatatggacctgaatgtgactggtggtctttgggggtctgtatgtatgaaatgctttacggagaaacaccattttatgcagaatcgctggtggagacatacggaaaaatcatgaaccacaaagagaggtttcagtttccagcccaagtgactgatgtgtctgaaaatgctaaggatcttattcgaaggctcatttgtagcagagaacatcgacttggtcaaaatggaatagaagactttaagaaacacccatttttcagtggaattgattgggataatattcggaactgtgaagcaccttatattccagaagttagtagcccaacagatacatcgaattttgatgtagatgatgattgtttaaaaaattctgaaacgatgcccccaccaacacatactgcattttctggccaccatctgccatttgttggttttacatatactagtagctgtgtactttctgatcggagctgtttaagagttacggctggtcccacctcactggatcttgatgttaatgttcagaggactctagacaacaacttagcaactgaagcttatgaaagaagaattaagcgccttgagcaagaaaaacttgaactcagtagaaaacttcaagagtcaacacagactgtccaagctctgcagtattcaactgttgatggtccactaacagcaagcaaagatttagaaataaaaaacttaaaagaagaaattgaaaaactaagaaaacaagtaacagaatcaagtcatttggaacagcaacttgaagaagctaatgctgtgaggcaagaactagatgatgcttttagacaaatcaaggcttatgaaaaacaaatcaaaacgttacaacaagaaagagaagatctaaataagctggaagttcatacagaagctctagctgctgaagcatctaaagacaggaagctacgtgaacagagtgagcactattctaagcaactggaaaatgaattggagggactgaagcaaaaacaaattagttactcaccaggagtatgcagcatagaacatcagcaagagataaccaaactaaagactgatttggaaaagaaaagtatcttttatgaagaagaattatctaaaagagaaggaatacatgcaaatgaaataaaaaatcttaagaaagaactgcatgattcagaaggtcagcaacttgctctcaacaaagaaattatgattttaaaagacaaattggaaaaaaccagaagagaaagtcaaagtgaaagggaggaatttgaaagtgagttcaaacaacaatatgaacgagaaaaagtgttgttaactgaagaaaataaaaagctgacgagtgaacttgataagcttactactttgtatgagaacttaagtatacacaaccagcagttagaagaagaggttaaagatctagcagacaagaaagaatcagttgcacattgggaagcccaaatcacagaaataattcagtgggtcagcgatgaaaaggatgcacgagggtatcttcaggccttagcttctaaaatgactgaagaattggaggcattaagaaattccagcttgggtacacgagcaacagatatgccctggaaaatgcgtcgttttgcgaaactggatatgtcagctagactggagttgcagtcggctctggatgcagaaataagagccaaacaggccatccaagaagagttgaataaagttaaagcatctaatatcataacagaatgtaaactaaaagattcagagaagaagaacttggaactactctcagaaatcgaacagctgataaaggacactgaagagcttagatctgaaaagggtatagagcaccaagactcacagcattctttcttggcatttttgaatacgcctaccgatgctctggatcaatttgaaactgtagactccactccactttcagttcacacaccaaccttaaggaaaaaaggatgtcctggttcaactggctttccacctaagcgcaagactcaccagttttttgtaaaatcttttactactcctaccaagtgtcatcagtgtacctccttgatggtgggtttaataagacagggctgttcatgtgaagtgtgtggattctcatgccatataacttgtgtaaacaaagctccaaccacttgtccagttcctcctgaacagacaaaaggtcccctgggtatagatcctcagaaaggaataggaacagcatatgaaggtcatgtcaggattcctaagccagctggagtgaagaaagggtggcagagagcactggctatagtgtgtgacttcaaactctttctgtacgatattgctgaaggaaaagcatctcagcccagtgttgtcattagtcaagtgattgacatgagggatgaagaattttctgtgagttcagtcttggcttctgatgttatccatgcaagtcggaaagatataccctgtatatttagggtcacagcttcccagctctcagcatctaataacaaatgttcaatcctgatgctagcagacactgagaatgagaagaataagtgggtgggagtgctgagtgaattgcacaagattttgaagaaaaacaaattcagagaccgctcagtctatgttcccaaagaggcttatgacagcactctacccctcattaaaacaacccaggcagccgcaatcatagatcatgaaagaattgctttgggaaacgaagaagggttatttgttgtacatgtcaccaaagatgaaattattagagttggtgacaataagaagattcatcagattgaactcattccaaatgatcagcttgttgctgtgatctcaggacgaaatcgtcatgtacgactttttcctatgtcagcattggatgggcgagagaccgatttttacaagctgtcagaaactaaagggtgtcaaaccgtaacttctggaaaggtgcgccatggagctctcacatgcctgtgtgtggctatgaaaaggcaggtcctctgttatgaactatttcagagcaagacccgtcacagaaaatttaaagaaattcaagtcccatataatgtccagtggatggcaatcttcagtgaacaactctgtgtgggattccagtcaggatttctaagataccccttgaatggagaaggaaatccatacagtatgctccattcaaatgaccatacactatcatttattgcacatcaaccaatggatgctatctgcgcagttgagatctccagtaaagaatatctgctgtgttttaacagcattgggatatacactgactgccagggccgaagatctagacaacaggaattgatgtggccagcaaatccttcctcttgttgttacaatgcaccatatctctcggtgtacagtgaaaatgcagttgatatctttgatgtgaactccatggaatggattcagactcttcctctcaaaaaggttcgacccttaaacaatgaaggatcattaaatcttttagggttggagaccattagattaatatatttcaaaaataagatggcagaaggggacgaactggtagtacctgaaacatcagataatagtcggaaacaaatggttagaaacattaacaataagcggcgttattccttcagagtcccagaagaggaaaggatgcagcagaggagggaaatgctacgagatccagaaatgagaaataaattaatttctaatccaactaattttaatcacatagcacacatgggtcctggagatggaatacagatcctgaaagatctgcccatgaaccctcggcctcaggaaagtcggacagtattcagtggctcagtcagtattccatctatcaccaaatcccgccctgagccaggccgctccatgagtgctagcagtggcttgtcagcaaggtcatccgcacagaatggcagcgcattaaagagggaattctctggaggaagctacagtgccaagcggcagcccatgccctccccgtcagagggctctttgtcctctggaggcatggaccaaggaagtgatgccccagcgagggactttgacggagaggactctgactctccgaggcattccacagcttccaacagttccaacctaagcagccccccaagcccagcttcaccccgaaaaaccaagagcctctccctggagagcactgaccgcgggagctgggacccgtgagctgcctcagcactgggacctctcgctctccgctccctgccactcgcctcctctcactttcatctcttccctccacctcgcctgctcggcctgaaagccaccaggggctggcagcagtagcaggacagggattcaggagttctgacgacacgactctcagatccacgcccccagcctaacagcaacaacaaagacagactttccgtagcagcttagattaacgttgatttcattccatgcacttagagttgctttcagtaacattttacccctactcccaaaggtagcttaaatagacagattacacaaatgtaagtgataagaataagattagacagattttgctttcacagtagagtctcattatagtcctaaaatagctcatgggcttctccgcatccagaagggagaattggtccctggagtggctcactaagctcttaatcagcaaacgcagtgagtatcaacctgattgttgccaggaaatccttatgaattaaaacaatgcatattttactacagtacagagtttaaatgaatacataaatgtagaagtactgaatgtatatatttaaaaggagcctcttgtattcaacaaaagatggatgcatatataagagagatgatttaatttaaagaaatatgttgtttcttgtctgtaatgtaatgtaaagggtggaaaggcctcaagctcacatttgtagagagagagcgagagaaatcagagttccctttattgccctgtcctcaaactggtcataggctctagtcacctggggagctgtagaaaacacttgcagagccaggttttgctggtttggggcatgccctgggcaccagagctttaacatttgaagccacttcagcagcagcagcaaaaggcgaactcatctctacccaagatgtttcttttcctagtggtggaatttgaacacttctcactttttattgtattttatcttccgcagataaatgtagaaatacacgattctgtcacctctgatcccttccatctgaaaggttacaaggagtgttgtagcttctgaaggtgcagaaaacaatttctaaaaatgcttttattcctgggctaatcctgtccctccctaagtcacagcgaggtgtctgtcccagggctggagatgcttcccaaggaggagtctgttttgttgagagtgggcgtgggcttcttcacataagcctggggaaggaagaaaaaacggctttcattaccaaataatgtaaaacctcaaaagcaagggcttcaacagccttaaccaaatattattccccatagccagtggaaaatggatgtgacaaccccagtgcgcaggccagagtgagtgagcccagcacggcgctccgactggcttcctctctcaggtgctggattgtggggttagtggcatttccagctggattcctcctgttgtagttgccataaggaaatgagatgcagaatcagaaggatctatttctacagaatcatttcaccagttaagcacatgagtagagaaagagataaaaataaaagtatctcatgaaggaaagagattttgcctctcttttacttttcacctaagtttctctgagaaatagagacaggattctctctttaaaattcagtgaaaatgaagaaagttttcctgcagttgctaacctgagttgcagtgtttaaggccatcatttcactgctgctgtctgtgactccacgtctgtgtcactgaggtgacctgcgtgtcactgaggtggccaccatgctggcctgcggcatgtgcagggagctgaggctgtttccaggtgatgctgctgtgtggagaaggttctgagatgcagtgagggaagaaaggatcctgctggggattccattgtaagcacctataatcgggaattttcatgtaacagctttgacatttaaacattctgagtttggtgccagctcagatttgattatattttattttggatgggtgtaattcacagcacagttctaatctcccaaatctttctgctttttagaatgaagtataaaaatacttttctcacctgaataccaagggttggccctttagttggatcattgtcatatgacttggtagatccttgtcctcagcacctcacgtgagagaagggagtcagccagccggccccctgcttggtgctcgtgaccagctcgcaccccttctgtccacccttctctcctctcctccccactctccccaccctcctcactctccccaccctcctcactctccccaccctcccctcctctcctcctcactcttcccaccctccccatccccaccctccccatcctcctcttccctttccccttgccttctcctctctcccttctcttctcaggcagggaggaggccatcccaagccgagattaacaggacttgacataagccattagtttgtagctttgacaagtaattatgaatttttgttgcttataggtgcttattttgcaaaggatgcttttaagatcaaaataataaccctacctaaagtctagctccactgctatgggtcatactcttcagcctcccaacagggcagagagagagagctactgaggcttgtctaggttgccaggctaactgggcgacttgtccatattcaccccatggattgcaccatggcactctttgatttttccactgcaatggcaagtaatctcatcagtcataatagagcagtcccgaatgcgtgcagattctaaaagcagggctttaggagagaaacactgccagggggaatagttttggggagggttttcccaaaataacggtcatcctactgggtttatcccacccttaaatatgaagcctgttacctccagaagcttctgagaagaatgatgtgaaaagacagggagtgggttctaggcaaagaaaacataatgaccattcagaggagtcagtagcacagctcacagataaagtattttattactatctgaagttttcttttgttttcatgcaggacattttaaaaacgtatatggcagcagaaacctgtttctcaatagaaaaaatacattcagaggcatttctgggatagtctatctgtgttagtatttggtgctatctatgtccagccaagttatctaccctcaaattctgactaatcatgtttgtgctttgggtatttaaaattacatacatatatattctttttgccaaaaacaaaagtcttgcttcttgtcaaatgattgctaaagtagatcttacattttttgttattatgtatgtatttatacacatccccaacacacttagtgatttctgttatttcctagggagcacagctttaaggctatgagatacaactaaaaggagcccatctatttggttttccagccaattattgtactcacatttcaggggagaatctgaaattcctgtcatgtttacagcaacaatctatcattcctggctagctctcagcctctctctccttccataggttagaattatgtcattttgttacttagtggccacgtctatttctgagaaagactggttacatttatgtggcatctcaggtatcattaaggaaaagccagagcaggggtgagcagaggtcaaaaccacagacgcagcagggccatttgccgcctttggccgggatcacaaccactgcagtctcccagcaggtaggccttgccaagcctaaggctccccatccaatctagacagaggggcgctcagagcagactttgccgtagcccatgtctggtgagcacaacagggaatgaattgggcactccactcccccgtctctctggcccagccctgaactagatgagctgcatttcatggagcccattttaaaatctctttccttatgactttgttactcaagtccagagttctctgtgcacttctgctagataaggagtgtaagccctgccccccagcactggcagcacgctgggccctccccacacaggacaccgtgcagttccgggggaagctgactcaaatcaaccttgaaatctcatgaaaacaaaatgacttgtctttttatttgatagtgtaatatcattcattttataaattttttagggtttttctcgtaatattgtacagttttgcatggcctggtgtgatcattttttggttagaatataatgctgacaaatgtggatggaggggaagatactgctttagcctatcactccttattttattttgtttggttttatgccctcagtgtcttagggaactttttaagagatcctctgctaccaaacaatgatgtggattcttttgcacagaaatatttaaggtgggatggtaaaaaatgtcacaaaagactcctcaccaatactttatgttgatatcacttaatattaaccagactttgctgtattgcaataaaacagagaactgttaaaaaaaaaaaaaaaaaaaaaa

SEQ ID NO: 321 - DNA, 3057 bp, Homo sapiens
aatcgcgtcgccgccgcttccgccctcagccggccccacctctgccggctcgtactcggctcccccacctcgccgcagagctagcccgggaagcccacactggcggccacggagcagagtccctcacccccaccagctgtagctgaacgtctggatggtggagaagagcagggttccgagtctgaggaagacataaccttgtgcctgcctgcccacctctctctctggtcctgttcatctctcaggctctgagacactgaccttcactgctcagttaaaggttccagggattccactttgtctggacccatccagctgagtgaacccagggtggtggtgtatctggggagagtgaggagtgggttgtccaaacaccagggaaagagccctttggggcctcagacagcggagtgaagctggaaccatcagggaacatgagtgaattttggcacaaactgggctgctgtgtggtagagaaaccccagccgaagaagaagagaagacggattgaccggaccatgattggggaaccaatgaattttgttcacctgactcacattggctcaggggagatgggggccggagatggacttgccatgacaggtgcagttcaggagcagatgagatccaagggaaaccgagataggccatggagcaattctaggggcttatagctccaataatggaatggttctgccatcttgaaacccccattctgtttccagcccagaagaaatgctgcccctaccagatccctccttgaaccagtgatctaaggacccctcttttccctatctgcctaacagtgcctcacaaggcttgggggctggactccctctactccctctggccatagcccctcctggagatggggtcaaggcagcaggactgatcaagtgactactggttagccagaggagctcagctgaagccctggaaaccctcaggtctgagataggagttctctaggaacctggaatgagttcctgtctcctgaatgatggtctgggtgccacctgtttttaaactcttaaacctggaactccttaaatggggtaggtgggtgagattatcaaagctgaagctggctttgctgagaagctccctacctccctgcccttctcctccttcctgctggaatgaactaaagcagatgtcaagcaggggctggtgggggtgcctactcccttttccactctatctttagatttcaaaccttaggcttacagcccctcaatatctctctgctaacaccagtgtctctttctagttaggcctctaatcttctgtttctgtttaccagcttcccagcaactttccttttttaaaatattaaaaatttaattcaggttctcttaattatcctcatcctgctgttgcctccgcccttaactctatccctattaggaaccttgtttcccaccgaataagagttaaggtaagaggtagctcttcacctgatgacattccatttaagttttggggcatctttcctgccctctgccaacctccctgctggcccaggtgagaggaggaagaggggtctggaaagaaacccagaatgcggcagaactaggagtaagtccatctcaaggtggacttctgatcattgaggatggtgagataaataggttgaaaacaatcatctgtgagtttaggagtcttaagatcctcacagcacgggagcagggagaggctctagaacaaggtttcacaaccgagatgcctttgacattttgggctgaagtgttctttgtaaggaaaacctgtttcctattttgtgcattacaggatatttagcagcaaccctggcccactctagttatgacaaccaaaaatgtctctatacattgccagatttctcctagggggcaaaatcgcctccatttgagaaccacaactctaaagtcaagatatttttctctgaagtgatttctgcttggcacgctaccctcatcatcttactcatcttaagcccgagccatggatcaactaggagcccatataaatgaggctcagtagggctgcacataatctccaaacaattctttattcagtgttttgcttgtgtttgcatgttgctatgatggacaggtccccctcctccattcttgccctctggagaagtggttcctgcagtgtagagatatgaacagggtatggtaggattggggaaaggggagagagaagcagtagatacactccttatcctccccaaattttaagctctatttctgtgccctagtcctagacacacattagactcagggagttttgtctgaagaccaggtcccactgccccctggctgaagagtctgctttaaatgggaaaacaacgtaggagcaggggtttttaggcactttcagtattctcaggtgttcttcgttctggcccttccagggtaattaggaaggcagaacaagacagatgagctcctgcctgctctgagacaagaagggtggggtctcattagctttgcaacaggaaacatcctgttttatggtagtggggtcaggaatgtaggaactggtatccattctgccaattccaccacccattcagtttgcttatccctacagaacagtgactgaggttctttttttttttttttttttttttttttcaaatttccatgtattttctgccatttttcagggtctaagattggtcatacattcccaatttactctcagttccagtcaagctggttgctctgaaagtaacccagcttgttgctctaaaatacctcagtagcctgagtgttatactagagatctaaagggttaacaggatagggtggaaaggttagagactcctagaaatctctggtcaccgtgatcttcggcctcattctaatacctgttctttggacagtctttttcctttggtgctctcttgcctttagctaccttctctaatatgtatgctaccatcactaataaagtgatgggaatgggtttgagagtcgtaatttatattaaaaagttgttggacttttaaatacattttttcaaataaaaaattaagcaaaatagttgcacagtaaaaaaaaaaaa

SEQ ID NO: 322 - DNA, 1938 bp, Homo sapiens
gatttggcgggagtcttgaccgccgccgggctcttggtacctcagcgcgagcgccaggcgtccggccgccgtggctatgttcgtgtccgatttccgcaaagagttctacgaggtggtccagagccagagggtccttctcttcgtggcctcggacgtggatgctctgtgtgcgtgcaagatccttcaggccttgttccagtgtgaccacgtgcaatatacgctggttccagtttctgggtggcaagaacttgaaactgcatttcttgagcataaagaacagtttcattattttattctcataaactgtggagctaatgtagacctattggatattcttcaacctgatgaagacactatattctttgtgtgtgacacccataggccagtcaatgtcgtcaatgtatacaacgatacccagatcaaattactcattaaacaagatgatgaccttgaagttcccgcctatgaagacatcttcagggatgaagaggaggatgaagagcattcaggaaatgacagtgatgggtcagagccttctgagaagcgcacacggttagaagaggagatagtggagcaaaccatgcggaggaggcagcggcgagagtgggaggcccggagaagagacatcctctttgactacgagcagtatgaatatcatgggacatcgtcagccatggtgatgtttgagctggcttggatgctgtccaaggacctgaatgacatgctgtggtgggccatcgttggactaacagaccagtgggtgcaagacaagatcactcaaatgaaatacgtgactgatgttggtgtcctgcagcgccacgtttcccgccacaaccaccggaacgaggatgaggagaacacactctccgtggactgcacacggatctcctttgagtatgacctccgcctggtgctctaccagcactggtccctccatgacagcctgtgcaacaccagctataccgcagccaggttcaagctgtggtctgtgcatggacagaagcggctccaggagttccttgcagacatgggtcttcccctgaagcaggtgaagcagaagttccaggccatggacatctccttgaaggagaatttgcgggaaatgattgaagagtctgcaaataaatttgggatgaaggacatgcgcgtgcagactttcagcattcattttgggttcaagcacaagtttctggccagcgacgtggtctttgccaccatgtctttgatggagagccccgagaaggatggctcagggacagatcacttcatccaggctctggacagcctctccaggagtaacctggacaagctgtaccatggcctggaactcgccaagaagcagctgcgagccacccagcagaccattgccagctgcctttgcaccaacctcgtcatctcccaggggcctttcctgtactgctctctcatggagggcactccagatgtcatgctgttctctaggccggcatccctaagcctgctcagcaaacacctgctcaagtcctttgtgtgttcgacaaagaaccggcgctgcaaactgctgcccctggtgatggctgcccccctgagcatggagcatggcacagtgaccgtggtgggcatccccccagagaccgacagctcggacaggaagaacttttttgggagggcgtttgagaaggcagcggaaagcaccagctcccggatgctgcacaaccattttgacctctcagtaattgagctgaaagctgaggatcggagcaagtttctggacgcacttatttccctcctgtcctaggaatttgattcttccagaatgaccttcttatttatgtaactggctttcatttagattgtaagttatggacatgatttgagatgtagaagccattttttattaaataaaatgcttattttaggctccgtccccaaaaaaaaaaaaaaaaaaaaaaaaaaaaa

SEQ ID NO: 323 - DNA, 3012 bp, Homo sapiens
gctttggccagagtggtttgatggttttgtgttagtcttcctgcagctgagcttccacaagacactttttccctttcagccacccaatatctcgcgagacttgctattctgcgccccctcctaccttgcgcttgcgcagatcttcaaagcagaaggtcgcgcttggaggaagtggcggctttgagtccggtggcccaatcgctgttactacttctctgaagctcctctcggctgcttgccgagacaccctgccgccaagatgcctcgaattatgatcaaggggggcgtatggaggaataccgaggatgaaattctgaaagcagcggtaatgaaatatgggaaaaatcagtggtctaggattgcctcattgctgcatagaaaatcagcaaagcagtgcaaagccagatggtatgaatggctggatccaagcattaagaagacagaatggtccagagaagaagaggaaaaactcttgcacttggccaagttgatgccaactcagtggaggaccattgctccaatcattggaagaacagcggcccagtgcttagaacactatgaatttcttctggataaagctgcccaaagagacaatgaagaggaaacaacagatgatccacgaaaacttaaacctggagaaatagatccaaatccagaaacaaaaccagcgcggcctgatccaattgatatggatgaggatgaacttgagatgctttctgaagccagagcccgcttggctaatactcagggaaagaaggccaagaggaaagcaagagagaaacaattggaagaagcaagacgtcttgctgccctccaaaaaagaagagaacttcgagcagctggcatagaaattcagaagaaaagaaaaaggaagagaggagttgattataatgccgaaatcccatttgaaaaaaagcctgcccttggtttttatgatacttctgaggaaaactaccaagctcttgacgcagatttcaggaaattaagacaacaggatcttgatggggagctaagatctgaaaaagaaggaagagatagaaaaaaagacaaacagcatttgaaaaggaaaaaagaatctgatttaccatcagctattcttcaaactagtggtgtttctgaatttactaaaaagagaagcaaactagtacttcctgcccctcagatttcagatgcagaactccaggaagttgtaaaagtaggccaagcgagtgaaattgcacgtcaaactgccgaggaatctggcataacaaattctgcttccagtacacttttgtctgagtacaatgtcaccaacaacagcgttgctcttagaacaccacgaacaccagcttcccaggacagaattctgcaggaagcccagaacctcatggccctcaccaatgtggacaccccattgaaaggtggacttaataccccattgcatgagagtgacttctcaggtgtaactccacagcgacaagttgtacagactccaaacacagttctctctactccattcaggactccttctaatggagctgaagggctgactccccggagtggaacaactcccaaaccagttattaactctactccgggtagaactcctcttcgagacaagttaaacattaatcccgaggatggaatggcagactatagtgatccctcttacgtgaagcagatggaaagagaatcccgagaacatctccgtttagggttgttgggccttcctgcccctaagaatgattttgaaattgttctaccagaaaatgccgagaaggagctggaagaacgtgaaatagatgatacttacattgaagatgctgctgatgtggatgctcgaaagcaggccatacgagatgcagagcgtgtaaaggaaatgaaacgaatgcataaagctgtccagaaagatctgccaagaccatcagaagtaaatgaaactattctaagacccttaaatgtagaaccgcctttaacagatttacagaaaagtgaagaactaatcaaaaaagaaatgatcacaatgcttcattatgaccttctacatcacccttatgaaccatctggaaataaaaaaggcaaaactgtagggtttggtaccaataattcagagcacattacctatctggaacataatccttatgaaaagttctccaaagaagagctgaaaaaggcccaggatgttttggtgcaggagatggaagtggttaaacaaggaatgagccatggagagctctcaagtgaagcttataaccaggtgtgggaagaatgctacagtcaagttttatatcttcctgggcagagccgctacacacgggccaatctggctagtaaaaaggacagaattgaatcacttgaaaagaggctcgagataaacaggggtcacatgacgacagaagccaagagggctgcaaagatggaaaagaagatgaaaattttgcttgggggttaccagtctcgtgctatggggctcatgaaacagttgaatgacttatgggaccaaattgaacaggctcacttggagttacgcacttttgaagaactcaagaaacatgaagattctgctattccccggaggctagagtgtctaaaagaagacgttcagcgacaacaagaaagagaaaaggaacttcaacatagatatgctgatttgctgctggagaaagagactttaaagtcaaaattctgaagtacagtttatattctgtcacaggattaattaattgccggttttcatactctagaaggctgaaactgatgtttatcttcattgacaaatttacccaccatctgtggtttttcagttgtttattttaaatgatatcgatcttacacattctgtgtataaagaccttaactccacaggacggacattttagagtttaaattattaaggctatcattcttttagtaatgtcatatttgcaaacttttttagttttggcctttaatttaaaaagcctaattttaaagtgctgcctttgagtaactcttgaataaaaacaaaatataaaaaattgaaaaaaaaaaaaa

SEQ ID NO: 324 - DNA, 3053 bp, Homo sapiens
gagcgcggctggagtttgctgctgccgctgtgcagtttgttcaggggcttgtggtggtgagtccgagaggctgcgtgtgagagacgtgagaaggatcctgcactgaggaggtggaaagaagaggattgctcgaggaggcctggggtctgtgaggcagcggagctgggtgaaggctgcgggttccggcgaggcctgagctgtgctgtcgtcatgcctcaaacccgatcccaggcacaggctacaatcagttttccaaaaaggaagctgtctcgggcattgaacaaagctaaaaactccagtgatgccaaactagaaccaacaaatgtccaaaccgtaacctgttctcctcgtgtaaaagccctgcctctcagccccaggaaacgtctgggcgatgacaacctatgcaacactccccatttacctccttgttctccaccaaagcaaggcaagaaagagaatggtccccctcactcacatacacttaagggacgaagattggtatttgacaatcagctgacaattaagtctcctagcaaaagagaactagccaaagttcaccaaaacaaaatactttcttcagttagaaaaagtcaagagatcacaacaaattctgagcagagatgtccactgaagaaagaatctgcatgtgtgagactattcaagcaagaaggcacttgctaccagcaagcaaagctggtcctgaacacagctgtcccagatcggctgcctgccagggaaagggagatggatgtcatcaggaatttcttgagggaacacatctgtgggaaaaaagctggaagcctttacctttctggtgctcctggaactggaaaaactgcctgcttaagccggattctgcaagacctcaagaaggaactgaaaggctttaaaactatcatgctgaattgcatgtccttgaggactgcccaggctgtattcccagctattgctcaggagatttgtcaggaagaggtatccaggccagctgggaaggacatgatgaggaaattggaaaaacatatgactgcagagaagggccccatgattgtgttggtattggacgagatggatcaactggacagcaaaggccaggatgtattgtacacgctatttgaatggccatggctaagcaattctcacttggtgctgattggtattgctaataccctggatctcacagatagaattctacctaggcttcaagctagagaaaaatgtaagccacagctgttgaacttcccaccttataccagaaatcagatagtcactattttgcaagatcgacttaatcaggtatctagagatcaggttctggacaatgctgcagttcaattctgtgcccgcaaagtctctgctgtttcaggagatgttcgcaaagcactggatgtttgcaggagagctattgaaattgtagagtcagatgtcaaaagccagactattctcaaaccactgtctgaatgtaaatcaccttctgagcctctgattcccaagagggttggtcttattcacatatcccaagtcatctcagaagttgatggtaacaggatgaccttgagccaagaaggagcacaagattccttccctcttcagcagaagatcttggtttgctctttgatgctcttgatcaggcagttgaaaatcaaagaggtcactctggggaagttatatgaagcctacagtaaagtctgtcgcaaacagcaggtggcggctgtggaccagtcagagtgtttgtcactttcagggctcttggaagccaggggcattttaggattaaagagaaacaaggaaacccgtttgacaaaggtgtttttcaagattgaagagaaagaaatagaacatgctctgaaagataaagctttaattggaaatatcttagctactggattgccttaaattcttctcttacaccccacccgaaagtattcagctggcatttagagagctacagtcttcattttagtgctttacacattcgggcctgaaaacaaatatgaccttttttacttgaagccaatgaattttaatctatagattctttaatattagcacagaataatatctttgggtcttactatttttacccataaaagtgaccaggtagaccctttttaattacattcactacttctaccacttgtgtatctctagccaatgtgcttgcaagtgtacagatctgtgtagaggaatgtgtgtatatttacctcttcgtttgctcaaacatgagtgggtatttttttgtttgttttttttgttgttgttgtttttgaggcgcgtctcaccctgttgcccaggctggagtgcaatggcgcgttctctgctcactacagcacccgcttcccaggttgaagtgattctcttgcctcagcctcccgagtagctgggattacaggtgcccaccaccgcgcccagctaattttttaatttttagtagagacagggttttaccatgttggccaggctggtcttgaactcctgaccctcaagtgatctgcccaccttggcctccctaagtgctgggattataggcgtgagccaccatgctcagccattaaggtattttgttaagaactttaagtttagggtaagaagaatgaaaatgatccagaaaaatgcaagcaagtccacatggagatttggaggacactggttaaagaatttatttctttgtatagtatactatgttcatggtgcagatactacaacattgtggcattttagactcgttgagtttcttgggcactcccaagggcgttggggtcataaggagactataactctacagattgtgaatatatttattttcaagttgcattctttgtctttttaagcaatcagatttcaagagagctcaagctttcagaagtcaatgtgaaaattccttcctaggctgtcccacagtctttgctgcccttagatgaagccacttgtttcaagatgactactttggggttgggttttcatctaaacacatttttccagtcttattagataaattagtccatatggttggttaatcaagagccttctgggtttggtttggtggcattaaatgg

SEQ ID NO: 325 - DNA, 1989 bp, Homo sapiens
gcggaatggggcgggacttccagtaggaggcggcaagtttgaaaagtgatgacggttgacgtttgctgatttttgactttgcttgtagctgctccccgaactcgccgtcttcctgtcggcggccggcactgtaggtgagcgcgagaggacggaggaaggaagcctgcagacagacgccttctccatcccaaggcgcgggcaggtgccgggacgctgggcctggcggtgttttcgtcgtgctcagcggtgggaggaggcggaagaaaccagagcctgggagattaacaggaaacttccaagatggaaactttgtctttccccagatataatgtagctgagattgtgattcatattcgcaataagatcttaacaggagctgatggtaaaaacctcaccaagaatgatctttatccaaatccaaagcctgaagtcttgcacatgatctacatgagagccttacaaatagtatatggaattcgactggaacatttttacatgatgccagtgaactctgaagtcatgtatccacatttaatggaaggcttcttaccattcagcaatttagttactcatctggactcatttttgcctatctgccgggtgaatgactttgagactgctgatattctatgtccaaaagcaaaacggacaagtcggtttttaagtggcattatcaactttattcacttcagagaagcatgccgtgaaacgtatatggaatttctttggcaatataaatcctctgcggacaaaatgcaacagttaaacgccgcacaccaggaggcattaatgaaactggagagacttgattctgttccagttgaagagcaagaagagttcaagcagctttcagatggaattcaggagctacaacaatcactaaatcaggattttcatcaaaaaacgatagtgctgcaagagggaaattcccaaaagaagtcaaatatttcagagaaaaccaagcgtttgaatgaactaaaattgtcggtggtttctttgaaagaaatacaagagagtttgaaaacaaaaattgtggattctccagagaagttaaagaattataaagaaaaaatgaaagatacggtccagaagcttaaaaatgccagacaagaagtggtggagaaatatgaaatctatggagactcagttgactgcctgccttcatgtcagttggaagtgcagttatatcaaaagaaaatacaggacctttcagataatagggaaaaattagccagtatcttaaaggagagcctgaacttggaggaccaaattgagagtgatgagtcagaactgaagaaattgaagactgaagaaaattcgttcaaaagactgatgattgtgaagaaggaaaaacttgccacagcacaattcaaaataaataagaagcatgaagatgttaagcaatacaaacgcacagtaattgaggattgcaataaagttcaagaaaaaagaggtgctgtctatgaacgagtaaccacaattaatcaagaaatccaaaaaattaaacttggaattcaacaactaaaagatgctgctgaaagggagaaactgaagtcccaggaaatatttctaaacttgaaaactgctttggagaaataccacgacggtattgaaaaggcagcagaggactcctatgctaagatagatgagaagacagctgaactgaagaggaagatgttcaaaatgtcaacctgattaacaaaattacatgtctttttgtaaatggcttgccatcttttaattttctatttagaaagaaaagttgaagcgaatggaagtatcagaagtaccaaataatgttggcttcatcagtttttatacactctcataagtagttaataagatgaatttaatgtaggcttttattaatttataattaaaataacttgtgcagctattcatgtctctactctgccccttgttgtaaatagtttgagtaaaacaaaactagttacctttgaaatatatatatttttttctgttactatc

SEQ ID NO: 326 - DNA, 2507 bp, Homo sapiens
gcagcgagtggccttcccggttggcgcgcgcccggggcggcggcgctggaggagctcgagacggagcctagttatgtctgggaggcgaacgcggtccggaggagccgctcagcgctccgggccaagggccccatctcctactaagcctctgcggaggtcccagcggaaatcaggctctgaactcccgagcatcctccctgaaatctggccgaagacacccagtgcggctgcagtcagaaagcccatcgtcttaaagaggatcgtggcccatgctgtagaggtcccagctgtccaatcacctcgcaggagccctaggatttcctttttcttggagaaagaaaacgagccccctggcagggagcttactaaggaggaccttttcaagacacacagcgtccctgccacccccaccagcactcctgtgccgaaccctgaggccgagtccagctccaaggaaggagagctggacgccagagacttggaaatgtctaagaaagtcaggcgttcctacagccggctggagaccctgggctctgcctctacctccaccccaggccgccggtcctgctttggcttcgaggggctgctgggggcagaagacttgtccggagtctcgccagtggtgtgctccaaactcaccgaggtccccagggtttgtgcaaagccctgggccccagacatgactctccctggaatctccccaccacccgagaaacagaaacgtaagaagaagaaaatgccagagatcttgaaaacggagctggatgagtgggctgcggccatgaatgccgagtttgaagctgctgagcagtttgatctcctggttgaatgagatgcagtggggggtgcacctggccagactctccctcctgtcctgtacatagccacctccctgtggagaggacacttagggtcccctcccctggtcttgttacctgtgtgtgtgctggtgctgcgcatgaggactgtctgcctttgagggcttgggcagcagcggcagccatcttggttttaggaaatggggccgcctggcccagccactcactggtgtcctgtctcttgtcgtcctgtccttcctatctccccaaagtaccatagccagtttccagatgggccacagactggggaggagaatcagtggcccagccagaagttaaagggctgagggttgaggtgagaggcacctctgctcttgttgggaggggtggctgcttggaaataggcccaggggctctgccagcctcggcctctccctcctgagttgccttctgttggtggctttcttcttgaacccacctgtgtaaagaggttttcagttccgtgggtttcccctttgattctgtaaatagtcccagagagaattcgtgggctgagggcaattctgtcttggaggaagaagctggacattcagcctgtggagtctgagttttgaaggatgtagggagccttagttgggtctcagaccataagtgtgtactacacagaagctgtgttttctagttctggtctgctgttgagatgtttggtaaatgccaggttgatagggcgctggctgcttggagcaaagggtgcatttcagggtgtggccaccaggtgctgtgagtttctgtggctcatggcctctgggctggtcccttgcacagggcccacgctggagtcttaccactctgctgcaggggtggaaggtggcccctcttgtcacccatacccatttcttacaaaataagttacaccgagtctacttggccctagaagagaaagttgaagagtcccagacctactagcattttgcaactatgcttgtaaagtcctcggaaagtttcctcgcgtaccagacagcggcgggggctgatagcaattttagtttttggcctccctatcctctcacatgagaacactgcctggatgcatctcatgatctctggagaatttccccatctttctcttctttccatcgtgtggattcaatagtttggatttgaaggctgccctgcccccgactctcctgccgcacccctggccattgtaccttttgatgtttagaagttcgtggaagtagacgctgaggtgtgcagaggagctggtggataacagagaatgccagggaagatgagtgctgggtcagggtacttggatgaaacggtgcaggccaggcgggccctaataaaaccctctgccaggtctgggagtcccaggccatctgctcaacgctctgtggtttgtcagacctgcaagcaagccccctgctggggaagcctaggtgtccttgagctgaaccgcactgaagaactcttgtcctcactggctgatgcagcagaactcttgggaaatgtcttagtcctgcagaatcaggagtcaccagatgatgcagagttgagatcatcattgcaaagttctctgttcctgaggaactaaatttaaggaaaaaatgggattttgttttagagttggaaaaaaagcctgattaaagagtttctgcctgttaaaaaaaaaaaaaaaaaaaaaaa

SEQ ID NO: 327 - DNA, 2319 bp, Homo sapiens
gtggagtttgaattgggtggcggttgactgtagagccgctctctctcactggcacagcgaggttttgctcagcccttgtctcgggaccgcagcctccgccgagcgccatggctcctaggaagggcagtagtcgggtggccaagaccaactccttacggaggcggaagctcgcctcctttctgaaagacttcgaccgtgaagtggaaatacgaatcaagcaaattgagtcagacaggcagaacctcctcaaggaggtggataacctctacaacatcgagatcctgcggctccccaaggctctgcgcgagatgaactggcttgactacttcgcccttggaggaaacaaacaggccctggaagaggcggcaacagctgacctggatatcaccgaaataaacaaactaacagcagaagctattcagacacccctgaaatctgccaaaacacgaaaggtaatacaggtagatgaaatgatagtggaagaggaagaagaagaagaaaatgaacgtaagaatcttcaaactgcaagagtcaaaaggtgtcctccatccaagaagagaactcagtccatacaaggaaaaggaaaagggaaaaggtcaagccgtgctaacactgttaccccagccgtgggccgattggaggtgtccatggtcaaaccaactccaggcctgacacccaggtttgactcaagggtcttcaagacccctggcctgcgtactccagcagcaggagagcggatttacaacatctcagggaatggcagccctcttgctgacagcaaagagatcttcctcactgtgccagtgggcggcggagagagcctgcgattattggccagtgacttgcagaggcacagtattgcccagctggatccagaggccttgggaaacattaagaagctctccaaccgtctcgcccaaatctgcagcagcatacggacccacaaatgagacaccaaagttgacaggatggacttttaatgggcacttctgggaccctgaagagacttcttcccttcaggcttattgtttgagtgtgaagttccagagcaaggagccatgttcctctaagggaattcaggaattcagacgtgctagtcccacaccagttaggtagagctgtctgttcaccctcccatcccagctgatcccagtcactgcttgctggggccatgccatggaagcttcccatcagtctcccagctgaatcctccctgctctctgagctgctgccttttgcctcctgcaactcaacatcctcttcaccctgccctgcctgcagttgagggggcgaagaagaaccctgtgttctcaggaagactgcctccaccaccgctacccagagaacctctgcatctggcatttctgctctctatgcttgagaccgggaggtttaggctcagataagtgagctctgggccatgagagggtaggtccagaaggtggggggaactgtacagatcagcagagcaggacagttggcagcagtgacctcagtagggaacatgtccgtctaccctctcgcactcatgacacctccccctaccagccctcctcttcctcctcctcctcctcctgtgggaggtggtcagtgggacttagggatctttcacctgctgtgcccagtagttctgaagtctgcttgtggagcagtgttttatgtttatccctgtttactgaagaccaaatactggtttggagacaacttccatgtcttgctcttctacctccctagttagtggaaatttggataagggaactgtagggcccagattctggaggttttatgtcattggccacagaataactgtctctaagctatccatggtccagtggtccctgccaagtctgtagacttcagagagcacttctctcttatggggttcatgggaacaggggtgggtgtgacttgcttggtggcctcattccatgtgtgcctgtgcctggggcatggactttgttaagcagagtcagcagtgaggtcctcattctccagccagcctctctgccctggagaatcatgtgctatgttctaagaatttgagaactagagtcctcatccccaggcttgaaggcacatggctttctcatgtagggctctctgtggtatttgttattattttgcaacaagaccattttagtaaaacagtcctgttcaagttgtattcttttaagttcttttattctcctttccctgagatttttgtatatattgttctgagtaatggtatctttgagctgattgttctaatcagagctggtacctactttcaataaattctggttttgtgttttcttttgtaaaaaaaaaaaaaaaaaa

SEQ ID NO: 328 - DNA, 4815 bp, Homo sapiens
agtggcgtcggaactgcaaagcacctgtgagcttgcggaagtcagttcagactccagcccgctccagcccggcccgacccgaccgcacccggcgcctgccctcgctcggcgtccccggccagccatgggcccttggagccgcagcctctcggcgctgctgctgctgctgcaggtctcctcttggctctgccaggagccggagccctgccaccctggctttgacgccgagagctacacgttcacggtgccccggcgccacctggagagaggccgcgtcctgggcagagtgaattttgaagattgcaccggtcgacaaaggacagcctatttttccctcgacacccgattcaaagtgggcacagatggtgtgattacagtcaaaaggcctctacggtttcataacccacagatccatttcttggtctacgcctgggactccacctacagaaagttttccaccaaagtcacgctgaatacagtggggcaccaccaccgccccccgccccatcaggcctccgtttctggaatccaagcagaattgctcacatttcccaactcctctcctggcctcagaagacagaagagagactgggttattcctcccatcagctgcccagaaaatgaaaaaggcccatttcctaaaaacctggttcagatcaaatccaacaaagacaaagaaggcaaggttttctacagcatcactggccaaggagctgacacaccccctgttggtgtctttattattgaaagagaaacaggatggctgaaggtgacagagcctctggatagagaacgcattgccacatacactctcttctctcacgctgtgtcatccaacgggaatgcagttgaggatccaatggagattttgatcacggtaaccgatcagaatgacaacaagcccgaattcacccaggaggtctttaaggggtctgtcatggaaggtgctcttccaggaacctctgtgatggaggtcacagccacagacgcggacgatgatgtgaacacctacaatgccgccatcgcttacaccatcctcagccaagatcctgagctccctgacaaaaatatgttcaccattaacaggaacacaggagtcatcagtgtggtcaccactgggctggaccgagagagtttccctacgtataccctggtggttcaagctgctgaccttcaaggtgaggggttaagcacaacagcaacagctgtgatcacagtcactgacaccaacgataatcctccgatcttcaatcccaccacgtacaagggtcaggtgcctgagaacgaggctaacgtcgtaatcaccacactgaaagtgactgatgctgatgcccccaataccccagcgtgggaggctgtatacaccatattgaatgatgatggtggacaatttgtcgtcaccacaaatccagtgaacaacgatggcattttgaaaacagcaaagggcttggattttgaggccaagcagcagtacattctacacgtagcagtgacgaatgtggtaccttttgaggtctctctcaccacctccacagccaccgtcaccgtggatgtgctggatgtgaatgaagcccccatctttgtgcctcctgaaaagagagtggaagtgtccgaggactttggcgtgggccaggaaatcacatcctacactgcccaggagccagacacatttatggaacagaaaataacatatcggatttggagagacactgccaactggctggagattaatccggacactggtgccatttccactcgggctgagctggacagggaggattttgagcacgtgaagaacagcacgtacacagccctaatcatagctacagacaatggttctccagttgctactggaacagggacacttctgctgatcctgtctgatgtgaatgacaacgcccccataccagaacctcgaactatattcttctgtgagaggaatccaaagcctcaggtcataaacatcattgatgcagaccttcctcccaatacatctcccttcacagcagaactaacacacggggcgagtgccaactggaccattcagtacaacgacccaacccaagaatctatcattttgaagccaaagatggccttagaggtgggtgactacaaaatcaatctcaagctcatggataaccagaataaagaccaagtgaccaccttagaggtcagcgtgtgtgactgtgaaggggccgctggcgtctgtaggaaggcacagcctgtcgaagcaggattgcaaattcctgccattctggggattcttggaggaattcttgctttgctaattctgattctgctgctcttgctgtttcttcggaggagagcggtggtcaaagagcccttactgcccccagaggatgacacccgggacaacgtttattactatgatgaagaaggaggcggagaagaggaccaggactttgacttgagccagctgcacaggggcctggacgctcggcctgaagtgactcgtaacgacgttgcaccaaccctcatgagtgtcccccggtatcttccccgccctgccaatcccgatgaaattggaaattttattgatgaaaatctgaaagcggctgatactgaccccacagccccgccttatgattctctgctcgtgtttgactatgaaggaagcggttccgaagctgctagtctgagctccctgaactcctcagagtcagacaaagaccaggactatgactacttgaacgaatggggcaatcgcttcaagaagctggctgacatgtacggaggcggcgaggacgactaggggactcgagagaggcgggccccagacccatgtgctgggaaatgcagaaatcacgttgctggtggtttttcagctcccttcccttgagatgagtttctggggaaaaaaaagagactggttagtgatgcagttagtatagctttatactctctccactttatagctctaataagtttgtgttagaaaagtttcgacttatttcttaaagcttttttttttttcccatcactctttacatggtggtgatgtccaaaagatacccaaattttaatattccagaagaacaactttagcatcagaaggttcacccagcaccttgcagattttcttaaggaattttgtctcacttttaaaaagaaggggagaagtcagctactctagttctgttgttttgtgtatataattttttaaaaaaaatttgtgtgcttctgctcattactacactggtgtgtccctctgccttttttttttttttaagacagggtctcattctatcggccaggctggagtgcagtggtgcaatcacagctcactgcagccttgtcctcccaggctcaagctatccttgcacctcagcctcccaagtagctgggaccacaggcatgcaccactacgcatgactaattttttaaatatttgagacggggtctccctgtgttacccaggctggtctcaaactcctgggctcaagtgatcctcccatcttggcctcccagagtattgggattacagacatgagccactgcacctgcccagctccccaactccctgccattttttaagagacagtttcgctccatcgcccaggcctgggatgcagtgatgtgatcatagctcactgtaacctcaaactctggggctcaagcagttctcccaccagcctcctttttatttttttgtacagatggggtcttgctatgttgcccaagctggtcttaaactcctggcctcaagcaatccttctgccttggccccccaaagtgctgggattgtgggcatgagctgctgtgcccagcctccatgttttaatatcaactctcactcctgaattcagttgctttgcccaagataggagttctctgatgcagaaattattgggctcttttagggtaagaagtttgtgtctttgtctggccacatcttgactaggtattgtctactctgaagacctttaatggcttccctctttcatctcctgagtatgtaacttgcaatgggcagctatccagtgacttgttctgagtaagtgtgttcattaatgtttatttagctctgaagcaagagtgatatactccaggacttagaatagtgcctaaagtgctgcagccaaagacagagcggaactatgaaaagtgggcttggagatggcaggagagcttgtcattgagcctggcaatttagcaaactgatgctgaggatgattgaggtgggtctacctcatctctgaaaattctggaaggaatggaggagtctcaacatgtgtttctgacacaagatccgtggtttgtactcaaagcccagaatccccaagtgcctgcttttgatgatgtctacagaaaatgctggctgagctgaacacatttgcccaattccaggtgtgcacagaaaaccgagaatattcaaaattccaaatttttttcttaggagcaagaagaaaatgtggccctaaagggggttagttgaggggtagggggtagtgaggatcttgatttggatctctttttatttaaatgtgaatttcaacttttgacaatcaaagaaaagacttttgttgaaatagctttactgtttctcaagtgttttggagaaaaaaatcaaccctgcaatcactttttggaattgtcttgatttttcggcagttcaagctatatcgaatatagttctgtgtagagaatgtcactgtagttttgagtgtatacatgtgtgggtgctgataattgtgtattttctttgggggtggaaaaggaaaacaattcaagctgagaaaagtattctcaaagatgcatttttataaattttattaaacaattttgttaaaccat

SEQ ID NO: 329 - DNA, 2759 bp, Homo sapiens
tgcccctccaccccagccagctcatgggccacgtggcctggcccagcctcagcacccagggccagtgaacagagccctggctggagtccaaacatgtggggcctggtgaggctcctgctggcctggctgggtggctggggctgcatggggcgtctggcagccccagcccgggcctgggcagggtcccgggaacacccagggcctgctctgctgcggactcgaaggagctgggtctggaaccagttctttgtcattgaggaatatgctggtccagagcctgttctcattggcaagctgcactcggatgttgaccggggagagggccgcaccaagtacctgttgaccggggagggggcaggcaccgtatttgtgattgatgaggccacaggcaatattcatgttaccaagagccttgaccgggaggaaaaggcgcaatatgtgctactggcccaagccgtggaccgagcctccaaccggcccctggagcccccatcagagttcatcatcaaagtgcaagacatcaacgacaatccacccatttttccccttgggccctaccatgccaccgtgcccgagatgtccaatgtcgggacatcagtgatccaggtgactgctcacgatgctgatgaccccagctatgggaacagtgccaagctggtgtacactgttctggatggactgcctttcttctctgtggacccccagactggagtggtgcgtacagccatccccaacatggaccgggagacacaggaggagttcttggtggtgatccaggccaaggacatgggcggccacatgggggggctgtcaggcagcactacggtgactgtcacgctcagcgatgtcaacgacaacccccccaagttcccacagagcctataccagttctccgtggtggagacagctggacctggcacactggtgggccggctccgggcccaggacccagacctgggggacaacgccctgatggcatacagcatcctggatggggaggggtctgaggccttcagcatcagcacagacttgcagggtcgagacgggctcctcactgtccgcaagcccctagactttgagagccagcgctcctactccttccgtgtcgaggccaccaacacgctcattgacccagcctatctgcggcgagggcccttcaaggatgtggcctctgtgcgtgtggcagtgcaagatgccccagagccacctgccttcacccaggctgcctaccacctgacagtgcctgagaacaaggccccggggaccctggtaggccagatctccgcggctgacctggactcccctgccagcccaatcagatactccatcctcccccactcagatccggagcgttgcttctctatccagcccgaggaaggcaccatccatacagcagcacccctggatcgcgaggctcgcgcctggcacaacctcactgtgctggctacagagctcgacagttctgcacaggcctcgcgcgtgcaagtggccatccagaccctggatgagaatgacaatgctccccagctggctgagccctacgatacttttgtgtgtgactctgcagctcctggccagctgattcaggtcatccgggccctggacagggatgaagttggcaacagtagccatgtctcctttcaaggtcctctgggccctgatgccaactttactgtccaggacaaccgagatggctccgccagcctgctgctgccctcccgccctgctccaccccgccatgccccctacttggttcccatagaactgtgggactgggggcagccggcgctgagcagcactgccacagtgactgttagtgtgtgccgctgccagcctgacggctctgtggcatcctgctggcctgaggctcacctctcagctgctgggctcagcaccggcgccctgcttgccatcatcacctgtgtgggtgccctgcttgccctggtggtgctcttcgtggccctgcggcggcagaagcaagaagcactgatggtactggaggaggaggacgtccgagagaacatcatcacctacgacgacgagggcggcggcgaggaggacaccgaggccttcgacatcacggccttgcagaacccggacggggcggcccccccggcgcccggccctcccgcgcgccgagacgtgttgccccgggcccgggtgtcgcgccagcccagaccccccggccccgccgacgtggcgcagctcctggcgctgcggctccgcgaggcggacgaggaccccggcgtacccccgtacgactcggtgcaggtgtacggctacgagggccgcggctcctcttgcggctccctcagctccctgggctccggcagcgaagccggcggcgcccccggccccgcggagccgctggacgactggggtccgctcttccgcaccctggccgagctgtatggggccaaggagcccccggccccctgagcgcccgggctggcccggcccaccgcggggggggggcagcgggcacaggccctctgagtgagccccacggggtccaggcgggcggcagcagcccaggggccccaggcctcctccctgtccttgtgtccctccttgcttccccggggcaccctcgctctcacctccctcctcctgagtcggtgtgtgtgtctctctccaggaatctttgtctctatctgtgacacgctcctctgtccgggcctgggtttcctgccctggccctggccctgcgatctctcactgtgattcctctccttcctccgtggcgttttgtctctgca

SEQ ID NO: 330 - DNA, 2873 bp, Homo sapiens
tgcccctccaccccagccagctcatgggccacgtggcctggcccagcctcagcacccagggccagtgaacagagccctggctggagtccaaacatgtggggcctggtgaggctcctgctggcctggctgggtggctggggctgcatggggcgtctggcagccccagcccgggcctgggcagggtcccgggaacacccagggcctgctctgctgcggactcgaaggagctgggtctggaaccagttctttgtcattgaggaatatgctggtccagagcctgttctcattggcaagctgcactcggatgttgaccggggagagggccgcaccaagtacctgttgaccggggagggggcaggcaccgtatttgtgattgatgaggccacaggcaatattcatgttaccaagagccttgaccgggaggaaaaggcgcaatatgtgctactggcccaagccgtggaccgagcctccaaccggcccctggagcccccatcagagttcatcatcaaagtgcaagacatcaacgacaatccacccatttttccccttgggccctaccatgccaccgtgcccgagatgtccaatgtcgggacatcagtgatccaggtgactgctcacgatgctgatgaccccagctatgggaacagtgccaagctggtgtacactgttctggatggactgcctttcttctctgtggacccccagactggagtggtgcgtacagccatccccaacatggaccgggagacacaggaggagttcttggtggtgatccaggccaaggacatgggcggccacatgggggggctgtcaggcagcactacggtgactgtcacgctcagcgatgtcaacgacaacccccccaagttcccacagagcctataccagttctccgtggtggagacagctggacctggcacactggtgggccggctccgggcccaggacccagacctgggggacaacgccctgatggcatacagcatcctggatggggaggggtctgaggccttcagcatcagcacagacttgcagggtcgagacgggctcctcactgtccgcaagcccctagactttgagagccagcgctcctactccttccgtgtcgaggccaccaacacgctcattgacccagcctatctgcggcgagggcccttcaaggatgtggcctctgtgcgtgtggcagtgcaagatgccccagagccacctgccttcacccaggctgcctaccacctgacagtgcctgagaacaaggccccggggaccctggtaggccagatctccgcggctgacctggactcccctgccagcccaatcagatactccatcctcccccactcagatccggagcgttgcttctctatccagcccgaggaaggcaccatccatacagcagcacccctggatcgcgaggctcgcgcctggcacaacctcactgtgctggctacagagctcggctggagctgggggccagaaaggggctgggtacctcttctggttgctgagtggagtgcaccagcagccccaccccagagaagccctgttggaagcgctgtgggaatcccccaagacagttctgcacaggcctcgcgcgtgcaagtggccatccagaccctggatgagaatgacaatgctccccagctggctgagccctacgatacttttgtgtgtgactctgcagctcctggccagctgattcaggtcatccgggccctggacagagatgaagttggcaacagtagccatgtctcctttcaaggtcctctgggccctgatgccaactttactgtccaggacaaccgagatggctccgccagcctgctgctgccctcccgccctgctccaccccgccatgccccctacttggttcccatagaactgtgggactgggggcagccggcgctgagcagcactgccacagtgactgttagtgtgtgccgctgccagcctgacggctctgtggcatcctgctggcctgaggctcacctctcagctgctgggctcagcaccggcgccctgcttgccatcatcacctgtgtgggtgccctgcttgccctggtggtgctcttcgtggccctgcggcggcagaagcaagaagcactgatggtactggaggaggaggacgtccgagagaacatcatcacctacgacgacgagggcggcggcgaggaggacaccgaggccttcgacatcacggccttgcagaacccggacggggcggcccccccggcgcccggccctcccgcgcgccgagacgtgttgccccgggcccgggtgtcgcgccagcccagaccccccggccccgccgacgtggcgcagctcctggcgctgcggctccgcgaggcggacgaggaccccggcgtacccccgtacgactcggtgcaggtgtacggctacgagggccgcggctcctcttgcggctccctcagctccctgggctccggcagcgaagccggcggcgcccccggccccgcggagccgctggacgactggggtccgctcttccgcaccctggccgagctgtatggggccaaggagcccccggccccctgagcgcccgggctggcccggcccaccgcggggggggggcagcgggcacaggccctctgagtgagccccacggggtccaggcgggcggcagcagcccaggggccccaggcctcctccctgtccttgtgtccctccttgcttccccggggcaccctcgctctcacctccctcctcctgagtcggtgtgtgtgtctctctccaggaatctttgtctctatctgtgacacgctcctctgtccgggcctgggtttcctgccctggccctggccctgcgatctctcactgtgattcctctccttcctccgtggcgttttgtctctgca

SEQ ID NO: 331 - DNA, 948 bp, Homo sapiens; identical to SEQ ID NO: 313

SEQ ID NO: 332 - DNA, 2325 bp, Homo sapiens
gcgggaagcaggggcggggcctctggtggcggtcgggaactcggtgggaggcggcaacattgtttcaagttggccaaattgacaagagcgagaggtatactgcgttccatcccgacccggggccacggtactgggccctgtttccccctcctcggcccccgagagccagggtccgccttctgcagggttcccaggcccccgctccagggccgggctgacccgactcgctggcgcttcatggagaacttccaaaaggtggaaaagatcggagagggcacgtacggagttgtgtacaaagccagaaacaagttgacgggagaggtggtggcgcttaagaaaatccgcctggacactgagactgagggtgtgcccagtactgccatccgagagatctctctgcttaaggagcttaaccatcctaatattgtcaagctgctggatgtcattcacacagaaaataaactctacctggtttttgaatttctgcaccaagatctcaagaaattcatggatgcctctgctctcactggcattcctcttcccctcatcaagagctatctgttccagctgctccagggcctagctttctgccattctcatcgggtcctccaccgagaccttaaacctcagaatctgcttattaacacagagggggccatcaagctagcagactttggactagccagagcttttggagtccctgttcgtacttacacccatgaggtggtgaccctgtggtaccgagctcctgaaatcctcctgggctgcaaatattattccacagctgtggacatctggagcctgggctgcatctttgctgagatggtgactcgccgggccctattccctggagattctgagattgaccagctcttccggatctttcggactctggggaccccagatgaggtggtgtggccaggagttacttctatgcctgattacaagccaagtttccccaagtgggcccggcaagattttagtaaagttgtacctcccctggatgaagatggacggagcttgttatcgcaaatgctgcactacgaccctaacaagcggatttcggccaaggcagccctggctcaccctttcttccaggatgtgaccaagccagtaccccatcttcgactctgatagccttcttgaagcccccagccctaatctcaccctctcctccagtgtgggcttgaccaggcttggccttgggctatttggactcaggtgggccctctgaacttgccttaaacactcaccttctagtcttggccagccaactctgggaatacaggggtgaaaggggggaaccagtgaaaatgaaaggaagtttcagtattagatgcacttaagttagcctccaccaccctttcccccttctcttagttattgctgaagagggttggtataaaaataattttaaaaaagccttcctacacgttagatttgccgtaccaatctctgaatgccccataattattatttccagtgtttgggatgaccaggatcccaagcctcctgctgccacaatgtttataaaggccaaatgatagcgggggctaagttggtgcttttgagaaccaagtaaaacaaaaccactgggaggagtctattttaaagaattcggttgaaaaaatagatccaatcagtttataccctagttagtgttttgcctcacctaataggctgggagactgaagactcagcccgggtggggctgcagaaaaatgattggccccagtccccttgtttgtcccttctacaggcatgaggaatctgggaggccctgagacagggattgtgcttcattccaatctattgcttcaccatggccttatgaggcaggtgagagatgtttgaatttttctcttccttttagtattcttagttgttcagttgccaaggatccctgatcccattttcctctgacgtccacctcctaccccataggagttagaagttagggtttaggcatcattttgagaatgctgacactttttcagggctgtgattgagtgagggcatgggtaaaaatatttctttaaaagaaggatgaacaattatatttatatttcaggttatatccaatagtagagttggctttttttttttttttttggtcatagtgggtggatttgttgccatgtgcaccttggggttttgtaatgacagtgctaaaaaaaaaaagcattttttttttatgatttgtctctgtcacccttgtccttgagtgctcttgctattaacgttatttgtaatttagtttgtagctcattaaaaaaatgtgcctagttttataaaaaaaaaaaaaaaaaacaaaaaaaaaaaaaa

SEQ ID NO: 333 - DNA, 2223 bp, Homo sapiens
gcgggaagcaggggcggggcctctggtggcggtcgggaactcggtgggaggcggcaacattgtttcaagttggccaaattgacaagagcgagaggtatactgcgttccatcccgacccggggccacggtactgggccctgtttccccctcctcggcccccgagagccagggtccgccttctgcagggttcccaggcccccgctccagggccgggctgacccgactcgctggcgcttcatggagaacttccaaaaggtggaaaagatcggagagggcacgtacggagttgtgtacaaagccagaaacaagttgacgggagaggtggtggcgcttaagaaaatccgcctggacactgagactgagggtgtgcccagtactgccatccgagagatctctctgcttaaggagcttaaccatcctaatattgtcaagctgctggatgtcattcacacagaaaataaactctacctggtttttgaatttctgcaccaagatctcaagaaattcatggatgcctctgctctcactggcattcctcttcccctcatcaagagctatctgttccagctgctccagggcctagctttctgccattctcatcgggtcctccaccgagaccttaaacctcagaatctgcttattaacacagagggggccatcaagctagcagactttggactagccagagcttttggagtccctgttcgtacttacacccatgaggtgactcgccgggccctattccctggagattctgagattgaccagctcttccggatctttcggactctggggaccccagatgaggtggtgtggccaggagttacttctatgcctgattacaagccaagtttccccaagtgggcccggcaagattttagtaaagttgtacctcccctggatgaagatggacggagcttgttatcgcaaatgctgcactacgaccctaacaagcggatttcggccaaggcagccctggctcaccctttcttccaggatgtgaccaagccagtaccccatcttcgactctgatagccttcttgaagcccccagccctaatctcaccctctcctccagtgtgggcttgaccaggcttggccttgggctatttggactcaggtgggccctctgaacttgccttaaacactcaccttctagtcttggccagccaactctgggaatacaggggtgaaaggggggaaccagtgaaaatgaaaggaagtttcagtattagatgcacttaagttagcctccaccaccctttcccccttctcttagttattgctgaagagggttggtataaaaataattttaaaaaagccttcctacacgttagatttgccgtaccaatctctgaatgccccataattattatttccagtgtttgggatgaccaggatcccaagcctcctgctgccacaatgtttataaaggccaaatgatagcgggggctaagttggtgcttttgagaaccaagtaaaacaaaaccactgggaggagtctattttaaagaattcggttgaaaaaatagatccaatcagtttataccctagttagtgttttgcctcacctaataggctgggagactgaagactcagcccgggtggggctgcagaaaaatgattggccccagtccccttgtttgtcccttctacaggcatgaggaatctgggaggccctgagacagggattgtgcttcattccaatctattgcttcaccatggccttatgaggcaggtgagagatgtttgaatttttctcttccttttagtattcttagttgttcagttgccaaggatccctgatcccattttcctctgacgtccacctcctaccccataggagttagaagttagggtttaggcatcattttgagaatgctgacactttttcagggctgtgattgagtgagggcatgggtaaaaatatttctttaaaagaaggatgaacaattatatttatatttcaggttatatccaatagtagagttggctttttttttttttttttggtcatagtgggtggatttgttgccatgtgcaccttggggttttgtaatgacagtgctaaaaaaaaaaagcattttttttttatgatttgtctctgtcacccttgtccttgagtgctcttgctattaacgttatttgtaatttagtttgtagctcattaaaaaaatgtgcctagttttataaaaaaaaaaaaaaaaaacaaaaaaaaaaaaaa

SEQ ID NO: 334 - DNA, 1534 bp, Homo sapiens
ggaacgccaaccgcctgggcctagcgcagcttcctccgcccaccacggaagtgaggcggggatactaaagcgacggagcccggtggacggaagtgggtgttggaggctttaaggtagctttaaattcgtgttgtcctgggagctcgcccttttcggctggagtcgggctttacggcgccggatggctctggacgtgaagtctcgggcaaagcgttatgagaagctggacttccttggggagggacagtttgccaccgtttacaaggccagagataagaacaccaaccaaattgtcgccattaagaaaatcaaacttggacatagatcagaagctaaagatggtataaatagaaccgccttaagagagataaaattattacaggagctaagtcatccaaatataattggtctccttgatgcttttggacataaatctaatattagccttgtctttgattttatggaaactgatctagaggttataataaaggataatagtcttgtgctgacaccatcacacatcaaagcctacatgttgatgactcttcaaggattagaatatttacatcaacattggatcctacatagggatctgaaaccaaacaacttgttgctagatgaaaatggagttctaaaactggcagattttggcctggccaaatcttttgggagccccaatagagcttatacacatcaggttgtaaccaggtggtatcgggcccccgagttactatttggagctaggatgtatggtgtaggtgtggacatgtgggctgttggctgtatattagcagagttacttctaagggttccttttttgccaggagattcagaccttgatcagctaacaagaatatttgaaactttgggcacaccaactgaggaacagtggccggacatgtgtagtcttccagattatgtgacatttaagagtttccctggaatacctttgcatcacatcttcagtgcagcaggagacgacttactagatctcatacaaggcttattcttatttaatccatgtgctcgaattacggccacacaggcactgaaaatgaagtatttcagtaatcggccagggccaacacctggatgtcagctgccaagaccaaactgtccagtggaaaccttaaaggagcaatcaaatccagctttggcaataaaaaggaaaagaacagaggccttagaacaaggaggattgcccaagaaactaattttttaaagagaacactggacaacattttactactgagggaaatagccaaaaaggcaaataatggaaaaatagtaaacattaagtaaatgctgtagaagtgagtttgtaaatattctacacatgtaaaatatgtaaaactatgggttatttttattaaatgtattttaaaataaaaatttaattctggtttttctgattagagtgcaaaagtgagaaaagttcaatactcttgaaatgtagaattgaaaatgcattagggaaaacttaataaaaattattaccagttatttggaagatctgaaaaaaaaaaaaaaaaaa

SEQ ID NO: 335 - DNA, 11611 bp, Homo sapiens
ggcttcagccctgcagggaaagaaaagtgcaatgattctggactgagacgcgcttgggcagaggctatgtaatcgtgtctgtgttgaggacttcgcttcgaggagggaagaggagggatcggctcgctcctccggcggcggcggcggcggcgactctgcaggcggagtttcgcggcggcggcaccagggttacgccagccccgcggggaggtctctccatccagcttctgcagcggcgaaagccccagcgcccgagcgcctgagccggcggggagcaagtaaagctagaccgatctccggggagccccggagtaggcgagcggcggccgccagctagttgagcgcaccccccgcccgccccagcggcgccgcggcgggcggcgtccaggcggcatggagaaggacggcctgtgccgcgctgaccagcagtacgaatgcgtggcggagatcggggagggcgcctatgggaaggtgttcaaggcccgcgacttgaagaacggaggccgtttcgtggcgttgaagcgcgtgcgggtgcagaccggcgaggagggcatgccgctctccaccatccgcgaggtggcggtgctgaggcacctggagaccttcgagcaccccaacgtggtcaggttgtttgatgtgtgcacagtgtcacgaacagacagagaaaccaaactaactttagtgtttgaacatgtcgatcaagacttgaccacttacttggataaagttccagagcctggagtgcccactgaaaccataaaggatatgatgtttcagcttctccgaggtctggactttcttcattcacaccgagtagtgcatcgcgatctaaaaccacagaacattctggtgaccagcagcggacaaataaaactcgctgacttcggccttgcccgcatctatagtttccagatggctctaacctcagtggtcgtcacgctgtggtacagagcacccgaagtcttgctccagtccagctacgccacccccgtggatctctggagtgttggctgcatatttgcagaaatgtttcgtagaaagcctctttttcgtggaagttcagatgttgatcaactaggaaaaatcttggacgtgattggactcccaggagaagaagactggcctagagatgttgcccttcccaggcaggcttttcattcaaaatctgcccaaccaattgagaagtttgtaacagatatcgatgaactaggcaaagacctacttctgaagtgtttgacatttaacccagccaaaagaatatctgcctacagtgccctgtctcacccatacttccaggacctggaaaggtgcaaagaaaacctggattcccacctgccgcccagccagaacacctcggagctgaatacagcctgaggcctcagcagccgccttaagctgatcctgcggagaacacccttggtggcttatgggtccccctcagcaagccctacagagctgtggaggattgctatctggaggccttccagctgctgtcttctggacaggctctgcttctccaaggaaaccgcctagtttactgttttgaaatcaatgcaagagtgattgcagctttatgttcatttgtttgtttgtttgtctgtttgtttcaagaacctggaaaaattccagaagaagagaagctgctgaccaattgtgctgccatttgatttttctaaccttgaatgctgccagtgtggagtgggtaatccaggcacagctgagttatgatgtaatctctctgcagctgccgggcctgatttggtacttttgagtgtgtgtgtgcatgtgtgtgtgtgtgtgtgtgtgtgtgtgtgtgtatgtgagagattctgtgatcttttaaagtgttactttttgtaaacgacaagaataattcaattttaaagactcaaggtggtcagtaaataacaggcatttgttcactgaaggtgattcaccaaaatagtcttctcaaattagaaagttaaccccatgtcctcagcatttcttttctggccaaaagcagtaaatttgctagcagtaaaagatgaagttttatacacacagcaaaaaggagaaaaaattctagtatattttaagagatgtgcatgcattctatttagtcttcagaatgctgaatttacttgttgtaagtctattttaaccttctgtatgacatcatgctttatcatttcttttggaaaatagcctgtaagctttttattacttgctataggtttagggagtgtacctcagatagattttaaaaaaaagaatagaaagcctttatttcctggtttgaaattcctttcttccctttttttgttgttgttattgttgtttgttgttgttattttgtttttgtttttaggaatttgtcagaaactctttcctgttttggtttggagagtagttctctctaactagagacaggagtggccttgaaattttcctcatctattacactgtactttctgccacacactgccttgttggcaaagtatccatcttgtctatctcccggcacttctgaaatatattgctaccattgtataactaataacagattgcttaagctgttcccatgcaccacctgtttgcttgctttcaatgaacctttcataaattcgcagtctcagcttatggtttatggcctcgattctgcaaacctaacagggtcacatatgttctctaatgcagtccttctacctggtgtttacttttgctacccaaataatgagtaggatcttgttttcgtatacccccaccactcccattgctaccaactgtcaccttgtgcactccttttttatagaagatattttcagtgtctttacctgagggtatgtctttagctatgttttagggccatacatttactctatcaaatgatcttttctccatcccccaggctgtgcttatttctagtgccttgtgctcactcctgctctctacagagccagcctggcctgggcattgtaaacagcttttcctttttctcttactgttttctctacagtcctttatatttcataccatctctgccttataagtggtttagtgctcagttggctctagtaaccagaggacacagaaagtatcttttggaaagtttagccacctgtgctttctgactcagagtgcatgcaacagttagatcatgcaacagttagattatgtttagggttaggattttcaaagaatggaggttgctgcactcagaaaataattcagatcatgtttatgcattattaagttgtactgaattctttgcagcttaatgtgatatatgactatcttgaacaagagaaaaaactaggagatgtttctcctgaagagcttttggggttgggaactattcttttttaattgctgtactacttaacattgttctaattcagtagcttgaggaacaggaacattgttttctagagcaagataataaaggagatgggccatacaaatgttttctactttcgttgtgacaacattgattaggtgttgtcagtactataaatgcttgagatataatgaatccacagcattcaaggtcaggtctactcaaagtctcacatggaaaagtgagttctgcctttcctttgatcgagggtcaaaatacaaagacatttttgctagggcctacaaattgaatttaaaaactcactgcactgattcatctgagctttttggttagtattcatggctagagtgaacatagctttagtttttgctgttgtaaaagtgttttcataagttcactcaagaaaaatgcagctgttctgaactggaatttttcagcattctttagaattttaaatgagtagagagctcaacttttattcctagcatctgcttttgactcatttctaggcagtgcttatgaagaaaaattaaagcacaaacattctggcattcaatcgttggcagattatcttctgatgacacagaatgaaagggcatctcagcctctctgaactttgtaaaaatctgtccccagttcttccatcggtgtagttgttgcatttgagtgaatactctcttgatttatgtattttatgtccagattcgccatttctgaaatccagatccaacacaagcagtcttgccgttagggcattttgaagcagatagtagagtaagaacttagtgactacagcttattcttctgtaacatatggtttcaaacatctttgccaaaagctaagcagtggtgaactgaaaagggcatattgccccaaggttacactgaagcagctcatagcaagttaaaatattgtgacagatttgaaatcatgtttgaatttcatagtaggaccagtacaagaatgtccctgctagtttctgtttgatgtttggttctggcggctcaggcattttgggaactgttgcacagggtgcagtcaaaacaacctacatataaaaattacataaaagaaccttgtccatttagctttcataagaaatcccatggcaaagagtaataaaaaggacctaatcttaaaaatacaatttctaagcacttgtaagaacccagtgggttggagcctcccactttgtccctcctttgaagtggatgggaactcaaggtgcaaagaacctgttttggaagaaagcttggggccatttcagccccctgtattctcatgattttctctcaggaagcacacactgtgaatggcagacttttcatttagccccaggtgacttactaaaaatagttgaaaattattcacctaagaatagaatctcagcattgtgttaaataaaaatgaaagctttagaaggcatgagatgttcctatcttaaataaagcatgtttcttttctatagagaaatgtatagtttgactctccagaatgtactatccatcttgatgagaaaactcttaaatagtaccaaacattttgaactttaaattatgtatttaaagtgagtgtttaagaaactgtagctgcttcttttacaagtggtgcctattaaagtcagtaatggccattattgttccattgtggaaattaaattatgtaagcttcctaatatcataaacatattaaaattcttctaaaatattgcttttcttttaagtgacaatttgactattcttatgataagcacatgagagtgtcttacattttccaaaagcaggctttaattgcatagttgagtctaggaaaaaataatgttaaaagtgaatatgccaccataattacttaattatgttagtatagaaactacagaatatttaccctggaaagaaaatattggaatgttattataaactcttagatatttatataattcaaaagaatgcatgtttcacattgtgacagataaagatgtatgatttctaaggctttaaaaattattcataaaacagtgggcaatagataaaggaaattctggagaaaatgaaggtatttaaagggtagtttcaaagctatatatattttgaaggatatattctttatgaacaaatatattgtaaaaatttatactaaggtcatctggtaactgtgggattaatatggtcgaaaacaaatgttatggagaagctgtcccaagcaaactaaattacctgtacttttttcccatttcaagggaagaggcaaccacatgaagcaatacttcttacacatgcctaagaacgttcattgaaaaaataaatttttaaaaggcatgtgtttcctatgccaccaatacttttgaaaaattgtgaaccttacccaaaaccatttatcatgtccattaagtatatttgggtatataattaggaagatatttacatgttccatctccacagtggaaaaacttattgaggctaccaaagtgtgccaagaaatgtaagtccttagagtaattagaaatgctgttttcctcaaaagcatgagaaactagcattttcatttcttatttactccctttctatatcaatgcaattcacaacccaattttaatacatccctatatctcaagcatttctatcttgtactttttcagaaaataaaccaaaaataatcctttggtctctctatcttctgacctttgtaagcaacagaaatgtaaaaacagaaggggtccaatttttacacgtttttttctcaagtagcctttctggggatttttattttcttaatgaagtgccaatcagcttttcaaaatgttttctatttctcagcatttccaggaagtgataacgtttagctaaatgagtagaagtggacttccttcaacatattgttaccttgtctagccttaggaagaaaacaagagccacctgaaaataaatacaggctcttttcgagcatctgctgaaatactgttacagcaatttgaagttgatgtggtaggaaaggaaggtgacttttcttgcaaaagtctttctaaacattcacactgtcctaagagatgagctttcttgttttattccggtatattccacaaggtggcacttttagagaaaaacaaatctgatgaagactaaagaggtacttctaaaagagatttcattctaactttatttttctgcgcatatttaactctttcctagcacttgttttttgggatgattaatagtctctataatgttctgtaacttcaatattttacttgttacctaggttctgaacaattgtctgcaaataaattgttcttaaggatggataatacacccattttgatcatttaagtaaagaaagcctagtcattcattcagtcaagaaaaaatttttgaagtacccagttaccttacttttctagattaaaacaggcttagttactaaaaaggcagtcctcatctgtgaacaggatagtttcgttagaagtataaaactcctttagtggccccagttaaaacacacataccctctctgctgctttcaaattccctagcatggtggcctttcaacattgattaaattttaaaatcctaatttaaagatcaggtgagcaaaatgagtagcacatcagtaattcagtagacaaaacttttgtctgaaaaattgctgtattgaaacagagccctaaaataccaaaagaccaggtaattttaacatttgtggaatcacaaatgtaaattcataagaagctctaattaaaaaaaaaaagtctgaagtatatgagcataacaacttaggagtgtgtctacatacttaacttttgaagttttttggcaactttatatactttttttaaatttacaagtctacttaaagacttcttataccccaaatgattaagttaattttagaggtcacctttctcacagcagtgtcacttgaaatttagtagggaaggatattgcagtatttttcagtttccttagcacagcaccacagaaagcagcttattccttttgagtggcagacactcgacggtgcctgcccaactttcctcctgagtggcaagcagatgagtctcagtaattcatactgaaccaaaatgccacatacactaggggcagtcagaaactggctgagaaatcccccgcctcattcgcccctctgctcccaggaactagagtccagttaaagcccctatgcgaaaggccgaattccaccccagggtttgttataacagtggccagtctgaaccccatttgctcgtgctcaaaacttgattcccacttgaaagccttccgggcgcgctgcctcgttgccccgcccctttggcaggagagaggcagtgggcgaggccgggctggggccccgcctcccactcacctgccggtgcctgaaattatgtgcggccccgcgggctgctttccgaggtcagagtgccctgctgctgtctcagaggcatctgttctgcaaatcttaggaagaaaaatgtccctagtagcaaacgggtgtcttctgtgcataaataagtacaacacaattctccgaaagttcgggtaaaaagagatgcggtagcagctgccctgtgtgaagctgtctaccccgcatctctcaggcgctaagctcagtttttgtttttgtttttgtttttttaaagaaaagatgtataattgcaggaatttttttttatttttttattttccatcattctatatatgtgatggtgaaagatatgcctggaaaagttttgttttgaaaagtttattttctgcttcgtcttcagttggcaaaagctctcaattctttagcttccagtttcttttctctctttttctttgttaggtaattaaaggtatgtaaacaaattatctcatgtagcaggggattttcatgttgagaggaatcttccgtgtgagttgtttggtcacacaaataaccctttctcaattttaggagtttggattgtcaaatgtaggtttttctcaaagggggcatataactacatattgactgccaagaactatgactgtagcactaatcagcacacatagagccacacaattatttaatttctaactctctgtggtccctagaaaaattccgttgatgtgcttaggttaaagttctgaagatacccgttgtacccttacttgaaagtttctaatcttaagttttatgaaatgcaataatatgtatcagctagcaatatttctgtgatcaccaacaactctcagtttgatcttaaagtctgaataataaaacaaatcccagcagtaatacatttcttaaacctcacagtgcatgatatatcttttcattctgatcctgtgtttgcaaaaatatacacatgtatatcatagttcctcactttttattcatttgttttcctattacctgtagtaaatatattagttagtacatggaatttatagcatcagctacccccaggaacagcacctgacaggcgggggattttttttcaagttgttctacatttgcataaattatttctattattattcatgtatgttatttatttctgaatcacactagtcctgtgaaagtacaactgaaggcagaaagtgttaggattttgcatctaatgttcattatcatggtattgatggacctaagaaaataaaaattagactaagcccccaaataagctgcatgcatttgtaacatgattagtagatttgaatatatagatgtagtattttgggtatctaggtgttttatcattatgtaaaggaattaaagtaaaggactttgtagttgtttttattaaatatgcatatagtagagtgcaaaaatatagcaaaaataaaaactaaaggtagaaaagcattttagatatgccttaatttagaaactgtgccaggtggccctcggaatagatgccaggcagagaccagtgcctgggtggtgcctcctcttgtctgccctcatgaagaagcttccctcacgtgatgtagtgccctcgtaggtgtcatgtggagtagtgggaacaggcagtactgttgagaggagagcagtgtgagagtttttctgtagaagcagaactgtcagcttgtgccttgaggcttccagaacgtgtcagatggagaagtccaagtttccatgcttcaggcaacttagctgtgtacagaagcaatccagtgtggtaataaaaagcaaggattgcctgtataatttattataaaataaaagggattttaacaaccaacaattcccaacacctcaaaagcttgttgcattttttggtatttgaggtttttatctgaaggttaaagggcaagtgtttggtatagaagagcagtatgtgttaagaaaagaaaaatattggttcacgtagagtgcaaattagaactagaaagttttatacgattatcattttgagatgtgttaaagtaggttttcactgtaaaatgtattagtgtttctgcattgccatagggcctggttaaaactttctcttaggtttcaggaagactgtcacatacagtaagcttttttccttctgacttataatagaaaatgttttgaaagtaaaaaaaaaaaatctaatttggaaatttgacttgttagtttctgtgtttgaaatcatggttctagaaatgtagaaattgtgtatatcagatactcatctaggctgtgtgaaccagcccaagatgaccaacatccccacacctctacatctctgtcccctgtatctcttcctttctaccactaaagtgttccctgctaccatcctggcttgtccacatggtgctctccatcttcctccacatcatggaccacaggtgtgcctgtctaggcctggccaccactcccaacttgacctagccacattcatctagagatggttcctgatgctgggcacagactgtgctcatggcacccattagaaatgcctctagcatctttgtatgcatcttgatttttaaaccaagtcattgtacagagcattcagttttggctgtggtaccaagagaaaaactaatcaagaatataaaccacattccaggctgctgttttctctccatctacaggccacacttttactgtatttcttcatacttgaaattcattctgctattttcatatcagggtacagacttataagggtgcatgttccttaaaggtgcataattattcttattccgtttgcttatattgctacagaatgctctgttttggtgctttgagttctgcagacccaagaagcagtgtggaaattcactgcctgggacacagtcttataagaatgttggcaggtgactttgtatcagatgttgcttctcttttctctgtacacagattgagagttaccacagtggcctgtcgggtccaccctgtgggtgcagcacagctctctgaaagcaagaaccttcctacctattctaacgtttttgccctctaagaaaaatggcctcaggtatggtatagacatagcaagaggggaagggctgtctcactctagcaaccatccctccattacacacagaaagccctcttgaagcaaaagaagaagaaagaaagaaagcttatctctaaggctactgtcttcagaatgctctgagctgaatgctcttgctcctttcccaagaggcagatgaaaatatagccagtttatctatacccttcctatctgaggaggagaatagaaaagtagggtaaatatgtaacgtaaaatatgtcattcaaggaccaccaaaactttaagtaccctatcattaaaaatctggttttaaaagtagctcaagtaagggatgctttgtgacccagggtttctgaagtcagatagccattcttacctgccccttactctgacttattgggaaagggagaactgcagtggtgtttctgttgcagtggcaaaggtaacatgtcagaaaattcagagggttgcataccaataatcctttggaaactggatgtcttactgggtgctagaatgaaaatgtaggtatttattgtcagatgatgaagttcattgtttttttcaaaattggtgttgaaatatcactgtccaatgtgttcacttatgtgaaagctaaattgaatgaggcaaaaagagcaaatagtttgtatatttgtaataccttttgtatttcttacaataaaaatattggtagcaaataaaaataataaaaacaataactttaaactgctttctggagatgaattactctcctggctattttcttttttactttaatgtaaaatgagtataactgtagtgagtaaaattcattaaattccaagttttagcagaaaaaaaaaaaaaaaaaaaa

SEQ ID NO: 336 - DNA, 2408 bp, Homo sapiens
aaataaacgtggcgggacgtatgtgtcatggcgctctccatctaaagtctgtgcagcttccggagagtggcgggttgattttctcactttggactggtttttacttcccgacttctggactcatctttcaagaggactttagactaattgcagataattaaggtggtagagaatatgccttctgcatcctgtgatacactactggatgacatcgaagatatcgtgtctcaggaagattcaaaaccacaagataggcattttgtaagaaaggatgttgtcccgaaggtacgaaggcgaaatacccaaaaatatttgcaagaggaagaaaacagtccaccaagtgacagcactattccaggcatacagaaaatttggatacgaacatggggttgttctcataataattcagatggagaatatatggctggacagctagctgcttatggctataaaattacagaaaatgcatccgatgcagatttatggctcctgaacagttgcactgtaaaaaacccagctgaagaccactttagaaactcaattaaaaaagctcaagaggagaacaagaaaatcgtactggctggatgcgttcctcaagcccagcctcgccaggactaccttaagggactgagtatcattggggttcagcagatagatcgtgtggtagaagttgtggaggagacaattaaaggtcactctgtgagactgctgggtcagaaaaaggataatggaaggcggcttgggggagcacgattggatttgccgaagattaggaagaatccactgatagaaatcatttccatcaataccgggtgtctcaatgcttgtacctactgcaaaactaaacacgccagaggaaatttggccagttatccaattgatgaactagtagatagagccaaacaatcttttcaagagggtgtttgtgagatatggttgaccagtgaagacacgggggcttatggcagagatattggcaccaatctccccacactcctgtggaaactggttgaagtgattcctgagggagcaatgctgaggcttggcatgacaaatccgccctatattttagagcatctggaggaaatggcaaaaatccttaatcaccccagagtctacgcttttctgcacataccagtccagtctgcctccgacagcgtactcatggaaatgaaaagagaatactgtgtggctgacttcaaaagagtagtggattttctgaaagagaaagttcctggaataactattgctacagatattatctgtggttttcctggagaaacagatcaggattttcaagaaacagtgaaacttgttgaagagtacaaattcccaagcctgtttattaaccaattttacccaagaccaggaactcctgctgcaaaaatggaacaagttccagcacaagtgaaaaagcaaaggacaaaagatctttctcgggtgtttcattcttacagtccatatgatcacaagattggtgaaagacaacaagtgttagtaacagaagaatcttttgattccaagttttatgttgcacacaatcaattctatgagcaggttttagtgccaaagaaccctgcgttcatggggaagatggttgaagtggacatctatgaatcaggcaaacattttatgaaagggcagccagtatctgatgccaaagtgtacacgccctccatcagcaaaccgctagcaaagggagaagtctcgggtttgacaaaggacttcagaaatgggcttgggaaccagctgagttcaggatcccacacctctgctgcatctcagtgtgactcagcgagttccagaatggtgctgcccatgccaaggctacatcaagactgtgcgctgaggatgtccgtgggcttggctctgctgggtcttctttttgctttttttgtcaaggtctataattagaatacaactaatggaaacatctataaagaagaatacatttctaattaaaatcttcaatgaacaggaaagcgacatctccattctccaagggcaataatttgtactggtcatgctgcctccttctcagccactcttcttaatgaggctccccctgtctcacattgagttgggcccattggttatttgacctaaaacctaatcaccgctaccatagcacatccttcaaattaaactgcttttggtttacttttagcaagaaatgcaagcggttgcatttttttctgtttgtttcaatctctaatctttaagtcagaacctaattgtacagtggctctggccatcttttcctcatgtggaagaattttctatctttaataaactttttctttgttttttttttccagatggagtttcgctcttgtcccccaggctggagtggtgcagtggcacgatctcaggtcactgcaacctctgcctcctgggttcaaacgatt

SEQ ID NO: 337 - DNA, 3434 bp, Homo sapiens
attagttgtctctgccgctggggaaggtaaagcggcgacggcgtcctcaggagctgtggggtcccctgctagaagtgggggactcggcgggggagtcatttaatacttcatgattagaacaaatatgtgaaagttcccaccaaccagtgagaatttcttccttcagacggttttggatcttactgcacagctttctgagaagttcttttggtgccatgttttgtggcttgcatcaaaagaggagtttgtcttcatgaagattcctaacattggtaatgtgatgaataaatttgagatccttggggttgtaggtgaaggagcctatggagttgtacttaaatgcagacacaaggaaacacatgaaattgtggcgatcaagaaattcaaggacagtgaagaaaatgaagaagtcaaagaaacgactttacgagagcttaaaatgcttcggactctcaagcaggaaaacattgtggagttgaaggaagcatttcgtcggaggggaaagttgtacttggtgtttgagtatgttgaaaaaaatatgctcgaattgctggaagaaatgccaaatggagttccacctgagaaagtaaaaagctacatctatcagctaatcaaggctattcactggtgccataagaatgatattgtccatcgagatataaaaccagaaaatctcttaatcagccacaatgatgtcctaaaactgtgtgactttggttttgctcgtaatctgtcagaaggcaataatgctaattacacagagtacgttgccaccagatggtatcggtccccagaactcttacttggcgctccctatggaaagtccgtggacatgtggtcggtgggctgtattcttggggagcttagcgatggacagcctttatttcctggagaaagtgaaattgaccaactttttactattcagaaggtgctaggaccacttccatctgagcagatgaagcttttctacagtaatcctcgcttccatgggctccggtttccagctgttaaccatcctcagtccttggaaagaagataccttggaattttgaatagtgttctacttgacctaatgaagaatttactgaagttggacccagctgacagatacttgacagaacagtgtttgaatcaccctacatttcaaacccagagacttctggatcgttctccttcaaggtcagcaaaaagaaaaccttaccatgtggaaagcagcacattgtctaatagaaaccaagccggcaaaagtactgctttgcagtctcaccacagatctaacagcaaggacatccagaacctgagtgtaggcctgccccgggctgacgaaggtctccctgccaatgaaagcttcctaaatggaaaccttgctggagctagtcttagtccactgcacaccaaaacctaccaagcaagcagccagcctgggtctaccagcaaagatctcaccaacaacaacataccacaccttcttagcccaaaagaagccaagtcaaaaacagagtttgattttaatattgacccaaagccttcagaaggcccagggacaaagtacctcaagtcaaacagcagatctcagcagaaccgccactcattcatggaaagctctcaaagcaaagctgggacactgcagcccaatgaaaagcagagtcggcatagctatattgacacaattccccagtcctctaggagtccctcctacaggaccaaggccaaaagccatggggcactgagtgactccaagtctgtgagcaacctttctgaagccagggcccaaattgcggagcccagtaccagtaggtacttcccatctagctgcttagacttgaattctcccaccagcccaacccccaccagacacagtgacacgagaactttgctcagcccttctggaagaaataaccgaaatgagggaacgctggactcacgtcgaaccacaaccagacattctaagacgatggaggaattgaagctgccggagcacatggacagtagccattcccattcactgtctgcacctcacgaatctttttcttatggactgggctacaccagccccttttcttcccagcaacgtcctcataggcattctatgtatgtgacccgtgacaaagtgagagccaagggcttggatggaagcttgagcatagggcaagggatggcagctagagccaacagcctgcaactcttgtcaccccagcctggagaacagctccctccagagatgactgtggcaagatcttcggtcaaagagacctccagagaaggcacctcttccttccatacacgccagaagtctgagggtggagtgtatcatgacccacactctgatgatggcacagcccccaaagaaaatagacacctatacaatgatcctgtgccaaggagagttggtagcttttacagagtgccatctccacgtccagacaattctttccatgaaaataatgtgtcaactagagtttcttctctaccatcagagagcagttctggaaccaaccactcaaaaagacaaccagcattcgatccatggaaaagtcctgaaaatattagtcattcagagcaactcaaggaaaaagagaagcaaggatttttcaggtcaatgaaaaagaaaaagaagaaatctcaaacagtacccaattccgacagccctgatcttctgacgttgcagaaatccattcattctgctagcactccaagcagcagaccaaaggagtggcgccccgagaagatctcagatctgcagacccaaagccagccattaaaatcactgcgcaagttgttacatctctcttcggcctcaaatcacccggcttcctcagatccccgcttccagcccttaacagctcaacaaaccaaaaattccttctcagaaattcggattcaccccctgagccaggcctctggcgggagcagcaacatccggcaggaacccgcaccgaagggcaggccagccctccagctgccagacggtggatgtgatggcagaagacagagacaccattctggaccccaagatagacgcttcatgttaaggacgacagaacaacaaggagaatacttctgctgtggtgacccaaagaagcctcacactccgtgcgtcccaaaccgagcccttcatcgtccaatctccagtcctgctccctatccagtactccaggtccgaggcacttccatgtgcccgacactccaggtccgaggcactgatgctttcagctgcccaacccagcaatccgggttctctttcttcgtgagacacgttatgagggaagccctgattcacagggcccaggtaaaccaagctgcgctcctgacataccatgagaatgcggcactgacgggcaagtgacttctgcaagcctgcggctggtcccaatgccctgaatcacctctctcatggaagaaccaattaacaccaatgaatcaaccattaaaaa

SEQ ID NO: 338 - DNA, 3430 bp, Homo sapiens
gggggagttggaggaggaagaccctacaggaagttgagctgtactctccaacaggcgagcacatggtcgtctcctctctcccttcagggagtcatttaatacttcatgattagaacaaatatgtgaaagttcccaccaaccagtgagaatttcttccttcagacggttttggatcttactgcacagctttctgagaagttcttttggtgccatgttttgtggcttgcatcaaaagaggagtttgtcttcatgaagattcctaacattggtaatgtgatgaataaatttgagatccttggggttgtaggtgaaggagcctatggagttgtacttaaatgcagacacaaggaaacacatgaaattgtggcgatcaagaaattcaaggacagtgaagaaaatgaagaagtcaaagaaacgactttacgagagcttaaaatgcttcggactctcaagcaggaaaacattgtggagttgaaggaagcatttcgtcggaggggaaagttgtacttggtgtttgagtatgttgaaaaaaatatgctcgaattgctggaagaaatgccaaatggagttccacctgagaaagtaaaaagctacatctatcagctaatcaaggctattcactggtgccataagaatgatattgtccatcgagatataaaaccagaaaatctcttaatcagccacaatgatgtcctaaaactgtgtgactttggttttgctcgtaatctgtcagaaggcaataatgctaattacacagagtacgttgccaccagatggtatcggtccccagaactcttacttggcgctccctatggaaagtccgtggacatgtggtcggtgggctgtattcttggggagcttagcgatggacagcctttatttcctggagaaagtgaaattgaccaactttttactattcagaaggtgctaggaccacttccatctgagcagatgaagcttttctacagtaatcctcgcttccatgggctccggtttccagctgttaaccatcctcagtccttggaaagaagataccttggaattttgaatagtgttctacttgacctaatgaagaatttactgaagttggacccagctgacagatacttgacagaacagtgtttgaatcaccctacatttcaaacccagagacttctggatcgttctccttcaaggtcagcaaaaagaaaaccttaccatgtggaaagcagcacattgtctaatagaaaccaagccggcaaaagtactgctttgcagtctcaccacagatctaacagcaaggacatccagaacctgagtgtaggcctgccccgggctgacgaaggtctccctgccaatgaaagcttcctaaatggaaaccttgctggagctagtcttagtccactgcacaccaaaacctaccaagcaagcagccagcctgggtctaccagcaaagatctcaccaacaacaacataccacaccttcttagcccaaaagaagccaagtcaaaaacagagtttgattttaatattgacccaaagccttcagaaggcccagggacaaagtacctcaagtcaaacagcagatctcagcagaaccgccactcattcatggaaagctctcaaagcaaagctgggacactgcagcccaatgaaaagcagagtcggcatagctatattgacacaattccccagtcctctaggagtccctcctacaggaccaaggccaaaagccatggggcactgagtgactccaagtctgtgagcaacctttctgaagccagggcccaaattgcggagcccagtaccagtaggtacttcccatctagctgcttagacttgaattctcccaccagcccaacccccaccagacacagtgacacgagaactttgctcagcccttctggaagaaataaccgaaatgagggaacgctggactcacgtcgaaccacaaccagacattctaagacgatggaggaattgaagctgccggagcacatggacagtagccattcccattcactgtctgcacctcacgaatctttttcttatggactgggctacaccagccccttttcttcccagcaacgtcctcataggcattctatgtatgtgacccgtgacaaagtgagagccaagggcttggatggaagcttgagcatagggcaagggatggcagctagagccaacagcctgcaactcttgtcaccccagcctggagaacagctccctccagagatgactgtggcaagatcttcggtcaaagagacctccagagaaggcacctcttccttccatacacgccagaagtctgagggtggagtgtatcatgacccacactctgatgatggcacagcccccaaagaaaatagacacctatacaatgatcctgtgccaaggagagttggtagcttttacagagtgccatctccacgtccagacaattctttccatgaaaataatgtgtcaactagagtttcttctctaccatcagagagcagttctggaaccaaccactcaaaaagacaaccagcattcgatccatggaaaagtcctgaaaatattagtcattcagagcaactcaaggaaaaagagaagcaaggatttttcaggtcaatgaaaaagaaaaagaagaaatctcaaacagtacccaattccgacagccctgatcttctgacgttgcagaaatccattcattctgctagcactccaagcagcagaccaaaggagtggcgccccgagaagatctcagatctgcagacccaaagccagccattaaaatcactgcgcaagttgttacatctctcttcggcctcaaatcacccggcttcctcagatccccgcttccagcccttaacagctcaacaaaccaaaaattccttctcagaaattcggattcaccccctgagccaggcctctggcgggagcagcaacatccggcaggaacccgcaccgaagggcaggccagccctccagctgccagacggtggatgtgatggcagaagacagagacaccattctggaccccaagatagacgcttcatgttaaggacgacagaacaacaaggagaatacttctgctgtggtgacccaaagaagcctcacactccgtgcgtcccaaaccgagcccttcatcgtccaatctccagtcctgctccctatccagtactccaggtccgaggcacttccatgtgcccgacactccaggtccgaggcactgatgctttcagctgcccaacccagcaatccgggttctctttcttcgtgagacacgttatgagggaagccctgattcacagggcccaggtaaaccaagctgcgctcctgacataccatgagaatgcggcactgacgggcaagtgacttctgcaagcctgcggctggtcccaatgccctgaatcacctctctcatggaagaaccaattaacaccaatgaatcaaccattaaaaa

SEQ ID NO: 339 - DNA, 1943 bp, Homo sapiens
agtgcgctgtgctcgaggggtgccggccaggcctgagcgagcgagctagccagcaggcatcgagggggcgcggctgccgtccggacgagacaggcgaacccgacgcagaagagtccaccaccggacagccaggtagccgccgcgtccctcgcacacgcagagtcgggcggcgcggggtctcccttgcgcccggcctccgccctctcctcctctcctttccccttcttctcgctgtcctctcctctctcgctgcccgcgtttgcgcagccccgggccatgtccgacgcgtccctccgcagcacatccacgatggagcgtcttgtcgcccgtgggaccttcccagtactagtgcgcaccagcgcctgccgcagcctcttcgggccggtggaccacgaggagctgagccgcgagctgcaggcccgcctggccgagctgaacgccgaggaccagaaccgctgggattacgacttccagcaggacatgccgctgcggggccctggacgcctgcagtggaccgaagtggacagcgactcggtgcccgcgttctaccgcgagacggtgcaggtggggcgctgccgcctgctgctggcgccgcggcccgtcgcggtcgcggtggctgtcagcccgcccctcgagccggccgctgagtccctcgacggcctcgaggaggcgccggagcagctgcctagtgtcccggtcccggccccggcgtccaccccgcccccagtcccggtcctggctccagccccggccccggctccggctccggtcgcggctccggtcgcggctccggtcgcggtcgcggtcctggccccggccccggccccggctccggctccggctccggccccggctccagtcgcggccccggccccagccccggccccggccccggccccggcccccgccccggccccggccccggacgcggcgcctcaagagagcgccgagcagggcgcgaaccaggggcagcgcggccaggagcctctcgctgaccagctgcactcggggatttcgggacgtcccgcggccggcaccgcggccgccagcgccaacggcgcggcgatcaagaagctgtccgggcctctgatctccgatttcttcgccaagcgcaagagatcagcgcctgagaagtcgtcgggcgatgtccccgcgccgtgtccctctccaagcgccgcccctggcgtgggctcggtggagcagaccccgcgcaagaggctgcggtgagccaatttagagcccaaagagccccgagggaacctgccggggcagcggacgttggaagggcgctgggcctcggctgggaccgttcatgtagcagcaaccggcggcggctgccgcagagcagcgttcggttttgtttttaaattttgaaaactgtgcaatgtattaataacgtctttttatatctaaatgtattctgcacgagaaggtacactggtcccaaggtgtaaagctttaagagtcatttatataaaatgtttaatctctgctgaaactcagtgcaaaaaaaagaaaaaagaaaaaaaaaaggaaaaaataaaaaaaccatgtatatttgtacaaaaagtttttaaagttatactaacttatattttctatttatgtccaggcgtggaccgctctgccacgcactagctcggttattggttatgccaaaggcactctccatctcccacatctggttattgacaagtgtaactttattttcatcgcggactctggggaagggggtcactcacaagctgtagctgccatacatgcccatctagcttgcagtctcttcgcgctttcgctgtctctcttattatgactgtgtttatctgaaacttgaagacaagtctgttaaaatggttcctgagccgtctgtaccactgccccggcccctcgtccgccgggttctaaataaagaggccgaaaaatgctgcaaaaaaaaaaaaaaa

SEQ ID NO: 340 - DNA, 2236 bp, Homo sapiens
acacacgcgcgcacacacacgcgcacaccggaccccgcgcgcacacgcacggagggcgcgagcgagcagacgcgcacaccggcgagccaagttccgcagcctggcatggcttctggggacctttacgaggttgaaaggattgtagacaagaggaagaacaagaaaggaaaatgggagtatcttatccgatggaaaggctacgggagcaccgaggacacgtgggagccggagcaccacctcttgcactgtgaggagtttattgatgaattcaatgggttgcacatgtccaaggacaagaggatcaagtcagggaagcagtccagtacctccaagctgctgcgtgacagtcgaggcccgtcggttgagaaactgtcccacagaccttcagatcctggaaagagcaaggggacctcccataaacggaagcgaattaaccctcccctggccaagccaaaaaaagggtattcaggcaagccctcttcaggaggtgacagggccaccaagacggtgtcttacaggactacccccagtggtttgcaaataatgcccctgaaaaagtctcagaacgggatggaaaatggggacgccggctctgagaaggatgagaggcactttggaaatgggtcccatcagcctggcttggatttgaatgatcatgttggagagcaagatatgggtgaatgtgacgtgaatcacgctacactggcggagaacgggctcggctctgctctgaccaacgggggattgaacctgcacagtccagtgaagaggaagctggaagcggagaaggactacgtctttgacaaaaggctcagatacagtgtccgccagaatgaaagcaactgtcggtttcgagacatcgttgtgcggaaggaagaagggttcacgcacatcctgctgtccagtcagacctcggataacaatgccctgacacctgagatcatgaaagaagtccggcgagcgctctgcaacgcagccacagacgacagcaaactgctgctcctcagcgcagtggggagcgtgttctgcagcggcctggattattcctacctaattggccggttgtccagcgaccggcgaaaggagagcactcggattgcagaagccatcagggactttgtgaaggcctttatccagtttaagaagcctatcgtggtggccatcaatgggccggccctgggcctgggtgcctccatcctgcccctctgtgacatcgtgtgggccagtgagaaggcctggttccagacgccctacgccaccatccgcctcacgcctgctggctgctcctcctacaccttcccccagatcctgggcgtcgcgctggccaatgagatgctgttctgtgggcggaagctcaccgcccaggaggcctgcagcagggggctggtgtcgcaggtcttctggcccaccacgttcagccaggaggtcatgctgcgggtcaaggagatggcatcctgcagtgccgtggtgttagaggagtccaaatgcctcgtgcggagcttcctgaaatcagtgctggaagacgtgaacgagaaggaatgcctcatgctcaagcagctctggagctcctccaaaggccttgactcccttttcagctacctgcaggacaaaatttatgaagtctgaggggccccagctcacgggcccccaacttccagctctgccctgtgtttcggaaaccagagcacagtgtctgccccggccaaggagtttgtcaaggtgtctctttatacgtagggttgtgtccatttcctcgtgtcctttggttgctcctccttggtttgattttgtgtaatggatggaaaacgcagcatacttggcctcccccacctccctgcccttcctggccagagagctgtccaaggctgtatcttcccagggctccgccaagcaccgctgtcctttccccacttgctgaaatgcaccatgacggtccaggaaggggaagaccactttcacattcttctgactcaggctgtgtctacacagtgcctctgacttggagacttggccatcatggctctctctggttgtatttagatcgggtgtcagaggacgaccaatcttagggaatttccagaccaatgagcaaaatgattgtgcacacctggcctcagtctcctttccgacgcaaatctgtgtgactattagggcttggtcttaaaacccaattgagtgatttgcaaacccagatattgtacatttagaaatgttttgttaaatatatatttttaaa

SEQ ID NO: 341 - DNA, 4973 bp, Homo sapiens
aggtgcgagtccccactgctggggaggcggcgggccccggctcccctcggccgcctagcccgcctcgcccgcccggggttggcggggagggaacagctgggcggccccagagcccctcggaggacaatgcgcccggcgctcggccaccctcgctcggtctcctccgcgtccggttccttcccgccgcccccggcagccgcccggctgcagcccctcttcctccgcgggggctccttccgcggccggagaggctccggcgacagcagcaccagcaccagcaccagccgcgggggaggcggcggcagacgcggcgggggcggcggctccccgagcagcagcacgggcgccgagcgcgaggacgacgacgagagcctcagcgtcagcaagccgctggtgcccaacgccgcgctcctggggccgccggctcaggtgggcgcccccgccggccccgcgcctgtcgccttctcctcctcagcggccacctcctcctccacctccacgcccacctcctcctgcagcatgacagccgcggacttcggcgggggcgccgcggccggggccgtcgggggccccgggagccgctcggcggggggcgcgggcggcaccgggaccggcagcggcgcctcctgctgcccgtgttgctgctgctgcggctgcccagaccgccccggccgcagaggtcggcgccgcggctgcgcccccagtcccaggtgccgctggggctaccaggcgctgtccgtggtgctgctgctggcgcagggcggcctgctggacctgtacctcatcgccgtcaccgacctgtactggtgctcctggatcgccactgacctggtggtggtggtgggctgggccatcttcttcgccaagaacagccggggccgtcggggcggcgcagccagcggcgcgcacaaccaccacctgcaccaccaccacgccgcgccgcccctgcatctgcccgccccctcggccgctaccgctggggccaaggcacgcggagcccgcgggggcgccggcggcgcggggggcggcctgggggcggccgcggcagcgggcgagttcgccttcgcctacctggcctggcttatctactccatcgccttcactcccaaggtggtgctgatcctgggcacgtccatcctagacctcatcgagctacgcgcgcccttcggcaccacgggcttccgtctcaccatggcgctgtcggtgcccctgctctacagcttggtgcgggccatcagcgaggcgggcgcgcccccgggatcggcaggacccctgctgctgcagccccagcggcaccgcgcggccggatgcttcctgggcacgtgcttggacctgctcgacagcttcacgctggtggagctgatgctggagggccgcgtgccgctgcccgcgcacctgcgctacctgcttatcgccgtctacttcctcaccctcgcctcgccggtgctctggctctacgagctcaacgccgcggccgcagcggctgcatcctggggccaggcctccgggcctggcagctgcagccgccttctgcgcctgctgggcggctgcctggtggacgtgcccttgctggcgctgcgctgcctcctggtggtcagctaccagcagcccctctccatcttcatgctcaagaacctcttcttcctcggctgccggggcctggaggccctggagggctgctgggaccggggcaatcgggcctccccgagtcgggccagagggggctacggtgctccgccctccgcccctccaccacctccgccaccacctcagggaggctcccagctgggccactgcatctcggagaacgaggggggtgctcatggctatgtcaacaccctggctgtggcctctcagaattgagggtgaagggcacgggtccttgtttttgggttgagagtccccaacccccttgtcttctaccttctgtcacctagatttgatcagggtctatttggaagaggtaacccttttcagggctaagggccagggtgtccttctgcaccctggggtgaggacggcttggagggagaccagcagttaacggtgagggaggtaggtgcacttaccctctcctctcttctcctatcctaccccaatcctgacctccaaggggctggtacctctgcttcttgctttgcccacctccactctaattcccatccattaggaggagaggggtgctgggccttggaccttctcccttgcttagaagtgccagcctcttttaggctgtggttagtggccattgtcccatgccttgaaattgacccagaacccactttccactgatgtgtctcttggatttcttccaggtgatagatacaaagtgtatgtctctgtgtgtgtagtgttgttttctcgtgtccaccctgtggccctttgcaatgggtaggagatctggggaggccctgccccctacaccatacttatcaccaccctcctcttttctgcctggatttgtgaccatgaattcccaggaagagctgggcccctgggagctgcccaggtactccccttgaagggagaatctcacccaggatcttcctcaatactgctcctctcttctcagctcagggagaggaggggatccattctctaaggaccaaactgcaccctttcttgggtgagtgagcatttctacctccgtgctttcaacttttgttgcatcatgcactgatgctgcttgcaaaaaatgaagacaaaatactcagaagttgcatttgccatggccactggctccagctggggtttggtgccagtgttattacagggtctgcggagtatcagccattggcttggcctctctctgttcctccctctgcacctagaactcttatccttcctgtggtttggtgccgactgggtcggatctgggcttagagtaatagctttggtgggtttcctggatggatgtgaagttgggcctcccatgggcccaagggagtaggaagccccattccccacctgtccttcctctaggaagtgtagatcagaaagtgaggtggtgacctcccacctctggtctggttaagagtctcactagggccaaggcaggctgcagaactttccctcttcctctcattgagggtgatgacaagagacatccggggactgtgcacttacagtcggtgtggaatgtcactcttgcagtctttgaggcaggataagtatttttacatattttaagggtgcaggaggacagcagctaacaaggccaggaaatactcacttccctccaccctcaacaggatgtggtgggggtgaaacttgaagaatttttgtttccccttctcccttcttacgtttgggaagttttatgtagtgtaacaaactctagacgagttaccagaagatgtggattctagttctgattctgtcactcattggctttgagtgacatatttttatttcctgggcctgttttctcacattaaaaaagtagaagttagatgagtgatctctaaggttgaaggtaatttcagctctcacattcttttgagtttgtggctcttgaaagccctggtcctgatgctccctgtaaaggtggctgggagagaagccagccaggctgcacttgcagaacattccctgctctgtactgggtgtgtgaagccccagcagagaaggccggagggagggcttgggtgcctgggctgggtgtggggcagggcctggcacagctgcagagtgcacagggagggtcagaagtgccaagtcactggccgttaactcagcacccaggccaagcccccgcctcccacttgaagccccctcttacaactgttttgggggcttggagcagaagacacccttgtagacagacataagaggggcagaaggcttgaccagagttctcttgagcctcctcatgctctcagagcagggaacagcggggggaaaatgtttacactccatgcacaatctgtgcttccagtccctcaccctatgtggcccaatagctggctggatttcacacttaattggtatttttttctgccttcttcccctgcccccactgactcctctcctctccctttgattgtactcaaggttctggggcctgggccctgggtgggtaccaacagctgctcgctgttcccatgtcctctctccagctttgctgtgtttctctgctacctaatctcagtgactgtgaaaggacattgtgtctgagccatgcccagccgctggctggccccctgatctgccccccttctattgtttggatggccatctcctgctgggcctccctgactgtaaaatctctgtactgtttgttaggtttttggtgggaggctgtgataagttccaatgagctgccacttccctggatatgtcaagaagctgatggcaacttggccaattctggcagatatcaggcccccagttcagccccagtcaccctcttttacacatgtgggtcaaccactgtgtgctcagagggtcagtcccttcctctgctgtgtttttcttgagtccttgcactcacttcccctgccccagtcacgatgacccctaaagcttcctttgcccttgctttctagggcatccctagtgaaggggcaaacctgagatttctccgtggacctgacagccaaggcagggcactgtctcctgaggccagtgccagcacgtgcatggttcacagaaaaggatcctgggctcagaatctcgagaaccgcctgctcctaacaattcagcaagtcaggggcttcctctctgttagtccccaaatccttacttattttaaaaagactagaccctctctaaagactgttccattttaacatgtcctgattctgcatccgtgggttttgtgaaagagagctagctggcggttagagcctggaagaaggagggaagtggcacctcactagcatttatcacttttttccttctctttttaaaaataaaaccagactctgttctgaaaataaaaaacttgagacttgaaaaaaaaaaaaaaaaaa

SEQ ID NO: 342 - DNA, 10540 bp, Homo sapiens
aggagccggaggaggagccgccgccgccgttgacccggccgccggccgggagctgggagagatgcggagcccggccaccggcgtccccctcccaacgccgccgccgccgctgctgctgctgttgctgctgctgctgccgccgccactattgggagaccaagtggggccctgtcgttccttggggtccaggggacgaggctcttcgggggcctgcgcccccatgggctggctctgtccatcctcagcgtcgaacctctggctctacaccagccgctgcagggatgcgggcactgagctgactggccacctggtaccccaccacgatggcctgagggtttggtgtccagaatccgaggcccatattcccctaccaccagctcctgaaggctgcccctggagctgtcgcctcctgggcattggaggccacctttccccacagggcaagctcacactgcccgaggagcacccgtgcttaaaggctccacggctcagatgccagtcctgcaagctggcacaggcccccgggctcagggcaggggaaaggtcaccagaagagtccctgggtgggcgtcggaaaaggaatgtaaatacagccccccagttccagccccccagctaccaggccacagtgccggagaaccagccagcaggcacccctgttgcatccctgagggccatcgacccggacgagggtgaggcaggtcgactggagtacaccatggatgccctctttgatagccgctccaaccagttcttctccctggacccagtcactggtgcagtaaccacagccgaggagctggatcgtgagaccaagagcacccacgtcttcagggtcacggcgcaggaccacggcatgccccgacgaagtgccctggctacactcaccatcttggttactgacaccaatgaccatgaccctgtgttcgagcagcaggagtacaaggagagcctcagggagaacctggaggttggctatgaggtgctcactgtcagggccacggatggtgatgcccctcccaatgccaatattctgtaccgcctgctggaggggtctgggggcagcccctctgaagtctttgagatcgaccctcgctctggggtgatccgaacccgtggccctgtggatcgggaagaggtggaatcctaccagctgacggtagaggcaagtgaccagggtcgggacccgggtcctcggagtaccacagccgctgttttcctttctgtggaggatgacaatgataatgccccccagtttagtgagaagcgctatgtggtccaggtgagggaggatgtgactccaggggccccagtactccgagtcacagcctcggatcgagacaaggggagcaatgccgtggtgcactatagcatcatgagtggcaatgctcggggacagttttatctggatgcccagactggagctctggatgtggtgagccctcttgactatgagacgaccaaggagtacaccctacgggtgcgagcacaggatggtggccgtcccccactctctaatgtctctggcttggtgacagtacaggtcctggatatcaacgacaatgcccccatcttcgtcagcacccctttccaggctactgtcctggagagtgtccccttaggctacctggttctccatgtccaggctatcgacgctgatgctggtgacaatgcccgcctggaataccgccttgctggggtgggacatgacttccccttcaccatcaacaatggcacaggctggatctctgtggctgctgaactggaccgggaggaagttgatttctacagctttggggtagaagctcgagaccatggcactccagcactcactgcctcggccagtgtcagcgtgactgtcctggatgtcaacgacaacaatccaacctttacccaaccagagtacacagtgcggctcaatgaggatgcagctgtgggcaccagcgtggtgacggtgtcagctgtggaccgtgatgctcatagtgtcatcacctaccagatcaccagtggcaatactcgaaaccgcttctccatcaccagccaaagtggtggtgggctggtatcccttgccctgccactggactacaaacttgagcggcagtatgtgttggctgttaccgcctccgatggcactcggcaggacacggcacagattgtggtgaatgtcaccgacgccaacacccatcgtcctgtctttcagagctcccactatacagtgaatgttaatgaggaccggccggcaggcaccacggtggtgctgatcagcgccacggatgaggacacaggtgagaatgcccgcatcacctacttcatggaggacagcatcccccagttccgcatcgatgcagacacgggggctgtcaccacccaggctgagctggactatgaagaccaagtgtcttacaccctggccattactgctcgggacaatggcattccccagaagtccgacaccacctacctggagatcctggtgaacgacgtgaatgacaatgcccctcagttcctgcgagactcctaccagggcagtgtctatgaggatgtgccacccttcactagcgtcctgcagatctcagccactgatcgtgattctggacttaatggcagggtcttctacaccttccaaggaggcgacgatggagacggtgactttattgttgagtccacgtcaggcatcgtgcgaacgctacggaggctggatcgagagaacgtggcccagtatgtcttgcgggcatatgcagtggacaaggggatgcccccagcccgcacacctatggaagtgacagtcactgtgttggatgtgaatgacaatccccctgtctttgagcaggatgagtttgatgtgtttgtggaagagaacagccccattgggctagccgtggcccgggtcacagccactgaccccgatgaaggcaccaatgcccagattatgtaccagattgtggagggcaacatccctgaggtctttcagctggacatcttctccggggagctgacagccctggtagacttagactacgaggaccggcctgagtacgtcctggtcatccaggccacgtcagctcctctggtgagccgggctacagtccacgtccgcctccttgaccgcaatgacaacccaccagtgctgggcaactttgagatccttttcaacaactatgtcaccaatcgctcaagcagcttccctgggggtgccattggccgagtacctgcccatgaccctgatatctcagatagtctgacttacagctttgagcggggaaatgaactcagcctggtcctgctcaatgcctccacgggtgagctgaagctaagccgcgcactggacaacaaccggcctctggaggccatcatgagcgtgctggtgtcagacggcgtacacagcgtgaccgcccagtgcgcgctgcgtgtgaccatcatcaccgatgagatgctcacccacagcatcacgctgcgcctggaggacatgtcacccgagcgcttcctgtcaccactgctaggcctcttcatccaggcggtggccgccacgctggccacgccaccggaccacgtggtggtcttcaacgtacagcgggacaccgacgcccccgggggccacatcctcaacgtgagcctgtcggtgggccagccgccagggcccgggggcgggccgcccttcctgccctctgaggacctgcaggagcgcctatacctcaaccgcagcctgctgacggccatctcggcacagcgcgtgctgcccttcgacgacaacatctgcctgcgggagccctgcgagaactacatgcgctgcgtgtcggtgctgcgcttcgactcctccgcgcccttcatcgcctcctcctccgtgctcttccggcccatccaccccgtcggagggctgcgctgccgctgcccgcccggcttcacgggtgactactgcgagaccgaggtggacctctgctactcgcggccctgtggcccccacgggcgctgccgcagccgcgagggcggctacacctgcctctgtcgtgatggctacacgggtgagcactgtgaggtgagtgctcgctcaggccgttgcaccccgggtgtctgcaagaatgggggcacctgtgtcaacctgctggtgggcggtttcaagtgcgattgcccatctggagacttcgagaagccctactgccaggtgaccacgcgcagcttccccgcccactccttcatcacctttcgcggcctgcgccagcgtttccacttcaccctggccctctcgtttgccacaaaggagcgcgacgggttgctgttgtacaatgggcgtttcaatgagaagcatgactttgtggccctcgaggtgatccaggagcaggtccagctcaccttctctgcaggggagtcaaccaccacggtgtccccattcgtgcccggaggagtcagtgatggccagtggcatacggtgcagctgaaatactacaataagccactgttgggtcagacagggctcccacagggcccatcagagcagaaggtggctgtggtgaccgtggatggctgtgacacaggagtggccttgcgcttcggatctgtcctgggcaactactcctgtgctgcccagggcacccagggtggcagcaagaagtctctggatctgacggggcccctgctactaggcggggtgcctgacctgcccgagagcttcccagtccgaatgcggcagttcgtgggctgcatgcggaacctgcaggtggacagccggcacatagacatggctgacttcattgccaacaatggcaccgtgcctggctgccctgccaagaagaacgtgtgtgacagcaacacttgccacaatgggggcacttgcgtgaaccagtgggacgcgttcagctgcgagtgccccctgggctttgggggcaagagctgcgcccaggaaatggccaatccacagcacttcctgggcagcagcctggtggcctggcatggcctctcgctgcccatctcccaaccctggtacctcagcctcatgttccgcacgcgccaggccgacggtgtcctgctgcaggccatcaccagggggcgcagcaccatcaccctacagctacgagagggccacgtgatgctgagcgtggagggcacagggcttcaggcctcctctctccgtctggagccaggccgggccaatgacggtgactggcaccatgcacagctggcactgggagccagcggggggcccggccatgccattctgtccttcgattatgggcagcagagagcagagggcaacctgggcccccggctgcatggtctgcacctgagcaacataacagtgggcggaatacctgggccagccggcggtgtggcccgtggctttcggggctgtttgcagggtgtgcgggtgagcgatacgccggagggggttaacagcctggatcccagccatggggagagcatcaacgtggagcaaggctgtagcctgcctgacccttgtgactcaaacccgtgtcctgctaacagctattgcagcaacgactgggacagctattcctgcagctgtgatccaggttactatggtgacaactgtactaatgtgtgtgacctgaacccgtgtgagcaccagtctgtgtgtacccgcaagcccagtgccccccatggctatacctgcgagtgtcccccaaattaccttgggccatactgtgagaccaggattgaccagccttgtccccgtggctggtggggacatcccacatgtggcccatgcaactgtgatgtcagcaaaggctttgacccagactgcaacaagacaagcggcgagtgccactgcaaggagaaccactaccggcccccaggcagccccacctgcctcttgtgtgactgctaccccacaggctccttgtccagagtctgtgaccctgaggatggccagtgtccatgcaagccaggtgtcatcgggcgtcagtgtgaccgctgtgacaacccttttgctgaggtcaccaccaatggctgtgaagtgaattatgacagctgcccacgagcgattgaggctgggatctggtggccccgtacccgcttcgggctgcctgctgctgctccctgtcccaaaggctcctttgggactgctgtgcgccactgtgatgagcacagggggtggctccccccaaacctcttcaactgcacgtccatcaccttctcagaactgaagggcttcgctgagcggctacagcggaatgagtcaggcctagactcagggcgctcccagcagctagccctgctcctgcgcaacgccacgcagcacacagctggctacttcggcagcgacgtcaaggtggcctaccagctggccacgcggctgctggcccacgagagcacccagcggggctttgggctgtctgccacacaggacgtgcacttcactgagaatctgctgcgggtgggcagcgccctcctggacacagccaacaagcggcactgggagctgatccagcagacagagggtggcaccgcctggctgctccagcactatgaggcctacgccagtgccctggcccagaacatgcggcacacctacctaagccccttcaccatcgtcacgcccaacattgtcatctccgtagtgcgcttggacaaagggaactttgctggggccaagctgccccgctacgaggccctgcgtggggagcagcccccggaccttgagacaacagtcattctgcctgagtctgtcttcagagagacgccccccgtggtcaggcccgcaggccccggagaggcccaggagccagaggagctggcacggcgacagcgacggcacccggagctgagccagggtgaggctgtggccagcgtcatcatctaccgcaccctggccgggctactgcctcataactatgaccctgacaagcgcagcttgagagtccccaaacgcccgatcatcaacacacccgtggtgagcatcagcgtccatgatgatgaggagcttctgccccgggccctggacaaacccgtcacggtgcagttccgcctgctggagacagaggagcggaccaagcccatctgtgtcttctggaaccattcaatcctggtcagtggcacaggtggctggtcggccagaggctgtgaagtcgtcttccgcaatgagagccacgtcagctgccagtgcaaccacatgacgagcttcgctgtgctcatggacgtttctcggcgggagaatggggagatcctgccactgaagacactgacatacgtggctctaggtgtcaccttggctgcccttctgctcaccttcttcttcctcactctcttgcgtatcctgcgctccaaccaacacggcatccgacgtaacctgacagctgccctgggcctggctcagctggtcttcctcctgggaatcaaccaggctgacctcccttttgcctgcacagtcattgccatcctgctgcacttcctgtacctctgcaccttttcctgggctctgctggaggccttgcacctgtaccgggcactcactgaggtgcgcgatgtcaacaccggccccatgcgcttctactacatgctgggctggggcgtgcctgccttcatcacagggctagccgtgggcctggaccccgagggctacgggaaccctgacttctgctggctctccatctatgacacgctcatctggagttttgctggcccggtggcctttgccgtctcgatgagtgtcttcctgtacatcctggcggcccgggcctcctgtgctgcccagcggcagggctttgagaagaaaggtcctgtctcgggcctgcagccctccttcgccgtcctcctgctgctgagcgccacgtggctgctggcactgctctctgtcaacagcgacaccctcctcttccactacctctttgctacctgcaattgcatccagggccccttcatcttcctctcctatgtggtgcttagcaaggaggtccggaaagcactcaagcttgcctgcagccgcaagcccagccctgaccctgctctgaccaccaagtccaccctgacctcgtcctacaactgccccagcccctacgcagatgggcggctgtaccagccctacggagactcggccggctctctgcacagcaccagtcgctcgggcaagagtcagcccagctacatccccttcttgctgagggaggagtccgcactgaaccctggccaagggccccctggcctgggggatccaggcagcctgttcctggaaggtcaagaccagcagcatgatcctgacacggactccgacagtgacctgtccttagaagacgaccagagtggctcctatgcctctacccactcatcagacagtgaggaggaagaagaggaggaggaagaggaggccgccttccctggagagcagggctgggatagcctgctggggcctggagcagagagactgcccctgcacagtactcccaaggatgggggcccagggcctggcaaggccccctggccaggagactttgggaccacagcaaaagagagtagtggcaacggggcccctgaggagcggctgcgggagaatggagatgccctgtctcgagaggggtccctaggcccccttccaggctcttctgcccagcctcacaaaggcatccttaagaagaagtgtctgcccaccatcagcgagaagagcagcctcctgcggctccccctggagcaatgcacagggtcttcccggggctcctccgctagtgagggcagccggggaggcccccctccccgcccaccgccccggcagagcctccaggagcagctgaacggggtcatgcccatcgccatgagcatcaaggcaggcacggtggatgaggactcgtcaggctccgaatttctcttctttaacttcctgcattaaccctgggccgtggttcctacgcccgaggctcccttcccttccccagccgcactcatgccctgctcctgtcttgtgctttatcctgccccgctccccatcgcctgcccgcagcagcgacgaaacgtccatctgaggagcctgggccttgccgggaggggtactcaccccacctaaggccatctagtgccaactccccccccaccattcccctcactgcactttggacccctggggccaacatctccaagacaaagtttttcagaaaagaggaaaaaaagaatttaaaaaaggatctccactcttcatgacttcagggattcattttttttatacgctggaaattgactcccctttcccttcccaaagaggataggacctcccaggatgcttcccagcctctcctcagtttcccatctgctgtgcctctgggaggagagggactcctggggggcctgcccctcatacgccatcaccaaaaggaaaggacaaagccacacgcagccagggcttcacacccttcaggctgcacccgggcaggcctcagaacggtgaggggccagggcaaagggtgtgcctcgtcctgcccgcactgcctctcccaggaactggaaaagccctgtccggtgagggggcagaaggactcagcgcccctggacccccaaatgctgcatgaacacattttcaggggagcctgtgcccccaggcgggggtcgggcagccccagcccctctccttttcctggactctggccgtgcgcggcagcccaggtgtttgctcagttgctgacccaaaagtgcttcatttttcgtgcccgccccgcgccccgggcaggccagtcatgtgttaagttgcgcttctttgctgtgatgtgggtgggggaggaagagtaaacacagtgctggctcggctgccctgagggtgctcaatcaagcacaggtttcaagtctgggttctggtgtccactcacccaccccaccccccaaaatcagacaaatgctactttgtctaacctgctgtggcctctgagacatgttctatttttaaccccttcttggaattggctctcttcttcaaaggaccaggtcctgttcctctttctccccgactccaccccagctccctgtgaagagagagttaatatatttgttttatttatttgctttttgtgttgggatgggttcgtgtccagtcccgggggtctgatatggccatcacaggctgggtgttcccagcagccctggcttgggggcttgacgcccttccccttgccccaggccatcatctccccacctctcctcccctctcctcagttttgccgactgcttttcatctgagtcaccatttactccaagcatgtattccagacttgtcactgactttccttctggagcaggtggctagaaaaagaggctgtgggcaggaaagaaaggctcctgtttctcatttgtgaggccagcctctggcttttctgccgtggattctcccccgtcttctcccctcagcaattcctgcaaagggttaaaaatttaactggtttttactactgatgacttgatttaaaaaaaatacaaagatgctggatgctaacttggtactaaccatcagattgtacagtttggttgttgctgtaaatagggtagcgttttgttgttgttgttttttcatgccccatactactgaataaactagttctgtgcgggtacagca

SEQ ID NO: 343 - DNA, 8630 bp, Homo sapiens
taaatttaaaggcggggcggcctgtgagccctgaagtgccggccgcggagggtcctggccattttcctgggaccagttcagcctgataggatggcggaggaaggagccgtggccgtctgcgtgcgagtgcggccgctgaacagcagagaagaatcacttggagaaactgcccaagtttactggaaaactgacaataatgtcatttatcaagttgatggaagtaaatccttcaattttgatcgtgtctttcatggtaatgaaactaccaaaaatgtgtatgaagaaatagcagcaccaatcatcgattctgccatacaaggctacaatggtactatatttgcctatggacagactgcttcaggaaaaacatataccatgatgggttcagaagatcatttgggagttatacccagggcaattcatgacattttccaaaaaattaagaagtttcctgatagggaatttctcttacgtgtatcttacatggaaatatacaatgaaaccattacagatttactctgtggcactcaaaaaatgaaacctttaattattcgagaagatgtcaataggaatgtgtatgttgctgatctcacagaagaagttgtatatacatcagaaatggctttgaaatggattacaaagggagaaaagagcaggcattatggagaaacaaaaatgaatcaaagaagcagtcgttctcataccatctttaggatgattttggaaagcagagagaagggtgaaccttctaattgtgaaggatctgttaaggtatcccatttgaatttggttgatcttgcaggcagtgaaagagctgctcaaacaggcgctgcaggtgtgcggctcaaggaaggctgtaatataaatcgaagcttatttattttgggacaagtgatcaagaaacttagtgatggacaagttggtggtttcataaattatcgagatagcaagttaacacgaattctccagaattccttgggaggaaatgcaaagacacgtattatctgcacaattactccagtatcttttgatgaaacacttactgctctccagtttgccagtactgctaaatatatgaagaatactccttatgttaatgaggtatcaactgatgaagctctcctgaaaaggtatagaaaagaaataatggatcttaaaaaacaattagaggaggtttctttagagacgcgggctcaggcaatggaaaaagaccaattggcccaacttttggaagaaaaagatttgcttcagaaagtacagaatgagaaaattgaaaacttaacacggatgctggtgacctcttcttccctcacgttgcaacaggaattaaaggctaaaagaaaacgaagagttacttggtgccttggcaaaattaacaaaatgaagaactcaaactatgcagatcaatttaatataccaacaaatataacaacaaaaacacataagctttctataaatttattacgagaaattgatgaatctgtctgttcagagtctgatgttttcagtaacactcttgatacattaagtgagatagaatggaatccagcaacaaagctactaaatcaggagaatatagaaagtgagttgaactcacttcgtgctgactatgataatctggtattagactatgaacaactacgaacagaaaaagaagaaatggaattgaaattaaaagaaaagaatgatttggatgaatttgaggctctagaaagaaaaactaaaaaagatcaagagatgcaactaattcatgaaatttcgaacttaaagaatttagttaagcatgcagaagtatataatcaagatcttgagaatgaactcagttcaaaagtagagctgcttagagaaaaggaagaccagattaagaagctacaggaatacatagactctcaaaagctagaaaatataaaaatggacttgtcatactcattggaaagcattgaagacccaaaacaaatgaagcagactctgtttgatgctgaaactgtagcccttgatgccaagagagaatcagcctttcttagaagtgaaaatctggagctgaaggagaaaatgaaagaacttgcaactacatacaagcaaatggaaaatgatattcagttatatcaaagccagttggaggcaaaaaagaaaatgcaagttgatctggagaaagaattacaatctgcttttaatgagataacaaaactcacctcccttatagatggcaaagttccaaaagatttgctctgtaatttggaattggaaggaaagattactgatcttcagaaagaactaaataaagaagttgaagaaaatgaagctttgcgggaagaagtcattttgctttcagaattgaaatctttaccttctgaagtagaaaggctgaggaaagagatacaagacaaatctgaagagctccatataataacatcagaaaaagataaattgttttctgaagtagttcataaggagagtagagttcaaggtttacttgaagaaattgggaaaacaaaagatgacctagcaactacacagtcgaattataaaagcactgatcaagaattccaaaatttcaaaacccttcatatggactttgagcaaaagtataagatggtccttgaggagaatgagagaatgaatcaggaaatagttaatctctctaaagaagcccaaaaatttgattcgagtttgggtgctttgaagaccgagctttcttacaagacccaagaacttcaggagaaaacacgtgaggttcaagaaagactaaatgagatggaacagctgaaggaacaattagaaaatagagattctacgctgcaaactgtagaaagggagaaaacactgattactgagaaactgcagcaaactttagaagaagtaaaaactttaactcaagaaaaagatgatctaaaacaactccaagaaagcttgcaaattgagagggaccaactcaaaagtgatattcacgatactgttaacatgaatatagatactcaagaacaattacgaaatgctcttgagtctctgaaacaacatcaagaaacaattaatacactaaaatcgaaaatttctgaggaagtttccaggaatttgcatatggaggaaaatacaggagaaactaaagatgaatttcagcaaaagatggttggcatagataaaaaacaggatttggaagctaaaaatacccaaacactaactgcagatgttaaggataatgagataattgagcaacaaaggaagatattttctttaatacaggagaaaaatgaactccaacaaatgttagagagtgttatagcagaaaaggaacaattgaagactgacctaaaggaaaatattgaaatgaccattgaaaaccaggaagaattaagacttcttggggatgaacttaaaaagcaacaagagatagttgcacaagaaaagaaccatgccataaagaaagaaggagagctttctaggacctgtgacagactggcagaagttgaagaaaaactaaaggaaaagagccagcaactccaagaaaaacagcaacaacttcttaatgtacaagaagagatgagtgagatgcagaaaaagattaatgaaatagagaatttaaagaatgaattaaagaacaaagaattgacattggaacatatggaaacagagaggcttgagttggctcagaaacttaatgaaaattatgaggaagtgaaatctataaccaaagaaagaaaagttctaaaggaattacagaagtcatttgaaacagagagagaccaccttagaggatatataagagaaattgaagctacaggcctacaaaccaaagaagaactaaaaattgctcatattcacctaaaagaacaccaagaaactattgatgaactaagaagaagcgtatctgagaagacagctcaaataataaatactcaggacttagaaaaatcccataccaaattacaagaagagatcccagtgcttcatgaggaacaagagttactgcctaatgtgaaagaagtcagtgagactcaggaaacaatgaatgaactggagttattaacagaacagtccacaaccaaggactcaacaacactggcaagaatagaaatggaaaggctcaggttgaatgaaaaatttcaagaaagtcaggaagagataaaatctctaaccaaggaaagagacaaccttaaaacgataaaagaagcccttgaagttaaacatgaccagctgaaagaacatattagagaaactttggctaaaatccaggagtctcaaagcaaacaagaacagtccttaaatatgaaagaaaaagacaatgaaactaccaaaatcgtgagtgagatggagcaattcaaacccaaagattcagcactactaaggatagaaatagaaatgctcggattgtccaaaagacttcaagaaagtcatgatgaaatgaaatctgtagctaaggagaaagatgacctacagaggctgcaagaagttcttcaatctgaaagtgaccagctcaaagaaaacataaaagaaattgtagctaaacacctggaaactgaagaggaacttaaagttgctcattgttgcctgaaagaacaagaggaaactattaatgagttaagagtgaatctttcagagaaggaaactgaaatatcaaccattcaaaagcagttagaagcaatcaatgataaattacagaacaagatccaagagatttatgagaaagaggaacaatttaatataaaacaaattagtgaggttcaggaaaaagtgaatgaactgaaacaattcaaggagcatcgcaaagccaaggattcagcactacaaagtatagaaagtaagatgctcgagttgaccaacagacttcaagaaagtcaagaagaaatacaaattatgattaaggaaaaagaggaaatgaaaagagtacaggaggcccttcagatagagagagaccaactgaaagaaaacactaaagaaattgtagctaaaatgaaagaatctcaagaaaaagaatatcagtttcttaagatgacagctgtcaatgagactcaggagaaaatgtgtgaaatagaacacttgaaggagcaatttgagacccagaagttaaacctggaaaacatagaaacggagaatataaggttgactcagatactacatgaaaaccttgaagaaatgagatctgtaacaaaagaaagagatgaccttaggagtgtggaggagactctcaaagtagagagagaccagctcaaggaaaaccttagagaaactataactagagacctagaaaaacaagaggagctaaaaattgttcacatgcatctgaaggagcaccaagaaactattgataaactaagagggattgtttcagagaaaacaaatgaaatatcaaatatgcaaaaggacttagaacactcaaatgatgccttaaaagcacaggatctgaaaatacaagaggaactaagaattgctcacatgcatctgaaagagcagcaggaaactattgacaaactcagaggaattgtttctgagaagacagataaactatcaaatatgcaaaaagatttagaaaattcaaatgctaaattacaagaaaagattcaagaacttaaggcaaatgaacatcaacttattacgttaaaaaaagatgtcaatgagacacagaaaaaagtgtctgaaatggagcaactaaagaaacaaataaaagaccaaagcttaactctgagtaaattagaaatagagaatttaaatttggctcagaaacttcatgaaaaccttgaagaaatgaaatctgtaatgaaagaaagagataatctaagaagagtagaggagacactcaaactggagagagaccaactcaaggaaagcctgcaagaaaccaaagctagagatctggaaatacaacaggaactaaaaactgctcgtatgctatcaaaagaacacaaagaaactgttgataaacttagagaaaaaatttcagaaaagacaattcaaatttcagacattcaaaaggatttagataaatcaaaagatgaattacagaaaaagatccaagaacttcagaaaaaagaacttcaactgcttagagtgaaagaagatgtcaatatgagtcataaaaaaattaatgaaatggaacagttgaagaagcaatttgaggcccaaaacttatctatgcaaagtgtgagaatggataacttccagttgactaagaaacttcatgaaagccttgaagaaataagaattgtagctaaagaaagagatgagctaaggaggataaaagaatctctcaaaatggaaagggaccaattcatagcaaccttaagggaaatgatagctagagaccgacagaaccaccaagtaaaacctgaaaaaaggttactaagtgatggacaacagcaccttacggaaagcctgagagaaaagtgctctagaataaaagagcttttgaagagatactcagagatggatgatcattatgagtgcttgaatagattgtctcttgacttggagaaggaaattgaattccaaaaagagctttcaatgagagttaaagcaaacctctcacttccctatttacaaaccaaacacattgaaaaactttttactgcaaaccagagatgctccatggaattccacagaatcatgaagaaactgaagtatgtgttaagctatgttacaaaaataaaagaagaacaacatgaatccatcaataaatttgaaatggattttattgatgaagtggaaaagcaaaaggaattgctaattaaaatacagcaccttcaacaagattgtgatgtaccatccagagaattaagggatctcaaattgaaccagaatatggatctacatattgaggaaattctcaaagatttctcagaaagtgagttccctagcataaagactgaatttcaacaagtactaagtaataggaaagaaatgacacagtttttggaagagtggttaaatactcgttttgatatagaaaagcttaaaaatggcatccagaaagaaaatgataggatttgtcaagtgaataacttctttaataacagaataattgccataatgaatgaatcaacagagtttgaggaaagaagtgctaccatatccaaagagtgggaacaggacctgaaatcactgaaagagaaaaatgaaaaactatttaaaaactaccaaacattgaagacttccttggcatctggtgcccaggttaatcctaccacacaagacaataagaatcctcatgttacatcaagagctacacagttaaccacagagaaaattcgagagctggaaaattcactgcatgaagctaaagaaagtgctatgcataaggaaagcaagattataaagatgcagaaagaacttgaggtgactaatgacataatagcaaaacttcaagccaaagttcatgaatcaaataaatgccttgaaaaaacaaaagagacaattcaagtacttcaggacaaagttgctttaggagctaagccatataaagaagaaattgaagatctcaaaatgaagcttgtgaaaatagacctagagaaaatgaaaaatgccaaagaatttgaaaaggaaatcagtgctacaaaagccactgtagaatatcaaaaggaagttataaggctattgagagaaaatctcagaagaagtcaacaggcccaagatacctcagtgatatcagaacatactgatcctcagccttcaaataaacccttaacttgtggaggtggcagcggcattgtacaaaacacaaaagctcttattttgaaaagtgaacatataaggctagaaaaagaaatttctaagttaaagcagcaaaatgaacagctaataaaacaaaagaatgaattgttaagcaataatcagcatctttccaatgaggtcaaaacttggaaggaaagaacccttaaaagagaggctcacaaacaagtaacttgtgagaattctccaaagtctcctaaagtgactggaacagcttctaaaaagaaacaaattacaccctctcaatgcaaggaacggaatttacaagatcctgtgccaaaggaatcaccaaaatcttgtttttttgatagccgatcaaagtctttaccatcacctcatccagttcgctattttgataactcaagtttaggcctttgtccagaggtgcaaaatgcaggagcagagagtgtggattctcagccaggtccttggcacgcctcctcaggcaaggatgtgcctgagtgcaaaactcagtagactcctctttgtcacttctctggagatccagcattccttatttggaaatgactttgtttatgtgtctatccctggtaatgatgttgtagtgcagcttaatttcaattcagtctttactttgccactagagttgaaagataagggaacaggaaatgaatgcattgtggtaatttagaatggtgatagcaataccttcttcttgcatatggtaatacttttaaaagttgaattgttttatttatttgtatattttgtaaagaataaagttattgaaagaaatgtaaagttatctacatgacttagcatattccaaagcataatacatacattaatataaaacatcattttattaacaaaattgtaaatgtttttaataccttacacattcaataaatgtttagtagttctgaatcaccaaaaaaaaaaaaaaaaaa

SEQ ID NO: 344 - DNA, 5187 bp, Homo sapiens
agtttcactgggctcagcggtgcctgcgctttagcgcagacgcgcgggtgagatcctcacttcccacaggacctcgggacgggggcggggctccgacagaggcggcgattgtggcggcccatttgtaaatgctgcggagattgaggtgtcggttcgtgctgctgagctgcccaggcttcacggagcggtgttggaaatcaatagctcttctagcctttgcattgtttaaatataatagtgtcattggactaagatgttcctgatgccaacctcttcagagttaaacagtgggcagaacttcctaacccagtggatgaccaatccttctcgggctggggtcatattaaatcgtggatttcctattttggaagcagacaaagagaagcgagcagctgtggacatttctaccagctttcctattaaaggcacacatttttctgatagcttcagctttataaatgaagaagattcacttcttgaagaacagaagttggagtcaaacaacccttacaaaccacagtcagataaatctgaaacccatacagcctttccttgcattaaaaagggaccacaggtagcggcatgtcacagtgctcctggacaccaggaagaaaacaaaaatgacttcatcccagatcttgcgagtgaattcaaagaaggggcttataaagacccactttttaaaaaacttgaacagctgaaagaagtacaacagaagaagcaggaacaattgaagaggcaacagttggagcaactacagagactcatggaagaacaagagaagctgctcaccatggtgtctgggcagtgcacacttccaggtttgagtttactgcctgatgatcagagccagaagcacaggtctccaggaaataccaccactggagagagagccacatgctgcttcccatcatatgtctacccggacccaacccaggaagaaacatacccgtccaacattttatcccatgagcaaagcaacttctgtagaactgctcatggagattttgtcttaacttcaaaacgtgcgtctcctaatttattttctgaggcacagtatcaagaagcacctgtggaaaaaaataatttaaaagaagaaaaccgtaaccatcctacaggagaaagtatcttatgttgggagaaagtgacagaacagattcaggaagcaaatgataagaacttacaaaaacatgatgattcctcagaagtggctaatattgaagaaaggcccattaaagctgctattggagaaaggaaacagacctttgaagattacttagaagaacaaattcagttggaagagcaagaactgaagcaaaaacagctgaaggaagcagaaggaccattgccaatcaaagcaaaaccaaaacaaccatttttaaaacgaggagaaggtttagctagatttactaatgccaaatctaagtttcaaaaaggcaaagaaagtaaactagtgactaaccagagcacttccgaggaccagccgctgtttaaaatggatagacagcaactccagcggaaaaccgctcttaaaaataaagagctgtgtgcagacaaccctatccttaaaaaggacagtaaagctagaaccaagagtggttctgtcaccctcagtcagaagccgaaaatgctgaagtgtagtaacaggaaaagtctttctccgtcaggattgaaaatacagacggggaagaaatgtgatgggcagtttagagaccagatcaaatttgaaaacaaagtcacatctaataataaagaaaatgtaactgagtgtccaaaaccttgcgatactggctgcacagggtggaataagacacaaggtaaagacagacttcctctttcaacagggccggccagccggctggctgctaagagccccataagggagaccatgaaagagtctgaatcttctcttgacgtttctcttcagaaaaagttagagacttgggaacgagaaaaggaaaaggaaaatttggaattagatgaatttttgtttttagaacaagctgctgatgaaatatcattttctagtaattcctcatttgtactgaaaatcttagaaagggatcaacagatctgcaaaggtcaccggatgtcttccacccctgtcaaagctgtgccacagaagacaaatccggcagatcccattagtcattgtaaccgcagtgaggatttggaccacactgcacgtgagaaggagagtgagtgtgaagtcgcacccaaacaacttcattcattgtcctcagctgatgaattgagggaacagccttgtaaaatcaggaaagccgtccaaaagagcacttctgaaaatcagactgaatggaatgcacgtgacgatgaaggtgttccaaatagtgacagtagcactgactctgaggaacagcttgatgttaccataaaaccatcgactgaggatagagagaggggcatcagcagcagagaggatagcccacaagtctgtgatgataaggggccttttaaggacaccaggacccaagaagataaaaggagagatgttgatctggatttgtctgataaagattacagtagcgatgagtctatcatggaaagcataaaacataaagtgtctgagccctcgagatcctcatccctaagtctgagtaaaatggactttgatgatgaaagaacttggactgaccttgaagagaatttgtgtaaccatgatgttgttcttgggaatgaatccacttatgggacgccgcagacatgctaccctaataatgaaataggtatcctggacaaaacaataaaaaggaagattgcaccagtcaagaggggagaagacttgagcaagtccaggaggagcagaagtcctcctacatcggagctgatgatgaaattctttccttctttgaaaccaaaaccaaagtcagattcacacttgggaaatgaactcaagttaaacataagtcaagaccaaccacctggtgacaatgctcgatcccaggttttgagagagaaaattattgaattggaaacagaaatagaaaagtttaaagctgagaacgcatctttagctaaacttcgcattgaacgagaaagtgccttggaaaaactcaggaaagaaattgcagacttcgaacaacagaaagcaaaagaattagctcgaatagaagagtttaaaaaggaggagatgaggaagctacaaaaggaacgtaaagtttttgaaaagtatactacagctgcaagaacttttccagataaaaaggaacgtgaagaaatacagactttaaaacagcaaatagcagatttacgggaagatttgaaaagaaaggaaaccaaatggtcaagtacacacagccgtctcagaagccagatacaaatgttagtcagagagaacacagacctccgggaagaaataaaagtgatggaaagattccgactggatgcctggaagagagcagaagccatagagagcagcctcgaggtggagaagaaggacaagcttgcgaacacatctgttcgatttcaaaacagtcagatttcttcaggaacccaggtagaaaaatacaagaaaaattatcttccaatgcaaggcaatccacctcgaagatccaagtctgcacctcctcgtgatttaggcaatttggataagggacaagctgcctctcccagggagccacttgaaccactgaacttcccagatcctgaatataaagaggaggaggaagaccaagacatacagggagaaatcagtcatcctgatggaaaggtggaaaaggtttataagaatgggtgccgtgttatactgtttcccaatggaactcgaaaggaagtgagtgcagatgggaagaccatcactgtcactttctttaatggtgacgtgaagcaggtcatgccagaccaaagagtgatctactactatgcagctgcccagaccactcacacgacatacccggagggactggaagtcttacatttctcaagtggacaaatagaaaaacattacccagatggaagaaaagaaatcacgtttcctgaccagactgttaaaaacttatttcctgatggacaagaagaaagcattttcccagatggtacaattgtcagagtacaacgtgatggcaacaaactcatagagtttaataatggccaaagagaactacatactgcccagttcaagagacgggaatacccagatggcactgttaaaaccgtatatgcaaacggtcatcaagaaacgaagtacagatccggtcggataagagttaaggacaaggagggtaatgtgctaatggacacggagctgtgacgatcctcatgtgatcatgaagtaacagtaactgactttttatgttaaaaaatgtacatttactgtggattctgtttaatttattgtgtatgtgtggggaaaagattagattctaaaataaaagtttaccctgtggcatcttcatttttatattctttgaaatgcaatgatagctctcatttataattcactaccctgtctttcaatagactaaggaaagcattttgactgtttagaaattgtgtacaggtttttacagtaagtgggtgtgtttattggttagaaatggctataaaaaaaaaccaagaagtacaggaagtacatcacctagatgtcccacagacacatcagccgtagagcactggacttgtacagaaggtgtactcaaggagtaaacacgtgtctctgtagccaaaatattactatgttcagttagtaccaaaattagaccatttgatcttctacagaggatcattaattattataacagaatgggaagttacaacagtggatgaatataaataggtcacacacaacaggtagtaatcatggtgaagagaaagcagttataacaaggctgactttgtaatgtaatgtctcaaaatgggatacttgagagtggaggggggcatgaacgatgactagccagtgttaacccatggaccacagctaccctgatgttaccacagtgagattactgtagcctcatggaagcaagatgtccctgaaggatgggcaagtcacttacttacttacttgtaaatttatataataaataattacagattggtctagatagaccttacctgtcacatatactatgaatcaggttttgttaatgaaatctatcaattccaggtgacttaactgaatatgaaaaataaaactttttgaagaatataaaaaaaaaaaaaaaa

SEQ ID NO: 345 - DNA, 8637 bp, Homo sapiens
caaatgctctcagcaaacagtcagctttacaaatggagacagcaggaccagaagaggagccagccggagctacagaatccttgcagggccaagatctcttcaacagggcttcaccactggaacaagcacaagactcacctattgattttcatttacagtcatggatgaataataaggaacccaagattgttgtgcttgatgctggaaaacattttgaagacaagactctaaagagtgacctaagccacactagcttattagaaaatgagaaacttatcttaccgacaagcttggaagattcttctgatgatgatattgatgatgaaatgttttatgatgatcatttggaggcttattttgaacaactggcaattccaggaatgatatatgaagacctagaaggaccagaacctccagaaaaaggttttaagttacctacaaatggtcttagacaggcaaatgaaaacggtagcttaaactgcaagtttcaatcagaaaataacagctctctgatttccctcgactcacactcttctgaaacaactcacaaagagtctgaggaaagccaagttatttgtctacctgggactagtaattctataggtactggagatagtagaaggtacacagatggtatgttaccattttcctctggtacttggggaactgagaaagaaatagaaaatttgaagggtattgttccagatcttaacagtgaatgtgcaagtaaagatgttctggtgaagaccctcagggctattgatgtgaaacttaactctgataattttcatgatgcaaatgccaatagaggtggttttgatctgactgaccctgtaaaacagggggcagagtgtcctcaccaaaataagacagttttgcacatggatggatgtttagacactgagactcctacggtgtccattcaagaaaatgtggatgtagcctctttgaagcccattagtgacagtggaattaatttcactgatgccatttggtcaccaacttgtgaaaggcgaacatgtgaatgtcacgagtccatcgaaaagaataaagacaaaacagatctcccacagagtgtggtctatcaaaatgaagagggtaggtgggtcacagaccttgcctattacacatcttttaatagcaaacaaaatttaaatgtgtctctaagtgatgagatgaatgaagacttcagatctggttccatcatttggctattttattagatcaccagagaagagagaacctattgccttaataagaaaatctgatgtatcaagaggtaatttggaaaaagaaatggctcatcttaaccatgatctatattcaggagatttaaatgaacagtcccaggcacagctaagtgaaggatcaattacacttcaggttgaagcagtagagagtacttcacaagtggatgaaaatgatgtgacgttaacggctgataaaggcaaaacagaggacactttcttcatgagcaacaaaccccaaagatacaaagacaagctaccagatagtggtgattctatgcttaggatcagcaccattgcttcagccattgcagaggcatcagttaatactgatccttcccaacttgctgcaatgatcaaggcactttcaaataaaaccagagacaagacttttcaggaagatgagaaacaaaaggactattctcatgtgcgtcatttcttacctaatgatttagaaaaaagtaatggatccaatgcacttgatatggagaaataccttaaaaaaacagaagttagtagatatgaaagtgcattggaaaacttttcaagggctagtatgtctgatacttgggatttatctttgcccaaagaacaaactactcaagacattcatccggtggacttaagtgctactagtgtaagtgtgagggcaccagaagaaaacacagcagctattgtttatgttgaaaatggagagagtgagaatcaagagtcatttagaaccataaactcctcaaattcagttacaaatagagagaataacagtgcagtagttgatgtgaagacatgttccattgacaacaaattacaagatgttggtaacgatgaaaaagctacctcaatttccactccatctgatagttattcatcagtgaggaaccccagaataacatccctttgtctgttaaaagactgtgaagaaatacgagataacagagaaaatcagaggcaaaatgagtgtgtcagtgaaataagcaacagtgagaagcatgtgacttttgaaaaccatcgcatagtctcacctaaaaatagtgatttgaaaaatacctctcctgagcatggtggacgtggctcagaggatgagcaggagagcttcagaccttccacgtcaccactgagtcattcttctcctagtgaaatttctggaacgagttcatcagggtgtgcgttagagtcctttggttcagcagctcagcagcagcagcctccctgtgagcaggagttgtctcccttggtgtgctcgcctgctggggtgagcaggctgacgtatgtgtctgaaccagagagctcctatcctaccacagccacagatgatgccctggaggaccgcaagagtgatatcaccagcgagttgagtaccacaattattcaaggcagtccagccgcattggaggaacgggctatggaaaaattgagagaaaaagttccatttcagaatagaggaaaaggaacattatcatctattatccagaataactctgatacaagaaaagcaactgaaactacttctctgagtagcaagcctgaatatgtaaaacctgactttagatggagtaaagatccttcctccaaaagtggaaatctgttggaaaccagtgaggtaggttggacatcaaaccctgaggaattggacccgatcaggctggctctcctgggcaagtcaggtctgagctgtcaggtggggtcagccacatcacaccctgtgtcctgccaggagcctatagatgaagatcaaagaataagtcctaaagataagtcaactgctggccgtgagttcagtggccaggtttctcatcagaccacctctgaaaaccagtgtactcctattcccagcagcacagttcacagctctgtggctgacatgcagaacatgcctgctgctgtgcacgcactcttgacacaaccctctctcagcgctgctccttttgctcagcggtatttgggaacactcccttcaactggaagcaccaccttgcctcagtgccatgctggcaatgccacagtctgtggcttctcaggaggccttccctatccagctgttgcaggagagcctgtgcagaactctgtggctgtgggaatttgtctaggatcaaatatcggctctggatggatgggtacctcttccctctgtaacccatattctaataccttaaatcagaacctgctaagcacaacaaaaccttttcctgtgccgtctgttggtacaaactgtggaattgaaccatgggattcaggagtgacatcaggattggggagtgtccgagtgcccgaggagttgaagcttcctcatgcttgctgtgtcgggatcgcttcccagaccctcctcagtgtgcttaatccaactgaccgctggctgcaagtcagcattggggtcctcagcattagtgttaatggtgaaaaggtagctttctatgtctttctcatttaacctaacagttgcattgtgattaggtgcttgatttcccccatctctagtgctaggttctcccttcacgcctttattaatgcacacagtcattgccatggtatctttctctcagaccccttttgttgtagtgcttgtagagtgtaaagtgaaacagttttgcattttccatcatttattatttatattttattgttatttattggtaaattcctataaatttgcttttagtgctattatttaaatcatcaaaagttctgagtttcttgtttctacttgtcagttttgttaaaggtgattgaatataagtaaccatgacttgtaaaaaaaaaaaaagaaagcagttactcttggagcttatgccttcatttggcaagggaagtctttttaactagtttatctgatgattttcttacatgagcttttgaaatacctggaaatgcagttttaatatgaacttttaagacagatgtctcttacatgatcaattacagttgctataattctagactctaaatcttctctcctggttacagtgaccatttgaacattggtgagtggagaggggggatatatggtcagcagctgttttgaaatgtcccagttttacgactgttacttgtgaatcagtattggtggatgcttccctcgtgcctcttagtggccatcgtctgcctggtaaaataagatcgcctccccctacgccgtcttggcttttcccctctacttccagtccttaggttagatgaaaagtaggtgattgaaggagaggattgagggtggaaggtgggctgtgaagactttttgggggcatcctggagtctgtgaatgaagcagtgttgtctatggaagtggggagtagaaaagaagatccccattgacagtgaggagggagggtggctggagttgtcactgcagtcgaggcggagtcagggctgtgggacctcagcggttagcctgactcttcttccccccagcccccacccactgctgtgttgtgtgtgctagagagacttacagggctgtgaaagagtgacctttgtcagtgtcctttttaagacaagtgagtgtaagggtcaatgtgcttgcttggaggtggactggggagacagccttggtgcagcaagaacattcaactcaggaagcatttgactcgttgtacttcagagaccataaatgacaaggttttgacatttttgaagagataataaatgttttaatttggcagtttgagtgattgggaaaaggaatcttaaactaggtgattctacttgattttcagtgtgaagccattaataacgaactttatggctcttttttgaaggtggatctttcaacatatcgttgtttagttttcaagaataaagccatcataagacctcatgccacagaagagataaaagtgctttttataccatccagtcctggggttttcagatgcacattcagtgttgcttcttggccatgttcgacagatgctgagaccatcgtacaggcagaagctttggccagcaccgtcactctcactgccattgccgagagtcctgttattgaggtagaaacagaaaagaaagacgttcttgattttggtgacttgacttatggaggctggaaagccctcccactaaaattgataaaccgaacgcatgccactgtgccaattagactgattattaatgctaacgctgtagcctggcgctgtttcacgttttccaaggaatccgtccgagctcctgtggaagttgctccttgcgctgatgtggtcactcggctagcaggcccttctgtggtcaaccacatgatgcctgctagttatgatggacaggatccagaatttctgatgatttgggttcttttccatagtccaaagaaacagatcagctcttcagatattctggactcagcagaagaattctcggcaaaagttgatatcgaagttgacagcccaaaccctacgcccgttcttagaagtgtgagtctccgagcaagagcaggaatagctaggatccatgctcccagggacttgcagacgatgcatttcttggccaaagtggcttcctcaagaaagcagcacttacctttgaaaaatgctgggaacattgaagtttatttggatatcaaggtcccagaacaaggaagtcacttttcagtggatccaaagaatctactccttaaacctggagaagaacatgaggttattgtttcatttactccaaaggatcctgaagcctgcgaggaaaggatcttgaaaatatttgtgcagccatttggacctcagtatgaggtagtgttaaaaggcgaagtcatttcttcaggaagtaaacctctgtcacctggaccttgcttagatattccatcgattttgtccaacaaacaatttctggcttggggaggagtccctctaggtagaacacagcttcagaaactagctttaagaaataattctgcatctacaactcaacatttacgactgcttattagaggacaagatcaggactgctttcagcttcagaacacttttggttcagaacagcgattgaccagtaactgtgagatcagaattcacccaaaggaagacattttcatctctgtattatttgcacctactcgattatcttgcatgttggctagactagaaatcaaacaacttggaaatcgatcacaaccaggcattaagttcacaatacctttgtctggatatggaggaacaagcaatcttattttggaaggcgttaaaaaattatctgacagttacatggtaacagtgaatggcttagtacctggcaaagaaagtaaaattgttttttctgtccgcaacactggctcccgagcagcttttgttaaagcagtaggttttaaggattctcagaaaaaagttttgctggatcctaaagtattgaggatttttccagataaatttgtactcaaggaaagaacacaagaaaatgttactttaatatataatccatcagacagaggaatcaataataaaactgcaacagaactatcaactgtatacttatttggtggagatgaaatttcaagacagcagtatcgcagggccctgttacataaaccagagatgataaaacagatacttccagaacatagtgtgcttcaaaacattaattttgttgaagcatttcaagatgagctattagtaactgaagtatatgatcttccccaacgacctaatgatgttcagctcttttatggaagcatgtgtaaaattatactttcagtaattggagaattcagagattgcatttctagcagagaattccttcagccttcttccaaagctagcttggaatctacaagcgacttgggagcttctgggaaacatggtggcaacgtctctttggatgttttaccagtcaaaggtcctcagggttctcctcttctctcacgggcggctcgcccgcctctggatcagctggcctccgaagagccgtggactgtcctacccgagcacttgattctggtagctccttctccttgtgacatggcaaaaactggacgtttccagattgtgaataactctgtgaggttactgagatttgagctgtgctggccagcgcattgcctcacagtcacgccgcagcatggatgtgtcgcgccagagagtaaactacaaattcttgtgagtcctaattcctccttatccacaaaacagtcaatgttcccgtggagtggtttgatctatatacactgtgacgatggacagaagaaaattgtgaaagttcaaattcgagaagatttaactcaagtggaacttttaactcgtttgacctccaaaccatttggaattctttccccagtatctgagccttcagttagtcatttggtcaaaccaatgacaaaaccgccttccacaaaagttgaaataagaaacaagagtattacttttcctacaacagaacctggtgaaacttcagagagctgtctagaactcgagaatcatggcaccacagacgtgaaatggcatctgtcatctttagcgccaccttatgtcaagggagttgatgaaagtggagatgtttttagagctacctatgcagcattcagatgttctcctatttctggtctgctggaaagccatgggatccaaaaagtctccatcacatttttgcccagaggtaggggggattatgcccagttttgggatgttgaatgtcaccctcttaaggagcctcacatgaaacacacgttgagattccaactctctggacaaagcatcgaagcagaaaatgagcctgaaaacgcatgcctttccacggattccctcattaaaatagatcatttagttaagccccgaagacaagctgtgtcagaggcttctgctcgcatacctgagcagcttgatgtgactgctcgtggagtttatgccccagaggatgtgtacaggttccggccgactagtgtgggggaatcacggacacttaaagtcaatctgcgaaataattcttttattacacactcactgaagtttttgagtcccagagagccattctatgtcaaacattccaagtactctttgagagcccagcattacatcaacatgcccgtgcagttcaaaccgaagtccgcaggcaaatttgaagctttgcttgtcattcaaacagatgaaggcaagagtattgctattcgactaattggtgaagctcttggaaaaaattaactagaatacatttttgtgtaaagtaaattacataagttgtattttgttaactttatctttctacactacaattatgcttttgtatatatattttgtatgatggatatctataattgtagattttgtttttacaagctaatactgaagactcgactgaaatattatgtatctagcccatagtattgtacttaacttttacaggtgagaagagagttctgtgtttgcattgattatgatattctgaataaatatggaatatattttaatgtggtatatccagaaaa

SEQ ID NO: 346 - DNA, 6054 bp, Homo sapiens
aacggcgggaaggctcaggggcgtgcttgcggcaaccctgtaaccgccggtgcgcaagttggaggggcaaggggctgccgtgtcctggtctggaggcggcccaggctgccttggtgattctggcttcgcggcctcatggcttgcggccggtttgcgcaacggcctgcgaaccaccaggcgcgtccccgccggcttgggtccgccccgaagcccagtccctcggcctggcccgctatgccctgcacactggcggagtctggcgtggcgcagcccggcgtggggttcggccccgccaggtggtcagcccttcctcggagtccaggtggctgggggcgcttcggagagtggccaggggcccccaaacccggggccgcagagcagtaccagtccgtggcctgttaggaaccaggctacagagcaggagttgccaaaacaaaggggatttggtgatggaggctttgttagaaggaatacaaaatcgagggcatggtgggggatttttgacatcttgtgaagcagaactacaggagctcatgaaacagattgacataatggtggctcataaaaaatctgaatgggaaggacgtacacatgctctagaaacttgcttgaaaatccgtgaacaggaacttaagagtcttaggagtcagttggatgtgacacataaggaggttggaatgttgcatcagcaggtagaagaacatgaaaaaatcaagcaagagatgaccatggaatataagcaggagttgaagaaactacatgaagaattatgcatactgaagagaagctatgaaaagcttcagaaaaagcaaatgagggaattcagaggaaataccaaaaatcacagggaagatcggtctgaaattgagaggttaactgcaaaaatagaggaattccgtcagaaatcgctggactgggagaagcaacgcttgatttatcagcaacaggtatcttcactggaggcacaaaggaaggctctggctgaacaatcagagataattcaggctcagcttgtcaatcggaaacagaaattagagtctgtggaactttctagccaatcagaaattcaacacttaagcagtaaactggagcgggctaatgacactatctgtgccaatgagttggaaatagagcgcctcaccatgagggtcaatgacttggttggaaccagtatgactgtcctacaggagcagcagcaaaaagaagaaaaattgagggaatctgaaaaactattagaggctctgcaggaagaaaagagagaattgaaggcagctcttcagtctcaagaaaatctcatacatgaggccagaatacaaaaggagaagttacaagaaaaagtaaaggcaactaacactcaacatgctgtagaagctataaggccacgggaagaatctctggcagaaaagaagtacacctctcaagggcagggggacttagacagtgtgctctcccagttgaattttacccatactagtgaggaccttctgcaggcagaggtgacttgtcttgaaggcagtttggaatctgtgagtgcaacgtgtaaacagctgagccaagaactaatggaaaaatatgaagaactgaagaggatggaagcacataacaatgaatacaaagcagagattaagaagttgaaagaacagattttacagggtgaacaaagttacagttctgcactagaaggaatgaagatggaaatctcccatctaactcaggagttacatcagcgagatatcactattgcttccaccaaaggttcttcctcagacatggaaaagcgactcagagcagagatgcaaaaggcagaagacaaagcagtagagcataaggagattttggatcagctggagtcactcaaattagaaaatcgtcatctttctgaaatggtgatgaaattggaattgggtttacatgaggcaaaagagatttcactagcagacctccaggagaattatattgaggcattaaataaattagtgtctgaaaatcaacaactacagaaagatttgatgaataccaaatctcagctggagatttctactcagatgtgcaaaaaacaaaatgacaggatctttaaaccaacacacagcagaacaactgagttcaagaatacagagttcaagccaacccatggccagcacagacatgatggaataaagactgagcactacaaaacagatcttcattctccaagaggacaagcgtcggatagtataaaccccatgtctagggtgctaagccccctgagtcctcaaatcagcccttgcagctccaccaggtctttgacttcctactctctatgtaaaactcattctttgccttcagcgctagatacaaatgaagccaatttttctgacactatgtctgagagtatgaatgaccaagaagagtttatatcttcgtgttccttgcctgtatctccccttggttcaatagctaccagatttttggaagaggaggaactgaggtctcatcacattctagagcgcttggatgcccatattgaagaactaaaaagagagagtgaaaagacagtgagacaattcacagccttaaagtagcctcttaaaaaaatcacaatcttggaaataaaaataaacaccaaagagttactgtcatctgaagtagcagctctttaaaaacatgaagagataaaattataaaaatgatacatctaaagcagtggtgaagaaagctgaaaaactgatacttttgataggcattttctctgcactggtttgtttaaaggacttcttccagcaataagttgaaagaataaaccactttgctagacttttttctcatacgaatatttattatcataaagtgatacttaccttgctgacttaaatgtgaatagctatgtactaattgaaataaggattttatgatacatgttgaaaataaagtaactgcaggaactttctttaggggaaatgtgtagaagcatggatttaggggtcaaacatacctggatcgatagactggttttgccacttaccagccaacggggcttgttatttactgggctggtagcccctcctagccaaggggctggtagtgtgtaaagtcaggctggtagtgaataaggggggggtgtgctaaagaaccttatcaagcagtcctctcttgctcaacactcatgcagaggagagaggcagggagggcaagggactggctgtcatgcacggtgcccatggaatatccattggaaataaatgttcatcgtctgcactgctgaggacaagtttagatgggagacaaagatctggatgttgatgtgccgcaggcatttgaaacgatgggagttgataagatccaccagggaggctgtggagagagagaggagcaggaggctgggtttggggccctgaaagatgccagcatctgaggatcacaggaaatagatctagcaaaggaactagaatgtgcagttacagatgagaaaggtcagtgtagtgtacttgccagctcaagggtgtggcctctgtgaaccctctttctgtagtggatctttcccatcagcgtaaaacatcctgttatttcccctttttaaataaaacctcagttttttttaatgcctctcttttactgctctgtatgtttgcttcccttcacccaaacacttctggaaagagttgtctgcagtgactctttccagttcctcaccccgccccaccgtagttctcttcctaaccctctccaacaccacttccatccccagactgctttcttgctcttgagttcaccagtgacctaatcagtgtctgagcatcattcagcacagttggactctctcttggcttctgtgacctggaacttctggtttcctctctacctcatcctccactccatctcatggcttttcctcttctaacctctaagtcagagggccccctagagctctgtcatgggttttctccctcagcattctcttccctagaagtttccattccattctcaagctcttaataccacctataggccagtgacccttacatttattactaatcttgacctctccccagagctgctgtcttagatacctagctgcttatgcgatgtcttcacttggatatctgacaaacatcttgtttccaagagagaactctttattctccctcttgctaagattccatatcaggacatagcattatgtttgccagttcctaggagttacttataattccttccttacccacatccgcatatccagtcatttgggaggtcctgtcatttcttcccccagaatcttatctcagacccaaccgtttccctcctgcacttctaccacctgatccagactacttctctctcaccctgattctggcagtagcctcctaactgatagtactcacaccagtaattcagggagcttctggagttatcctttagaaatgtaaatgaaacagtgtcaccactgcttcccttcagactcttccaaggcttctctttttttttttattgagacagagtctcactctgtcgcccaagctgcagtacagtggcaggatctcggctctctgcaacctccacctcccgggctcaagtgattctcctgccttagcttcccgagtagctgggattacaggcgcatgccaccaggcccagctaatttttgtatttttagtaggaacagggtttcaccatgttggtcaggctgatctcgaactcctgacctcaagtgatccacccgcctgagcttcccaaagtgctgggttataagcgtgagccactgcacccagccccaaggcttcttactgcactcagaataaaatccaaatgaattagtatagcctacagagtgtcaataatctgggcctaatcacccattgcatcatcctttactgtgctccacccatgctggcgtcctttctgtttattgagtgcagcaagctttaacctgttcgggtctttcatttgcagtttaccctgaatattccctttctcttacctcacctttgattggcgttttcccccttgcagacctgcactctggcatcctctcctgagcaagccttctttgattgctgcctcccaaacctgtttctccccatttctctagctcattggcctgtgttacttgcttcatagtgctcactactatctgaaatcatttcattacttgatttatgtttgtactgtctatttctgtctttagaattaaaactccttgagggcaaggactttgcttctctggttcatggtgggatcctcatcacccagcacaagcccaacacttaggagaggctcagctagtttgaaccaatggaaaatgccattcctgaggtgcaccacatcgtttcttttgtgttggtgtgcatgctgtccttcagtttgtctcctcttcccacaccctgtcatgtgctcctaaaactccccctttacttggctactttatctggcttggcaaagctttcccatatcccctgacccatgtcagggaacgtttctcctcattgctgtcatggcaccctgtgtgtggctctgaccagactttgctatccgctttgatttctgtctttcaggggctaagtcctgcctacatcctcagtcagcatgctgcctaacacataacagatcctaagcaaatattgggtggatgaaaatcactaccattcaaggcttcattgtatttatcagtaaaactgaaataatatctaatggggtcgagaagatttactgaaaatatatatttgaaagggctttgcagttttaagtactgtacctatgtgcattgctgttacattcaggagatttctgagttttagacagtcccaagcttcagcttaaaatctgtagactgcagcccgtttctgaaacgtttgtactacgtgttgactaggaggaacaatgacagactctgtagtcaccggaaatacttaaggaatcatgaggtactatgtatttccttaaattatactgttttttaaagctgaagtatctaatagttaatgggttgtccaaatttgtcagaacatttgactgtaatttaatgtctcaccatttttcaaaaagatatattaataccaaatattaaaatgtgtcaagact

SEQ ID NO: 347 - DNA, 1059 bp, Homo sapiens
gctctcgtcttctgcggctctcggtgccctctccttttcgtttccggaaacatggcctccggtgtggctgtctctgatggtgtcatcaaggtgttcaacgacatgaaggtgcgtaagtcttcaacgccagaggaggtgaagaagcgcaagaaggcggtgctcttctgcctgagtgaggacaagaagaacatcatcctggaggagggcaaggagatcctggtgggcgatgtgggccagactgtcgacgatccctacgccacctttgtcaagatgctgccagataaggactgccgctatgccctctatgatgcaacctatgagaccaaggagagcaagaaggaggatctggtgtttatcttctgggcccccgagtctgcgccccttaagagcaaaatgatttatgccagctccaaggacgccatcaagaagaagctgacagggatcaagcatgaattgcaagcaaactgctacgaggaggtcaaggaccgctgcaccctggcagagaagctggggggcagtgcggtcatctccctggagggcaagcctttgtgagccccttctggccccctgcctggagcatctggcagccccacacctgcccttgggggttgcaggctgcccccttcctgccagaccggaggggctggggggatcccagcagggggaggcaatcccttcaccccagttgccaaacagaccccccaccccctggattttccttctccctccatcccttgacggttctggccttcccaaactgcttttgatcttttgattcctcttgggctgaagcagaccaagttccccccaggcaccccagttgtgggggagcctgtattttttttaacaacatccccattccccacctggtcctcccccttcccatgctgccaacttctaaccgcaatagtgactctgtgcttgtctgtttagttctgtgtataaatggaatgttgtggagatgacccctccctgtgccggctggttcctctcccttttcccctggtcacggctactcatggaagcaggaccagtaagggaccttcgattaaaaaaaaa

SEQ ID NO: 348 - DNA, 1893 bp, Homo sapiens
gcgcagcgaggttccacgtgagcgcctgcgtttctcctcaaacctaacgatgccgccggagcggaggagacgaatgaaactggaccggagaaccggagcgaagccgaagcggaagcccggaatgaggccggactggaaagccggagcggggccaggcgggcctccccaaaagcctgccccttcatcccagcggaaaccgccggcccggccgagcgcggcggccgctgcgattgcagtcgcggcggcggaggaagagagacggctccggcagcggaaccgcctgaggctggaggaggacaaaccggccgtggagcggtgcttggaggagctggtcttcggcgacgtcgagaacgacgaggacgcgttgctgcggcgtctgcgaggcccgagggttcaagaacatgaagactcgggtgactcagaagtggagaatgaagcaaaaggtaattttccacctcaaaagaagccagtttgggtggatgaagaagatgaagatgaggaaatggttgacatgatgaacaatcggtttcggaaggatatgatgaaaaatgctagtgaaagtaaactttcgaaagacaaccttaaaaagagacttaaagaagaattccaacatgccatgggaggagtacctgcctgggcagagactactaagcggaaaacatcttcagatgatgaaagtgaagaggatgaagatgatttgttgcaaaggactgggaatttcatatccacatcaacttctcttccaagaggaatcttgaagatgaagaactgccagcatgcgaatgctgaacgtcctactgttgctcggatctcatctgtgcagttccatcccggtgcacagattgtgatggttgctggattagataatgctgtatcactatttcaggttgatgggaaaacaaatcctaaaattcagagcatctatttggaaaggtttccaatctttaaggcttgttttagtgctaatggggaagaagttttagccacgagtacccacagcaaggttctttatgtctatgacatgctggctggaaagttaattcctgtgcatcaagtgagaggtttgaaagagaagatagtgaggagctttgaagtctccccagatgggtccttcttgctcataaatggcattgctggatatttgcatttgctagcaatgaagaccaaagaactgattggaagcatgaaaattaatggaagggttgcagcatccacattctcttcagatagtaagaaagtatacgcctcttcgggggatggagaagtttatgtttgggatgtgaactcaaggaagtgccttaacagatttgttgatgaaggcagtttatatggattaagcattgccacatctaggaatggacagtatgttgcttgtggttctaattgtggagtggtaaatatatacaatcaagattcttgtctccaagaaacaaacccaaagccaataaaagctataatgaacttggttacaggtgttacttctctgaccttcaatcctactacagaaatcttggcaattgcttcagaaaaaatgaaagaagcagtcagattggttcatcttccttcctgtacagtattttcaaacttcccagtcattaaaaataagaatatttctcatgttcataccatggatttttctccgagaagtggatactttgccttggggaatgaaaagggcaaggccctgatgtataggttgcaccattactcagacttctaaagagactatttgaagtccagttgagtcacaagagaagcctgtcttgatatatcatctcagaaactttcctgaatatgtgataatatatggaaaatgatttatagatccagctgtgcttaagagccagtaatgtcttaataaacatgtggcagcttttgtttgaaaaaaaaaaa

SEQ ID NO: 349 - DNA, 1243 bp, Homo sapiens
gggcggtggcgggcgctggtgaaggagtctcgctgagctcgaggaggtggcgcgatggagggactggaagagaatggaggtgttgtccaagttggagaattgttaccttgcaagatttgtggaagaacattctttccagtagcattaaaaaaacatggacccatttgccagaagactgcaactaaaaaacggaagacttttgattcaagcagacagagagctgaaggaactgatattccaacagtaaaacctctcaaaccgaggccagaaccaccaaagaaaccatctaattggagaaggaaacatgaagaattcattgctaccataagagcagctaaaggccttgatcaggccctcaaagagggtggcaaacttcctcctcctcctccaccttcttatgatcctgattatattcaatgtccatattgtcagaggagattcaatgaaaatgcagctgatagacatataaatttctgtaaagaacaggcagcacgtattagtaatgaaggggaattttctacagataccaaaggaaaaccatcttctcggacacaggtgtataagccacccgcacttaaaaagtcaaattctcctggaactgcatcatcaggatcttcacgattaccgcagccaagtggcgctggcaaaactgttgtaggtgttccttcaggtaaagtgtcttcaagtagcagctctttgggaaacaaacttcagaccttgtctccctctcataaagggatagcagcccctcatgcaggagctaatgtcaaaccccgaaattccacaccacctagtttggcaagaaatcctgccccaggtgtgcttacaaacaaaagaaaaacatatactgagagctacatagccaggccagatggggactgtgcatcttcccttaatggtggaaatattaaaggcattgaaggacattcacctggaaacttaccaaaattctgccatgagtgtgggactaaataccctgtagaatgggccaaattttgctgtgaatgtggcattcgaagaatgattctatgaatagaatctcaaaaaaaaaaaaaagccaagttcagagtttatgattattgctgcttggacagctagagcacatcctctagttagtttgtgctaaaaatactcgaaataccatttccagttaattttgaagtgtaatcttttggctatataatgtgtgtatgtttatatgtgtacatatactgtatataataaatatttgataccccaaaaa

SEQ ID NO: 350 - DNA, 2067 bp, Homo sapiens
aggcctatttccggtaggaatcagtggacttggcggcagaggcagtgcggatccggcgttctccactgatcttttccaaggctgtacagacatggcggcggcttttcggaaggcggctaagtcccggcagcgggaacacagagagcgaagccagcctggctttcgaaaacatctgggcctgctggagaaaaagaaagattacaaacttcgtgcagatgactaccgtaaaaaacaagaatacctcaaagctcttcggaagaaggctcttgaaaaaaatccagatgaattctactacaaaatgactcgggttaaactccaggatggagtacatattattaaggagactaaggaagaagtaaccccagaacaactaaagctgatgagaactcaggacgtcaaatatatagaaatgaagagggttgcagaagctaagaaaatcgaaagactaaaatcagagctccatctgctggatttccaggggaagcaacagaacaagcatgtgttcttttttgacaccaaaaaggaagttgaacagtttgatgtcgcaactcacctgcaaacagccccggagctagtcgacagagtctttaataggcccaggatagagaccttgcagaaagaaaaagtgaaaggagttaccaatcagactggacttaagcgaatagctaaagaaaggcaaaagcagtataactgcctgacacagcggattgaacgagagaagaaattgttcgttattgctcagaaaattcaaacacgcaaagatcttatggataaaactcagaaagtgaaggtgaagaaagaaacggtgaactccccagctatttataaatttcagagtcgtcgaaaacgttgacgtgttatagataagccttgtcattctgtatcaaaaatctgttgtcgttttctagtaacttcaaattccattactccaaatggcatggttttccggtttgtaaccataactaaattgtcagtctgacatttaatgtctttctatggacaacattaaatctccctcccttctgtaattgtttttggattgtgaaattagtcttatttttatatacttaattttttttttctttgagatagggtctttgttgccaggctggaagtgcagtgtgtgattatggctcactgcaactttgaactcctgggctcaagtgatcttcctgcatcagcctcttgagtagctgggaccacagacatgtgccaccatgtctgagtaatgtttaaattttctgtagagaccaggttttgccatgttggccaggctggttttgaactcgtggcctcaagcgatcctcccaccttggcctcccaaagggctgggattacagggatgagccactatgcccagcccataattttttttgttatgaaacataggatctcattacagcagatttggaaagtagattaattcattcctaatcccagtgcttattcaataataacaaatatttattgcatgcttaactgtgctaggagctagagctgtggaggtggacaattactgtgagtagtctagttgatttcctccattttgtaaaacgaggcatcactttttgtccatgtttttgtgttttatagttacagtaaacaatttgatgtcctactttttttttttttttttttgagacggagtctcgctctgtcgcccaggccggactgcggactgcagtggcgcaatctcggctcactgcaagctccgcttcccgggttcacgccattctcctgcctcagcctcccgagtagctgggactacaggcgcccgccaccgcgcctggctaatttttttttgtatttttttagtagagacggggtttcaccttgttagccaggatggtctcgatctcctgacctcatgatccacccgcctcggcctcccaaagtgctgggattacaggcgtgagccaccgcgcccggccgatgtcctactttttaattaaatcattagctctttcccagtttgttacatcacaaaagttttttacagtaatatatgctagagtaaacgttaaaataaatattatttttaatgattgcaaaaaaaaaaaaaaaaaa

SEQ ID NO: 351 - DNA, 5142 bp, Homo sapiens
gaattcggccgagaggacgagggggagggccagagctgcgcgtgctgctttgcccgagcccgagcccgagcccgagcccgagcccgagcccgagcccgagcccgaacgcaagcctgggagcgcggagcccggctagggactcctcctatttatggagcaggcacccaacatggctgagccccggggccccgtagaccatggagtccagattcgcttcatcacagagccagtgagtggtgcagagatgggcactctacgtcgaggtggacgacgcccagctaaggatgcaagagccagtacctacggggttgctgtgcgtgtgcagggaatcgctgggcagccctttgtggtgctcaacagtggggagaaaggcggtgactcctttggggtccaaatcaagggggccaatgaccaaggggcctcaggagctctgagctcagatttggaactccctgagaacccctactctcaggtcaagggatttcctgccccctcgcagagcagcacatctgatgaggagcctggggcctactggaatggaaagctactccgttcccactcccaggcctcactggcaggccctggcccagtggatcctagtaacagaagcaacagcatgctggagctagccccgaaagtggcttccccaggtagcaccattgacactgctcccctgtcttcagtggactcactcatcaacaagtttgacagtcaacttggaggccaggcccggggtcggactggccgccgaacacggatgctaccccctgaacagcgcaaacggagcaagagcctggacagccgcctcccacgggacacctttgaggaacgggagcgccagtccaccaaccactggacctctagcacaaaatatgacaaccatgtgggcacttcgaagcagccagcccagagccagaacctgagtcctctcagtggctttagccgttctcgtcagactcaggactgggtccttcagagttttgaggagccgcggaggagtgcacaggaccccaccatgctgcagttcaaatcaactccagacctccttcgagaccagcaggaggcagccccaccaggcagtgtggaccatatgaaggccaccatctatggcatcctgagggagggaagctcagaaagtgaaacctctgtgaggaggaaggttagtttggtgctggagaagatgcagcctctagtgatggtttcttctggttctactaaggccgtggcagggcagggtgagcttacccgaaaagtggaggagctacagcgaaagctggatgaagaggtgaagaagcggcagaagctagagccatcccaagttgggctggagcggcagctggaggagaaaacagaagagtgcagccgactgcaggagctgctggagaggaggaagggggaggcccagcagagcaacaaggagctccagaacatgaagcgcctcttggaccagggtgaagatttacgacatgggctggagacccaggtgatggagctgcagaacaagctgaaacatgtccagggtcctgagcctgctaaggaggtgttactgaaggacctgttagagacccgggaacttctggaagaggtcttggaggggaaacagcgagtagaggagcagctgaggctgcgggagcgggagttgacagccctgaagggggccctgaaagaggaggtagcctcccgtgaccaggaggtggaacatgtccggcagcagtaccagcgagacacagagcagctccgcaggagcatgcaagatgcaacccaggaccatgcagtgctggaggccgagaggcagaagatgtcagcccttgtgcgagggctgcagagggagctggaggagacttcagaggagacagggcattggcagagtatgttccagaagaacaaggaggatcttagagccaccaagcaggaactcctgcagctgcgaatggagaaggaggagatggaagaggagcttggagagaagatagaggtcttgcagagggaattagagcaggcccgagctagtgctggagatactcgccaggttgaggtgctcaagaaggagctgctccggacacaggaggagcttaaggaactgcaggcagaacggcagagccaggaggtggctgggcgacaccgggaccgggagttggagaagcagctggcggtcctgagggtcgaggctgatcgaggtcgggagctggaagaacagaacctccagctacaaaagaccctccagcaactgcgacaggactgtgaagaggcttccaaggctaagatggtggccgaggcagaggcaacagtgctggggcagcggcgggccgcagtggagacgacgcttcgggagacccaggaggaaaatgacgaattccgccggcgcatcctgggtttggagcagcagctgaaggagactcgaggtctggtggatggtggggaagcggtggaggcacgactacgggacaagctgcagcggctggaggcagagaaacagcagctggaggaggccctgaatgcgtcccaggaagaggaggggagtctggcagcagccaagcgggcactggaggcacgcctagaggaggctcagcgggggctggcccgcctggggcaggagcagcagacactgaaccgggccctggaggaggaagggaagcagcgggaggtgctccggcgaggcaaggctgagctggaggagcagaagcgtttgctggacaggactgtggaccgactgaacaaggagttggagaagatcggggaggactctaagcaagccctgcagcagctccaggcccagctggaggattataaggaaaaggcccggcgggaggtggcagatgcccagcgccaggccaaggattgggccagtgaggctgagaagacctctggaggactgagccgacttcaggatgagatccagaggctgcggcaggccctgcaggcatcccaggctgagcgggacacagcccggctggacaaagagctactggcccagcgactgcaggggctggagcaagaggcagagaacaagaagcgttcccaggacgacagggcccggcagctgaagggtctcgaggaaaaagtctcacggctggaaacagagttagatgaggagaagaacaccgtggagctgctaacagatcgggtgaatcgtggccgggaccaggtggatcagctgaggacagagctcatgcaggaaaggtctgctcggcaggacctggagtgtgacaaaatctccttggagagacagaacaaggacctgaagacccggttggccagctcagaaggcttccagaagcctagtgccagcctctctcagcttgagtcccagaatcagttgttgcaggagcggctacaggctgaagagagggagaagacagttctgcagtctaccaatcgaaaactggagcggaaagttaaagaactatccatccagattgaagacgagcggcagcatgtcaatgaccagaaagaccagctaagcctgagggtgaaggctttgaagcgtcaggtggatgaagcagaagaggaaattgagcgactggacggcctgaggaagaaggcccagcgtgaggtggaggagcagcatgaggtcaatgaacagctccaggcccggatcaagtctctggagaaggactcctggcgcaaagcttcccgctcagctgctgagtcagctctcaaaaacgaagggctgagctcagatgaggaattcgacagtgtctacgatccctcgtccattgcatcactgcttacggagagcaacctacagaccagctcctgttagctcgtggtcctcaaggactcagaaaccaggctcgaggcctatcccagcaagtgctgctctgctctgcccaccctgggttctgcattcctatgggtgacccaattattcagacctaagacagggaggggtcagagtgatggtgataaaaaaaaaaaaatcatcagcaataagctgatagatggactttccactgtaggagtggacgtttcaagccaactgagccttttcctcaagtgccgacacctccctcatctctcttatagtggaaggatggtcagcattaggctgatggggactgagaaggataggaagggatagaaattgccatgtgtataaagctttattctttagcccttaaccctaaggctcagggaaataccctatgttattgtgctccctggattcctgcaactcattttccttccactctggagcagggtgaggggaatgttatgggtaacagacatgcaggcatggctctacccatttctttgcacaagtatggggcccatgtggtagtccccatacccctccagttcctatatttttgtcttcttcctttcccctctttgccattcctaccttgcatttttcctgtcagtgccttagccaaggcaaggagataaggatgctcttcttgctttttatatctgcacattcatacctctccaaagaccagcttttccccagccagggccctcagccttccctgctgccccagtgattgattgagagagctgttggggtttctctgccaatgacccctgggagagggactttggtagggtcatgataaagtggcgggggtcttggtcctgctcagggttttcatccttcctcctctccctcctctgtgactgtggatatggttataaggtggttgcacctgggagccctgacaactggctgcacaaattccaaaagtaaaggtgtcagtccctgtggccttccttggggcttctctgaccacatgtgcccaacttcaataagagaaccaagggaccttcattttctgaggtgcttggctctgattcagggctttgcaaggggttagaagctgactgtaaaaatgggaagaggcaacggaagacatttatttctcctttggattttggggagaaccaagccctggtagggaagaggtaagggggatgattcacctccatatttcctaagcaggttgtatagggagccggtggcaggaggaaggctgttttcacaaatgacttgtaatgtcgtgattaaaaaaattcctatattcttctgcaaatcaaacgttctttcccaatccaatccagccttggttttattttaaattaaatattaaaattacacatttatattgaaaaaaaaaaaaaaaaaaaaaaaaaaaaaaaaaa

SEQ ID NO: 352 - DNA, 7235 bp, Homo sapiens
actccggccgggctctgctggctgcggcgggagctggacgcgggaggaggcggcggcggcgctggaacagtgaaccatggagctgtatttcggtgaatatcaacatgtgcagcaggaatatggggtccatctgagactcgcaagtgatgatacccaaaaatcaaggagttcccagaactccaaggcaggctcctacggtgtcagtattcgggtccagggaattgatggtcacccctatattgtcctgaataacacagaacggtgcctagcaggcacatcgttttctgaaaatgggccaccctttccacctccagtgataaataacctgcctctacattccagcaatggttctgtgccaaaggagaacagtgaagaacttcagcttccagaaaacccatacgcccagcctagcccaataagaaacctgaaacagcccctgctccatgagggcaagaatggagttctagatcgcaaagacgggtctgtgaagccatctcacctgctgaactttcagaggcatccagagcttttgcaaccctatgaccctgaaaagaatgagttgaatttacaaaatcaccagccttctgagagtaattggctaaaaacgttgacagaagaaggcatcaacaataagaagccttggacttgctttcccaaacctagcaattcccagcctaccagtccctccttggaagacccggccaaatctggtgtgacagctattcgtttatgcagctccgtggtcatagaggaccccaaaaagcagacctcagtgtgtgtaaacgttcagagctgcaccaaggagagggtgggagaggaggcccttttcactagcgggaggcccctgactgcccacagcccacatgcccaccctgaaaccaagaaaaccaggccagatgttcttcccttccggcgacaggattcagcgggacccgtcctggatggagctcggtcccggaggtcctcctcgtcatccacaactcccacgtcagccaactctttgtacaggtttttactggatgatcaggaatgtgccatccatgccgacaacgtcaatcgtcatgaaaacagaaggtatattcccttcctgccaggaactggacgggatattgatacaggatcaattcctggtgtggatcagttaattgaaaaatttgatcaaaaacctgggcttcagagaagaggaaggtctgggaagcgaaacagaattaatacagatgacaggaaaagatccagaagcgtggatagcgcctttccttttggcctccaagggaactcggagtacctgattgaattcagtaggaacttgggcaagtcaagcgaacacctcctccggccttcccaggtgtgcccgcagcggccactgtctcaggagcgccgtgggaaacagagcgtgggccgcacctttgcaaagctgcagggagcagcgcacggggcttcatgtgcccactccaggcctccccagccgaacatagatgggaaagttctggaaaccgaaggtagtcaggaaagtacagtgatccgtgcgccctcccttggtgcacagagtaaaaaggaggaggaggtgaaaacagccaccgctacgctgatgttacagaaccgggcaacagcaacttcgcctgattctggtgccaagaaaatttccgtgaagacatttccttcggcctcaaatactcaggccacaccggatctcttaaagggccagcaagagctcactcagcaaaccaatgaggagacagctaagcagattctctacaattacctcaaagaaggaagcactgataatgacgatgctactaaaaggaaagtcaacttggtctttgagaaaatccagaccttaaagtctcgagcagctgggagcgcccaaggaaataaccaagcttgtaattccacatctgaagtcaaagatctattggaacagaaaagcaagttgaccatagaagtggctgaacttcagagacagcttcaactggaagtcaagaatcaacagaacattaaagaagagagagagaggatgagagcaaacctagaagagctccgaagccaacacaacgaaaaggtggaggagaactccacattgcagcaacgactggaagaaagtgaaggggagctccggaagaatctggaggagctattccaggtgaagatggaacgggagcagcatcagactgagatcagggatctccaggaccagctctcagaaatgcacgatgaactggacagtgcaaagcgatcggaggacagggagaagggagctctgattgaggagctcttacaggcaaaacaggatcttcaagatctgctgattgccaaagaggagcaagaagacctcttgagaaagcgagagcgtgaactcaccgccctgaagggagccctgaaagaagaggtttccagccatgatcaggagatggacaagctgaaggagcaatatgatgctgagttgcaggccctgagggagagtgtggaagaagcaaccaagaatgtcgaggtcttggcgagcaggagcaacacttcagagcaagaccaggcggggactgaaatgcgcgtgaagcttctgcaggaggagaatgagaagctgcagggaagaagcgaagagctggagcggagagttgctcagcttcaaaggcagatcgaggacctgaaaggcgatgaagccaaggcgaaggaaacgctgaagaagtacgagggagaaatacgacagttagaggaggcccttgtgcacgccagaaaggaagaaaaagaagctgtgtcagccagaagggccctggagaatgaactggaggctgctcagggaaatctgagtcagactacccaggagcagaagcagttgtctgagaagctcaaagaggagagtgagcagaaggagcagctaagaaggttgaagaacgagatggagaatgagcggtggcacctgggcaaaaccattgagaaactgcagaaggagatggcagacattgttgaggcctcccgtacctcaaccctggagctccagaaccagctggatgagtataaggagaaaaaccgcagggagctcgcagaaatgcaaagacagttgaaggagaaaacgctggaggcagaaaagtcccgactgacagccatgaaaatgcaggatgagatgcgtctgatggaggaagagttacgggactaccagagagctcaggatgaagcactcacaaaaaggcagcttctggagcagacgctgaaggacctggagtatgagctggaagccaagagtcacctcaaagatgaccgcagcaggctggtcaagcagatggaggacaaggtgtctcaactggagatggaactggaagaagagagaaacaactcagatttgctgtctgagaggatcagtaggagcagggaacagatggagcagttgaggaatgagctacttcaggagagagctgcgagacaagacttggagtgcgacaagatttccctggagaggcagaacaaggacttaaagagccggattatccacctggaaggttcctacaggtccagcaaagaggggctggttgtgcagatggaggccaggatcgcggagctggaggaccgcctggagagtgaggagagggatcgggccaatcttcagctcagcaaccggcggctggagcggaaagtgaaggagctggtgatgcaggtggatgatgagcacctgtcattgactgatcagaaggaccagctgagcttgcgtttgaaagccatgaagcggcaggtggaggaggctgaggaggaaatcgacagactggaaagttctaaaaagaagctgcagagggagctggaggagcagatggacatgaatgagcatctgcaggggcagctcaactccatgaagaaggacttaagactgaagaagctgccgagtaaagtgctggatgacatggatgacgacgatgacctcagcacggatgggggaagcctctatgaggcgcctgtgagctacacattctccaaggacagcaccgtcgccagccagatctgagtgctctcccgggctgtggaagtacctgtcattcctgcaggagctgcagccacccaaagtgggaggcagggaggggagcatctgtctgccactgagaccaatcacagcctctttgcacagcatgccagctcctcagtgttacattcctcgccagggtctctcagtgggtcttcgacagagagcttttgcagtttaaaatgttgggatgcctgaggaccaggagccaccacccactggggtgttgtgagagatacactttggtaggctgaggcccctgttccacagccactatttgcattgctgtccctgccccctcatcactccccctgccaagacaaagggtccagaaggctaggacttacttaatagcactgtgcagggaggaaaccatgtatagcttgtacatattttaaaccagaccttctcacgaactgctgctgttgggtttggaatgtgatggaggcttggtagggtggctggtttgtaaagttcatgcatctatattgagtattctttttttttttttttgagatggagtttcattcttgttgccgaggctggagtgcaatggcgcaaccttggctcactgcaacctctgcctccctggttcaagtgattctcctgcctcatcctcccaagaagctgagattacagatgaccaccaccactcctggctaattttttgtatttagtagagacggggtttcaccatgttggtcaggctggtcttgaactcctgacctcaggtgatccacctgcctcagcctcccaaagtgctgagattacaggcatgagccaccacgcccagccattgagtattcttttttaaaatatgaagctattagattttaagtgttgaggagcagaggtgagaagagagagagagagagaaagtcaaataaagtcaaagaccagtttggaaaccaaagttggaaaagaagaattgtagtggtcatggacagctaagactgagcatagcagttcacatggtctgggtaaacaagtcactggcacaggggaaagccagaaggttgcttgtgtctgtgactgcagctatggccttgtttgcttagtttatctggaattctgttataatttctgaactgttctgagacctgttcccagtcactgattgcaatttcttttacacaggttgggtagggagagttgtaggtaaggccttaaacaaatgaggccgtttctggaaggatagggctgtgtggtcatgtcccacagcaagcttttgggatcgggggaataagagggtatgggggaaaggttcatagacttaggtgtgagaatgaggtgggaggtgtctggtaaggtcatgggggaagggagatgagagaggagataggcagatgtgggtatggggcccagtgtgagaaggaagacagagaagttcttgaaagctgggggatgtgtgggcaagaggtggattgagcaggatctcagggttatgtcgaggaagggaagaaagaaacagaagtcaggcagaggcgtgtctgtgcaaactggaggactccttccaacttcctggaacaaagcgacatcgccagcagcaggctggcagggagtggttgaggtctgggggccaggccacatggctggagaggaatttcagggagcatagcatcgggaggatgctacatatccagggactccctcctggccttcctgtgtcacttcacaatgtgacagtccccaggcatgcccacaggccaggcccagtcacagctgggcttccacaggtcagaatatgggacaggacatggtcagggagaggaccctgtgagttggtgacatatatgtggcagagatggtagtgttcagctgcttcagcagtgtccccaaccatcccaatagggtgggggcctgtgggccagaggactccatgacagtagccatggagtcccacctgtgccaggtcagagcccacccggcaggtttcagagtggtcagcccagtttaagggtgggagtctggagccagacagccaagccccttccacatctacagggtcactgtcatcctcaccacagccaggggtgattctcacctctgcctgcttatgtggggtgtggccgattcctccctttagtcattcattcatttagcacatatttattgggcatcggtgatgtgtcaggcacagtccttggcacacagaatacagcagtgaattaaacaggcaaaaattcctcccctcctggagctcagtgtcaggaaagggggtgataaatgacaatcaaatcgacatggaggttgagcacctctgtactcagccctctgtctgtccttctgaggacgcaacaagcctggttccctagagctcactttgaccctcaatatgttcataatttccctgctgcttctcccatcgttagacatctgccagtaagcctgctgagagaagcctcagcccactcatacctagagacgctgctggggaaggtcagcacacccaagaactttgggagtgtgtgtctgttttggtttgtgagaaagtagctgcccctcattctggccagttctttccagtagccatggggctggctacaagaagcaaaactgcccatgcaaagagaacacaggtcacttttcaaaacacttgcatcattaccctaaaaataggctgttatgcgttttgacaattgcgctatcctacactctgagggagttggcaacgcatgcggtatagtggagtgggaagagttgagactgaaagttaagagaagggttttcaagtcccggctcatctcaccccagtgactttgacagtgtgctcactctcagagccatggattacctggaacaaagtgcagattagtgcccacggtcctttccaggtataacatgctatcgttctttaattttattatatatacatacttttcttctgttttttgctttaagaactaaccccgatcaagagtattttctttagctagcttaaaaagaaaacatatattttatgtaaaaacacatacatggccaaatgcaatactgaagagacaatcatcctgtatcttttatggtttttcctgcttctgagtgtcgttctacaatgcccgttgacttattccattgcgtctctgctttagggtatggtttggtcgctttggttgtcatgagaaagagacattctccttgcagctacctccatgtgagtgaattcctggataaagcaagatttcctttcaataaacgctgtcacccaatgggaattttgaaaaaaaaaaaaaaaaaa

SEQ ID NO: 353 - DNA, 3344 bp, Homo sapiens
gcggcagcagcggcgcgggcgggagggcgaagagcagcggccgcctgaggggagcccgcgcctccgccgcctgagaggaggtcgagctgccgccggggcgatgctggaggagctggagtgcggggcgcccggcgccaggggagccgccacagccatggattgcaaagatagaccagcttttccagttaagaagttaatacaagcccgtctgccgtttaagcgcctgaatcttgtcccaaaggggaaagccgatgacatgtcagacgatcagggtacttctgtgcaaagtaaaagccccgatttagaggcctctttggacaccttggaaaacaactgtcatgtgggttctgacatagactttagaccgaaacttgtcaacgggaagggtcccttagataactttttaagaaatagaatcgaaaccagtattggccagagcacagtcatcattgatttgacagaggactcgaatgagcagccagacagtcttgtggaccacaataaactaaattctgaagcctctccctccagggaggcaataaatggccagcgagaagacactggggatcagcaggggttgttgaaggccattcagaacgacaagttggcatttcctggagagaccctttcagacattccttgcaaaacagaggaggagggtgttggctgtggaggtgcagggaggagaggcgactcccaggaatgttcgccacggagctgcccggagctgacgagtggcccgagaatgtgccccagaaaggagcaggacagttggagtgaagctgggggcatcctgttcaaagggaaggtgcctatggtggtcttgcaggacatcttggctgtgagaccaccgcaaatcaagtcccttccagccacaccccaaggcaagaacatgacccctgagagtgaggtgctggaatctttccccgaagaagactctgtactcagccattcgtccctgagctctccctcttccaccagctcgcccgaggggccgcctgctcccccaaagcagcacagcagtaccagtcccttccccacctccacgcccctccgcagaataactaagaaattcgtcaaaggctctacagagaagaacaagctcagactgcaaagagatcaggagcgtctgggcaagcagctcaagttacgtgcagaaagggaagaaaaggagaagctgaaagaggaggccaagcgggccaaggaggaggccaagaagaagaaggaggaagagaaggagcttaaggaaaaggagaggcgggagaagcgggagaaggatgagaaggagaaggcggagaagcagcggctcaaggaggagcggcgcaaggagagacaggaagccctggaggctaaacttgaggaaaaaaggaaaaaggaagaagagaaacggttaagagaagaagagaagcgcattaaagcagagaaggccgaaatcacgaggttcttccagaaaccaaagactccacaggcccccaagaccctggccggctcctgtgggaagtttgccccctttgaaattaaagagcacatggtcctggcccctcggcgtcggaccgctttccatccagacctctgcagtcagctggaccagctcctccagcagcagagcggcgagttctccttcttgaaagacctcaaaggccggcagcccctgaggtccggacccacgcacgtttccacccggaatgcagatatttttaacagtgatgtcgtcatcgtggagcgtgggaagggcgacggtgttcccgagaggaggaagtttggcaggatgaagctcctgcagttctgtgagaaccaccggcctgcctactggggtacctggaataagaagacggcactcatccgcgcgcgagacccctgggcccaggacacgaagctcctggactatgaggtggacagtgatgaggagtgggaagaagaggagcctggggagtccctgtcccacagtgagggggatgatgatgacgacatgggagaggatgaagatgaggacgatggtttctttgtgccccatgggtacctgtctgaggacgaaggtgtgacagaggagtgtgccgaccctgagaaccataaggtccgccagaaactgaaggccaaggagtgggacgagttcctggctaaggggaagcgctttcgcgtcctgcaacctgtgaagatcggctgcgtgtgggcggctgacagagactgcgcaggcgatgacctgaaggtactgcagcagttcgcagcctgcttcctggagaccctgccggcccaggaggagcagacgcccaaggcctccaagcgggagaggagagacgagcagatcctggcccagctgctgccgctcctgcacggcaatgtgaacgggagcaaggtcatcatccgggagttccaggagcactgccgccggggactgctcagcaaccacaccggcagcccgcggagcccctccaccacctacctgcacacccccacccccagcgaggatgccgccatcccctctaagtcccggctcaagcggctcatttccgagaactcagtgtatgagaagcggcctgacttcaggatgtgctggtacgtgcacccgcaggtgctacagagcttccagcaggagcacctgcccgtgccgtgccagtggagctatgtgacatcggtgccctcggcccccaaagaggacagtggcagcgtcccctccacggggcccagccagggcactcccatctcgctgaagaggaagtcagcgggcagcatgtgcatcacccaattcatgaagaagcgcaggcacgacggccagattggtgctgaagacatggacggcttccaggcagacacggaggaggaggaagaggaggagggcgactgtatgatcgtggatgtcccggatgctgcggaggtccaagccccgtgtggagccgcttccggagctgggggtggtgtgggggtggacaccggcaaggccaccctgaccgcgagcccactgggtgcatcctgagagcaggggtgacgtatgtagaatgcttagggtgtcctccccacagagcagatacttgaaccgactcaattcctgtgtaaagagcactttgtcctgcttcacggacctccccaaagtgtgcagagttctatataggatgctggattagttcctttgatatttgtaaaaattcccccaagagccgcatatgaatctgccctttaataaagcattattgagattgctggcctattggggaagcctgcgggcacaggagcaggcgtggaatccaatacttgtaaatgaattgaagcgtcaggaccacccgcctggccacgtgcgcgggcccctggacctaacgaggcagtgtataaacttattctctagccctgaa

SEQ ID NO: 354 - DNA, 2124 bp, Homo sapiens
tcaacgccgctctggggacgcgtcaggcccagcgcacagcctgggcagctcagcctgtcagctgagcacgggcgcctcaaggggtgcggccctctcagaaggaaggtccacacctctgcatccctgcaccaggactcaccaagacgcccatcctggaaaaggtcccccgtaagatggcagcaaaaactcccagcagtgaggagtctgggctgcccaaactgcccgtgcccccgctgcagcagaccctggccacgtacctgcagtgcatgcgacacttggtgtctgaggagcagttcaggaagagccaggccattgtgcagcagtttggggcccctggtggcctcggcgagaccctgcagcagaaactcctggagcggcaggagaagacagccaactgggtgtctgagtactggctgaatgacatgtatctcaacaaccgcctggccctgcctgtcaactccagccctgccgtgatctttgctcggcagcacttccctggcaccgatgaccagctgaggtttgcagccagcctcatctctggtgtactcagctacaaggccctgctggacagccactccattcccactgactgtgccaaaggccagctgtcagggcagcccctttgcatgaagcaatactatgggctcttctcctcctaccggctccccggccatacccaggacacgctggtggctcagaacagcagcatcatgccggagcctgagcacgtcatcgtagcctgctgcaatcagttctttgtcttggatgttgtcattaatttccgccgtctcagtgagggggatctgttcactcagttgagaaagatagtcaaaatggcttccaacgaggacgagcgtttgcctccaattggcctgctgacgtctgacgggaggagcgagtgggccgaggccaggacggtcctcgtgaaagactccaccaaccgggactcgctggacatgattgagcgctgcatctgccttgtatgcctggacgcgccaggaggcgtggagctcagcgacacccacagggcactccagctccttcacggcggaggctacagcaagaacggggccaatcgctggtacgacaagtccctgcagtttgtggtgggccgagacggcacctgcggtgtggtgtgcgaacactccccattcgatggcatcgtcctggtgcagtgcactgagcatctgctcaagcacgtgacgcagagcagcaggaagctgatccgagcagactccgtcagcgagctccccgccccccggaggctgcggtggaaatgctccccggaaattcaaggccacttagcctcctcggcagaaaaacttcaacgaatagtaaagaaccttgacttcattgtctataagtttgacaactatgggaaaacattcattaagaagcagaaatgcagccctgatgccttcatccaggtggccctccagctggccttctacaggctccatcgaagactggtgcccacctacgagagcgcgtccatccgccgattccaggagggacgcgtggacaacatcagatcggccactccagaggcactggcttttgtgagagccgtgactgaccacaaggctgctgtgccagcttctgagaagcttctgctcctgaaggatgccatccgtgcccagactgcatacacagtcatggccataacagggatggccattgacaaccacctgctggcactgcgggagctggcccgggccatgtgcaaggagctgcccgagatgttcatggatgaaacctacctgatgagcaaccggtttgtcctctccactagccaggtgcccacaaccacggagatgttctgctgctatggtcctgtggtcccaaatgggtatggtgcctgctacaacccccagccagagaccatccttttctgcatctctagctttcacagctgcaaagagacttcttctagcaagtttgcaaaagctgtggaagaaagcctcattgacatgagagacctctgcagtctgctgccgcctactgagagcaagccattggcaacaaaggaaaaagccacgaggcccagccagggacaccaaccttgactcctgccactaggtttcacctcccaaacccagcctctagaacagccagaccctgcag

SEQ ID NO: 355 - DNA, 2286 bp, Homo sapiens
cccgccccgttgaggctttgagaaaggagtaggagccgagcattccggcagaggaagaaaaacggcccatcttttagagtccgacctctggaaattcgggtggccgcggggacccgggcgacgtcggaggccctgccgggaacccaggctgcagcccccacccccgcgctgcgacacgccccccaccccttccggctcacacccccgcccacactcctgagtggtgcggtgcagcgtcggccgaggcagcagagccgaggagagcaggtccacacctctgcatccctgcaccaggactcaccaagacgcccatcctggaaaaggtcccccgtaagatggcagcaaaaactcccagcagtgaggagtctgggctgcccaaactgcccgtgcccccgctgcagcagaccctggccacgtacctgcagtgcatgcgacacttggtgtctgaggagcagttcaggaagagccaggccattgtgcagcagtttggggcccctggtggcctcggcgagaccctgcagcagaaactcctggagcggcaggagaagacagccaactgggtgtctgagtactggctgaatgacatgtatctcaacaaccgcctggccctgcctgtcaactccagccctgccgtgatctttgctcggcagcacttccctggcaccgatgaccagctgaggtttgcagccagcctcatctctggtgtactcagctacaaggccctgctggacagccactccattcccactgactgtgccaaaggccagctgtcagggcagcccctttgcatgaagcaatactatgggctcttctcctcctaccggctccccggccatacccaggacacgctggtggctcagaacagcagcatcatgccggagcctgagcacgtcatcgtagcctgctgcaatcagttctttgtcttggatgttgtcattaatttccgccgtctcagtgagggggatctgttcactcagttgagaaagatagtcaaaatggcttccaacgaggacgagcgtttgcctccaattggcctgctgacgtctgacgggaggagcgagtgggccgaggccaggacggtcctcgtgaaagactccaccaaccgggactcgctggacatgattgagcgctgcatctgccttgtatgcctggacgcgccaggaggcgtggagctcagcgacacccacagggcactccagctccttcacggcggaggctacagcaagaacggggccaatcgctggtacgacaagtccctgcagtttgtggtgggccgagacggcacctgcggtgtggtgtgcgaacactccccattcgatggcatcgtcctggtgcagtgcactgagcatctgctcaagcacgtgacgcagagcagcaggaagctgatccgagcagactccgtcagcgagctccccgccccccggaggctgcggtggaaatgctccccggaaattcaaggccacttagcctcctcggcagaaaaacttcaacgaatagtaaagaaccttgacttcattgtctataagtttgacaactatgggaaaacattcattaagaagcagaaatgcagccctgatgccttcatccaggtggccctccagctggccttctacaggctccatcgaagactggtgcccacctacgagagcgcgtccatccgccgattccaggagggacgcgtggacaacatcagatcggccactccagaggcactggcttttgtgagagccgtgactgaccacaaggctgctgtgccagcttctgagaagcttctgctcctgaaggatgccatccgtgcccagactgcatacacagtcatggccataacagggatggccattgacaaccacctgctggcactgcgggagctggcccgggccatgtgcaaggagctgcccgagatgttcatggatgaaacctacctgatgagcaaccggtttgtcctctccactagccaggtgcccacaaccacggagatgttctgctgctatggtcctgtggtcccaaatgggtatggtgcctgctacaacccccagccagagaccatccttttctgcatctctagctttcacagctgcaaagagacttcttctagcaagtttgcaaaagctgtggaagaaagcctcattgacatgagagacctctgcagtctgctgccgcctactgagagcaagccattggcaacaaaggaaaaagccacgaggcccagccagggacaccaaccttgactcctgccactaggtttcacctcccaaacccagcctctagaacagccagaccctgcag

SEQ ID NO: 356 - DNA, 2485 bp, Homo sapiens
tggggttggggaagtgcggtgactgggaaatgctgagctaggggcaggaggcatgggcgggacagtgttctgtgcccccttctagagcctaaatttgttgcccgagttcctccgggaagcgctccgggtagattctgggggccgggagctgagatccctgggcggggagctggggaagggatggggctgaggacagcgaagaagagggggcttgggggaggggggaaatggaagagagaggagggaggaggtacaagaggaaggagagaagtgcggccagcttgctttctccagtcgggtggccgcggggacccgggcgacgtcggaggccctgccgggaacccaggctgcagcccccacccccgcgctgcgacacgccccccaccccttccggctcacacccccgcccacactcctgagtggtgcggtgcagcgtcggccgaggcagcagagccgaggagagcaggtccacacctctgcatccctgcaccaggactcaccaagacgcccatcctggaaaaggtcccccgtaagatggcagcaaaaactcccagcagtgaggagtctgggctgcccaaactgcccgtgcccccgctgcagcagaccctggccacgtacctgcagtgcatgcgacacttggtgtctgaggagcagttcaggaagagccaggccattgtgcagcagtttggggcccctggtggcctcggcgagaccctgcagcagaaactcctggagcggcaggagaagacagccaactgggtgtctgagtactggctgaatgacatgtatctcaacaaccgcctggccctgcctgtcaactccagccctgccgtgatctttgctcggcagcacttccctggcaccgatgaccagctgaggtttgcagccagcctcatctctggtgtactcagctacaaggccctgctggacagccactccattcccactgactgtgccaaaggccagctgtcagggcagcccctttgcatgaagcaatactatgggctcttctcctcctaccggctccccggccatacccaggacacgctggtggctcagaacagcagcatcatgccggagcctgagcacgtcatcgtagcctgctgcaatcagttctttgtcttggatgttgtcattaatttccgccgtctcagtgagggggatctgttcactcagttgagaaagatagtcaaaatggcttccaacgaggacgagcgtttgcctccaattggcctgctgacgtctgacgggaggagcgagtgggccgaggccaggacggtcctcgtgaaagactccaccaaccgggactcgctggacatgattgagcgctgcatctgccttgtatgcctggacgcgccaggaggcgtggagctcagcgacacccacagggcactccagctccttcacggcggaggctacagcaagaacggggccaatcgctggtacgacaagtccctgcagtttgtggtgggccgagacggcacctgcggtgtggtgtgcgaacactccccattcgatggcatcgtcctggtgcagtgcactgagcatctgctcaagcacgtgacgcagagcagcaggaagctgatccgagcagactccgtcagcgagctccccgccccccggaggctgcggtggaaatgctccccggaaattcaaggccacttagcctcctcggcagaaaaacttcaacgaatagtaaagaaccttgacttcattgtctataagtttgacaactatgggaaaacattcattaagaagcagaaatgcagccctgatgccttcatccaggtggccctccagctggccttctacaggctccatcgaagactggtgcccacctacgagagcgcgtccatccgccgattccaggagggacgcgtggacaacatcagatcggccactccagaggcactggcttttgtgagagccgtgactgaccacaaggctgctgtgccagcttctgagaagcttctgctcctgaaggatgccatccgtgcccagactgcatacacagtcatggccataacagggatggccattgacaaccacctgctggcactgcgggagctggcccgggccatgtgcaaggagctgcccgagatgttcatggatgaaacctacctgatgagcaaccggtttgtcctctccactagccaggtgcccacaaccacggagatgttctgctgctatggtcctgtggtcccaaatgggtatggtgcctgctacaacccccagccagagaccatccttttctgcatctctagctttcacagctgcaaagagacttcttctagcaagtttgcaaaagctgtggaagaaagcctcattgacatgagagacctctgcagtctgctgccgcctactgagagcaagccattggcaacaaaggaaaaagccacgaggcccagccagggacaccaaccttgactcctgccactaggtttcacctcccaaacccagcctctagaacagccagaccctgcag

SEQ ID NO: 357 - DNA, 698 bp, Homo sapiens
gccatgacgagccggtccggaagaagaggtagggcgccgccgtgacagattagtcctaaagggaacggggttgttagttcaattggctaccggaaaaaaccaggctgggctgggcgccgccatgacaaccgataccggaaaaggcgggtcgttccccccggacagccctacgccggcaaaggtctcgagatgcaggcggccctagaggtcaccgctcgctactgtggccgggagctggagcagtatggccagtgtgtggcggccaagccggaatcctggcagcgggactgtcactaccttaagatgagcattgcccagtgcacatcctcccacccaatcatccgccagatccgccaggcctgtgctcagccttttgaggccttcgaggagtgtcttcgacagaacgaggcagctgtgggcaactgtgcagagcatatgcgccgcttcctgcagtgcgctgagcaggtgcagccgccacgctcacctgcaactgtggaggcacagccacttcctgcctcctgaggactcctctgacggcaggaaaactggacatgaatgactgcccccccgcccctcccctgcagagtggccagatggagtcctgagccctggacatgggcccggctttcctggatatcaggacttccaataaataaagactctgtatactgggaaaaaaaaaaaaaaaaaaaaaaaaa

SEQ ID NO: 358 - DNA, 2160 bp, Homo sapiens
cgggccgcggccacccgctcctcccgctccggtcccgactgtcgggctctcggccgagtcgccccggacaatcacaaagagtgtgtaggccagccccggtcacagagtgcaccgtatcctgtcacttctggatgtgagggagaagtgagtcatctcattcccctccgtggatcagaggacttggactagatagaagcatgtggtgtctcctacgaggcctgggccggcctggagccctggcacggggagccctggggcagcagcaatccctgggtgcccgggccctggccagcgcaggctctgagagccgggacgagtacagctatgtggtggtgggcgcgggctcggcgggctgcgtgctggctgggaggctcacggaggaccccgccgagcgcgtgctgctgctggaggccgggcccaaggacgtgcgcgcggggagcaagcggctctcgtggaagatccacatgcccgcggccctggtggccaacctgtgcgacgacaggtacaactggtgctaccacacagaggtgcagcggggcctggacggccgcgtgctgtactggccacgcggccgcgtctggggtggctcctcatccctcaatgccatggtctacgtccgtgggcacgccgaggactacgagcgctggcagcgccagggcgcccgcggctgggactacgcgcactgcctgccctacttccgcaaggcgcagggccacgagctgggcgccagccggtaccggggcgccgatggcccgctgcgggtgtcccggggcaagaccaaccacccgctgcactgcgcattcctggaggccacgcagcaggccggctacccgctcaccgaggacatgaatggcttccagcaggagggcttcggctggatggacatgaccatccatgaaggcaaacggtggagcgcagcctgtgcctacctgcacccagcactgagccgcaccaacctcaaggccgaggccgagacgcttgtgagcagggtgctatttgagggcacccgtgcagtgggcgtggagtatgtcaagaatggccagagccacagggcttatgccagcaaggaggtgattctgagtggaggtgccatcaactctccacagctgctcatgctctctggcatcgggaatgctgatgacctcaagaaactgggcatccctgtggtgtgccacctacctggggttggccagaacctgcaagaccacctggagatctacattcagcaggcatgcacccgccctatcaccctccattcagcacagaagcccctgcggaaggtctgcattggtctggagtggctctggaaattcacaggggagggagccactgcccatctggaaacaggtgggttcatccgcagccagcctggggtcccccacccggacatccagttccatttcctgccatcccaagtgattgaccacgggcgggtccccacccagcaggaggcttaccaggtacatgtggggcccatgcggggcacgagtgtgggctggctcaaactgagaagtgccaatccccaagaccaccctgtgatccagcccaactacttgtcaacagaaactgatattgaggatttccgtctgtgtgtgaagctcaccagagaaatttttgcacaggaagccctggctccgttccgagggaaagagctccagccaggaagccacattcagtcagataaagagatagatgcctttgtgcgggcaaaagccgacagcgcctaccacccctcgtgcacctgtaagatgggccagccctccgatcccactgccgtggtggatccgcagacaagggtcctcggggtggaaaacctcagggtcgtcgatgcctccatcatgcctagcatggtcagcggcaacctgaacgcccccacaatcatgatcgcagagaaggcagctgacattatcaaggggcagcctgcactctgggacaaagatgtccctgtctacaagcccaggacgctggccacccagcgctaagacagttgctgctggaggatgaccagggaagccccctgataagccaagagggccagcacagcccttgctcccaggctcctgcctgaaactatctagcacactaggacccaggtggtaccctactcagtggctgagaattggataaagtcttgggaaatgagacaaaaaaaaaaaaaaa

SEQ ID NO: 359 - DNA, 2035 bp, Homo sapiens
acccccacctctccctcctccttccccagtcgttcgccggaaagcatttgtctcccacctcttcataacaacaattaatttcctctggggcctgaggagggcagaatttcaaccttcggtgtgcttgggagtggcgattgtgatttacacgacaaaatgccgaggtgctcggtggagtcatggcagtgccctttgtggaagactgggacttggtgcaaaccctgggagaaggtgcctatggagaagttcaacttgctgtgaatagagtaactgaagaagcagtcgcagtgaagattgtagatatgaagcgtgccgtagactgtccagaaaatattaagaaagagatctgtatcaataaaatgctaaatcatgaaaatgtagtaaaattctatggtcacaggagagaaggcaatatccaatatttatttctggagtactgtagtggaggagagctttttgacagaatagagccagacataggcatgcctgaaccagatgctcagagattcttccatcaactcatggcaggggtggtttatctgcatggtattggaataactcacagggatattaaaccagaaaatcttctgttggatgaaagggataacctcaaaatctcagactttggcttggcaacagtatttcggtataataatcgtgagcgtttgttgaacaagatgtgtggtactttaccatatgttgctccagaacttctgaagagaagagaatttcatgcagaaccagttgatgtttggtcctgtggaatagtacttactgcaatgctcgctggagaattgccatgggaccaacccagtgacagctgtcaggagtattctgactggaaagaaaaaaaaacatacctcaacccttggaaaaaaatcgattctgctcctctagctctgctgcataaaatcttagttgagaatccatcagcaagaattaccattccagacatcaaaaaagatagatggtacaacaaacccctcaagaaaggggcaaaaaggccccgagtcacttcaggtggtgtgtcagagtctcccagtggattttctaagcacattcaatccaatttggacttctctccagtaaacagtgcttctagtgaagaaaatgtgaagtactccagttctcagccagaaccccgcacaggtctttccttatgggataccagcccctcatacattgataaattggtacaagggatcagcttttcccagcccacatgtcctgatcatatgcttttgaatagtcagttacttggcaccccaggatcctcacagaacccctggcagcggttggtcaaaagaatgacacgattctttaccaaattggatgcagacaaatcttatcaatgcctgaaagagacttgtgagaagttgggctatcaatggaagaaaagttgtatgaatcaggttactatatcaacaactgataggagaaacaataaactcattttcaaagtgaatttgttagaaatggatgataaaatattggttgacttccggctttctaagggtgatggattggagttcaagagacacttcctgaagattaaagggaagctgattgatattgtgagcagccagaagatttggcttcctgccacatgatcggaccatcggctctggggaatcctggtgaatatagtgctgctatgttgacattattcttcctagagaagattatcctgtcctgcaaactgcaaatagtagttcctgaagtgttcacttccctgtttatccaaacatcttccaatttattttgtttgttcggcatacaaataatacctatatcttaattgtaagcaaaactttggggaaaggatgaatagaattcatttgattatttcttcatgtgtgtttagtatctgaatttgaaactcatctggtggaaaccaagtttcaggggacatgagttttccagcttttatacacacgtatctcatttttatcaaaacattttgtttaattcaaaaagtacatattccatgttgatttaattctaagatgaaccaataaagacataattcttgtga

SEQ ID NO: 360 - DNA, 2496 bp, Homo sapiens
gatcgggggcgcgaggcctcacggagctcgtagtttcccggacgggccgctcccggcctcgcggcctcgcctccccacactacaactcccacggggcagcgggcgcggctccccgtacccaccagctggccgggcagggcagccacttcgcggtcgggcccgccggctgcgggcacccgcgcgacgggcgggaagatggcggacgtggtcgtgggtaaagacaagggcggggagcagcggctcatctcgctgcctctatcccgcatccgggtcatcatgaagagctcccccgaggtgtccagcatcaaccaggaggcgttggtgctcacggccaaggccacggagctctttgttcaatgcctagccacctattcctacagacacggcagtggaaaggaaaagaaagtactgacttacagtgatttagcaaacactgcacagcaatcagaaacttttcagtttcttgcagatatattaccaaagaagattttagctagtaaatacctgaaaatgcttaaagaggaaaagagggaagaagatgaggagaatgacaatgataatgaaagtgaccatgatgaagctgactcctaaaccaaaagtgctttaaaaaccagcctggcgaggacagccctggacccactccactgtctctaagtaaacacagcactgcccgcttttagcgtcttcacttcttcacagagttccagtgcgtggtattctttcgaggtattctttccaggccgagattgagcacctcatgtacctacgccacagacagccagagggaaagcgacccagacagcagcccctcctcgacaggcccaccctgcagctcaggcaccaagaaaacagccgatactggcagccattgcagctccaaactgcagaggcaaggccaattttaacttttcaatttacagtcgattttgaagagcttctacatatcggttatgtaaattcatatatgtatttttggaatcagttcttataaacagctcgattcagttttagctaaatttatagtttaggtagtatgttacatttgaatttttgtcttaagaaaagttgactgttcagatatttttctactgtaaagaaatatacttttctattaaagatctgtacatatttttacagtaaaatgctttatggaactagttttagagccctctatggctttaaggccttgcttactgcctgcaaattttgagaaatttaaaaataagcattctaacacttttattcccacagaaaaattccaagtcaaattatcaaatcaaacacaaaaataagtcttacctcttgtataagcatgttgtactaaaaaaaaattttgaaacattttgtatattggagatctctctcatcttactgttctttgctttaaattcctggcacttctttttactgtctataagagaaaacctatcataagcccaatttttttttttccacttagggtaaatgtttggctcttctcatttcattatcttttttttttttttttaaagacagattctcactcagttgcccaggctggattgcggtggcgctgtctcagctcactgcaacctccgcctcccaggttcaagtgattctcctgcctcatcctcctgagtagctgggattacaggcgtgtgccaccatgcccaacctatttttgtattttttagtagagacggggttcaccatgttggccaggcttgtctcaaactcctaacctcaactgatccacctgcctcagcctcccaaagtgccgccgggattacaggcgtgagccaccatgcctggccttcattatctcttttttaaaaatgaaaaagtttataatttacattcagtaaaatcaccctttttagtgtctagtctgtgaattttgacaaatgcatggttttgtaaccaatcgataggacagttctgccacccaggacattcccctctgttcctctgttcctctcttctcctgccccctagcaaccactggtgttttctgtccctcttgttcattgacatttattttaaaataaaatattttaaaatctactttttggtgtacagttctgagttttggcaaatgcagtcaagtcactaccaccaccacaattaacagctatatcaccctccagtaaattccctgtggtcagctccttccccaccttttaccgtggcaaccgtcaagctattctctgtccctataccaggtgtcatcaaatttttttctggaaaggcccatgcagtaaatagttcaagctttgtgggcttttatagtctctgttgctgctgctgaactcagctgttgtagcacgaaagcagccaggtaattactagatgaaggaatgcaggtggctgtgtttcaatagagctttatttctgcaaactgaaacttgagttttgtgtaattttcatgtgtcatgaaatactgttttctccaaccatttaataatgtaaatacttgctagcttatgtgccattaaaaaatgacttgatttggcttac

SEQ ID NO: 361 - DNA, 2468 bp, Homo sapiens
ccacgcgtccgggcgggagctgtggcgcggagcggcccctctgctgcgtctgccctcgttttgtctcacgactcacactcagtgctccattccccaagagttcgcgttccccgcgcggcggtcgagaggcggctgcccgcggtcccgcgcgggcgcggggcgatggcggcgcgggggtcagggccccgcgcgctccgcctgctgctcttggtccagctggtcgcggggcgctgcggtctagcgggcgcggcgggcggcgcgcagagaggattatctgaaccttcttctattgcaaaacatgaagatagtttgcttaaggatttatttcaagactacgaaagatgggttcgtcctgtggaacacctgaatgacaaaataaaaataaaatttggacttgcaatatctcaattggtggatgtggatgagaaaaatcagttaatgacaacaaacgtctggttgaaacaggaatggatagatgtaaaattaagatggaaccctgatgactatggtggaataaaagttatacgtgttccttcagactctgtctggacaccagacatcgttttgtttgataatgcagatggacgttttgaagggaccagtacgaaaacagtcatcaggtacaatggcactgtcacctggactccaccggcaaactacaaaagttcctgtaccatagatgtcacgtttttcccatttgaccttcagaactgttccatgaaatttggttcttggacttatgatggatcacaggttgatataattctagaggaccaagatgtagacaagagagatttttttgataatggagaatgggagattgtgagtgcaacagggagcaaaggaaacagaaccgacagctgttgctggtatccgtatgtcacttactcatttgtaatcaagcgcctgcctctcttttataccttgttccttataataccctgtattgggctctcatttttaactgtacttgtcttctatcttccttcaaatgaaggtgaaaagatttgtctctgcacttcagtacttgtgtctttgactgtcttccttctggttattgaagagatcataccatcatcttcaaaagtcatacctctaattggagagtatctggtatttaccatgatttttgtgacactgtcaattatggtaaccgtcttcgctatcaacattcatcatcgttcttcctcaacacataatgccatggcgcctttggtccgcaagatatttcttcacacgcttcccaaactgctttgcatgagaagtcatgtagacaggtacttcactcagaaagaggaaactgagagtggtagtggaccaaaatcttctagaaacacattggaagctgcgctcgattctattcgctacattacaagacacatcatgaaggaaaatgatgtccgtgaggttgttgaagattggaaattcatagcccaggttcttgatcggatgtttctgtggacttttcttttcgtttcaattgttggatctcttgggctttttgttcctgttatttataaatgggcaaatatattaataccagttcatattggaaatgcaaataagtgaagcctcccaagggactgaagtatacatttagttaacacacatatatctgatggcacctataaaattatgaaaatgtaagttatgtgttaaatttagtgcaagctttaacagactaagttgctaacctcaatttatgttaacagatgatccatttgaacagttggctgtatgactgaagtaataactgatgagatacatttgatcttgtaaaaatagcaaaatattatctgaactggactagtgaaaaatctagtatttgtatcctggcaaataatactaatttataatccacagtaaagttcatcctttgactgtgctggagaattccagttgtatttgaagactgattttaaaacttttctgcatttggtaaaggtatgtaaactttcctgtactcactgagtaacagctaatctttaatataatattatactgctatatttaaaaagctgactacttgatataattacttaatgtgatgcttgatataataattacttaatgtggccgggcacggtggctcacacctgtaatcccagcactttgggaggtcgaggtgggcgtatcacctgaggttgggagttcgagaccagcctgaccaacgtggagaaaccccgtctctactaaaaatatgaaattagccagggtggtggtgcacacctgtaatcccagctacctgggaggctgcggcaggagaatcgcttgaacccaggtggcggaggttgcggtgagctgagatcacgccattgcactccagcctgggcaacaagagcaaaactcagtctcaaataataataataacaacaacttaatgtgctgctgcttttccataaccaacattttaaaaataaatgaaaaacaggaaaaaaaaaaaaaaaaaaaaaaaaaaaaaaaaaaaa

SEQ ID NO: 362 - DNA, 6885 bp, Homo sapiens
gacgacgtttgggagcctttgctgagtccagggagagaggcgtcccccaccgtgccgctgcagctcgggcagagccgccaagctttggggtgctgaggaacctctaatcatctcccatggatttgtgatcagcgttgcagctctcccagcagccctggacagtggcccccagcagtcagcatgtggctgccgcgcgtctccagcacagcagtgaccgcgctcctcctggcgcagaccttcctcctcctctttctggtttcccggccagggccctcgtccccagcaggcggcgaggcgcgcgtgcatgtgctggtgctgtcctcgtggcgctcgggctcgtccttcgtgggccaactcttcaaccagcaccccgacgtcttctacctaatggagcccgcgtggcacgtgtggaccaccctgtcgcagggcagcgccgcaacgctgcacatggctgtgcgcgacctggtgcgctccgtcttcctgtgcgacatggacgtgtttgatgcctatctgccttggcgccgcaacctgtccgacctcttccagtgggccgtgagccgtgcactgtgctcgccacccgcctgcagtgcctttccccgaggcgccatcagcagcgaggccgtgtgcaagccactgtgcgcgcggcagtccttcaccctggcccgggaggcctgccgctcctacagccacgtggtgctcaaggaggtgcgcttcttcaacctgcaggtgctctacccgctgctcagcgaccccgcgctcaacctacgcatcgtgcacctggtgcgcgacccgcgggccgtgctgcgctcccgggagcagacagccaaggctctggcgcgtgacaacggcatcgtgctgggcaccaacggcacgtgggtggaggccgaccccggcctgcgcgtggtgcgcgaggtgtgccgtagccacgtacgcatcgccgaggccgccacactcaagccgccaccctttctgcgcggccgctaccgcctggtgcgcttcgaggacctggcgcgggagccgctggcagaaatccgtgcgctctacgccttcactgggctcagtctcacgccacagctcgaggcctggatccataacatcacccacggatctggacctggtgcgcgccgcgaagccttcaagacttcgtccaggaatgcgctcaacgtctcccaggcctggcgccatgcgctgccctttgccaagatccgccgcgtgcaggaactgtgcgctggtgcgctgcagctgctgggctaccggcctgtgtactctgaggacgagcagcgcaacctcgcccttgatctggtgctgccacgaggcctgaacggcttcacttgggcatcatccaccgcctcgcacccccgaaattagtggaggccacagttgtagcaggcgctaggcccgggaggagagtgcatggtgcagagggggctggggcgcacggagaagcaggtccctatattgaccaaggagtttgtggtacgacccctccccctccccaagtaggcaaggactgcacgtttctttctctcttgattcttggttttcctttgagtcctctggagctgccttctcatcaggtgcactcttcatggaaagcaactcttgcccctcctcctctgggcacagggtgtgcgttcagatgacttggctcctactcaagggctttcttcccctttaactctctccttctggtgacacatcctgcagcagctgagggggtgccctggcactggctgggagtggagaggcactgtggtgaaatggctccagaggtctgtacatcacatacatatgcacacaggcacacatggcaaaactcggaagtgaaaggacttgtctgaaatcacatggtgagaaggaggatgaagggaggagagagcttttgctctgggtctccagtggataggagaggacctgcctcctgggtgagaagggtcagattttcctattttaattgctttagggaagagcaagcagagtcatgaccagggacacagctgagagatagaggaggctgtgaatgctgagaccagagtttatcatgctggacaagcctggaaggaggcaataagtgggaaaggtaggaggagagaaggctggggagggctgggcagcaagccaggcacagtgagtggcagagcaagagggggaaagcaggatcagtgcctggaaggcaggtgtgcccgtcagcggggagtggaactcatcaggcttgccaagaggttggaagggaaatggctctgggctggaactgtcttcccttggtccttctggtccaggccttggaggaaagcagaggatgatccctgcctgtgagccacacctcctagctctgggggcaaaggggcttagtaaaggaatgctggatgtgtagagggtttagtcccgagctcaggaaatgagagcctataagtgcccagtacatgtttaaaagaagagctcatggaacctctggaaaggacagggaagttgagttagccacataaatgaacccaagtcacattggaacacagagctggtctgggaactgtgttggctgccaacagaacttctgaccctgttacctgtgaaatgaggcagtttccctcacgttgccatcagctaccaggagcgatgctggtggtcactagcttctgatcctcatcctgggtgtggccacagattgggggaacctggattgtggagtcacatcctccctgcaaagcaagcagggcaagggagatctggcattttctgctttacgtggagggagaacaggcacattagccttgaagctgaagctcattttaggttccttccaggtttagaagcttcaaccaaatgaaacttgaatctgtccctcgtgacaattataggaggaaggtatttaaaaccccagatttatgaatgtgtactacatggcttagagaatgtctttgttcttgttcaggtggttataacaaaataccttaagagtgggtaacttggctggatgcagtggctcatgcctgtaatcccagcactgtgggaggccgagggggatgaatcacctgaggtcaggcattcaagaacagcctggccaacatggcgaagcccctcctctactaaaaatacaaaattagcgaggcatggtcgcacatacctgtaatcccagctcctcgggaagctgaggcaggagaatcgcttgaacccaggaggcggaggttgcagtgagccaagatcacgccattgcactccagcctgggtgacagagcaagactccatctcaaaaaaaaaaaaaagactgggtaacttataaacaaatgttcttctcacaagtctggagactgggaagtccaagatcaagccaccagtgctgtctgatgagggcccactttttcaaagacagtgccttctagctgtgtcctcttatcgtagaagatgggagacagctctccagggccatttttttttttttttttttttttttgagatggagtctggctctgtcgcccaggctggagtgcagtggcacaatctcggctcactgcaacctctgcctctctctgcctcctgagttcaagcaattctcctgcctcagcctcctgaggagctgggactacagggatgcaccaccatgcccagctaatttttgtatttttgtagacactgggtttcaccatattggccaggttggtctcaaactcctgacctcaagtgatctgcccacctcagcctcccaaagtgctgagattacaggcatgagccactgtacccagtctccagggccttttaaagaatgtcactaatcccattcttgaggtctccaccttcattatctaatcacctcccaaaggctccacatcccaacaccatcatattgtgggttaagatttcaaccacaagccaggcgtggtggctcatgcctgtaatcccagcattttggaaggctgaggcaggtggatcacttgaggtcaggagtttgagaccagcctggccaacatggtgaaaccccatctctactaaaaataaaaaaaattagccgggtgtggtggtgcacacctgtaattccagctactcaggaggctgaggcaggagaatcccttgaatccaggaggcggacagtgcagtgagccgagataatgccactgcactccagcctggatgacagagcaagactccatctcatgcccagccagcatgcccaacaagcttcatttgcccctgtttaggtcacaaattttattgatggctgcaattaatggcctcttggtatccaagtcctttgttgtatgacccatccattctcccctgactcccaaggtgtcaggacatgcttgactggctcctgaatttgctctctgcgcatgggcagtacagtcaagcctcacagtgaacccaggtcagctttcaggacaaagaaagtggcctggctgactaggcacagtaaagccagggctgggtaggtacatacttgtgctgatcacgtatgtcttatatctctgtgagagtgcagtcccaacaggaaggtttaatcactggggactgcccaatgctgtgacagggcacagagctctgggttgctgtgggggtgactgcattgaccactgttagtggtttgctgtgttgacactctgtgctgtgtgaccatggctcctgccatcaagaagtagagtctgtttctccacctctgaatccaggctggtcctgtgacttgctttgtcctgtagacaagtgtagtgcaacttcctgtgagccagtttgaagcataggccttggaagcaaaactttacctccacctgtcttaggttttcagctggggctctgctgtgatttgattgtgtctcccaaagttggaaccttgatccccagtgttgtgaggtgaggcttgatggaaagtaaattacgccgtgcgggttatgcccttgtgaatgggtagagaacattatttctgggcgcaggcatggtagctcatgtctgtaatcccagcattttgggaggttgaggtgtgcggattacttgaggtcaggagtttgagaccagcctggccaacaaggtaaaacaccatttctagttaaaatacaaaaattagccaggtgtggtggcacatgcctgtaaggccagctacttgggaggctgagacaggagaatcgcttgaacccaggaggcagagattgcagtgagctgagatcgcaccactgtactccagcctgggcaacaaagcgagagtctgtcttaaaaaaaaccaccattatttcaggagtgagttggttatcctgagagtggtgccttttaaatgaaggagttcattctttgtctttctctcgccctcactttgcccttctgccatatgatgccttccatcatgctaggacacagcaagaaggctctcgctagatgctggctccttgatcttgggcttcccagcctccagaactgtaagccaatacacttctatttattatatatgacccttgctgggttcagtggctcacgcctgtaatcccaatactttgcaaggctgaggcaggaggatcacttgagaccaggcactcaagaccagcctgggcaacatagtgagaccccatctctacaaagttaaaaaaaaattagcagggcatggtgtcgtgcacctgtagtcctagctacttgggaggctgagttgggaggactgcttgaccctgggaggttgaggctacattgaaccatgatcatgccagtgcactccagcctgagtgacagagcaagacacctatctctaaataaatgaccccatctgtggtattgttatagcaaaacaaaacagattaagagagactttttaatgaaaagacagattcacaaagaaaaacaatgtttttgtttctgtttttttgaggcagagtcttgctcttgtcccccaggctggagtgcagtggcgccatcttggctcactgcaacctccgcctcccagtttcaagcgattctcctgcctcagcctcccgagtagctgggattacagatgtacaccaccacgcccggctaattttttttgtatttttagtagagatggggtttcaccatgtcgatcaggctgggctggaactcctgacctcaggtgatccacctgccttggcctcccaatgtgctaggattacaggcatgagccactgtacctggcgaaaaacagtttgttaacacaggcagccaacatcactcaggataagcctcaatgaaaagtaacaaagtgatggcttggaacactgtcttacacagcatttttaaaaaatacaataaatttgtagagataggatgaccaaggacaacagttttaggcttccaaaggtggtaaactatgggatggtaaatatccgagaggaagctgatgcaacaggatttgtctgcagcagcctctggtaccacctctgagtcaagggttgtgtccagtgatggagagtttatatcgtgcctttaggcagaaaaggggagggaaacctgaacttttcctgcactttctgcttcttaattgccttcagctgaaaatcattttttatgtgaaaaaggcatagtctgagctgacgcctctgctttcctccacctgaagagaacctgcgtgctgctcctttgcttcggacctccgcctctgcccgggagaaagcccaggccagcctgctggacaagcagagaccatgagaaggagagttcaggggtcccaaaccaggccatcctagaccagccagctccagctgatccgcacgcagccacttcggctaccttctactggccaaagggagtcccagggctcacccagattcagaggtggggaaactgagtccaccacttgagaagagtagctataaagacatatgagcgaggccagctgagcccagcactgcggccaagtcgaagactttaggagcaataaaagtgcttattgtgtttcagtca

SEQ ID NO: 363 - DNA, 6714 bp, Homo sapiens
actgcggggtgtgcggcggcccaagcggtttcaaacggcttagagcaggccgcttggttctgacccagctgaggaaatactcttaattctaaggaaaacctggaagcacaatgggagatgacagtgagtggttgaaactgccagttgatcagaaatgtgaacacaagctgtggaaagcaaggttaagtgggtatgaagaggccctgaagatcttccagaaaataaaggatgaaaagagcccagagtggtccaaatttttaggattgatcaaaaaatttgtcactgattccaatgcagtggttcaattgaaaggattagaagctgcacttgtttatgttgaaaatgcccatgtagcaggaaaaaccacaggagaagttgtgtcaggtgttgtaagtaaggtgttcaatcaacctaaagctaaagccaaggagctgggcatagagatctgtcttatgtacatagagattgagaaaggagaggctgttcaagaagagctcctgaaaggcttggacaataagaatcccaagatcatagtggcctgtatagagacactgaggaaagccttaagtgaatttggttccaaaatcatcttgcttaagccaattatcaaagtgttgccaaaactctttgagtctcgagagaaggctgttcgagatgaagccaaactaattgctgtggagatttacagatggattcgggatgctctgagacccccattacaaaatataaactctgttcagttgaaagaactagaagaagaatgggtcaaactgccaacaagtgctcctagacctactcgatttcttcgttcccaacaagaactagaagctaaattggaacaacaacagtctgctggtggagatgctgaaggaggtggtgatgatggtgatgaggtgccacaaatagatgcttatgagcttttagaagctgtagaaatcctttccaaacttcccaaagacttttatgacaaaattgaggcaaaaaaatggcaagagagaaaagaggccctggagtctgtagaagtactaataaaaaaccccaaactggaagctggcgattatgcagatttagtaaaagcattaaagaaggttgttggaaaggacaccaatgtcatgttggtggctttggcagcaaaatgtcttactggcctggctgttgggctaaggaagaaatttggacaatatgcaggacatgttgtgccaaccatcttggagaaattcaaagagaagaaacctcaagtggtacaagccctgcaggaggcaattgatgcaatcttccttactaccacactacagaacatcagtgaggatgttttagcagtaatggataataaaaatccaaccatcaagcagcagacatctctttttattgcaagaagtttccgccactgcactgcttctaccctgccaaagagcttgctaaagcccttttgtgctgcactacttaagcacatcaatgattctgctcctgaagtcagagatgccgcatttgaagcattgggtactgctttgaaggtggttggcgagaaagcagtaaacccattcctagctgatgtggacaaactcaagcttgataagatcaaagaatgttcagaaaaggtagaactgatacatggtaagaaagctggactagctgctgataagaaggaattcaaacctctgcctggaaggactgctgcttcaggggctgcaggagataaggacacaaaggacatttctgcacccaaaccaggacctctaaaaaaggcacctgctgctaaggctggtgggccaccaaaaaaggggaaaccagctgcaccaggaggcgcagggaatactggaaccaagaacaagaaaggactggagactaaagaaatagtggagcctgagctctcgatagaagtatgtgaagaaaaagcttcagctgttcttccccctacctgtatacagcttcttgacagcagtaactggaaagaaaggctggcttgtatggaagagttccagaaggctgttgagctaatggaccgaactgaaatgccatgccaggcattagtgaggatgctagccaagaaacctggatggaaagaaactaattttcaggtgatgcaaatgaagcttcatatagttgctttgattgcccagaagggaaatttttccaaaacgtcagctcaggttgtattagatggccttgtggacaagattggagatgtgaaatgtgggaacaatgcaaaagaagctatgacagcaatagccgaagcctgtatgttaccatggactgctgaacaggttgtgtcaatggctttctcacaaaagaatcccaaaaatcagtcagaaactctgaattggctatcaaatgccataaaagaatttggtttttctgggttgaatgtcaaagctttcattagcaatgtgaagacagctcttgctgcaacaaacccagctgtgaggactgctgccataaccctgcttggcgtgatgtatctgtatgttggtccctctttgcgaatgttctttgaggatgagaagcctgccctcctatcccagatagatgcagaatttgagaagatgcagggacaaagtccacctgctccaaccagaggaatttccaagcatagcacaagtggtacagatgaaggagaagatggagatgaaccagatgacgggagcaatgatgtcgttgatcttttgccgaggacggagatcagtgataaaatcacttcagagttggtatctaagattggtgataagaattggaagattaggaaagaaggcctagatgaagtggcaggtattattaatgacgcaaaatttatccaaccgaatataggtgaacttccaactgccttgaagggtcgactcaatgattcaaataaaatcttggtacagcaaacgctgaatatcctgcaacaactggcagtagccatgggcccaaatattaagcaacatgtaaaaaatttaggcatccctatcatcacagtccttggagacagcaagaacaatgttcgagctgctgccctagcgactgtgaatgcttgggcagaacagactggcatgaaggaatggctggaaggagaagatctttctgaagagctcaaaaaggaaaatcctttcttgaggcaagagcttctgggctggctggctgagaaactacctactcttcgttccacccctacagaccttatcctttgtgttcctcatctctactcctgcctagaagatcgaaatggagatgtgcgaaagaaggcccaagatgccttgccattcttcatgatgcatttaggatatgaaaaaatggccaaggctactgggaaactaaagccaacttctaaagatcaggtattggccatgctagagaaagccaaagttaacatgccagccaagcctgctccacccactaaagcaacttctaaaccaatgggagggtccgctccagccaaattccagcctgcatcagcacctgctgaagattgtatttccagcagtacagaacccaaacctgatccaaaaaaggccaaagctccaggattatcctctaaagcaaagagtgcacaagggaagaagatgccaagcaaaaccagcttaaaggaggatgaagacaaatccgggcctatttttattgttgttccaaatggaaaagagcaaaggatgaaagatgaaaaaggattgaaggtgctaaagtggaattttactaccccacgggatgaatacattgagcaactaaagactcaaatgtctagctgtgtggctaaatggttacaagatgagatgtttcactcagactttcagcatcataacaaagcccttgctgttatggttgatcacttggagagtgaaaaagaaggagttattggttgcctggatcttatcttaaagtggcttaccctgaggttttttgacaccaatacaagcgtcctgatgaaagcactagaatatttaaaattgctcttcaccttgctaagtgaagaagaatatcatcttactgagaatgaagcatcttccttcatcccctatcttgtcgtcaaggttggagaaccaaaggatgtcattcgtaaagatgttcgtgccatcctgaaccggatgtgccttgtctacccagctagcaagatgtttccctttatcatggaaggaaccaaatccaaaaactctaagcagagagcagagtgcctggaagagctgggatgtctggttgagtcctatggcatgaatgtttgccaaccaaccccaggaaaagccttaaaggaaatagctgttcacataggagaccgtgacaatgctgtacgcaatgctgcactcaacaccattgtaacggtgtacaatgtacatggggatcaggtgttcaaactgattggaaatctttctgaaaaggatatgagcatgctcgaggagaggattaagcggtcagcaaagagaccctctgctgcaccaataaaacaggtggaagagaaacctcagcgtgcacagaacataagctccaatgccaacatgttacgcaagggaccagctgaggacatgtcttccaaactcaaccaagcccgaagcatgagtgggcatcctgaggcagcccagatggtccgccgagaattccagctggatctagatgagattgagaatgacaatggtacagtccgatgtgaaatgccagaacttgttcagcacaaactggatgacatttttgagccagtccttattcctgaacccaagatccgggctgtttctccacacttcgatgacatgcacagtaatacagcatccacaatcaatttcattatctcccaagtagccagtggtgacatcaacacaagtatccaagctctgacacagatcgatgaggtcctgagacaggaagacaaagctgaagccatgtccggccatattgatcagtttctgatagccacttttatgcagctaagactcatctacaacacacacatggcagatgagaaattggagaaggacgagatcatcaagttgtatagctgtatcattggcaacatgatttcgctgtttcagatagagagccttgcccgggaggcctccactggagtactaaaagacctaatgcatggcctcatcaccttaatgctggattctcggattgaagatcttgaggaaggacaacaggtcatccgctctgtgaacctcttggtggtgaaggttctggagaagtcagaccagaccaacatcctgagtgccctacttgttttgctccaagacagcctgctagcaacagccagttctcccaaattctcagagcttgttatgaagtgtctctggagaatggttcgactgttgcctgataccatcaatagcattaacctagacagaattcttctggatatccacattttcatgaaggtcttccccaaagagaaactgaagcaatgcaaaagtgaatttcccataaggaccctaaagaccctgctacacaccttatgcaaattaaaagggcccaagatcctggaccacctaacgatgatcgacaacaaaaacgagtctgagctggaggcccatctctgccggatgatgaagcacagtatggaccagactgggagcaagtctgataaggaaacagaaaagggagcatctcgaatagatgaaaaatcatcaaaggccaaagtgaatgatttcttagctgagatttttaagaagattggctctaaagaaaacactaaagagggactagcagagttatatgaatataagaagaaatactcagatgctgacattgaaccatttctgaaaaattcctcacagttcttccagagctatgtcgaaagaggccttcgggtgattgagatggagagggagggcaaaggtcgtatttccacttcaacaggcatctcccctcagatggaagtcacatgtgtgcccacgcccacaagcacagtgtcctccataggtaacacaaatggggaagaagtggggccatctgtctacttggaaaggctaaagatcctccgacagcgatgtggtctggacaacacaaagcaagatgaccgacctcctttgacctctttgctctccaaaccagcagttcctactgtcgcctcttccacagacatgctccacagcaaactctctcagctccgggagtcacgggagcagcaccagcattcagacctggattctaaccagactcactcttcaggaactgtgacctcctcctcctccacagctaacatagacgacttgaaaaaaagactggagagaataaagagcagtcgcaaatgaagctgccccactcccccggcaccctgcagctttagtttactaaactagaagtcctcatagtttaaaatggcctcagcaggcctagtgtatacaaactggttgtatgtatcatgccgtggagctagggggaggagtcattgtggcacaagtatttgtacatactctgcttctctctgtcagcgtcctgctgctctagaagactgtccgtggatgagtttagtgtacagacttgtaaacagctgccccctctctgctcagtctagttcccagatccttttcttttctttttaattgctcatttgtaaaattgtcctaatctttcctagctttttaatagttaatattagaaactctttaatagttttcctttcagtttgtgagctcttctctgtcgccctgaagggtcactgtattctgtatgaatgcatggcatgatacaactaatttaagagtcttttataaataaagtttgcattaactatacctgacaaaaaaaaaaaaaaaa

SEQ ID NO: 364 - DNA, 6534 bp, Homo sapiens
actgcggggtgtgcggcggcccaagcggtttcaaacggcttagagcaggccgcttggttctgacccagctgaggaaatactcttaattctaaggaaaacctggaagcacaatgggagatgacagtgagtggttgaaactgccagttgatcagaaatgtgaacacaagctgtggaaagcaaggttaagtgggtatgaagaggccctgaagatcttccagaaaataaaggatgaaaagagcccagagtggtccaaatttttaggattgatcaaaaaatttgtcactgattccaatgcagtggttcaattgaaaggattagaagctgcacttgtttatgttgaaaatgcccatgtagcaggaaaaaccacaggagaagttgtgtcaggtgttgtaagtaaggtgttcaatcaacctaaagctaaagccaaggagctgggcatagagatctgtcttatgtacatagagattgagaaaggagaggctgttcaagaagagctcctgaaaggcttggacaataagaatcccaagatcatagtggcctgtatagagacactgaggaaagccttaagtgaatttggttccaaaatcatcttgcttaagccaattatcaaagtgttgccaaaactctttgagtctcgagagaaggctgttcgagatgaagccaaactaattgctgtggagatttacagatggattcgggatgctctgagacccccattacaaaatataaactctgttcagttgaaagaactagaagaagaatgggtcaaactgccaacaagtgctcctagacctactcgatttcttcgttcccaacaagaactagaagctaaattggaacaacaacagtctgctggtggagatgctgaaggaggtggtgatgatggtgatgaggtgccacaaatagatgcttatgagcttttagaagctgtagaaatcctttccaaacttcccaaagacttttatgacaaaattgaggcaaaaaaatggcaagagagaaaagaggccctggagtctgtagaagtactaataaaaaaccccaaactggaagctggcgattatgcagatttagtaaaagcattaaagaaggttgttggaaaggacaccaatgtcatgttggtggctttggcagcaaaatgtcttactggcctggctgttgggctaaggaagaaatttggacaatatgcaggacatgttgtgccaaccatcttggagaaattcaaagagaagaaacctcaagtggtacaagccctgcaggaggcaattgatgcaatcttccttactaccacactacagaacatcagtgaggatgttttagcagtaatggataataaaaatccaaccatcaagcagcagacatctctttttattgcaagaagtttccgccactgcactgcttctaccctgccaaagagcttgctaaagcccttttgtgctgcactacttaagcacatcaatgattctgctcctgaagtcagagatgccgcatttgaagcattgggtactgctttgaaggtggttggcgagaaagcagtaaacccattcctagctgatgtggacaaactcaagcttgataagatcaaagaatgttcagaaaaggtagaactgatacatggtaagaaagctggactagctgctgataagaaggaattcaaacctctgcctggaaggactgctgcttcaggggctgcaggagataaggacacaaaggacatttctgcacccaaaccaggacctctaaaaaaggcacctgctgctaaggctggtgggccaccaaaaaaggggaaaccagctgcaccaggaggcgcagggaatactggaaccaagaacaagaaaggactggagactaaagaaatagtggagcctgagctctcgatagaagtatgtgaagaaaaagcttcagctgttcttccccctacctgtatacagcttcttgacagcagtaactggaaagaaaggctggcttgtatggaagagttccagaaggctgttgagctaatggaccgaactgaaatgccatgccaggcattagtgaggatgctagccaagaaacctggatggaaagaaactaattttcaggtgatgcaaatgaagcttcatatagttgctttgattgcccagaagggaaatttttccaaaacgtcagctcaggttgtattagatggccttgtggacaagattggagatgtgaaatgtgggaacaatgcaaaagaagctatgacagcaatagccgaagcctgtatgttaccatggactgctgaacaggttgtgtcaatggctttctcacaaaagaatcccaaaaatcagtcagaaactctgaattggctatcaaatgccataaaagaatttggtttttctgggttgaatgtcaaagctttcattagcaatgtgaagacagctcttgctgcaacaaacccagctgtgaggactgctgccataaccctgcttggcgtgatgtatctgtatgttggtccctctttgcgaatgttctttgaggatgagaagcctgccctcctatcccagatagatgcagaatttgagaagatgcagggacaaagtccacctgctccaaccagaggaatttccaagcatagcacaagtggtacagatgaaggagaagatggagatgaaccagatgacgggagcaatgatgtcgttgatcttttgccgaggacggagatcagtgataaaatcacttcagagttggtatctaagattggtgataagaattggaagattaggaaagaaggcctagatgaagtggcaggtattattaatgacgcaaaatttatccaaccgaatataggtgaacttccaactgccttgaagggtcgactcaatgattcaaataaaatcttggtacagcaaacgctgaatatcctgcaacaactggcagtagccatgggcccaaatattaagcaacatgtaaaaaatttaggcatccctatcatcacagtccttggagacagcaagaacaatgttcgagctgctgccctagcgactgtgaatgcttgggcagaacagactggcatgaaggaatggctggaaggagaagatctttctgaagagctcaaaaaggaaaatcctttcttgaggcaagagcttctgggctggctggctgagaaactacctactcttcgttccacccctacagaccttatcctttgtgttcctcatctctactcctgcctagaagatcgaaatggagatgtgcgaaagaaggcccaagatgccttgccattcttcatgatgcatttaggatatgaaaaaatggccaaggctactgggaaactaaagccaacttctaaagatcaggtattggccatgctagagaaagccaaagttaacatgccagccaagcctgctccacccactaaagcaacttctaaaccaatgggagggtccgctccagccaaattccagcctgcatcagcacctgctgaagattgtatttccagcagtacagaacccaaacctgatccaaaaaaggccaaagctccaggattatcctctaaagcaaagagtgcacaagggaagaagatgccaagcaaaaccagcttaaaggaggatgaagacaaatccgggcctatttttattgttgttccaaatggaaaagagcaaaggatgaaagatgaaaaaggattgaaggtgctaaagtggaattttactaccccacgggatgaatacattgagcaactaaagactcaaatgtctagctgtgtggctaaatggttacaagatgagatgtttcactcagactttcagcatcataacaaagcccttgctgttatggttgatcacttggagagtgaaaaagaaggagttattggttgcctggatcttatcttaaagtggcttaccctgaggttttttgacaccaatacaagcgtcctgatgaaagcactagaatatttaaaattgctcttcaccttgctaagtgaagaagaatatcatcttactgagaatgaagcatcttccttcatcccctatcttgtcgtcaaggttggagaaccaaaggatgtcattcgtaaagatgttcgtgccatcctgaaccggatgtgccttgtctacccagctagcaagatgtttccctttatcatggaaggaaccaaatccaaaaactctaagcagagagcagagtgcctggaagagctgggatgtctggttgagtcctatggcatgaatgtttgccaaccaaccccaggaaaagccttaaaggaaatagctgttcacataggagaccgtgacaatgctgtacgcaatgctgcactcaacaccattgtaacggtgtacaatgtacatggggatcaggtgttcaaactgattggaaatctttctgaaaaggatatgagcatgctcgaggagaggattaagcggtcagcaaagagaccctctgctgcaccaataaaacaggtggaagagaaacctcagcgtgcacagaacataagctccaatgccaacatgttacgcaagggaccagctgaggacatgtcttccaaactcaaccaagcccgaagcatgagtgggcatcctgaggcagcccagatggtccgccgagaattccagctggatctagatgagattgagaatgacaatggtacagtccgatgtgaaatgccagaacttgttcagcacaaactggatgacatttttgagccagtccttattcctgaacccaagatccgggctgtttctccacacttcgatgacatgcacagtaatacagcatccacaatcaatttcattatctcccaagtagccagtggtgacatcaacacaagtatccaagctctgacacagctgtttcagatagagagccttgcccgggaggcctccactggagtactaaaagacctaatgcatggcctcatcaccttaatgctggattctcggattgaagatcttgaggaaggacaacaggtcatccgctctgtgaacctcttggtggtgaaggttctggagaagtcagaccagaccaacatcctgagtgccctacttgttttgctccaagacagcctgctagcaacagccagttctcccaaattctcagagcttgttatgaagtgtctctggagaatggttcgactgttgcctgataccatcaatagcattaacctagacagaattcttctggatatccacattttcatgaaggtcttccccaaagagaaactgaagcaatgcaaaagtgaatttcccataaggaccctaaagaccctgctacacaccttatgcaaattaaaagggcccaagatcctggaccacctaacgatgatcgacaacaaaaacgagtctgagctggaggcccatctctgccggatgatgaagcacagtatggaccagactgggagcaagtctgataaggaaacagaaaagggagcatctcgaatagatgaaaaatcatcaaaggccaaagtgaatgatttcttagctgagatttttaagaagattggctctaaagaaaacactaaagagggactagcagagttatatgaatataagaagaaatactcagatgctgacattgaaccatttctgaaaaattcctcacagttcttccagagctatgtcgaaagaggccttcgggtgattgagatggagagggagggcaaaggtcgtatttccacttcaacaggcatctcccctcagatggaagtcacatgtgtgcccacgcccacaagcacagtgtcctccataggtaacacaaatggggaagaagtggggccatctgtctacttggaaaggctaaagatcctccgacagcgatgtggtctggacaacacaaagcaagatgaccgacctcctttgacctctttgctctccaaaccagcagttcctactgtcgcctcttccacagacatgctccacagcaaactctctcagctccgggagtcacgggagcagcaccagcattcagacctggattctaaccagactcactcttcaggaactgtgacctcctcctcctccacagctaacatagacgacttgaaaaaaagactggagagaataaagagcagtcgcaaatgaagctgccccactcccccggcaccctgcagctttagtttactaaactagaagtcctcatagtttaaaatggcctcagcaggcctagtgtatacaaactggttgtatgtatcatgccgtggagctagggggaggagtcattgtggcacaagtatttgtacatactctgcttctctctgtcagcgtcctgctgctctagaagactgtccgtggatgagtttagtgtacagacttgtaaacagctgccccctctctgctcagtctagttcccagatccttttcttttctttttaattgctcatttgtaaaattgtcctaatctttcctagctttttaatagttaatattagaaactctttaatagttttcctttcagtttgtgagctcttctctgtcgccctgaagggtcactgtattctgtatgaatgcatggcatgatacaactaatttaagagtcttttataaataaagtttgcattaactatacctgacaaaaaaaaaaaaaaaa

SEQ ID NO: 365 - DNA, 8576 bp, Homo sapiens
gcggggcggaacagatcgcagacctgggggttcgcagagccgccagtggggagatgttgaagttcaaatatggagcgcggaatcctttggatgctggtgctgctgaacccattgccagccgggcctccaggctgaatctgttcttccaggggaaaccaccctttatgactcaacagcagatgtctcctctttcccgagaagggatattagatgccctctttgttctctttgaagaatgcagtcagcctgctctgatgaagattaagcacgtgagcaactttgtccggaagtattccgacaccatagctgagttacaggagctccagccttcggcaaaggacttcgaagtcagaagtcttgtaggttgtggtcactttgctgaagtgcaggtggtaagagagaaagcaaccggggacatctatgctatgaaagtgatgaagaagaaggctttattggcccaggagcaggtttcattttttgaggaagagcggaacatattatctcgaagcacaagcccgtggatcccccaattacagtatgcctttcaggacaaaaatcacctttatctggtcatggaatatcagcctggaggggacttgctgtcacttttgaatagatatgaggaccagttagatgaaaacctgatacagttttacctagctgagctgattttggctgttcacagcgttcatctgatgggatacgtgcatcgagacatcaagcctgagaacattctcgttgaccgcacaggacacatcaagctggtggattttggatctgccgcgaaaatgaattcaaacaagatggtgaatgccaaactcccgattgggaccccagattacatggctcctgaagtgctgactgtgatgaacggggatggaaaaggcacctacggcctggactgtgactggtggtcagtgggcgtgattgcctatgagatgatttatgggagatcccccttcgcagagggaacctctgccagaaccttcaataacattatgaatttccagcggtttttgaaatttccagatgaccccaaagtgagcagtgactttcttgatctgattcaaagcttgttgtgcggccagaaagagagactgaagtttgaaggtctttgctgccatcctttcttctctaaaattgactggaacaacattcgtaactctcctccccccttcgttcccaccctcaagtctgacgatgacacctccaattttgatgaaccagagaagaattcgtgggtttcatcctctccgtgccagctgagcccctcaggcttctcgggtgaagaactgccgtttgtggggttttcgtacagcaaggcactggggattcttggtagatctgagtctgttgtgtcgggtctggactcccctgccaagactagctccatggaaaagaaacttctcatcaaaagcaaagagctacaagactctcaggacaagtgtcacaagatggagcaggaaatgacccggttacatcggagagtgtcagaggtggaggctgtgcttagtcagaaggaggtggagctgaaggcctctgagactcagagatccctcctggagcaggaccttgctacctacatcacagaatgcagtagcttaaagcgaagtttggagcaagcacggatggaggtgtcccaggaggatgacaaagcactgcagcttctccatgatatcagagagcagagccggaagctccaagaaatcaaagagcaggagtaccaggctcaagtggaagaaatgaggttgatgatgaatcagttggaagaggatcttgtctcagcaagaagacggagtgatctctacgaatctgagctgagagagtctcggcttgctgctgaagaattcaagcggaaagcgacagaatgtcagcataaactgttgaaggctaaggatcaagggaagcctgaagtgggagaatatgcgaaactggagaagatcaatgctgagcagcagctcaaaattcaggagctccaagagaaactggagaaggctgtaaaagccagcacggaggccaccgagctgctgcagaatatccgccaggcaaaggagcgagccgagagggagctggagaagctgcagaaccgagaggattcttctgaaggcatcagaaagaagctggtggaagctgaggagctcgaagagaaacatcgggaggcccaagtctcagcccagcacctagaagtgcacctgaaacagaaagagcagcactatgaggaaaagattaaagtgttggacaatcagataaagaaagacctggctgacaaggagacactggagaacatgatgcagagacacgaggaggaggcccatgagaagggcaaaattctcagcgaacagaaggcgatgatcaatgctatggattccaagatcagatccctggaacagaggattgtggaactgtctgaagccaataaacttgcagcaaatagcagtctttttacccaaaggaacatgaaggcccaagaagagatgatttctgaactcaggcaacagaaattttacctggagacacaggctgggaagttggaggcccagaaccgaaaactggaggagcagctggagaagatcagccaccaagaccacagtgacaagaatcggctgctggaactggagacaagattgcgggaggtcagtctagagcacgaggagcagaaactggagctcaagcgccagctcacagagctacagctctccctgcaggagcgcgagtcacagttgacagccctgcaggctgcacgggcggccctggagagccagcttcgccaggcgaagacagagctggaagagaccacagcagaagctgaagaggagatccaggcactcacggcacatagagatgaaatccagcgcaaatttgatgctcttcgtaacagctgtactgtaatcacagacctggaggagcagctaaaccagctgaccgaggacaacgctgaactcaacaaccaaaacttctacttgtccaaacaactcgatgaggcttctggcgccaacgacgagattgtacaactgcgaagtgaagtggaccatctccgccgggagatcacggaacgagagatgcagcttaccagccagaagcaaacgatggaggctctgaagaccacgtgcaccatgctggaggaacaggtcatggatttggaggccctaaacgatgagctgctagaaaaagagcggcagtgggaggcctggaggagcgtcctgggtgatgagaaatcccagtttgagtgtcgggttcgagagctgcagagaatgctggacaccgagaaacagagcagggcgagagccgatcagcggatcaccgagtctcgccaggtggtggagctggcagtgaaggagcacaaggctgagattctcgctctgcagcaggctctcaaagagcagaagctgaaggccgagagcctctctgacaagctcaatgacctggagaagaagcatgctatgcttgaaatgaatgcccgaagcttacagcagaagctggagactgaacgagagctcaaacagaggcttctggaagagcaagccaaattacagcagcagatggacctgcagaaaaatcacattttccgtctgactcaaggactgcaagaagctctagatcgggctgatctactgaagacagaaagaagtgacttggagtatcagctggaaaacattcaggttctctattctcatgaaaaggtgaaaatggaaggcactatttctcaacaaaccaaactcattgattttctgcaagccaaaatggaccaacctgctaaaaagaaaaagggtttatttagtcgacggaaagaggaccctgctttacccacacaggttcctctgcagtacaatgagctgaagctggccctggagaaggagaaagctcgctgtgcagagctagaggaagcccttcagaagacccgcatcgagctccggtccgcccgggaggaagctgcccaccgcaaagcaacggaccacccacacccatccacgccagccaccgcgaggcagcagatcgccatgtccgccatcgtgcggtcgccagagcaccagcccagtgccatgagcctgctggccccgccatccagccgcagaaaggagtcttcaactccagaggaatttagtcggcgtcttaaggaacgcatgcaccacaatattcctcaccgattcaacgtaggactgaacatgcgagccacaaagtgtgctgtgtgtctggataccgtgcactttggacgccaggcatccaaatgtctcgaatgtcaggtgatgtgtcaccccaagtgctccacgtgcttgccagccacctgcggcttgcctgctgaatatgccacacacttcaccgaggccttctgccgtgacaaaatgaactccccaggtctccagaccaaggagcccagcagcagcttgcacctggaagggtggatgaaggtgcccaggaataacaaacgaggacagcaaggctgggacaggaagtacattgtcctggagggatcaaaagtcctcatttatgacaatgaagccagagaagctggacagaggccggtggaagaatttgagctgtgccttcccgacggggatgtatctattcatggtgccgttggtgcttccgaactcgcaaatacagccaaagcagatgtcccatacatactgaagatggaatctcacccgcacaccacctgctggcccgggagaaccctctacttgctagctcccagcttccctgacaaacagcgctgggtcaccgccttagaatcagttgtcgcaggtgggagagtttctagggaaaaagcagaagctgatgctaaactgcttggaaactccctgctgaaactggaaggtgatgaccgtctagacatgaactgcacgctgcccttcagtgaccaggtggtgttggtgggcaccgaggaagggctctacgccctgaatgtcttgaaaaactccctaacccatgtcccaggaattggagcagtcttccaaatttatattatcaaggacctggagaagctactcatgatagcaggagaagagcgggcactgtgtcttgtggacgtgaagaaagtgaaacagtccctggcccagtcccacctgcctgcccagcccgacatctcacccaacatttttgaagctgtcaagggctgccacttgtttggggcaggcaagattgagaacgggctctgcatctgtgcagccatgcccagcaaagtcgtcattctccgctacaacgaaaacctcagcaaatactgcatccggaaagagatagagacctcagagccctgcagctgtatccacttcaccaattacagtatcctcattggaaccaataaattctacgaaatcgacatgaagcagtacacgctcgaggaattcctggataagaatgaccattccttggcacctgctgtgtttgccgcctcttccaacagcttccctgtctcaatcgtgcaggtgaacagcgcagggcagcgagaggagtacttgctgtgtttccacgaatttggagtgttcgtggattcttacggaagacgtagccgcacagacgatctcaagtggagtcgcttacctttggcctttgcctacagagaaccctatctgtttgtgacccacttcaactcactcgaagtaattgagatccaggcacgctcctcagcagggacccctgcccgagcgtacctggacatcccgaacccgcgctacctgggccctgccatttcctcaggagcgatttacttggcgtcctcataccaggataaattaagggtcatttgctgcaagggaaacctcgtgaaggagtccggcactgaacaccaccggggcccgtccacctcccgcagcagccccaacaagcgaggcccacccacgtacaacgagcacatcaccaagcgcgtggcctccagcccagcgccgcccgaaggccccagccacccgcgagagccaagcacaccccaccgctaccgcgaggggcggaccgagctgcgcagggacaagtctcctggccgccccctggagcgagagaagtcccccggccggatgctcagcacgcggagagagcggtcccccgggaggctgtttgaagacagcagcaggggccggctgcctgcgggagccgtgaggaccccgctgtcccaggtgaacaaggtctgggaccagtcttcagtataaatctcagccagaaaaaccaactcctcatcttgatctgcaggaaaacaccaaacacactatggaactctgctgatggggacccaagcgcccacgtgctcagccaccctctggctcagcggggcccagacccacctcggcacggacacccctgtctccaggaggggcaggtggctgaggctcttcggagctgtcagcgcccggtgcctgccctgggcacctccctgcagtcatctctttgcactttgttactctttcaaagcattcacaaacttttgtacctagctctagcctgtaccagttagttcatcaaaggaaaccaaccgggatgctaactacaacatggttagaatcctaattagctactttaagatcctaggattggttggtttttcttttttttttctctttgtttctttcctttttttttttttttttttaagacaacagaattcttaatagatttgaatagcgacgtatttcctgttgtagtcatttttagctcgaccacatcatcaggtctttgccaccgaggcatagtgtagaacagtcccggtcagttggccaacctcccgcagccaagtaggttcatccttgttcctgttcattctcatagatggccctgctttccccagggtgacatcgtagccaaatgtttactgttttcattgccttttatggccttgacgacttcccctcccaccagctgagaatgtatggaggtcatcggggcctcagctcggaggcagtgacttggggccaagggacctcgagacgctttccttccccaccccccagcgtcatctccccagcctgctgttcccgctttccatatagctttggccaggaaagcatgcaatagacttgctcggagcccagcactcctgggtctcggggtcggggaggggacgggggcacccacttccttgtctgtgacggcgtgttgttccccactctgggatggggaagaggcccgtcgggagttctgcatggcagttcactgcatgtgctgcccccttgggttgctctgccaatgtattaataccatcccatagctcctgccaaatcgagaccctctgacgacttgccgactaactggccaccacaagctgcagtctgtagcactgaacaaacaaaaaacaaaacgctcaagccttacgaccagagaaggatttcagcaaaccaccacctcccactcagtgtcccctccaaacttcacacttccctgcctgcagaggatgactctgttcacacccaatccagcgcggttctaccccacgaaactgtgactttccaaatgagcctttccctagggctagacctaagaccaggaagtttgagaaagcagccgcagctcaactcttccagctccgccagggttgggaagtccttaggtgcagtgcggctcccactgggtctgcggaccctcctattagagtacgaaattcctggcaactggtacagaaccaacctagaggctttgcagttggcaagctaactcgcggccttatttctgcctttaatctcccacaaggcatctgttgctttgggtcctccacgactcttaggcccgcctcaacaacccaggcacctcctaggtaggctcaaaggtagacccgtttccaccgcagcaggtgaacatgaccgtgttttcaactgtgtccacagttcagatccctttccagattgcaacctggcctgcatcccagctccttcctgctcgtgtcttaacctaagtgctttcttgtttgaaacgcctacaaacctccatgtggtagctcctttggcaaatgtcctgctgtggcgttttatgtgttgcttggagtctgtggggtcgtactccctcccctcccgtccccagggcagatttgattgaatgtttgctgaagttttgtctcttggtccacagtatttggaaaggtcactgaaaatgggtctttcagtcttggcatttcatttaggatctccatgagaaatgggcttcttgagccctgaaaatgtatattgtgtgtctcatctgtgaactgctttctgctatatagaactagctcaaaagactgtacatatttacaagaaactttatattcgtaaaaaaaaaaagaggaaattgaattggtttctacttttttattgtaaaaggtgcatttttcaacacttacttttggtttcaatggtggtagttgtggacagccatcttcactggagggtggggagctccgtgtgaccaccaagatgccagcaggatataccgtaacacgaaattgctgtcaaaagcttattagcatcaatcaagattctaggtctccaaaagtacaggctttttcttcattaccttttttattcagaacgaggaagagaacacaaggaatgattcaagatccaccttgagaggaatgaactttgttgttgaacaattagtgaaataaagcaatgatctaaact

SEQ ID NO: 366 - DNA, 689 bp, Homo sapiens
gcaagagagcgggaagccgagctgggcgagaagtaggggagggcggtgctccgccgcggtggcggttgctatcgcttcgcagaacctactcaggcagccagctgagaagagttgagggaaagtgctgctgctgggtctgcagacgcgatggataacgtgcagccgaaaataaaacatcgccccttctgcttcagtgtgaaaggccacgtgaagatgctgcggctggcactaactgtgacatctatgaccttttttatcatcgcacaagcccctgaaccatatattgttatcactggatttgaagtcaccgttatcttatttttcatacttttatatgtactcagacttgatcgattaatgaagtggttattttggcctttgcttgatattatcaactcactggtaacaacagtattcatgctcatcgtatctgtgttggcactgataccagaaaccacaacattgacagttggtggaggggtgtttgcacttgtgacagcagtatgctgtcttgccgacggggcccttatttaccggaagcttctgttcaatcccagcggtccttaccagaaaaagcctgtgcatgaaaaaaaagaagttttgtaattttatattactttttagtttgatactaagtattaaacatatttctgtattcttccaaaaaaaaaaaaaaaaaaaaaaaaaaa

SEQ ID NO: 367 - DNA, 434 bp, Homo sapiens
gcaagagagcgggaagccgagctgggcgagaagtaggggagggcggtgctccgccgcggtggcggttgctatcgcttcgcagaacctactcaggcagccagctgagaagagttgagggaaagtgctgctgctgggtctgcagacgcgatggataacgtgcagccgaaaataaaacatcgccccttctgcttcagtgtgaaaggccacgtgaagatgctgcggctggtgtttgcacttgtgacagcagtatgctgtcttgccgacggggcccttatttaccggaagcttctgttcaatcccagcggtccttaccagaaaaagcctgtgcatgaaaaaaaagaagttttgtaattttatattactttttagtttgatactaagtattaaacatatttctgtattcttccaaaaaaaaaaaaaaaaaaaaaaaaaaa

SEQ ID NO: 368 - DNA, 530 bp, Homo sapiens
gcaagagagcgggaagccgagctgggcgagaagtaggggagggcggtgctccgccgcggtggcggttgctatcgcttcgcagaacctactcaggcagccagctgagaagagttgagggaaagtgctgctgctgggtctgcagacgcgatggataacgtgcagccgaaaataaaacatcgccccttctgcttcagtgtgaaaggccacgtgaagatgctgcggctggatattatcaactcactggtaacaacagtattcatgctcatcgtatctgtgttggcactgataccagaaaccacaacattgacagttggtggaggggtgtttgcacttgtgacagcagtatgctgtcttgccgacggggcccttatttaccggaagcttctgttcaatcccagcggtccttaccagaaaaagcctgtgcatgaaaaaaaagaagttttgtaattttatattactttttagtttgatactaagtattaaacatatttctgtattcttccaaaaaaaaaaaaaaaaaaaaaaaaaaa

SEQ ID NO: 369 - DNA, 593 bp, Homo sapiens
gcaagagagcgggaagccgagctgggcgagaagtaggggagggcggtgctccgccgcggtggcggttgctatcgcttcgcagaacctactcaggcagccagctgagaagagttgagggaaagtgctgctgctgggtctgcagacgcgatggataacgtgcagccgaaaataaaacatcgccccttctgcttcagtgtgaaaggccacgtgaagatgctgcggctggcactaactgtgacatctatgaccttttttatcatcgcacaagcccctgaaccatatattgttatcactggatttgaagtcaccgttatcttatttttcatacttttatatgtactcagacttgatcgattaatgaagtggttattttggcctttgcttgtgtttgcacttgtgacagcagtatgctgtcttgccgacggggcccttatttaccggaagcttctgttcaatcccagcggtccttaccagaaaaagcctgtgcatgaaaaaaaagaagttttgtaattttatattactttttagtttgatactaagtattaaacatatttctgtattcttccaaaaaaaaaaaaaaaaaaaaaaaaaaa

SEQ ID NO: 370 - DNA, 3430 bp, Homo sapiens
agcggaccgagccgcagccgcagccgggcggcgggcgagaggcggcggcggcgggcgggccgcgggcagtcagtcgggcggcggcggcggcggcggcggcggcgatgcggcggccccgctgagtccgcccgctcctggcgccgggagccagccgcgcgaggcggcccgggccgggcggcagcatgcggagcggcgaggagctggacggcttcgagggcgaggcctcgagcacctccatgatctcgggcgccagcagcccgtaccagcccaccaccgagccggtgagccagcgccgcgggctggccggcctgcgctgcgaccccgactacctgcgcggcgcgctcggccgcctcaaggtcgcccaagtgatcttggccctgattgcattcatctgcatagagaccatcatggcatgctccccgtgtgaaggcctctacttttttgagtttgtgagctgcagtgcgtttgtggtgactggcgtcttgctgattatgttcagtctcaacctgcacatgaggatcccccagatcaactggaatctgacagatttggtcaacactggactcagcgctttccttttctttattgcttcaatcgtactggctgctttaaaccatagagccggagcagaaattgctgccgtgatatttggcttcttggcgactgcggcatatgcagtgaacacattcctggcagtgcagaaatggagagtcagcgtccgccagcagagcaccaatgactacatccgagcccgcacggagtccagggatgtggacagtcgccctgagatccagcgcctggacactttttcctactccacaaacgtaacagtaaggaaaaaatcacccacaaacctgctgagtttgaatcactggcaacttgcctagaaaagttcagatgatgggtccttgaactgtgtatctatttcatagggtaagtttgttgtctatgtttgtttttttatgctgaggctttaattcaggtgacttgctatctagacacctggggtggcgtgttttctttgggatgcataatacacaaaggccagggagcctttggcttggacccccagggagctattgaaacttttaaagtttgagtttaggagtaagaacatatctcagaccaccttagtcagctttgctgatgggatttagggccaggtcagagtttcttttcataactgcctgaaaagagagatggtgtgaaacaagattctgataatggtttgtgtgagatttgatcatagtctaaaactatcacgtctgagttgccttaggatgacagtgctgacacccagtaggaagtatcccatttttatcaggaaagtcagtcacgcgtagggatggtgaggagacgcgtagggatggtgaggaggggagaggagggagacctgctggtgcccttgcaccagggtgaggcctgactcacgctgcttccccccacaggccctgctttgcttgcctgctttttccagaatcgattttgcaagcttcaagattctgttcccctcttcgcagaagtgaggaaggcaaatactcagggtttgaagggagacctggccggcctgagggctggcagatgtgagggcaggacacctgggatggactcgtaggctgacccaggcccaaagggggctgcctgttcccaactctttcactctgtaacccattttaaaatgagtttttgaatcttgcctcaaattgacctacttggataaaatcagtgcttttcctaacttgattttgtttgacgtggttccctctaagagaatggtaggaattgaaactatttgtatatgttgaaatttgtaggggttcaggaacccatggcagaaacactaaactatttatttacaagtatgactatttttttttcaaagtaggcaattctttgtatattttaaggcaaataatcacttcacctctggtgccttccatgcgtcgcataagcactcttgtcaatcatggaattggaaaaaaagatgtacatttagttaaacaagataacactatttttgtagcatgattttagattgtgtccttttaatattgttttcaacaatggtagttttgaggttttggccattttctctttacacttcgtatgtattttaaagaagaaaaaaaacaaaaaaaattccctggctattcctctttcctctctgctgctgcttctcctgcatcttgttcctgcttatttaaatagtctgagagtaagagtatatttctgtgaaataattataagtcagtataattgcatttggcattttttaaccacttgctcagtttggagccactgctcacctcaaacagtacaaagaaagtggttccatattttacaaacagaagagtagcatcagagccctgacctcctgtctttgggtgtaaaatggtgagaggccggtgtccggctccttcccctgtggtttgggctggtgaactgagcccaagtgtattctctggcctgggccccttccagaatcagtgcgagcgtcctgcagaggcatggccttcctgccactgcagagtgggaagcttcctgggggacctcagccagctccggggctctcatcttccactcggatctcagattggttcgttgtggatgctctggctaggctcggcggccttttccaggcttcaggcctgaacaaaacaggctgtttgctgtgaggagctagatgacaccaagacacagacacgtactcttcaccggctccttttgcttctccttcctgcaggacgtgagttatgtctggtcccaaaacccttgagtaaactagctgagccattgcaaatgaaggtacagatggattgaaacataaaattgtagcttttggtgtccttctgaagggtcagaatatgtaattatttgataaccaaggaagtcaagtcagatggctaagtagtaactttccaatatgatttctccgtggtacttcacctggtggcacttttggggggcaatgttaacaactatcacattttactcatcaagtctctttcatttcggcagtttaaagacacaactgtgggctttctgaggcgatgcccgttgggcaaacttaggtttatgtgtttggtttttcagctgacgtggaagccctgggtgggcgtcccctggctggcctggcttttgggttcaagtctgtatgtatggagtgggttggggccccaaagctttgctgctattgatttgtccccgacagcaggcaaagcctcacattgccctcaattttccccctttcatttgaaggaccagtttttcatggtacttgtcttgatctttttcatagtgttcaaatctgtatttttgtatgtagagggaaataattttctcaacactaatcgttaataactattgtattaaattgtcatgaaggaacttgtttaataaatggacgtgtaaggaaaaaaaaaaaaaaaaa

SEQ ID NO: 371 - DNA, 2169 bp, Homo sapiens
gtccccgccgtgcgcccttcgccgctgagctcgcagcctccggcgcccacctccacctccagtgtcccgcctcgggccgtcgccctccagcggctcgcgagcgtgggagacgtacctgggcaggcactgtccagcccaggcccaggcacagccgtgaggggcgaggcacggggacatcctggcggccaccatggtggccacgtgcctgcaggtggtgggcttcgtcacgagcttcgtgggctggatcggggtcatcgtgaccacctccaccaatgactgggtggtgacctgcggctacaccatccccacctgccgcaagctggatgagctgggctccaaggggctgtgggccgactgcgtcatggccacggggctgtaccactgcaagcccctggtggacatcctcatcctgccgggctacgtgcaggcctgccgcgccctgatgattgctgcctcggtcctgggtctgccggccattttactgctgctgactgttcttccctgcatccggatgggccaggagcccggtgtggctaagtacaggcgggcccagctggctggtgttttgctcattctgctggctctctgcgcccttgttgccaccatctggttccctgtgtgcgcccaccgtgagaccaccatcgtgagctttggctactccctgtatgcaggctggattggtgctgtgctgtgcctcgtgggtggctgtgtcatcctctgctgcgctggagatgcccaggcctttggtgaaaaccgtttctactacactgcgggctctagctccccgactcatgcgaagagtgcccacgtataagagggctgcccggctgcccacagaggtgctgtagatgctgggcccagggccctaggtttgctcgtcacagtgtggggaagcccattcctctgccaggctctaaagccaaaggtctagaaaagcatcctgtctggcattttgtagtcttaacttctccccatttcccccatcttttggttgccttaaaagaaatctctagctcagataatgcccagacatttttttcccttggtgttgcccctattagctcttttcttgggcattcttttgctgtttattaaaaatatattatatatattttgtttctttaaatttcaaatgttttgcaaacatcactgagttaggtgggggtggggaagagaaatacaagatacttttttttttttttttttttttttttttttaaatagggcctcactctgttgctcaggctggagtgcggtggtgtgatctcggctcatgtagcctcaacctccccggctcaagtgatcctcctgcctcagcctcccaagtagctgggactacaggcgttcactactacacccagctaatttttaagttttttatagagatgagggctccctatgttgcccaggttggtctcgaactcctggactcaaagtatcctcccgcctcggcctcccaaagtgttgggattataggagtgagccaccacaccaggccaagatgcttttcaaactgatacagatgacaatgggagcctcataaagatggcttttgtttcttcccttcaaggtcatttacttgtacgagacagaaaaagatagcattggggacatgggatgggggagggagggcaatagtggaacgaactttccatgggaaactttcccttttgtaagttgagggccaggggtagggatattttttagtttgtgattttacatttatctgtacatactttttcaagattgatcatttttataaccatggttttcctgaaatcctcaattcatcaatatgaaggaaatgaaccacatagactttatgcaataaataacagtgcaagtgagtataactctaactgatgttccacaaaacatttttgatttcaggtttgtatgatgtagtttttaatcgtacattttcatatgcttcaaactaacacatttttaaagctttcccccacttttctctctatttgtattgttagccatcttgaagtgatgttgtttaacataaattgtactgttgaatttggctttacgggtgtaaacactgatggtatatcagtatctgagaccccaaactctccaaatactgatggtgcattttattcttgaagtgaaatctgtgcaataaaataacagactgtctgcaaaaaaaaaaaaaaa

SEQ ID NO: 372 - DNA, 1942 bp, Homo sapiens
cgccaggtggtggctcagaggaggacacagtcgctgtgggcaggtggtcagggcgcaggagggaatgagctgtggatttttagtaatctacaacaatcaggcagttccaggacacagggaagtgagtgtgaacagccaatggacccggagccgagagcctgggcaggcgtaggctggactatggacgccctgcaaccctgccaggctgggaaggggaggcttgatcctgagcgcgtgttaggaaggagatgcccaggttcaggtgtatcgtgcattttttttccacagtgcagaaatgacatttctggttggtcttgaatgtctgctctggccaagccacctcctctcatgctagctaaccaagtggcacgtgtgcccacgcaggccgttctaaggaacactgtaattgtctacacaattttctctcaaatactccgtcctggaagcgtctggttggcagaagagggaaggcaggagggtggcagcgtcccggctgagtcctcttgcacatgggagctggagtccagccaggctccagagcggctccggctggcaagggacctgaacaggaagatgagactcgaggttttctgcatgcctggaagtgcacatgctcatctacagctttcttggaagaagaaagaaacaaaaactgagatttagaacaccaggtctgtttccactggcggccactcttgggcactggagaccagcaagagctttgtttttaaaaggctcttccatggcagatattcgcagaggcatcagggctacacttaaatgaagggctccggctggcacctgaggagcggcgtgaccccgagggcccagggagctgcccggctggcctaggcaggcagccgcaccatggccagcacggccgtgcagcttctgggcttcctgctcagcttcctgggcatggtgggcacgttgatcaccaccatcctgccgcactggcggaggacagcgcacgtgggcaccaacatcctcacggccgtgtcctacctgaaagggctctggatggagtgtgtgtggcacagcacaggcatctaccagtgccagatctaccgatccctgctggcgctgccccaagacctccaggctgcccgcgccctcatggtcatctcctgcctgctctcgggcatagcctgcgcctgcgccgtcatcgggatgaagtgcacgcgctgcgccaagggcacacccgccaagaccacctttgccatcctcggcggcaccctcttcatcctggccggcctcctgtgcatggtggccgtctcctggaccaccaacgacgtggtgcagaacttctacaacccgctgctgcccagcggcatgaagtttgagattggccaggccctgtacctgggcttcatctcctcgtccctctcgctcattggtggcaccctgctttgcctgtcctgccaggacgaggcaccctacaggccctaccaggccccgcccagggccaccacgaccactgcaaacaccgcacctgcctaccagccaccagctgcctacaaagacaatcgggccccctcagtgacctcggccacgcacagcgggtacaggctgaacgactacgtgtgagtccccacagcctgcttctcccctgggctgctgtgggctgggtccccggcgggactgtcaatggaggcaggggttccagcacaaagtttacttctgggcaatttttgtatccaaggaaataatgtgaatgcgaggaaatgtctttagagcacagggacagagggggaaataagaggaggagaaagctctctataccaaagactgaaaaaaaaaatcctgtctgtttttgtatttattatatatatttatgtgggtgatttgataacaagtttaatataaagtgacttgggagtttggtcagtggggttggtttgtgatccaggaataaaccttgcggatgtggctgtttatgaaa

SEQ ID NO: 373 - DNA, 1233 bp, Homo sapiens
gtttgcttcaccttctgccaggattgtaagtttcctgaggcctccccagtcctgcggaactggctccggctggcacctgaggagcggcgtgaccccgagggcccagggagctgcccggctggcctaggcaggcagccgcaccatggccagcacggccgtgcagcttctgggcttcctgctcagcttcctgggcatggtgggcacgttgatcaccaccatcctgccgcactggcggaggacagcgcacgtgggcaccaacatcctcacggccgtgtcctacctgaaagggctctggatggagtgtgtgtggcacagcacaggcatctaccagtgccagatctaccgatccctgctggcgctgccccaagacctccaggctgcccgcgccctcatggtcatctcctgcctgctctcgggcatagcctgcgcctgcgccgtcatcgggatgaagtgcacgcgctgcgccaagggcacacccgccaagaccacctttgccatcctcggcggcaccctcttcatcctggccggcctcctgtgcatggtggccgtctcctggaccaccaacgacgtggtgcagaacttctacaacccgctgctgcccagcggcatgaagtttgagattggccaggccctgtacctgggcttcatctcctcgtccctctcgctcattggtggcaccctgctttgcctgtcctgccaggacgaggcaccctacaggccctaccaggccccgcccagggccaccacgaccactgcaaacaccgcacctgcctaccagccaccagctgcctacaaagacaatcgggccccctcagtgacctcggccacgcacagcgggtacaggctgaacgactacgtgtgagtccccacagcctgcttctcccctgggctgctgtgggctgggtccccggcgggactgtcaatggaggcaggggttccagcacaaagtttacttctgggcaatttttgtatccaaggaaataatgtgaatgcgaggaaatgtctttagagcacagggacagagggggaaataagaggaggagaaagctctctataccaaagactgaaaaaaaaaatcctgtctgtttttgtatttattatatatatttatgtgggtgatttgataacaagtttaatataaagtgacttgggagtttggtcagtggggttggtttgtgatccaggaataaaccttgcggatgtggctgtttatgaaaaaaaaaaaaaaaaaaa

SEQ ID NO: 374 - DNA, 1494 bp, Homo sapiens
ccccacccgaaacacactcagcccttgcactgacctgccttctgattggaggctggttgcttcggataatgacctccaggaccccactgttggttacagcctgtttgtattattcttactgcaactcaagacacctgcagcagggcgtgagaaaaagtaaaagaccagtattttcacattgccaggtaccagaaacacagaagactgacacccgccacttaagtggggccagggctggtgtctgcccatgttgccatcctgatgggctgcttgccacaatgagggatcttcttcaatacatcgcttgcttctttgcctttttctctgctgggtttttgattgtggccacctggactgactgttggatggtgaatgctgatgactctctggaggtgagcacaaaatgccgaggcctctggtgggaatgcgtcacaaatgcttttgatgggattcgcacctgtgatgagtacgattccatacttgcggagcatcccttgaagctggtggtaactcgagcgttgatgattactgcagatattctagctgggtttggatttctcaccctgctccttggtcttgactgcgtgaaattcctccctgatgagccgtacattaaagtccgcatctgctttgttgctggagccacgttactaatagcaggtaccccaggaatcattggctctgtgtggtatgctgttgatgtgtatgtggaacgttctactttggttttgcacaatatatttcttggtatccaatataaatttggttggtcctgttggctcggaatggctgggtctctgggttgctttttggctggagctgttctcacctgctgcttatatctttttaaagatgttggacctgagagaaactatccttattccttgaggaaagcctattcagccgcgggtgtttccatggccaagtcatactcagcccctcgcacagagacggccaaaatgtatgctgtagacacaagggtgtaaaatgcacgtttcagggtgtgtttgcatatgatttaatcaatcagtatggttacattgataaaatagtaagtcaatccaggaacagttatttagaattcatattgaattaaattaattgctagcttaatcaaaatgtttgattctcctatactttttctttctattactcttatattttcccgtcattctctctgctaaccttccaccttatgcacacactttccctatattttaagataagtctgctaggatgtagaaatatttgtttgtgatttctatatagctattagagattatgacatagtaatattaaaatgaaatgatacttaaacagaaagcaatttccaaagaggccagggaccctaatctttgaagagatgaagaaacttacttttctccctggcttttggttcactttttgtacttttaacaagtgggtgaattatttgataattttgaggaagattattcttttaaattcaaactagtatgtcaatgcctaccatta

SEQ ID NO: 375 - DNA, 1265 bp, Homo sapiens
gttcagggcggggccggtcggtgagtcagcggctctctgatccagcccgggagaggaccgagctggaggagctgggtgtggggtgcgttgggctggtggggaggcctagtttgggtgcaagtaggtctgattgagcttgtgttgtgctgaagggacagccctgggtctaggggagagagtccctgagtgtgagacccgccttccccggtcccagcccctcccagttcccccagggacggccacttcctggtccccgacgcaaccatggctgaagaacaaccgcaggtcgaattgttcgtgaaggctggcagtgatggggccaagattgggaactgcccattctcccagagactgttcatggtactgtggctcaagggagtcaccttcaatgttaccaccgttgacaccaaaaggcggaccgagacagtgcagaagctgtgcccaggggggcagctcccattcctgctgtatggcactgaagtgcacacagacaccaacaagattgaggaatttctggaggcagtgctgtgccctcccaggtaccccaagctggcagctctgaaccctgagtccaacacagctgggctggacatatttgccaaattttctgcctacatcaagaattcaaacccagcactcaatgacaatctggagaagggactcctgaaagccctgaaggttttagacaattacttaacatcccccctcccagaagaagtggatgaaaccagtgctgaagatgaaggtgtctctcagaggaagtttttggatggcaacgagctcaccctggctgactgcaacctgttgccaaagttacacatagtacaggtggtgtgtaagaagtaccggggattcaccatccccgaggccttccggggagtgcatcggtacttgagcaatgcctacgcccgggaagaattcgcttccacctgtccagatgatgaggagatcgagctcgcctatgagcaagtggcaaaggccctcaaataagcccctcctgggactccctcaaccccctccattttctccacaaaggccctggtggtttccacattgctacccaatggacacactccaaaatggccagtgggcagggaatcctggagcacttgttccgggatggtgtggtggaagaggggatgagggaaagaaatggggggcctgggtcagatttttattgtggggtgggatgagtaggacaacatatttcagtaataaaatacagaataaaaatcaagtgtttttacgcaaaaaaaaaaaaaaaa

SEQ ID NO: 376 - DNA, 5723 bp, Homo sapiens
gctgacagtcgcggatcctgtgacacctccgggcagcccggcacttgttgctcccacgacctgttgtcattcccttaacccggctttccccgtggccccccgcctcctcccggcttcgctccttttcatgtgagcatctgggacactgatctctcagaccccgctgctcgggctggagaatagatggttttgtgaaaaattaaacaccgccctgaagaggagccccgctgggcagcggcaggagcgcagagtgctggcccaggtgctgcagaggtggcgcctccccggcccgggacggtagccccgggcgccaacggcatgacagactcggcgacagctaacggggacgacagggaccccgagatcgagctctttgtgaaggctggaatcgatggagaaagcatcggcaactgtcctttctctcagcgcctcttcatgatcctctggctgaaaggagtcgtgttcaatgtcaccactgtggatctgaaaagaaagccagctgacctgcacaacctagcccccggcacgcacccgcccttcctgaccttcaacggggacgtgaagacagacgtcaataagatcgaggagttcctggaggagaccttgacccctgaaaagtaccccaaactggctgcaaaacaccgggaatccaacacagcgggcatcgacatcttttccaagttttctgcctacatcaaaaataccaagcagcagaacaatgctgctcttgaaagaggcctaaccaaggctctaaagaaattggatgactacctgaacacccctctaccagaggagattgacgccaacacttgtggggaagacaaggggtcccggcgcaagttcctggatggggatgagctgaccctggctgactgcaatctgttgcccaagctccatgtggtcaagattgtggccaagaaataccgcaactatgatatcccggctgagatgacaggcctgtggcggtacctcaagaacgcctatgcccgtgatgagttcaccaacacctgtgcagctgacagtgagatcgagttggcctacgctgatgtcgccaaacgcctcagccgatcctgagcacagccattttgccccatccccgctgcagaaggactcaaccactcccctaagactccagcttcatagactcctctgtatcactgccttgaggcgcactttttataatcaagcctcatcttgctggtatcatgggaactccagcctgctatctttcatgaaggtcagcaccatccctggcctcctcacataggaatctagcagaaatgatagacacagtccacctttcggccggccagcctgatctgggctcagcatgtttggggtcagtcagtgttggagagcccacatatgggattgccactagcttcttctgccaatatcaaaataccttctcagatgctttagaaacatgcaacaccaactccttttctaccctcctctccgtccatacctacaaggccaaggacaaacgccatcttcatccttcttagaaagagatctattaccccattaggggagacagagagagtgaatggaggagtaccgagctggctatggacttgggtgtctggcaaacacagcttcagtctcactacttctgacactctggttattgggcactaagggccagactggaaagtcacttgagacacattctcagtttgttgcagtgccaggaatgctgcgctgctgctgctgcgcacctggcccatgctgtccctggcttccatgccgtccaggccctgccagaaaaggaaattggcatgcaattctaaactgcagtgactgggatgggaggggaggggagcagtgttgatgccaaaatacccacggggtctaccagccatggggtttgcttgcttaggagtagttgtttcagaggtgattacaggcctgggtttgactgtgcttaccaatgagtggtttttgagctatgagaaagtggatgggagtgggaggaggagagatgggtgaagacaaaagagttctttatgagcctcgatgttccctggtaaacttttaaaaaggccttctctcatgatctaagtcttggactggtggcatcatgtaactgctaaccttacagtaaaaacccaagaatgggtcaaaaatgtcttcccagtttctccaagctgcttctggaatgcaggtctgtcggctgggtgctctccagcagctgctcctgcctgattcaactgtagcctgtaatgggtaaaagccacatttaggaggtggtctgatcatagaacaccttaggaagaaagtccatgagactttctgactaggaaaccatgtggtttgaacttgaagaaaaatgtagacccatctgggttaattttcctacaatctgactcaactgccaggtgaaaaaaaaaaggaaaaatttttaagctaatatttcactcttttgtcattctccttaagtttcatctcctaaaaagcttacccagcctgagcttggggacctgtgcagaggaaactaagaaaaatgcactcatcaactccttctcccagtgaacgcccggtgagaaaatccatttgccacaggcccttaccttcaacaatcccccttctatagtgttcgctggtaaagggtgaggctcccaagtgctggaaagcccctggacttggctcatttctcagcaagggcaggatagcacgggtcctttccatagaaatatcaacaaattctaacccaagcaatccctggacctacctgcctccagggatctctgaagaaaaaaagtaacccattgatcaaatcagaggagaggaagcaggaggtctcctagagcccattgaggaagaggaactttctcagtaggacactttataagcctgagaaagctttgaaaaggcggaatgagttgattcatttccacctcaaaaggaacctttccaggtccccctggaaattgtgccctggagatgtttaacaaggagaactggtgaggaaagagtccttttttactgtagggaaaagccccaaactggcctcctgggggatgagggctgaaatgatcccgaaggccttttaattagtgtgaaatcctgctgtactcagaaatccttccccgaatttacagcacaggcaggatgacctaagaggcagtttacttccctgagacccacagttgggctgttctggaaacacatctgtgaatcatagccaattgccacagagaaaacagaaccaagcctccggtgaggccactccaccccagagaagtctgcagaattccaaggactcggattggatgttcagaattcagcaactggaaagtccttaaaaacaaacaggccaaaccaaatcaatattgctgtttctagatgtcccttctgtggttgagctagttttacagagataaatatattaagacaaggaggtgggggtgttatatgatcaatgatagccatttgaaagagagggaggagtacagaaggaaggcacttctgggtacttaattcagaaatttctttatatttcagcactggattatcatataatgcaagtgactatggactaagagttagttatggtgtcttatgactagatttattatggtatattaaagtaacaataatattaatattaccttcctttttttttttgtttcaaaagagatctttctccagatgcttcagcctgtctggccttcttatcatatgtgcagcacatcatgtctcagcaacagtgtggtgaggtccttaggtgtcccaagaacaactcagggagcacgggagggtctgcagttgggaccccacaactatacagctatagggtaggaggcttccttttcattggtcctgaatgaatacaaatcgctcagaaagcattttggtggcacagaaaggggatgtatttgtgttgagatcttattttattttgtatttatttatcttctttgacttgcacagcactattgggggtgggggaagcagggtagtgggagacgaaggcagaagcaagagtcaaactcagaatgactgagttgaattcactgtctagtcagcaatgcctgcttctgagtttggcccagagagaaggtattgagtaagattttaataactgtaaaaagtaagctggataagtaaaatcatgatggatccaaagcacagtttcttcatctcctgataaagaaagtcaaatgcttgataaattcagagtcacagatgtgagcatagctatattcttttaaacgagaggtagagtgacctagcactaagcaaatgagctgaaatgtcggaaacagagtccatcagcttatttggccacacgatcccaaactagttttatcttgggaaatggccctgtcctcagcattcccttcttgtgctggtggggccagtgaagtcttgatcttatcagaaaaaggccacaccaagtgcgagttttcccaggctgactttccaggcccttatcaaatgaaacaacagaagctcttcacagttctgtgccccatggccactccacagacagacaataccaagcatcttagaactgtcataagataggtcatgcctgaaatagatcttgaccatatgagagtcccagaaatcagcaaggcctggacaaatagaactaagagagaggcagaggcaggaagctgcgggtctatcttgtaaagagtttagcatcactgtgagagtgtgtgtctaaaattaaattaaactagaagcagcaggtgagtatttggtaagtacttctgtgactcgcctcaattcccactggccaggggccatctcaactgcacggtgaatcaagatgctggtgtcatcctccttggaaaaaggaaatgttaactcatggttaaaactaagtacaatgattcccaagggatcactttcttatttttttaaatgacattaaggagaatcttaagaaagcatcagagaaagacatgtgcatgtgaagcaccctgattctgatgttaggaaaacttaagcgaacaggacctgctgcacacagccccattgtcttctatccatttctctttatcattcaaatcaagcaacatgtgccctcctcatcaacacacattcttcccctttgtcagtatgcatctcccagcttagtgtcaggatactttcgattcataattatgtatgatccaaagtgtgcataatttcatttaacgttaaagaaatagatccaattcctttcttgcaaccaaaaataaataaaatacgttgcctcaatataaggtttgggctattctgtgtttctatagaagcaatctgtttttggtaaaatgtacttttaaggatccagtcatctgaagtattttatgtagagttagagatttcacaatattgactatacatatatttaaaatataaattatccagctgatgtttgaatttgtcttactttcctggccacctcgttgtcctattttataagctggggagttaactagcttaacaaaagatgcttagcttttgtaaaagaacaagtgtttcattttacaaagacactccaaatgatagttacttgattttctcgagacctttaactatggtgatgaataacaggacttgctttcaagccttaataaatgtaaaatgccttttaatgaagatacagctgagtgttttcctcatgaatctgaaccaattaccaatttgtgttccagtcttgattggtattgactgattcaaataaagttggtttattttcaaatattacaaaaaaaaaaaaaaaa

SEQ ID NO: 377 - DNA, 2207 bp, Homo sapiens
gggtcggggcgacggagcgggcccagccccacggccaggtcggggccccacctctcggctctgagagcccagccggcccgggccgcgcacctgtcaggtcgggggacctacgtgcgccgcgacacggcgggaggcgggccgggccaggctcgtcccctcggccctcccggaactagtctcctaggccgcggcgcccgccggagcggagagggctggtgccccggagccttcgagtcgggggctagagcggccaggcctccgagccgggtcgagccgaggctggcgacggctgcgtcacgcgagggggcggggctgccacgggcggaggtcgcagccggaagcggaagaggcgctcggagcggggagtggggcctagctgcagccggagcctgggagacgatgcatcactgtaagcgataccgctcccctgaaccagacccgtacctgagctaccgatggaagaggaggaggtcctacagtcgggaacatgaagggagactgcgatacccgtcccgaagggagcctcccccacgaagatctcggtccagaagccatgaccgcctgccctaccagaggaggtaccgggagcgccgtgacagcgatacataccggtgtgaagagcggagcccatcctttggagaggactactatggaccttcacgttctcgtcatcgtcggcgatcgcgggagagggggccataccggacccgcaagcatgcccaccactgccacaaacgccgcaccaggtcttgtagcagcgcctcctcgagaagccaacagagcagtaagcgcagcagccggagtgtggaagatgacaaggagggtcacctggtgtgccggatcggcgattggctccaagagcgatatgagattgtggggaacctgggtgaaggcacctttggcaaggtggtggagtgcttggaccatgccagagggaagtctcaggttgccctgaagatcatccgcaacgtgggcaagtaccgggaggctgcccggctagaaatcaacgtgctcaaaaaaatcaaggagaaggacaaagaaaacaagttcctgtgtgtcttgatgtctgactggttcaacttccacggtcacatgtgcatcgcctttgagctcctgggcaagaacacctttgagttcctgaaggagaataacttccagccttaccccctaccacatgtccggcacatggcctaccagctctgccacgcccttagatttctgcatgagaatcagctgacccatacagacttgaaaccagagaacatcctgtttgtgaattctgagtttgaaaccctctacaatgagcacaagagctgtgaggagaagtcagtgaagaacaccagcatccgagtggctgactttggcagtgccacatttgaccatgagcaccacaccaccattgtggccacccgtcactatcgcccgcctgaggtgatccttgagctgggctgggcacagccctgtgacgtctggagcattggctgcattctctttgagtactaccggggcttcacactcttccagacccacgaaaaccgagagcacctggtgatgatggagaagatcctagggcccatcccatcacacatgatccaccgtaccaggaagcagaaatatttctacaaagggggcctagtttgggatgagaacagctctgacggccggtatgtgaaggagaactgcaaacctctgaagagttacatgctccaagactccctggagcacgtgcagctgtttgacctgatgaggaggatgttagaatttgaccctgcccagcgcatcacactggccgaggccctgctgcaccccttctttgctggcctgacccctgaggagcggtccttccacaccagccgcaacccaagcagatgacaggcacaggccaccgcatgaggagatggagggcgggactgggccgcccagccccttgactccagcctcgaccgccaggccccaggccagagccacccaatgaacagtgcaatgtgaaggaaggcaggagcctgcaggggagcagacttggtgcccagctgccagaaagcacagatttgacccaagctatttatatgttataaagttataataaagtgtttcttactgtttgtaacccctggtaccagtgtgtccatctccaggctccttgccttccccttacctgaccttattaataaagtctttcttagcagttcaaaaaaaaaaaaaaaaaa

SEQ ID NO: 378 - DNA, 1665 bp, Homo sapiens
tggggcactggtacctccaggacctggagtgtactggaagaaatggtgcagtccagatgcatcactgtaagcgataccgctcccctgaaccagacccgtacctgagctaccgatggaagaggaggaggtcctacagtcgggaacatgaagggagactgcgatacccgtcccgaagggagcctcccccacgaagatctcggtccagaagccatgaccgcctgccctaccagaggaggtaccgggagcgccgtgacagcgatacataccggtgtgaagagcggagcccatcctttggagaggactactatggaccttcacgttctcgtcatcgtcggcgatcgcgggagagggggccataccggacccgcaagcatgcccaccactgccacaaacgccgcaccaggtcttgtagcagcgcctcctcgatgagattgtggggaacctgggtgaaggcacctttggcaaggtggtggagtgcttggaccatgccagagggaagtctcaggttgccctgaagatcatccgcaacgtgggcaagtaccgggaggctgcccggctagaaatcaacgtgctcaaaaaaatcaaggagaaggacaaagaaaacaagttcctgtgtgtcttgatgtctgactggttcaacttccacggtcacatgtgcatcgcctttgagctcctgggcaagaacacctttgagttcctgaaggagaataacttccagccttaccccctaccacatgtccggcacatggcctaccagctctgccacgcccttagatttctgcatgagaatcagctgacccatacagacttgaaacctgagaacatcctgtttgtgaattctgagtttgaaaccctctacaatgagcacaagagctgtgaggagaagtcagtgaagaacaccagcatccgagtggctgactttggcagtgccacatttgaccatgagcaccacaccaccattgtggccacccgtcactatcgcccgcctgaggtgatccttgagctgggctgggcacagccctgtgacgtctggagcattggctgcattctctttgagtactaccggggcttcacactcttccagacccacgaaaaccgagagcacctggtgatgatggagaagatcctagggcccatcccatcacacatgatccaccgtaccaggaagcagaaatatttctacaaagggggcctagtttgggatgagaacagctctgacggccggtatgtgaaggagaactgcaaacctctgaagagttacatgctccaagactccctggagcacgtgcagctgtttgacctgatgaggaggatgttagaatttgaccctgcccagcgcatcacactggccgaggccctgctgcaccccttctttgctggcctgacccctgaggagcggtccttccacaccagccgcaacccaagcagatgacaggcacaggccaccgcatgaggagatggagggcgggactgggccgcccagccccttgactccagcctcgaccgccagccccaggccagagccacccaatgaacagtgcaatgtgaaggaaggcaggagcctgcaggggagcagacttggtgcccagctgccagaaagcacagatttgacccaagctatttatatgttataaagttataataaagtgtttcttactgtttgta

SEQ ID NO: 379 - DNA, 4080 bp, Homo sapiens
tttttttttttttttacagctgttcctgctgattgctttttaagctaggctcaagtgtggggccacggaatccttcaggtgcccttcaaatcagacattacatttcagctctcagggctagaatgcttccccctcttatcttgggcaggtctttgaagaagccagtttagccttggtaattttgaatttggccatagtatacggaggagagctaggtagctatcaaaacgcttagacaaacgtatggtaaaatgcagcccagcctgaacctccgcaaaacccccaaacctggagcagcaagtgggcaaaggagtgtgtgtttggggcagggtactgagtcccatatgtaatcaagagacctggagggcccaaggaagtcagtgacacccccacaagctacatatcctccaatggattgtggtggtcatctccggctaccgaagccaccttgcttattcccataggcttacaaacattatgatgcttcacacgagttgtgggtgaagtgaaggaattggaaagtcccggtctaaggccctgcaaaactgctgtctggtaaaaacaagtgactatggcaaggccctgaatgtactacgtatagacttaagtcagtatttgtgcctaacagcaaagcatgccacaagaggctcctcaaaagccgggtaattgatgccattgttttcttgacctagttgaagagtcaaagaagagaaggtgatgcagaaacttctttccagtgaagtgacagatccaagcaaggaacacctgcctgtgaggggagcggtaggggagggggtagattcggcagcactcgggtagtggcagggaccacatattgtcggtgttaaccactgttatcactggcccaggtcgagtgaggacgagtcatttccccactaagcacttggggagtggcagggaccacatattgtcagtgttaaccactgttatgactggcccaggtcgggtgacgacgagccatttccgcactattgtcccttcttcctcactgcacccccagccctgcaccctcagctccaaatacacattctcgttcactcaacgtttgttgacacctagcgtgggccctgtgggatggggtaaaagttcggtgttgggaggagccccggtgacagatttttggttttggtggtggcttttgggcaaggacaggtcagttcataaaagatgacgccccaggtctggatcgaattctcctgggagccagaccaaagcaccttcctggactgcaaagtgtggaagccgccgcgggccgggcgcggggaggtgtcatgcgccggaacctgcgcttggggccaagctctggagctgacgcgcaggggcaaggcgccccgcgtcccggactggcggctccgcgcatgctcctcccaccggcgtcgcaggcctcgagaggctccggaagtactgggtgcagcctgatggcgcaggaggtagacacggcacagggcgccgagatgcggcggggcgcgggcgcggctcggggacgcgcttcctggtgctgggccctggcgctgctttggctcgcggtggttccgggctggtcccgggtctcgggcatcccctcccggcgccactggccggtgccctacaagcgctttgacttccgtccaaaacctgatccttattgtcaagctaagtatactttctgtccaactggctcacctatcccagttatggagggtgatgatgacattgaagtttttcgattacaagccccagtatgggaatttaaatatggagacctcctgggacacttgaaaattatgcatgatgccattggattcagaagtacattaactggcaagaactacacaatggaatggtatgaacttttccaacttggcaactgtacatttccccatctccgacctgaaatggatgcccctttctggtgtaatcaaggcgctgcctgcttttttgagggaattgatgatgttcactggaaggaaaatgggacattagttcaagtagcaactatatcaggaaacatgttcaaccaaatggcaaagtgggtgaaacaggacaatgaaacaggaatttattatgagacatggaatgtaaaagccagcccagaaaagggggcagagacatggtttgattcctacgactgttccaaatttgtgttaaggacctttaacaagttggctgaatttggagcagagttcaagaacatagaaaccaactatacaagaatatttctttacagtggagaacctacttatctgggaaatgaaacatctgtttttgggccaacaggaaacaagactcttggtttagccataaaaagattttattaccccttcaaaccacatttgccaactaaagaatttctgttgagtctcttgcaaatttttgatgcagtgattgtgcacaaacagttctatttgttttataattttgaatattggtttttacctatgaaattcccttttattaaaataacatatgaagaaatccctttacctatcagaaacaaaacactctctggtttataaaacaccttaattctactgctcttttttctccaatcaccagcatctgtttttcagggggtgattttacttttgtgaattccttagcctttcttccttggtgcataaagttaaaatgcacatcagcagaattgctgcatattaacatctcaggactcttctcttgtaaagaagctgaaattcgtactatattggccaaagtgagcgagttaggtgatcttggtttcaatttccgagcctttgttaatatggagaattatggttcatatcagttatgtaggacctttggacccagggtcctacagatagatatggtgtgcccagattttaaaaataccttcaaaaataaaaaatacattcagtgacattttcatggtgggagctcttctttctgatatggcagttacactttttcacttaagtgctttagtttagactaactttacaacttctataacttttggaaccaagtttagtatagtctgattacattccattcacctaactttagacattcgtttagacaccataactggagtgattgtgcttctagatgtggcaaatccagtgttaacacatatttctggctgagattttggaactagctagtaactggcttgtgttctttaagcatactaacatcactaaatcttaggatttaggattgctgtaaagatgtaagttgtgtatgtttggcaggtcacattgaatggcagtgataatgattaatcaaagaacaaatgtcatccttgatcttgcctaatgtagtttatgtgccaaactttccagggttttgtagtcacctagattttaagctgatagcatagtgcttcagcggttcttctaaccggggtatgcaggaacatggctgcagacacgtttgggtaaacaggcaccttctgacttcttcattgtttcctgtagttctccctcttcccacaaagctgtcagcgcagtggaagaggttgcacttctccgagagaggacaggtttctgttaagatcaccaagtagctgtgctttaattagagccagacaagctttcaaggtcctttaagtatttgatgatcaactgaacacgtttctattcaaggagaaaacaccattcagtaagaagatggagtagatatcagataaaacaattcacgtttaatatgtaaatgtaccaattatgtgattcagtttcaactttcaagtacttcctgagaggttagtacattattattgagctctcacagaaagcttaatcatagatataattaacctgatccaaatgagtaaagtggaccttagaaaggctaagtgatctttctctggctatccagctagtagtaatgaagtcaggtcttgaaccccggttctgctgactgaattggatgcactatagtacaggcttttagcaccgaagtgtggtcctcagaccagtgcctgccaaccagatgttactggtctgtgaggaaataagtacagatactgacaggaagcttttataaacaatttattggagtgtttttgtttctgttgggtctaattaaaaaaattggagcttgtaaaaaaaaaaaaaaaaa

SEQ ID NO: 380 - DNA, 1044 bp, Homo sapiens
gaccggggcgtgcggagggatgtggcccggaatattggtagggggggcccgggtggcgtcatgcaggtaccccgcgctggggcctcgcctcgccgctcactttccagcgcagcggccgccgcagcggacactccagaacggcctggccctgcagcggtgcctgcacgcgacggcgacccgggctctcccgctcattcccatcgtggtggagcagacgggtcgcggcgagcgcgcctatgacatctactcgcggctgctgcgggagcgcatcgtgtgcgtcatgggcccgatcgatgacagcgttgccagccttgttatcgcacagctcctcttcctgcaatccgagagcaacaagaagcccatccacatgtacatcaacagccctggtggtgtggtgaccgcgggcctggccatctacgacacgatgcagtacatcctcaacccgatctgcacctggtgcgtgggccaggccgccagcatgggctccctgcttctcgccgccggcaccccaggcatgcgccactcgctccccaactcccgtatcatgatccaccagccctcaggaggcgcccggggccaagccacagacattgccatccaggcagaggagatcatgaagctcaagaagcagctctataacatctacgccaagcacaccaaacagagcctgcaggtgatcgagtccgccatggagagggaccgctacatgagccccatggaggcccaggagtttggcatcttagacaaggttctggtccaccctccccaggacggtgaggatgagcccacgctggtgcagaaggagcctgtagaagcagcgccggcagcagaacctgtcccagctagcacctgagagctgggcctcctctccagaatcatgtggaggggccagaggcttgccagacccccagctgggccctgctcaccccttgttgctgggcttggaggggcctcttgaggaacttttaatttgcaggggtgcccgctatggacggggcattccagctgagacactgtgattttaaattaaatctttgtggtctt

SEQ ID NO: 381 - DNA, 6451 bp, Homo sapiens
tggagccagggcagcaagaaggtgtctgttggagccagcagaacagaaccaatttgaacaagaacctccagaggaacgacgaaccctgagaccacagctgctacagaccacaaacaccccatcagccaagagagacccttgcatccagcctctaccctgctgaacatctagatctaaggctcccaatcccatcctcatctctgccccttcttctcagaaggatggccgacacccagacacaggtggcccccacaccaaccatgaggatggcaactgcagaggacctgcccctccctccacccccagccctggaggacctgccactgccgccacccaaggaatccttctccaagttccatcagcagcggcaagctagtgagctccgccgcctctacaggcacatccaccctgagctccgcaagaatctggctgaggctgtggccgaggatctggctgaggtcctgggctctgaggaacccaccgagggtgacgttcagtgcatgcgctggatctttgagaactggagactggatgccattggagaacacgagaggccagctgccaaggagcccgtgctgtgtggtgacgtccaggccacctcccgcaagtttgaggaaggctcctttgccaacagcacagaccaggagccaaccaggccccagccaggtggaggagacgttcgtgcagcccgctggctatttgagacaaagccactggacgagctgacagggcaagccaaggaactggaggccactgtgagggagcctgcagccagcggagatgtgcagggtaccaggatgctctttgagacgcggccgctggaccgcctgggctcccgcccctccctgcaggagcagagccccttggaactgcgctcagagatccaggagctgaagggtgatgtgaaaaagacagtgaagctcttccaaacggagcccctgtgtgccatccaggatgcagagggcgccatccatgaggtcaaggccgcatgccgggaggagatccaaagcaacgcggtgaggtctgcccgctggctctttgagacccggcctctggacgccatcaaccaggaccccagccaggtgcgggtgatccgggggatttccctggaggagggggcccggcccgacgtcagtgcaactcgctggatctttgagacacagcccctggatgccatccgggagatcttggtagatgagaaggacttccagccatccccagaccttatcccacctggtccagatgttcagcagcagcagcatctgtttgagacccgagcgctggacactctgaagggggacgaagaggctggagcagaggccccacccaaggaggaagtggtccctggtgatgtccgctccaccctgtggctatttgaaacaaagcccctggatgctttcagagacaaggtccaagtgggtcacctacagcgagtggatccccaggacggtgaggggcatctatccagtgacagctcctcagcactgcccttctctcagagtgccccccagagggatgagctaaagggggatgtgaagacttttaagaacctttttgagacccttcccttggacagcattggacagggtgaggttctggcccatgggagtccaagcagagaagaaggaactgattctgctgggcaggcccagggcatagggtccccagtgtatgccatgcaggacagcaagggccgcctccatgccctgacctctgttagcagagagcagatagtcggaggtgatgtgcagggctacaggtggatgtttgagacacagcccctagaccagctcggccgaagccccagtaccatcgacgtggtgcggggcatcacccggcaggaagtggtggctggggacgttggcacagctcggtggctttttgagacccagcccctggagatgatccaccaacgggagcagcaggaacgacagaaagaagaagggaagagtcagggagacccccagcctgaggcacccccaaagggcgatgtgcagaccatccggtggttgttcgagacttgcccaatgagtgagttggccgaaaagcaggggtcagaggtcacagatcccacagccaaggctgaggcacagtcctgcacctggatgttcaagccccaacctgtggacaggccagtgggctccagggagcagcacctgcaggttagccaggtcccggctggggaaagacagacagacagacacgtctttgagaccgagcctcttcaggcctcaggccgtccctgtggaagacggcctgtgagatactgcagccgcgtggagatcccttcagggcaggtgtctcgtcagaaagaggtttttcaggccctggaggcaggcaagaaggaagaacaggagccccgggtaatcgctgggtccatccccgcgggttctgtccacaagttcacttggctttttgagaattgtcccatgggctccctggcagctgagagcatccaagggggcaacctcctggaagagcagcccatgagcccctcaggcaacaggatgcaagagagccaggagactgcagctgaggggaccctgcggactctgcatgccacacctggcatcctgcaccatggaggcatcctcatggaggcccgagggccaggggagctctgtcttgccaagtatgtgctctcgggcacagggcaggggcacccttatatacgaaaggaggagctggtgtcaggtgaacttcccaggatcatctgccaagtcctgcgccggccagatgtggaccagcaggggctgctggtgcaggaagacccaactggccagctccaactcaagccgctgaggctgccaactccaggcagcagtgggaatattgaagacatggaccctgagctccagcagctgctggcttgcggtcttgggacctccgtggcaaggactgggctggtgatgcaggagacagagcagggcctggtcgcactgactgcctactctctgcagccccggctaactagcaaggcctctgagaggagcagcgtgcagctgttggccagctgcatagataaaggagacctgagtggcctgcacagtctgcggtgggagcccccggctgacccgagtccagtgccagccagcgagggggcccagagcctgcacccaactgagagcatcatccatgttcccccactggaccccagcatggggatggggcatctgagagcctcaggggccaccccttgccctcctcaggccattggaaaggcagtccctctggctggggaagctgcagcaccagcccaattgcaaaacacagaaaagcaggaagacagtcactctggacagaaagggatggcagtcttgggaaagtcagaaggagccacgactacccctccggggcctggggccccagacctcctggccgccatgcagagtctgcggatggcaacagctgaagcccagagcctgcaccagcaagttctgaacaagcacaagcagggccccaccccaacagccacttccaaccccatccaggacggtcttcggaaagctggggctacccaaagcaacataaggcctgggggtggaagtgatccccggatcccagcagcccccagaaaggtcagtagggaagagcaagcactacccagagggctgcctggggggtgggtgacaattcaggatggcatctacaccgctcatcccgtgaggacctttgacccacctgggggtgtccagctttctcagagggaaccccagtcaaggcacagggagactgccctctcagtccaggctccccgcccactccagggaggcccaggtcagagtactgggccagggcgggaggagcctgggggctgcacacagatggcctgggggccaccagggaaggcgatggcagaagtctgcccagggggcctccaagctgcagagaccaccctgaagactgcccctctaggccgccacattctggcctctgggccccaagctgcaggtgccagcccgcacccccataatgcctttgttcctcctcctcctactctcccagctgctgtgacaggacctgactttccagctggagcccaccgtgctgaggactccatccagcaagcctctgagcccctgaaggacccccttcttcactcccacagcagccctgctggccagagaacccctggagggtcacagacaaagaccccaaaactggaccccaccatgcccccaaagaagaagccgcagctgccccctaaacctgcacacctaacccagagccaccctcctcagaggctgcccaagcccttgcctctatctcccagcttttcctcggaggtggggcaaagagaacaccaacgaggtgagagagatacagccatccctcagccagccaaggttcccactactgtagaccagggccacatacctctggccagatgtcccagtggacatagccagcccagcttacaacatggcctcagcaccacggcccccaggcccaccaagaatcaggctacaggcagcaatgcccagagctctgagccccccaagctcaatgccctcaaccatgatcccacctcaccacagtggggccccggcccctcaggagagcagcccatggaaggttcccaccaaggggcccctgagagccctgacagtctgcaaagaaaccagaaagagctccagggcctcctgaaccaggtgcaagccctggagaaggaggccgcaagcagtgtggacgtgcaggccctgcggaggctctttgaggccgtgccccagctgggaggggctgctcctcaggctcctgctgcccaccaaaagcccgaggcctcagtggagcaggcctttggggagctgacacgggtcagcacggaagttgctcaactgaaggaacagaccttggcaaggctgctggacattgaagaggctgtgcacaaggcactcagctccatgtctagcctccagcctgaggccagtgccagaggccatttccagggacctccaaaagaccacagtgcccacaagatcagtgtcacagtcagcagtagcgccaggcccagtggctcaggccaggaggtcggaggtcaaactgcagtcaagaaccaagccaaggttgaatgccacactgaggcccagagtcaagtcaagatcagaaatcacacagaggccagaggtcacacagcctcaactgccccttccaccaggaggcaggagacatcaagagagtatttgtgccctcctcgggttttaccttccagccgagattctccctcctccccaacatttatctccatccagtcggccacaaggaagcctctagagactcccagctttaagggcaaccctgatgtctcagtgaaaagcacacaactggctcaggacataggccaggccctgctccaccagaaaggtgtccaagacaaaactgggaagaaggacatcacccagtgctctgtgcaacctgaacctgcccctccctcagccagtcccctgcccagagggtggcaaaagagtgttctggagctacagacggggccagggagctcacaacactatggagccatgagaaccgtgactgaacagtatgaggaggtggaccagtttgggaacacagtcctcatgtcttccaccacagtcaccgagcaggcagagccacccaggaacccaggctcccacctcgggctccacgcctcccccttgctgaggcagttcctgcacagcccagctgggttcagcagtgacctgacagaagctgagacggtgcaggtgtcctgcagctactcccagccagctgcccagtgaggcccaccgcctcccaccacacctgccacctgttcctggcctccactgccccaggactgaagtgggtacctgcctcctgtacactggagcaaggaccaagaggaaatggcatcttcagaggattactgtgggccatttccctttcgcagttctttcaataggcccagttcttccaaatggaaaaagaaaggtctggaagaggcccacagagttgcacaggcgtgggggtaggatgggggctcccagctgcttgtggaggatgtaatatatacagacacacacatgtttttcacacaggcctggcccacgcatcgacatgtgtgaatttgcacaccactgcctgaattggagccccccagagtgtccctctacccagagtttttatttctttaattagtctgagtgttcccagccatctgctccttaatccctggagaggaacagagccaactggacacagcgttggtctctgtttggaatcactgtgaggtctccagaaggacctggccgccagccccttcatcaccatctccatcattcagctggtcatctggtggcccaaaggtcacccaaagagtcagcaatcagcatgtccctagaagccaaatgcactgcctttctctgtccccatgactgtcccccactctgcaccccaaatgggaagcatacggtctgaataaatccaagttttattctct

SEQ ID NO: 382 - DNA, 12911 bp, Homo sapiens
agtcggagggagaacaccaggcgcggcgcgggcggctccggctccggccccggcccaggcccgggagaggcgatggcgagccgcgatagcaaccacgctggcgagagctttctcggctccgacggggacgaggaggcgacccgggagctggagaccgaggaggagtcggagggcgaggaggacgagacggcggcggagtcggaggaggagccggactccaggttatcagaccaggatgaagagggaaagatcaagcaggagtatatcatatctgacccctccttttccatggtgacagtccaaagggaagatagtgggataacctgggaaaccaattcaagtagatcttctactccttgggcttcagaagaaagtcagacttctggtgtgtgtagtcgggaagggtcaactgtgaattctcctcctggaaatgtttcctttattgtggatgaagtgaaaaaggttcggaaaaggactcataagtcaaagcatggttcaccatcattacgccggaaaggcaacagaaaaagaaattcttttgaatcccaagatgttccaacaaacaaaaaaggcagtcctttaacttcagcaagccaggtactaaccacggagaaagagaagtcatatactggcatttatgataaagcaagaaaaaagaagaccacttcaaatacacctccgattactggggcaatatacaaagaacacaagccattagtgttaagaccagtctacataggaacagtacaatataaaattaagatgtttaattcggttaaagaagaattaattcctctacaattttatggaacattgccaaagggttatgtaattaaagaaatacattataggaaagggaaagatgcatccattagtctagagccagatttggacaatagtggttctaatacagtgtccaaaacacgcaaattagtagcccaaagcatagaggataaagtaaaagaggtttttccaccctggagaggcgcactctccaaaggatcagagtccctaaccttaatgttcagtcatgaagatcaaaagaaaatttatgctgattctcccctaaatgccacatctgcattggagcacacagttccctcttattcaagtagtggcagagcagaacaaggaatacagctcaggcattcacagtcagtgccacaacagccagaagatgaagcaaaaccacatgaagtggaacctccatctgtgacacccgacacacctgcaactatgttcctgagaacaacaaaggaagaatgtgagcttgcttcaccaggaactgcagcttcagagaatgactcttcagtctcaccatcatttgctaatgaggtaaagaaggaagatgtgtattctgctcaccattccatttctctggaggcagcgtcaccaggtctggcagcatctacccaggatggtttggacccagaccaagaacagccggacctgacttcaatagaaagggcagaaccagtctccgcaaaactgacccctacccatcccagtgtcaaaggagagaaggaggaaaacatgcttgagccatccatttctctttctgaacctctaatgttagaagaaccagagaaagaagaaatagaaacttccctacccatagctattacccctgaacctgaagattctaatttagtagaagaagagatcgtagaacttgattacccagaaagcccattggtttccgagaagcccttcccaccacatatgtcccctgaagtggagcacaaagaagaagagcttattctaccattattggcagcatcatctcctgaacatgttgctttgtctgaggaagaaagagaggaaattgcatctgtttctactggttctgcttttgtatcagagtattcagtaccacaggatttgaaccatgaattacaggagcaagaaggtgagccagttcccccatccaatgtagaagctatagctgaacatgcagttttgtcagaagaagagaatgaggaatttgaggcttattccccagctgcagcccctacatctgagagctctctctcaccatccacaactgagaagacttcagagaaccagtctccactgttttcaacagttacaccagaatacatggtcctatcaggagacgaggcctcagaaagtgggtgttacacaccagactccacatctgcttctgaatattcagttccatcactggcaacaaaagagtcactgaagaaaacaattgaccgtaagtccccgttaatattgaaaggtgtttctgagtacatgattccatcagaagagaaggaagacactggatcgtttactccagctgtggcccctgcttctgagccctctctctcaccatccacaaccgaaaagacttctgaatgccagtcaccactgccttctactgccacatcagaacacgtggtcccatcagaaggagaggacctaggaagtgaacgtttcacaccggattcaaagttgatctccaaatatgcagccccactcaatgcaacacaggaatctcaaaagaaaataatcaatgaggcatcccaattcaaaccaaaaggtatttctgagcacacagttctgtcagtagacggcaaggaggtcattggaccatcttccccagatttggttgttgcatctgaacactctttcccaccacacacaaccgagatgacttctgaatgccaggccccaccactttcagccaccccatctgaatatgttgttctatcagacgaagaggcagtcgagttggaacgatacacaccctcttctacatctgcttctgaattttcagtaccaccatatgcaacaccggaggcacaggaggaagaaattgtccatagatctctaaatctaaaaggtgcatcctcacccatgaatttatcagaagaagatcaagaagacattggacctttttctccagattctgcatttgtgtcagaattctcatttccaccgtatgcaacccaggaagcagagaaaagagaatttgagtgcgattctccaatatgtttaacatcaccatctgagcacactattttgtcagatgaagacactgaagaagcggaactgttctctccagactcagcatcacaagtttcaatccctccctttagaatctcagaaacagagaaaaatgaacttgagcctgattcactattaactgcagtgtctgcttcaggttattcctgcttttcagaagcagatgaggaagacattggatccacagctgctacacctgtatctgagcagttcagttcatcacagaagcaaaaagctgaaactttccctttgatgtctccgcttgaagacttaagtctgccgccttcaacagataaatcagagaaagcagaaattaagccagagattccaacaacctcaacatctgtatctgaatatctcattttggcacagaagcagaaaactcaagcatatttagagcctgagtctgaagacttgattccttcacatttaaccagtgaagtggagaagggagaaagggaggcaagttcatcagtagctgcaatacctgctgctttacctgcacaatcatctatagtaaaggaagaaaccaaacctgcatctccacattcagttttacctgattcagtccctgcaatcaagaaagaacaggaacccacagcagcactcactctaaaagctgcagatgaacagatggctttgtcaaaagtcagaaaggaagaaattgtgcctgattctcaagaagctacagcacatgtatcacaggatcaaaaaatggagcctcagcctccaaatgttccagagtctgagatgaaatattcagttttgcctgacatggtagatgagccaaagaagggtgtcaagcccaaattagttctaaatgtgacttctgaactagaacagagaaagttgtccaagaatgagcctgaagtaataaaaccatattcacctctaaaggaaacatctttatctggacctgaggctttatcagcagtgaaaatggagatgaaacatgattccaaaataacaactacacctatagtgcttcattcagcttcctcaggagtggaaaagcaagttgaacatggtccacctgcactagcattttcagctttgtcagaagaaattaaaaaagaaattgaacccagttcctcaacaactacagcatctgtaactaagcttgattcaaacttaaccagagcagtaaaagaagaaatcccaacagattcatctcttatcactcctgtagatcgtccagtcttaacaaaagtaggaaagggtgaattaggaagtggtttgccaccactggtaacatctgcagatgaacattcagttcttgcagaagaagacaaggtggcaattaaaggtgcttctcccattgaaacttcatccaaacatttagcttggtcagaagcagagaaggaaattaaatttgattcacttccaagtgtctcctctatagcagagcattctgttttgtcagaagtagaagccaaagaagttaaagctgggttgccagtaatcaaaacatcatcttctcagcattcagataaatctgaggaagcaagggtagaagacaaacaagatcttttattttctacagtctgtgactctgaacgtttggtttcatcacagaagaagagcttgatgtctacctcagaggtgttagagcctgaacatgagcttccactcagcctatggggtgagataaagaagaaagaaactgaacttccttcatcacaaaatgtgtcacctgcatccaaacatataatcccaaaaggcaaagatgaggaaacagcaagttcatctcctgagttggaaaatttagcatcaggtttagccccaacattactgctcctcagtgatgataagaacaaaccggcagtggaggtatcttctacagctcagggagacttcccatcagaaaaacaagatgttgctttggcagagctgtctttggaacctgagaagaaagacaagccacaccaaccgttggaattaccaaatgctgggtcagaattttctagtgatttaggtagacaaagtggatccataggtacaaaacaagcaaagtctcccataactgaaacagaggattctgttttagaaaaaggcccagctgagcttaggagcagagaaggaaaagaagaaaatagagagctttgtgcatcttctacgatgcctgcaatttcagagctttcatcattgcttagggaggaatctcagaatgaagaaattaaacctttctctcccaagatcatcagcctagagtcgaaagaaccacctgcctctgtagctgaaggaggcaacccagaagaatttcagccatttactttttctttaaaaggattatcagaggaggttagccatccagccgactttaaaaagggaggaaatcaagaaataggcccattaccaccaactggaaatttgaaggcacaagtcatgggagatattttagataagctaagtgaagaaacaggccacccaaattcatcccaggtactccagagtataacagaaccatcaaagattgctccttctgacctccttgtagaacaaaaaaagacagaaaaagcacttcattcagatcaaactgttaaattacctgatgtaagcacctcttctgaagataaacaagatctgggtattaagcagttttcacttatgagagagaatttgcctttggaacaatcaaaatcatttatgacaaccaagcctgcggatgtcaaagaaacaaaaatggaagaattctttatttctccaaaggatgaaaactggatgttgggaaagccagaaaatgtggctagtcaacacgaacagagaatagcaggatctgtgcagctggattcctctagcagcaatgagctgaggccagggcagctcaaggctgctgtgtccagtaaggaccatacatgtgaagtgagaaagcaggtcctgccgcattctgctgaagaatctcatttgtcatcacaagaagcagtatctgctcttgatacttccagtggtaatacagagaccttatcaagtaaaagttactcttctgaagaagtaaagctggctgaagaaccaaagtctttagtcctagctggaaatgtagagagaaacatagcagaggggaaggagattcattctttgatggagagtgaaagtttgctattggagaaagcaaacacagagctttcctggccttccaaagaagatagccaggaaaaaattaaactacctcctgaaagattcttccagaaaccagtgtctggcctatcagtggaacaggtgaagtcagaaacaatctcctcttctgtcaaaacagcccatttcccggcagaaggtgtggaacctgcattgggcaatgaaaaagaagcacacaggagcacacctccttttcctgaagagaagccattggaagaatcaaaaatggttcagtcaaaggttattgatgatgctgatgagggaaagaaaccatcacctgaagtaaaaatacccacacaaagaaaacccatctcctcaatccatgcaagagagcctcaatccccagagtcacctgaggtgacacaaaatccacctacacaaccaaaggtggctaagccggaccttcctgaggaaaagggaaagaaaggaatttcatctttcaaatcgtggatgtccagcttgttttttggatcgagcactccagataacaaagttgctgaacaagaagacttagaaacacagccaagtccatccgtagaaaaagcagtgactgtgatagatcctgaaggtacaattcccaccaattttaatgtagctgagaaaccagctgatcattcattatcagaggtaaaacttaaaactgctgatgaacccagaggtactttagtaaaatctggtgacggtcaaaacgttaaagaaaaatccatgattttatcaaatgtagaagatttacaacagccaaaattcatttctgaggtgtctagggaagattatggaaaaaaagaaatctcaggcgattcagaggaaatgaacataaactcagtagttacttctgctgatggtgagaaccttgaaattcaatcttattcactaatcggtgagaaattggttatggaagaagccaaaactattgttcctcctcatgttactgatagtaaaagagtccagaagccagcaatcgctcctccatctaaatggaatatttctatttttaaggaagagccaagaagtgatcaaaaacaaaaatcactcctttcatttgatgtagtagataaggtgccacaacagccaaaatcagcttcctccaactttgcaagtaaaaatatcacaaaggaatcagagaaaccagagtcaattattttgccagtagaagaatcaaaaggcagtttaattgatttcagtgaagacagactcaagaaagaaatgcaaaatcctacttccttgaaaatttctgaagaggaaacaaaactcaggtctgttagtccaactgagaagaaagataatttggaaaacagatcatataccttggcagaaaagaaggtgctggcagaaaaacaaaactctgtggccccattagagcttagagatagtaatgaaatagggaagacacaaattacacttggatctagatctactgaactgaaagaatcaaaagccgatgctatgccacagcacttctatcaaaatgaagactacaatgaaagacccaaaatcattgttggttctgaaaaggagaaaggtgaagaaaaagaaaatcaggtatatgtgctttcagaaggaaagaagcagcaggaacatcagccttattctgtgaatgtagccgagtctatgagtagagaatcagatatctctttaggtcattctttgggtgaaactcaatcattttcattagttaaagctacatcagttactgaaaaatcagaagccatgctcgcagaggctcacccagaaatcagagaagcaaaggcagtaggaacccaaccacatcctttagaagaaagtaaagttttggtggagaaaaccaagactttcctgccggtggctctttcttgtcgtgatgaaatagagaaccactctttatctcaggaaggaaatctagtattagaaaagtcaagcagagatatgccagatcacagtgaagaaaaagaacagttcagagagtcagagctatcgaaaggcggttcagtagatatcacaaaagaaactgtgaaacaaggatttcaagaaaaggcagtaggaacccaaccacgtcctttagaagaaagtaaagttttggtggagaaaactaagactttcctgccagtggttctttcttgtcatgatgaaatagagaaccactctttgtctcaggaaggaaatctagtgttagaaaagtcaagcagagatatgccagatcacagtgaagaaaaagaacagttcaaagagtcagagctatggaaaggtggttcagtagatatcacaaaagaaagtatgaaagaaggatttccatctaaagaatccgaaaggactttagctcgtccttttgatgaaactaagagctcagaaacaccgccatatttgctgtcacctgtaaaaccacaaactcttgcttcaggagcttctccagaaattaacgcagtgaagaaaaaagaaatgccacgatcagaattgactccagaaaggcatacagttcatactattcagacatctaaagatgacacatccgatgtgcctaaacaatctgttcttgtttcaaagcaccacttggaggctgcggaagatacccgtgtaaaggaaccactgtcttcagcaaaaagcaactatgctcaatttatatctaatacatcagcaagcaatgctgataaaatggtttctaataaagaaatgcccaaggaacctgaagacacatatgcaaaaggtgaagactttacagtgactagtaagccagccggactttcagaagatcagaagactgcctttagtatcatttctgaaggctgtgagatattgaatattcatgctccggcctttatttcttcaatcgatcaggaagaaagtgaacaaatgcaagataaattagaatatttggaagagaaagcctcatttaaaaccataccactccctgatgatagtgaaacagttgcttgtcataaaacattaaagagcaggttagaagatgaaaaagttaccccattgaaagaaaataaacaaaaggaaactcataagacaaaagaagagatatccacagattcagaaactgatttatcatttattcagcccacaattcccagtgaagaggattattttgaaaaatatactttgattgattataacatctccccagacccagaaaaacagaaagctccacagaaattaaatgttgaagagaaactctcaaaggaagttacagaagaaactatctctttcccagtaagttcagtggaaagtgcactagaacatgaatatgacttggtgaaattagatgaaagtttttatggaccagaaaagggccacaacatattatctcatccagagacccaaagccaaaactcagctgacaggaatgtttcaaaggacacaaagagagatgtggactcaaagtcaccggggatgcctttatttgaagcagaggaaggagttctatcacgaacccagatatttcctaccactattaaagtcattgatccagaatttctggaggagccacctgcacttgcatttttatataaggatctgtatgaagaagcagttggagagaaaaagaaggaagaggagacagcttctgaaggtgacagtgtgaattctgaggcatcatttcccagcagaaattctgacactgatgatggaacaggaatatattttgagaagtacatactcaaagatgacattctccatgacacatctctaactcaaaaggaccagggccaaggtctggaagaaaaacgagttggtaaggatgattcataccaaccgatagctgcagaaggggaaatttggggaaagtttggaactatttgcagggagaagagtctggaagaacagaaaggtgtttatggggaaggagaatcagtagaccatgtggagaccgttggtaacgtagcgatgcagaagaaagctcccatcacagaggacgtcagagtggctacccagaaaataagttatgcggttccatttgaagacacccatcatgttctggagcgtgcagatgaagcaggcagtcacggtaatgaagtcggaaatgcaagtccagaggtcaatctgaatgtcccagtacaagtgtccttcccggaggaagaatttgcatctggtgcaactcatgttcaagaaacatcactagaagaacctaaaatcctggtcccacctgagccaagtgaagagaggctccgtaatagccctgttcaggatgagtatgaatttacagaatccctgcataatgaagtggttcctcaagacatattatcagaagaactgtcttcagaatccacacctgaagatgtcttatctcaaggaaaggaatcctttgagcacatcagtgaaaatgaatttgcgagtgaggcagaacaaagtacacctgctgaacaaaaagagttgggcagcgagaggaaagaagaagaccaattatcatctgaggtagtaactgaaaaggcacaaaaagagctgaaaaagtcccagattgacacatactgttacacctgcaaatgtccaatttctgccactgacaaggtgtttggcacccacaaagaccatgaagtttcaacgcttgacacagctataagtgctgtaaaggttcaattagcagaatttctagaaaatttacaagaaaagtccttgaggattgaagcctttgttagtgagatagaatccttttttaataccattgaggaaaactgtagtaaaaatgagaaaaggctagaagaacagaatgaggaaatgatgaagaaggttttagcacagtatgatgagaaagcccagagctttgaggaagtgaagaagaagaagatggagttcctgcatgagcagatggtccactttctgcagagcatggacactgccaaagacaccctggagaccatcgtgagagaagcagaggagcttgatgaggccgtcttcctgacttcgtttgaggaaatcaatgaaaggttgctttctgcaatggagagcactgcttctttagagaaaatgcctgctgcgttttcccttttcgaacattatgatgacagctcggcaagaagtgaccagatgttaaaacaagtggctgttccacagcctcctagattagaacctcaggaaccaaattctgccaccagcacaacaattgcagtttactggagcatgaacaaggaagatgtcattgattcatttcaggtttactgcatggaggagccacaagatgatcaagaagtaaatgagttggtagaagaatacagactgacagtgaaagaaagctactgcatttttgaagatctggaacctgaccgatgctatcaagtgtgggtgatggctgtgaacttcactggatgtagcctgcccagtgaaagggccatctttaggacagcaccctccacccctgtgatccgcgctgaggactgtactgtgtgttggaacacagccactatccgatggcggcccaccaccccagaggccacggagacctacactctggagtactgcagacagcactctcctgagggagagggcctcagatctttctctggaatcaaaggactccagctgaaagttaacctccaacccaatgataactactttttctatgtgagggccatcaatgcatttgggacaagtgaacagagtgaagctgctctcatctccaccagaggaaccagatttctcttgttgagagaaacagctcatcctgctctacacatttcctcaagtgggacagtgatcagctttggtgagaggagacggctgacggaaatcccgtcagtgctgggtgaggagctgccttcctgtggccagcattactgggaaaccacagtcacagactgcccagcatatcgactcggcatctgctccagctcggctgtgcaggcaggtgccctaggacaaggggagacctcatggtacatgcactgctctgagccacagagatacacatttttctacagtggtattgtgagtgatgttcatgtgactgagcgtccagccagagtgggcatcctgctggactacaacaaccagagacttatcttcatcaacgcagagagcgagcagttgctcttcatcatcaggcacaggtttaatgagggtgtccaccctgcctttgccctggagaaacctggaaaatgtactttgcacctggggatagagcccccggattctgtaaggcacaagtgatccttggctttcagaatttgcaagaacagcgatttgaattttgggggggtctgctgttcattcctttaggtgctatacattattcaaaaagtctcccgcgcatttgcactaatgatggctgcatgcatagcaatcagcatgtgagcaaaatcgacaagaaaaccttgactttacagagcagtgtgtgagtaaacagaatgaaaacaacaacctccactctttagtttatataagtttgagttctttcctaaattaaaagatctacacttgagttgggaaccgaaagagaaaaatggacttccatctgttttactggtaaaggaaatcctctgatggacaggtcagagtgaaggaaggttgtgctggtaagacatctctgacgaagagccatggatgctttccacaaaatgtcacctcgctgcactaaaggatgatgaatcctaatcattaaaggaattgtttcagctgatttaaatttataatgaactcttttgtaataatgtatactgtagaacatgagtctctcctccctaaaattttaaatgtagaaatgtgctatatattagaaatttccattttgttaaataaatggttagagtctataaagccaaaaaaaaaaaaaaaaaaaa

SEQ ID NO: 383 - DNA, 1546 bp, Homo sapiens
aaaggcgtgagcgcgcgtgcgtgcgtgtgcgggtgcgtgagcgtgagcgcgcggaggccggaagcgagcgctgcgcagtcgggtggtcgcgggccatggagggtagcttttcggatggcggagcgctgccggaggggctcgcggaagaggccgagccgcagggcgccgcctggagcggggacagtggcactgtttcccagagccacagcagcgcctcggggccgtgggaggacgagggcgcggaggacggcgcgccgggccgcgacctgccgctgcttcgccgcgccgctgcgggctacgccgcctgcctgctgcccggggccggggcgcggcccgaggtcgaggccctggacgcgagcctagaggacctgcttaccagagtggacgagttcgtgggcatgctggacatgcttcgcggcgactcgtcccacgtcgtcagcgagggcgtgccgcgcatccacgcgaaggccgccgagatgcggcgcatctacagcaggatcgaccggctggaggccttcgtgaggatggtggggggccgcgtggccaggatggaggagcaggtcaccaaggccgaggccgagctgggcaccttccccagggcgttcaagaagctcctgcacacgatgaacgtgccctcgctctttagcaagtctgctccctcgaggccacagcaagccggctacgaagcccccgtcctgtttcggaccgaagactacttcccttgttgcagtgaaaggcctcagctctgacggcctgaccactgcggcaagaggaccccagctggggtgcttacctccagtatgaagtgaattgcaaatcctgcttatggacatatatgatgttggagtgtgggattttaaagtttactttctacaaactctccgtagtatattcatgattcagtgtagaatgtatagactttatgtcttccaagtttaaaaaaagagacagggtcttggtatgttgcccagactgttcggaaactcctgggctcaagtgatccttccacctcagcctccccagtagctgggactacggggtcgccactgcacccagcctgtgtcttccagctctaatcagaaagctgcttgtcgagggcatggggaatcaaactgaatgaacttttctctgcactgtggcaaaactgttatttttatggattttactaaatggcgttaccttttcaagatttatatgtttgtataatcataagaaaattgagccattaaagccttgttattcaatcctaatagtcagttttctagaacctacttttagggtaaatggtacattatttaatattatattaaacctcctatagcgtggattgtagaccaaaggaaatggtacaatttctgagaatatatgttgattttttgtgactaattccaaagttgtatttgaaagtatgacctcacagtcttcatttgtccatagcaaacatatgtgtgtgtgtgtgtatatatatatgtgggttgccaatgtttggtttataatttaaatgttaatagaaattttgagttttattggaaatgatttccttctg

SEQ ID NO: 384 - DNA, 2855 bp, Homo sapiens
gaggaggggaggcctcctccgccgccgccatcttggaccgggcccggtcagcttccgcggagccatcggcagacgccgcggcctcccttgagccccgacccccgtcgtcagaacaaccccgggcccactcccccaaccccacttccgcttcgcgccgctatcgcgatagcgcccgggcccggggcgcgagaaaaaggcggcgggcgctcgcctcccccgcctgtcgcgatacgctcctcagcggcggcgccagctcctgtgcgtccgtctccaagagagtatgaagagagtgcgtctgtagggcagggaagatggcggacaagcgcaaactccaaggtgagattgatcgctgcctcaagaaggtgtccgagggcgtggagcagtttgaagatatttggcagaagctccacaatgcagccaacgcgaaccagaaagaaaagtatgaggctgacctaaagaaggagattaagaagctacaacggctgagggaccaaatcaagacatgggtagcgtccaacgagatcaaggacaagaggcagcttatagacaaccgcaagctcattgagacgcaaatggaacggttcaaagttgtggaacgagagaccaaaaccaaagcttacagcaaagagggcctgggcctggcccagaaggtagatcctgcccagaaggagaaggaagaggttggccagtggctcacgaataccatcgacacgctcaacatgcaggtggaccagtttgagagtgaagtggagtcactgtcagtgcagacacgcaagaagaagggcgacaaggataagcaggaccggattgagggcttgaagcggcacatcgagaagcaccgctaccacgtgcgcatgctagagaccatcctgcgcatgctggacaatgactccatcctcgttgacgccatccgcaagatcaaggacgacgttgagtactatgttgactcatcccaggaccccgacttcgaggagaacgagtttctctacgatgacctggacctcgaggacattccacaggcgctggtcgccacctccccccccagccacagccacatggaggatgagatcttcaaccagtccagcagcacgcccacctcaaccacctccagctctcccatcccgcccagcccagccaactgtaccacggaaaactctgaagatgataagaagaggggacgttccacagacagtgaagtcagccagtctccagccaaaaacggctccaagcctgtccacagcaaccagcaccctcagtccccagctgtgccgcccacctacccctccggccccccgcctgctgcctctgccttgagcaccactcctggcaacaatggggtccccgcccccgcagcacccccaagtgccctgggccccaaggccagtccagctcccagccacaactcgggcacccctgctccctatgcccaggctgtggccccaccagctcccagtgggcccagcacgacccagccccggccccccagcgtccagcctagcggaggcggaggcggcggcagcggaggtggagggagcagcagcagtagtaacagcagtgccggtggaggggctggcaagcagaatggcgccaccagttacagctcagttgtggcagacagcccggcagaggtggctttgagcagcagtgggggcaacaatgccagcagccaggccttgggccccccttccggcccccacaacccacctcccagcacctcgaaggaacccagtgcggcagccccaacgggggctgggggcgtggccccaggctcagggaacaactcagggggacccagcctcctggtgccactgcctgtgaatcctcccagctccccaacgcccagcttcagtgatgccaaggcagccggtgccctgctcaatgggcctccacagttcagcaccgccccagaaatcaaggcccctgagcctctgagctccttgaagtccatggcggaacgggcagccatcagctctggcattgaggaccctgtgccaacgctgcacctgaccgagcgagacatcatcctgagcagtacatcagcacctccggcctcagcccagccgcccctgcagctgtcagaggtgaacataccgctgtcgctgggtgtctgtccactgggccctgtgcccctcaccaaggagcagctctatcagcaggccatggaagaggccgcctggcaccacatgcctcacccctctgactctgagcgtattcggcagtacctcccccggaacccctgtccgacgcccccctaccaccaccagatgccacccccacactcggacactgtggaattctaccagcgcctgtcgaccgagacactcttcttcatcttctactatctggagggcactaaggcacagtatctggcagccaaggccctaaagaagcagtcatggcgattccacaccaagtacatgatgtggttccagaggcacgaggagcccaagaccatcactgacgagtttgagcagggcacctacatctactttgactacgagaagtggggccagcggaagaaggaaggcttcacctttgagtaccgctacctggaggaccgggacctccagtgacaccggcccctccctctacccacccccttcccccgcatgctgatccccctgcccaggtgagggccctgccctggaagactggagggaggccccaagccacggggcatccccctctcccaggaagcagggagggggccgggaggttttcctctcagccccaccctgggggcccgggggcgagggctgccccctcctcccctccccagtgagggacattttttggtaaacctattttcattttggaaaatatttatgaataaatagttttatatgacggctggc

SEQ ID NO: 385 - DNA, 5222 bp, Homo sapiens
gggtgcccgctccgccccccgggctatgtaaagcggccgggctcgggtcgtgccaccgctggactcccgtgtccctccgcgcaggcgggcggccccggagcgctggtgccggcagaggcggcgacggtggcgcccctcctcatcatgaacagaggcttctcccgaaaaagccacacattcctgcccaagatcttcttccgcaagatgtcatcctcaggggccaaggacaagcctgagctgcagtttcccttccttcaggatgaggacacagtggccacgctgctagagtgcaagacgctcttcatcttgcgcggcctgccaggaagcggcaagtccacgctggcacgggtcatcgtggacaagtaccgtgatggcaccaagatggtgtcggctgacgcttacaagatcacccccggcgctcgaggagccttctccgaggagtacaagcggctcgatgaggacctggctgcctactgccgccgccgggacatcagaattcttgtgcttgatgacaccaaccacgaacgggaacggctggagcagctctttgaaatggccgaccagtaccagtaccaggtggtgctggtggagcccaagacggcgtggcggctggactgtgcccagctcaaggagaagaaccagtggcagctgtcggctgatgacctgaagaagctgaagcctgggctggagaaggacttcctgccgctctacttcggctggttcctgaccaagaagagctctgagaccctccgcaaagccggccaggtcttcctggaagagctggggaaccacaaggccttcaagaaggagctgcgacaattcgtccctggggatgagcccagggagaagatggacttggtcacctactttggaaagagacccccaggcgtgctgcattgcacaaccaagttttgtgactacgggaaggctcccggggcagaggagtacgctcaacaagatgtgttaaagaaatcttactccaaggccttcacgctgaccatctctgccctctttgtgacacccaagacgactggggcccgggtggagttaagcgagcagcaactgcagttgtggccgagtgatgtggacaagctgtcacccactgacaacctgccgcgggggagccgcgcccacatcaccctcggctgtgcagctgacgtagaggccgtgcagacgggccttgacctcttagagattctgcggcaggagaaggggggcagccgaggcgaggaggtgggcgagctaagccggggcaagctctattccttgggcaatgggcgctggatgctgaccctggccaagaacatggaggtcagggccatcttcacggggtactacgggaaaggcaaacctgtgcccacgcaaggtagccggaaggggggcgccttgcagtcctgcaccatcatatgagtgttctcaccaccacttatgcccctagaagggaaggggagagggaaacgtgccctctgtttgatccttgttttgtgacattttttttttttttttttttactcaaagttaacctacctgtaactttttaaaaacttgtaaaataactgaccctcccttcctgtccgccctcttcccctctaatgctcacgctcccaacacaaggtgggcagggaggcaccattcaggaacctggaccaaagctgacgaggctgggccaagccagggatggggccacagccagaaccccgagccctacttccaggttctggttagctcagccccagcccagcccagctgctctgcccagagctgggtgagtggggagacacctcagagccccgcaaaacccactgaccggaggcaaaaggcagtggggctgggggtagttttccatggtcacagagaactagtggtggctctgagaaggggaggacctctgggctttgattccatctccttgtcttttttctttgtttttagagacagggtcctgctatttcccaagctggagtgcagtggtgcgatcatggctcactgcagcctcgaactcctgggctcaagcaatcctcctgagtgatcccatttcttaatcagtgtagccccaagaaggctggggctatttaccagggtagaaaaaggagcttacctcccacctttggtcctaagtccctgccccctccccttcacaccataactaggtaacagtttgataactagggaagaaagcagaacagttaagcagccgccacatccccgctggctgggggcctcactccaggaaggggctggactggctgtcctttccagtggcctggctccgctgtgtggatggggagatcggggccagaggcagaaccctggtgaggaagctccagtcctgctctctacccagcccatcttgcctccatggtgcctctggaggcctctgggcctcctctaacaggggctggtgggcaccaagagccaatggagtagacccctggctggtaagggccaagtcccaccggttgcttctgggaaggggtttctaacactagtctgtgtgctgtggttcctggggtgccctccactgccctctgttcagtaacagggccttgctaatcgggttgtcactcaacaaaagtgctttggatttaagttactatcctggctttgcccaacctcagcaacctgtaagactgataatgaaataaatcatgttaatcctagctgtgtgcagtctctcttacccttctgtgcccagctcagtcttccctagggctgggtgtattaggactggctttgtcccacagcttggggccatcggtcctgtctcccctctgctggccgggcacagctgtggtgaggttgggcagctgaacagtgttggctttcatgaggaggcagaaagcagaggctggcctcagactcatacagaaggtgggggttggctgggtacgagggatgtggagcacaaaagcctctcatcccccattaaccagggcaccaagcccacaggtgtccccagcccactggatcagaaagagttcagtaagaccggaagctcctggtatgggtttctcccagttctctagggaaggccacctgcaggtcactgaaacttcaagcaccagggaagatctaacatttgagtcccttccaggccatcagaggcctagtcagccacatgggaaacttccaagacctgactcaggcatcattccaccatggctaaggcaccagccggggaagacttgaaagaaaggggcaggagctcagatgaagagaaatcctaagttacctttctaggtcaaggcctgtccctggccatctctgaacttcagctagagcttcaagtctgtgcctggagctcctgggaaggctactcaccttgaacaccacgcttgacaggacagcatggtgcatgccgctgcatccgtgagcagtgtgtctcctgcatgcagaaagggagcagagaaggccaggggcttttgctaaaaatagtggccagaccagagctctggagccacctgtcccacctcaaatgggtctgggggtcaggaggcagggttttatctctgtctaccatctccctcgaacccacactgcaacaggaactgtgagagtctttgtaagtaaactgccctgtctaggtcagtacccacctgagctttggacgcacacagcttttagtacccacctgagctttggacacacacagcttctagtgatttctggggccccaccgtaaagtgagcatgctttctgaactcgcttctctgtgactgatgttaggctgggcccagaggcacagccggggcctgcctagcactcacatgctggacaggtctgggagaggcagagtgccccacctgccactaggctgggtgcccacagcccgcatgcagcagcttgctgcaccccaagtccaggtcgggctcagctctggctcacagactggagacaatgcagatgccagagcaaagggccaggaagggtcaaaacattttattctcttttttttttcttttttaataaagttaaacagtaaaacaaaaattcacaagctgcctccctgtccacccccgcctccctcccctgccctcggtcttcggcattggttccctttgctccaccccactcacagagacacagggcatccaactgagaaaacgaaactgctctaagcacacggagacgtgatgaagggaggaggtgaactgtttccacattcaagattaaactgagtgaatctgcattttctgggttctgggtggttgcccttcattagccaaattgaaaaaagaaattccctggaccagatgctgaaagagaaaagaggggttggtagttggctatggattttctaaggaagatcactttgctctgattatggaaaagtcttcaagggctgcttcaaactcaaacacagagagaaactctatgggtatcaaacagctcaggctgtttttgggtgcaagagggagcacgtgactgtattatacatgggtagcttctgacctcagcattatctatatagtacctttgctcttgcagagaagccttggtactaggcagttagagatgcctccctgaccctgcagagatgcggtggctaaaggtcccaaggcaaggggtgcctgggaaccttcctgtcttcatccttagcaacagccgagtggatagatgccctgctagatgagaattcagctgcccccgctcatgggcccctctgactcccaaagagctgcctaagaggcaatgagtgtgttggcttgtgatctgggaactcccaagaacagcaggcccacctaccttcaaagctgaagccgccaggaccgccaaagaatgccttgaagatattgtttggatcaaaatctgtagagcagggcaagtaacatggaagggaagaaaaggtgaaaaattagaaatgttcgaagagaactgatgacactgagaacagatctccaaagctttcctggagagtctcactcccctcctttcccaacacttcagactgcaagtgagcaaacctgccccatcccgtgcaaaacatgctacctgatcccactcctaggacatgttcccttctccttccaactgctgccccaaaggaagctttctctgcttcagcttgcttcattgggctgttttctcaacaaatggaatgccatttgcacttacacaagactttccccatactctgtctccctataatgctggagcggctactaaaaaggataaaatgtatcacttaaatgttaccaaaaataaatataagagcaagatct

SEQ ID NO: 386 - DNA, 2622 bp, Homo sapiens
ggtgcggggcggaagtgggcggctgcgggacgcgcgcggagtcgcgcggcgggcgggacctggccgagctggagggcgccggggagcggggctcgggcggtccccgaggcccggcggagcgggcttctggggtgtctgcggcggcgccgggggaacgggctggggatggggcgcctagccgggcggtggccggggcctcggccatgttcgcggggctgcaggacctgggcgtggccaacggcgaggacctgaaggagaccctgaccaactgcacggagccgctcaaggccatcgagcagttccagacagagaatggtgtgctgctgccatctcttcagtcagccctccccttcttggacctgcacgggacgccgcggctggagttccaccagtcggtattcgatgagctgcgggacaagctgctggagcgagtgtcagccatcgcttcggaggggaaggctgaggaaaggtacaagaagctggaagaccttctggagaagagcttttctctggtgaagatgccgtccctgcagcccgtggtgatgtgcgtcatgaagcacctgcccaaggttccggagaaaaaactgaagctggttatggctgacaaggagctgtatcgagcctgcgccgtggaggtgaagcggcagatctggcaagacaaccaggccctcttcggggacgaggtttccccactcctgaagcagtacatcctggagaaggagagcgctctcttcagtacagagctctctgtcctgcacaactttttcagtccttcccccaagaccaggcgccagggcgaggtggtgcagcggctgacgcggatggtggggaagaacgtgaagctgtacgacatggtgctgcagtttctgcgcacgctcttcctgcgcacgcggaatgtgcactactgcacgctgcgggctgagctgctcatgtccctgcacgacctggacgtgggtgaaatctgcaccgtggacccgtgccacaagttcacctggtgcctggacgcctgcatccgagagcggttcgtggacagcaagagggcgcgggagctgcaggggtttctcgatggcgtcaagaagggccaggagcaggtgctgggggacctgtccatgatcctgtgtgaccccttcgccatcaacacgctggcactgagcacagtcaggcacctgcaggagctggtcggccaggagacactgcccagggacagccccgacctcctgctgctgctccggctgctggcgctgggccagggagcctgggacatgatcgacagccaggtcttcaaggagcccaagatggaggtagagctcatcaccaggttcctcccgatgctcatgtccttcctggtggatgactacactttcaatgtggatcagaaacttccggctgaggagaaagccccagtctcatatccaaacacacttcccgaaagcttcactaagtttctgcaggagcagcgcatggcctgcgaggtggggctgtactacgtcctgcacatcaccaagcagaggaacaagaacgcgctcctccgcctgctgcccgggctggtggagacctttggcgacttggcctttggcgacatcttcctccacctgctcacgggcaaccttgcgctgctggccgacgaatttgcccttgaggacttctgcagcagcctcttcgatggcttcttcctcaccgcctctccaaggaaggagaacgtgcaccggcacgcgctgcggctcctcattcacctgcaccccagggtggccccgtctaagctggaggcgttgcagaaggccctggagcctacaggccagagcggagaggcagtgaaggagctttactcccagctcggcgagaagctggaacagctggatcaccggaagcccagcccggcacaggctgcggagacgccggccctggagctgcccctccccagcgtgcccgcccctgccccgctctgagggccctccagacctgctcgggtgctggggccatgccgagtcgcggccctgctcagccggaagaggctcccggacctggatgtacagggcagtctctcttcccggggctatggctgggcctgtcctgccgtcatggccccctgcttcctgctccttggagctggctcccggaccttgcccaccatccatgcagtggctcccagggcagagcctctccttgtactttggcagccatagaaagcgtgctcattttctgttttcctgtgttaggaaaaaaccacctgttttccaaggggagagggcggggcctgagggtgggggcggggcctcttcattggcccagcttggcgaaagcgaggcacactgcttactgccttggggttgtggagatggacccgtgacctcgtggaggccgtgtgggggcagcagcctggcctgtgccatggtgggtgtcctggggcctgtgcggagggagccacctcaccctgcagcccagtttgcaggtgtggccttgtttctccttgcccagcagtgctgccttcagcggccgtgacggggccagctggacacacggtgagattttctcgtatgtaaataaaaggcattttggtaaacgtggaaaaaaaaaaaaaaaaaaaaaaaaaaaaaaaaaaaaaaaaaaaaaaaaaaaaaaaaa

SEQ ID NO: 387 - DNA, 3307 bp, Homo sapiens
caccttctgcactgctcatctgggcagaggaagcttcagaaagctgccaaggcaccatctccaggaactcccagcacgcagaatccatctgagaatatgctgccacaaataccctttttgctgctagtatccttgaacttggttcatggagtgttttacgctgaacgataccaaatgcccacaggcataaaaggcccactacccaacaccaagacacagttcttcattccctacaccataaagagtaaaggtatagcagtaagaggagagcaaggtactcctggtccaccaggccctgctggacctcgagggcacccaggtccttctggaccaccaggaaaaccaggctacggaagtcctggactccaaggagagccagggttgccaggaccaccgggaccatcagctgtagggaaaccaggtgtgccaggactcccaggaaaaccaggagagagaggaccatatggaccaaaaggagatgttggaccagctggcctaccaggaccccggggcccaccaggaccacctggaatccctggaccggctggaatttctgtgccaggaaaacctggacaacagggacccacaggagccccaggacccaggggctttcctggagaaaagggtgcaccaggagtccctggtatgaatggacagaaaggggaaatgggatatggtgctcctggtcgtccaggtgagaggggtcttccaggccctcagggtcccacaggaccatctggccctcctggagtgggaaaaagaggtgaaaatggggttccaggacagccaggcatcaaaggtgatagaggttttccgggagaaatgggaccaattggcccaccaggtccccaaggccctcctggggaacgagggccagaaggcattggaaagccaggagctgctggagccccaggccagccagggattccaggaacaaaaggtctccctggggctccaggaatagctgggcccccagggcctcctggctttgggaaaccaggcttgccaggcctgaagggagaaagaggacctgctggccttcctgggggtccaggtgccaaaggggaacaagggccagcaggtcttcctgggaagccaggtctgactggaccccctgggaatatgggaccccaaggaccaaaaggcatcccgggtagccatggtctcccaggccctaaaggtgagacagggccagctgggcctgcaggataccctggggctaagggtgaaaggggttcccctgggtcagatggaaaaccagggtacccaggaaaaccaggtctcgatggtcctaagggtaacccagggttaccaggtccaaaaggtgatcctggagttggaggacctcctggtctcccaggccctgtgggcccagcaggagcaaagggaatgcccggacacaatggagaggctggcccaagaggtgcccctggaataccaggtactagaggccctattgggccaccaggcattccaggattccctgggtctaaaggggatccaggaagtcccggtcctcctggcccagctggcatagcaactaagggcctcaatggacccaccgggccaccagggcctccaggtccaagaggccactctggagagcctggtcttccagggccccctgggcctccaggcccaccaggtcaagcagtcatgcctgagggttttataaaggcaggccaaaggcccagtctttctgggacccctcttgttagtgccaaccagggggtaacaggaatgcctgtgtctgcttttactgttattctctccaaagcttacccagcaataggaactcccataccatttgataaaattttgtataacaggcaacagcattatgacccaaggactggaatctttacttgtcagataccaggaatatactatttttcataccacgtgcatgtgaaagggactcatgtttgggtaggcctgtataagaatggcacccctgtaatgtacacctatgatgaatacaccaaaggctacctggatcaggcttcagggagtgccatcatcgatctcacagaaaatgaccaggtgtggctccagcttcccaatgccgagtcaaatggcctatactcctctgagtatgtccactcctctttctcaggattcctagtggctccaatgtgagtacacacagagctaatctaaatcttgtgctagaaaaagcattctctaactctaccccaccctacaaaatgcatatggaggtaggctgaaaagaatgtaatttttattttctgaaatacagatttgagctatcagaccaacaaaccttccccctgaaaagtgagcagcaacgtaaaaacgtatgtgaagcctctcttgaatttctagttagcaatcttaaggctctttaaggttttctccaatattaaaaaatatcaccaaagaagtcctgctatgttaaaaacaaacaacaaaaaacaaacaacaaaaaaaaaattaaaaaaaaaaacagaaatagagctctaagttatgtgaaatttgatttgagaaactcggcatttcctttttaaaaaagcctgtttctaactatgaatatgagaacttctaggaaacatccaggaggtatcatataactttgtagaacttaaatacttgaatattcaaatttaaaagacactgtatcccctaaaatatttctgatggtgcactactctgaggcctgtatggcccctttcatcaatatctattcaaatatacaggtgcatatatacttgttaaagctcttatataaaaaagccccaaaatattgaagttcatctgaaatgcaaggtgctttcatcaatgaaccttttcaaacttttctatgattgcagagaagctttttatatacccagcataacttggaaacaggtatctgacctattcttatttagttaacacaagtgtgattaatttgatttctttaattccttattgaatcttatgtgatatgattttctggatttacagaacattagcacatgtaccttgtgcctcccattcaagtgaagttataatttacactgagggtttcaaaattcgactagaagtggagatatattatttatttatgcactgtactgtatttttatattgctgtttaaaacttttaagctgtgcctcacttattaaagcacaaaatgttttacctactccttatttacgacgcaataaaataacatcaatagatttttaggctgaattaatttgaaagcagcaatttgctgttctcaaccattctttcaaggcttttcattgttcaaagttaataaaaaagtaggacaataaagtgaaaaaaaaaaaaaaaaaa

SEQ ID NO: 388 - DNA, 3067 bp, Homo sapiens
agaggtgcgcgctgcgcgtgggatcagcccggcgccgacgggtggctccgaggagctcgctccttcctcgcccccgccccctcgccgcgcggggccagcccggccgctcctcccctgggtgggtccctgctccttttctggcagggtctatttgcatagaggaaactgcccaaagtggccgctgtggaggagctggctgcggcgaagggggcgtgcgcggcgatccgctgctacccggaggctaacccccgcgcccggcggacctcgtgcctcgggctgtcccgcctgctcctctcgcacccagcctctgccccagcagcaccgccccctcggagagtccacgcgcgacgaacgcgccatgggcccaggcgagcgcgccggtggcggcggcgacgcggggaagggcaatgcggcgggcggcggcggcggagggcgctcggcgacgacggccgggtcccgggcggtgagcgcgctgtgcctgctgctctccgtgggctcggcggctgcctgcctgctgctgggtgtccaggcggccgcgctgcagggccgggtggcggcgctcgaggaggagcgggagctgctgcggcgcgcggggccgccaggcgccctggacgcctgggccgagccgcacctggagcgcctgctgcgggagaagttggacggactagcgaagatccggactgctcgggaagctccatccgaatgtgtctgccccccagggccccctggacggcgcggcaagcctgggagaagaggcgaccctggtcctccagggcaatcaggacgagatggctacccgggacccctgggtttggatggcaagcccggacttccaggcccgaaaggggaaaagggtgcaccaggagactttggcccccggggagaccaaggacaagatggagctgctgggcctccggggccccctggacctcctggggcccggggccctcctggcgacactgggaaagatggccccaggggagcacaaggcccagcgggccccaaaggagagcccggacaagacggcgagatgggcccaaagggacccccagggcccaagggtgagcctggagtacctggaaagaagggcgacgatgggacaccaagccagcctggaccaccagggcccaagggcgagccagggagcatggggcctcggggagagaacggtgtggacggtgccccaggaccgaagggggagcctggccaccgaggcacggatggagctgcagggccccggggtgccccaggcctcaagggcgagcagggagacacagtggtgatcgactatgatggcaggatcttggatgccctcaaggggcctcccggaccacaggggcccccagggccaccagggatccctggagccaagggcgagcttggattgcccggtgccccaggaatcgatggagagaagggccccaaaggacagaaaggagacccaggagagcctgggccagcaggactcaaaggggaagcaggcgagatgggcttgtccggcctcccgggcgctgacggcctcaagggggagaagggggagtcggcgtctgacagcctacaggagagcctggctcagctcatagtggagccagggccccctggcccccctggccccccaggcccgatgggcctccagggaatccagggtcccaagggcttggatggagcaaagggagagaagggtgcgtcgggtgagagaggccccagcggcctgcctgggccagttggcccaccgggccttattgggctgccaggaaccaaaggagagaagggcagacccggggagccaggactagatggtttccctggaccccgaggagagaaaggtgatcggagcgagcgtggagagaagggagaacgaggggtccccggccggaaaggagtgaagggccagaagggcgagccgggaccaccaggcctggaccagccgtgtcccgtgggccccgacgggctgcctgtgcctggctgctggcataagtgacccacaggcccagctcacacctgtacagatccgtgtggacatttttaatttttgtaaaaacaaaacagtaatatattgatcttttttcatggaatgcgctacctgtggccttttaacattcaagagtatgcccacccagccccaaagccaccggcatgtgaagctgccggaaagtggacaggccagaccagggagatgtgtacctgaggggcacccttgggcctgggctttcccaggaaggagatgaaggtagaagcacctggctcgggcaaggctagaaagatgctacgttgggccttcagtcacctgatcagcagagagactctcagctgtggtactgccctgtaagaacctgcccccgcaaaactctggagtccctgggacacaccctatccaagaagacccaggggtggaacagcggctgctgttgctcctggcctcatcagcctccaaactcaaccacaaccagctgcctctgcagttggacaagacttggcccccggacaagactcgcccagcacttgcggctgggcccggggagcagtgagtggaaatcccccacgagggtctagctctaccacattcaggaggcctcaggaggccagcctgccatgagagcacatgtcctctggccaggagtagtggctgagctctgtgatcgctgtgatgtggacccagctccagggagcagagtgtcggggatggaggggcccagcctggactgactgtacttcctgtctctgtttccattatcacccagagagggacaagataggacatggcctggaccagggaggcaggcctcccactcagagtctgggtctcactggccccaagtctcccacccagaactctggccaaaaatggctctctaggtgggctgtgcaggcaaagcaaagctcagggctggttcccagctggcctgagcagggggcctgccaccagacccacccacgctctgacgagaggcttttccacctccagcaagtgttcccagcaaccagctccatcctggctgcttgccttccatttccgtgtagatggagatcactgtgtgtaataaaccacaagtgcgtgtcaaaaaaa

SEQ ID NO: 389 - DNA, 5084 bp, Homo sapiens
ctctgggctgctcgggcgccaccactactgtccccatcccgccccgccagctgggccaaagggtgacttgactcacgacgctgccaccagcccacggcttgcccgaggcgtataaaggctgccagggccgcaggctgccaagccctgccctgcccaaggcgcatagagcatggcccgaggcgctgagggaggccgtggggacgcgggttggggcctgcgtggcgccctggcggccgtggcgctgctctcggcgctcaacgctgcgggcacggtgttcgcgctgtgccagtggcgcgggctgagctcggcgctgcgggctttggaggcgcagcggggccgggagcagcgcgaggacagtgccctgcgctccttcctggccgagttgagccgcgcgccgcgcggggcgtccgcaccaccccaagacccggccagctcagctcgcaacaagcgcagccacagcggcgagcccgcgccgcatatccgcgccgagagccatgacatgctgatgatgatgacctactccatggtgccgatccgagtgatggtggacctgtgcaacagcaccaagggcatctgcctcacaggaccttctggaccaccaggacctccgggagccggcgggttgccaggacacaacggattggatggacagcctggtcctcagggcccaaaaggagaaaaaggagcaaatggaaaaagaggaaaaatggggatacctggagctgcaggaaatccaggggaaaggggagaaaagggagaccatggtgaactgggcctgcagggaaatgagggcccaccagggcagaagggagaaaagggtgacaaaggagatgtgtccaacgacgtgctcctggcaggtgccaaaggtgaccaaggcccacccggtccacctgggcccccaggccctccaggtcctccagggccccctggaagcagaagagccaaaggccctcggcagccaagcatgttcaacggccagtgcccaggtgagacttgtgccataccaaatgatgataccttggttggaaaagctgatgagaaagccagtgaacaccattccccacaagcagaatccatgatcacttccattggaaacccagtgcaagtactgaaagtgacagagacatttgggacttggataagagagtctgctaacaagagtgatgaccggatttgggtgacagagcatttttcaggcatcatggttaaggaattcaaggatcagccctcacttctgaatggcagttacacgttcatccaccttccatactatttccatggctgtgggcacgttgtttacaacaactctctctactaccacaaagggggttctaataccctagtgagatttgaatttggccaggaaacatcccaaactctgaagcttgaaaatgccttgtattttgatcgaaaatacctttttgcaaattccaaaacttacttcaatctagctgtagatgaaaagggcctttggattatctatgcgtcaagtgtggacggctcgagcattcttgtagcacaactggatgagaggacattctcagtggtgcaacacgtcaataccacgtaccctaaatccaaggctggcaacgccttcattgcccgaggaatcctctatgtcacagacaccaaagatatgagggtcacatttgcctttgatttgttaggagggaaacagatcaatgcaaactttgatttaagaacttcccagtctgttcttgccatgttagcatacaacatgagagatcagcatttatattcatgggaagatggccatttaatgctttatcctgtgcagtttttgtcaactaccttaaatcagtgatgtgctgcattcggctcccttcagcaaatttcaggggttttctgggaccagttctcccccaacaggaaacttgtttttttaacgtcagccagatatttagaaaataacctcaaaagtgtttatatggtcagtgagccccgcttagtgaaatagcaacagattggaagttgaaatggctgagatttggtgatctccccacagctggctctgcaagttacctctttctccttgggccttagtttccccattggtaatctgaattggctaagatgattggggagattttctgtacctgtaggtaatttggtgattcttggtggctgctcttctcacaacttttatgtatctgcttctgtcgtttagcttttttagccacatgctgaccaaatttacctttgagttgataagtccagtggcttgagtagtgaatccctcagtgctgacttatatcttgttctttgaaaaaatgcattgactctttaagacatctaaagtatcacattatccataatttattgcttttctttgcatctgcacctgccaccacagaataaccattaccctcagctgctgattgggcagctctgagattagcaaaagccagggacagctacatgttcaggtttttttttttttttttttttcaataagctattttttttcttttcttattttaaatagagagagagtcttgctatgtttcccaggctggtcttgaactcctggggctcaagtgatcctcctgccttggcctcccaaaatgctggattacaggcatgtgtgcctggcccaggtttcttaataaaacagaatcatgatcttccaggttccccccagtttctgatcatgttgatttgtagctgtggatcatgaacactgaatcctcagatcactctgacttcttatgcttctcctgtggatccactatcaaagtactaaatgctgtgtaagtagacgttaatctggctggaaccatgggaagcactttgcagtgttcagaagagaggctccatttgtggctattatgtagaactgggccagagccagtccattgcctgtttttttaaataaggttttactgagcacagccacactcatttgtttatgcagtacggcctgacattgcttttgctctgcaacagcagagtcgagtcattgcaacaaagagcatatggccccacagtgcctaaaatattgaccagctacccctttatggaaaaagattgctgactcctgataaagaatataaagtgagcctgattcttgaaaaaatcagaaccagagcctgttttgttttgttctaaactaagaagccgcataggatgtgacttgcgttttgagtagaggggaaggctgataacggcgtaagatgaagtggccctccacaaaggctggttaggggacagttctttctctaacatagttttaaaggatgtgatctggtccccttggatgccaggagagaatccagttgaacttgctcctaaatgctcttaaatatgcatattttctgccaactcacttctttaaacatctttcagcccagcgctgcggccccgggaagggccactgcgaatagagaggaagctggaaaagttcctggggctctgcagccaggaaggggaaccagggcaaatcttatgtaaagatttttcagcaacttgtcccaatttgtgtgtattctgaaactttctctttgggaccaaattcattctcaatggccctgagttcaatatattattaacagcagtattttaaaacttagggttgaactgggcatggtggcacataactgcaatcccagctactttggaggcagggatgggaggatcacttgaggccaggatctcaggaccagcctagagagatcccatctctaaaaaataaaatataagaaaataaaacttaggggatatacagatttaaatattcaaatctccctgctcccctgaaagtccccaggcagctgtcaatgacttgtttgttgtgttctcaatatgatggctatttgaaacttcacctacttttcattagattggttgtaccatgtcaccttagcttttaaaaatactcttttcagattcacgttctctaacaaagagtctcatgttcaagatcaatatgtctaataagtgctggtgtccttttaaagtatttaaatatatatgttgctgttgctgaatacaggagaccaggttaggaatatagtttcataataatagtacatacaatactaattgtatataaggtagcaaccaaaagaggttgttaattagcacatattccttttagaaaaatgtttcagaaacctcagtcttgatatctgagctatctgggctcccttacttgtgagtaagggatcatgctcaccactggagaagcttacaccgggactttttttcttttttcttttttttttgctatgacagagtaatgctaacgtaaggacaactgagtttgatcagtgtttaatcgcagtgggtaatcttatctgattgtctttaaaagtgaaaaggattaagattttattctttcttgtaaacattacttgattttttaaagaagttttgggctcactgctaaaatagagtatacaactgaatgtttttaagtcaagatactgttttaggagtttaccctctcatttataaccaaagttgctctaaaacactttccaaatatctgcacttctgatgtcagaatcaaaccagataattctctaattcttctttaatctaaagtagatagcttcccactggaaagtaaacaaaaccatccctcccaacctcaaagctaggccacactctatttcaaggcattttctttcagctgataaggtgtcctcctgaagccaagtaggtggttctggtctccaagtatcgttaagcacaggtgctatgacagaaaaagttctggggtggaagttttaagatgaggagttctgatcttaggcatcttaacagtcacaaggtgaaaagtcaaatgaaacagtacaattcttgatgagtgaggtgtcatcttccaaccacacagaggacgttttggctatgatcatctgatggcaagtgaaggagaaatgagtgatagggctttgcgttttcatccagatgctgtggccctgtgtttcacagcattaagagccataatttccaacctgcacagatcctgaacaacaaatgaataacgatgaatgtctttttggttgtaatttaacaagtcaaataaaataatcattgctgagcacaatcacatgttgaaa

SEQ ID NO: 390 - DNA, 5639 bp, Homo sapiens
agaagggagacagtggcggtcgcggcggggccgatccgagagttccccttagagaacggagctcacgggcggggaggcctcacctgctagtaggacgcagaaagacagaaggcgaaggagaccccgacttcccgggtcagccccagagccaccccctgccgtagccatcttgcctctctgctgagcggaagcccccgttcggctcctgtctgttagcggcctctctaggctaccactgacaccgtctctgtggcccggagcctaagagaccggaagttcgtgtttccaggcgcttccggaaaccgcgggagagggtcgctgacgtggaggcgtccgaagggcagcagggtgtgtcggggctcggattaagacatcggagtcggagacctgagagatgttaaccaaattcgagaccaagagcgcgcgggtcaaagggctcagctttcaccccaaaagaccttggatcctgactagtttacataatggggtcatccagttatgggactatcggatgtgcactctcattgacaagtttgatgaacatgatggtccagtgcgaggcattgacttccataagcagcagccactgttcgtctctggaggagatgactataagattaaggtttggaattacaagcttcggcgctgtcttttcacattgcttgggcacttagattatattcgcaccacgttttttcatcatgaatatccctggattctgagtgcctccgatgatcagaccatccgagtgtggaactggcaatctagaacctgtgtttgtgtgttaacagggcacaaccattatgtgatgtgtgctcagttccaccccacagaagacttggtagtatcagccagcctggaccagactgtgcgcgtttgggatatttctggtctgaggaaaaaaaacctgtcccctggtgcggtggaatcggatgtgagaggaataactggggttgatctatttggaactacagatgcagtggtgaagcatgtactagagggtcacgatcgtggagtaaactgggctgccttccaccccactatgccccttattgtatctggggcagatgatcgtcaagtgaagatctggcgcatgaatgaatcaaaggcatgggaggttgatacctgccggggccattacaacaatgtatcttgtgccgtcttccaccctcgccaagagttgatcctcagcaattctgaggacaagagtattcgagtctgggatatgtctaagcggactggggttcagactttccgcagagaccatgatcgtttctgggtcctagctgctcaccctaaccttaacctctttgcagcaggccatgatggtggtatgattgtgtttaagctggaacgggaacggccagcctatgctgttcatggcaatatgctacactatgtcaaggaccgattcttacgacagctggatttcaacagctccaaagatgtagctgtgatgcagttgcggagtggttccaagtttccagtattcaatatgtcatacaatccagcagaaaatgcagtcctgctttgtacaagagctagcaatctagagaatagtacctatgacctgtacaccatccctaaagatgctgactcccagaatcctgatgcgcctgaagggaaacgatcctcaggcctgacagccgtttgggtcgctcgaaatcggtttgctgtcctagatcggatgcattcgcttctgatcaagaatctgaagaatgagatcaccaaaaaggtacaggtgcccaactgtgatgagatcttctatgctggcacaggcaatctcctgcttcgagatgcggactctatcacactctttgacgtacagcagaagcggactctggcatctgtgaagatttctaaagtgaaatacgttatctggtcagcagacatgtcacatgtagcactactagccaaacacgccattgtgatctgtaaccgcaaactggatgctttatgtaacattcatgagaacattcgtgtcaagagtggggcctgggatgagagtggggtatttatctataccacaagcaaccacatcaaatatgctgtcaccactggggaccacgggatcattcgaactctggatttacccatctatgtcacacgggtgaagggcaacaatgtatactgcctagacagggagtgtcgtccccgggtactcaccattgatcccactgagttcaaattcaagctggccctgatcaacagaaaatatgatgaggtactgcacatggtgaggaatgccaaactagttggccagtctattattgcttatctccagaagaagggctatcctgaagtggcactgcattttgtcaaggatgagaaaactcgctttagtctggcactggagtgtggaaacattgagattgctctggaagcagccaaagcactggatgacaagaactgctgggaaaagctgggagaagtggccctgctgcaggggaaccaccagattgtggaaatgtgctatcagcgtaccaaaaactttgacaaactttccttcctgtatcttatcactggcaacttagaaaaacttcgcaagatgatgaagattgctgagatcagaaaggacatgagtggccactatcagaatgccctatacctgggtgatgtgtcagagcgtgtgcggatcctgaagaactgtggacagaagtccctggcctatctcacagctgctacccatggcttagatgaagaagctgagagcctaaaggagacatttgacccagagaaggagacaatcccagacattgaccctaatgccaagctgctccagccacctgcacctatcatgccattggataccaattggcctttattgactgtatccaaaggattttttgaaggcaccattgccagcaaagggaagggaggagcactggctgctgacattgacattgacactgttggtacagagggctggggagaggatgcagagctgcagttggatgaagatgggtttgtggaggctacagaaggtttgggggatgatgctcttggcaagggacaggaagaaggaggtggctgggatgtagaagaagatctggagctccctcctgagctggatatatcccctggggcagctggtggggctgaagatggtttctttgtgcccccaaccaagggaacaagtccaactcagatctggtgtaataactctcagcttccagttgatcacatcctggcaggctctttcgaaacagccatgcggctccttcatgaccaagtaggggtaatccagtttggcccctacaagcaactgttcctacagacatacgcccgaggccgcacaacctatcaggctctgccctgcctaccctccatgtatggctatcctaatcgcaactggaaggatgcagggctgaagaatggtgtaccagctgtgggcctgaagcttaatgacctcatccaacggttgcagctgtgctaccagctcaccacagttggcaaatttgaggaggctgtggaaaaattccgttccatccttctcagtgtgccacttcttgttgtggacaataaacaagagattgcagaggcccagcagctcatcaccatttgccgtgagtacattgtgggtttgtccgtggagacagaaaggaagaagctgcccaaagagactctagaacagcagaagcgcatctgtgagatggcagcctatttcacccactcaaacctgcagcctgtgcacatgatcctggtgctgcgtacagccctcaatctgttcttcaagctcaagaacttcaagacagctgccacctttgctcggcgcctactagaactcgggcccaagcctgaggtggcccaacagacccgaaaaatcctgtctgcctgtgagaagaatcccacagatgcctaccagctcaattatgacatgcacaacccctttgacatttgtgctgcatcatatcggcccatctaccgtggaaagccagtagaaaagtgtccactcagtggggcctgctattcccctgagttcaaaggtcaaatctgcagggtcaccacagtgacagagattggcaaagatgtgattggtttaaggatcagtcctctgcagtttcgctaaggccccctttgtgtgcatgggtcagtcaccatatgttccccccagagaatgtgtctatatcctccttctaacagcaccttccccctgcagctactcttcagatctggctctctgtaccctaaaacctagtatctttttctcttctatggaaaatccgaaggtctaaacttgacttttttgaggtcttctcaacttgactacagttgtgctcataattgtccttgcctttccagcttaattattttaaggaacaaatgaaaactctgggctgggtggagtggctcatacctgtaatcccagcactttgggaggctacggtgggcagatcatctgaggccaggagttcgagacctgcctggccaacatggcaacaccccgtctctaataaaaatataaaaattagcctggcatggtagcatgcgcctatagtcccagctgctcaggaggctgaggcatgagaatcgcttgaacctaggaggtggaggttgcattcaactgagatcataccacttcattccagcctgggtgacagagcaagactctgtctcaaaaaaaaaaaaaaggaaaactctgtgatggacatttgtttagtaaatcccttcagtatttatccctcctttccccacagcagctttctttcctgtcaactagaaaggagcaggatgtaataaatacattttggtgtgactaggccacaccaactcttaatcatctcccattttccttagacatttaaatttcaaggcaggtaccctctgtgtactcagaaatttgaagaagttatttggttttccaaaatgcacactgcgggttattgatttgttctttacaactattgttctcatatttctcacactaaataaatctctatgagagcttcttgacttggccatttatttcttggacactctcatgttcttgttcacccatgcaggcaccccaccaaagtacatatcttccttccagtaataatttttaattacaaaataaacatccactattggaaaaaaaaaaaaaaagctagccgggcatggtggtgggtgcctgtaatcccagctactctggaggctgaggcagaggattgcttgaacccgggaggcggaggttgcagtaagctgagatcgcgccaccgcactccagcctgggcgacagagtgagactccatctcaaaaaaaaagaaagaaaaaaagaagcacatgtttttcatagggtatatatgaggacctaaactgctgtgaaaatgatagaaagcaagtagctcccttattctgtttttgattgcagccttttatcttttgctaattatagcaatatttattgagcacctgccatgtgactgtcactgttctagatattttacatgtaatatacagataaaagaatagtactttatatatattacaatgatacaatgattacattaacaatacaatattttgcttgtcatatgctaagaataattgggtagagtgacattactgtgccttcgattaaaataagtacttttttgcgtgttaaattcatgttttcaataaataataaatgcatatagttgaaaaatcagtaaata

SEQ ID NO: 391 - DNA, 3528 bp, Homo sapiens
agccaaggactctggagccgccgccgccgctgctgcggttcatatccggagtagacggagccgcagtagacggatccgcggctgcaccaaaccactgcccctcggagcctggtagtgggccacaagcccccagtcccagaggcgtggtgggtcgggcagagtcggaagaactggctttctagctggaagatgcggaaggggagcgactaggccgcttgcgtctgggcctggcagaagggaccggattttctggcatccttaaatcttgtgtcaaggattggttataatataaccagaaaccatgacggcggctgagaacgtatgctacacgttaattaacgtgccaatggattcagaaccaccatctgaaattagcttaaaaaatgatctagaaaaaggagatgtaaagtcaaagactgaagctttgaagaaagtaatcattatgattctgaatggtgaaaaacttcctggacttctgatgaccatcattcgttttgtgctacctcttcaggatcacactatcaagaaattacttctggtattttgggaaattgttcctaaaacaactccagatgggagacttttacatgagatgatccttgtatgtgatgcatacagaaaggatcttcaacatcctaatgaatttattcgaggatctactcttcgttttctttgcaaattgaaagaagcagaattgctagaacctttaatgccagctattcgtgcatgtttggagcatcgacacagctatgttagaagaaatgctgttttggccatctataccatctatagaaattttgaacatcttatacctgatgctcctgaactgatacatgattttctggtgaatgagaaggatgcaagttgcaaaaggaatgcatttatgatgctaattcatgcagatcaggatcgagctttggattacttaagtacttgcattgatcaagttcaaacatttggagacattctgcagctggttattgttgaactgatttataaggtctgtcatgctaatccatcagaaagagctcgttttattcgctgcatctataacttattacagtcatccagccctgctgtaaaatatgaagctgctgggacattagtgacactctctagtgcaccaactgcaatcaaggctgctgctcagtgttacattgatttaattattaaggagagcgacaacaatgtaaaactcatagttttggatcgcttgatagaattaaaagagcatcctgctcatgaacgagtactacaggatctggttatggatatcctaagagtattgagcacaccagacttagaagtacgaaagaaaactctgcagttagcactggatcttgtctcttctagaaatgttgaagagctggttattgtcctgaagaaggaagtgataaaaacaaataatgtgtctgagcatgaagatactgacaaatacagacaactcctagtgcgaacattgcattcctgttctgtccgatttccagatatggctgcaaatgttattcctgtgttaatggaatttctcagtgacaacaacgaagcagcagctgctgatgtcttggagtttgttcgtgaagccattcagcgctttgataacctgagaatgcttattgttgagaagatgcttgaagtctttcatgctattaaatctgtcaagatttaccgaggagcattatggatcctgggagaatactgtagtaccaaggaagacattcagagtgtgatgactgagatccgcaggtcccttggagagatcccaattgtagagtcagaaataaagaaagaagctggtgaattaaaacctgaagaagaaataactgtagggccagttcagaaattggttactgaaatgggtacctatgcaactcagagtgcccttagcagttctagacccaccaagaaagaggaagacagacctcccttgagaggattccttctggatggagatttctttgttgctgcctcccttgccacaactctgaccaagattgcattgcgctatgtagctttggttcaggagaagaaaaagcaaaattcttttgttgctgaggctatgttgctcatggctactatcctgcatttgggaaaatcctctcttcctaagaagccaattactgatgatgatgtggatcgaatttccctgtgcctcaaggtcttgtctgaatgttcacctttaatgaatgacattttcaataaggaatgcagacagtccctttctcacatgttatctgctaaactagaagaagagaaattatcccaaaagaaagaatctgaaaagaggaatgtgacagtacagcctgatgaccccatttccttcatgcaactaactgctaagaatgaaatgaactgcaaggaagatcagtttcagctgagtttactggcagcaatgggtaacacacagaggaaagaggcagcagatcccctagcatctaaacttaacaaggtcacccaattgacaggtttctcagatcctgtatatgcagaagcttacgttcatgtcaaccaatatgatattgtcctggatgtacttgttgtgaaccaaaccagtgatactttgcagaattgcacattagaactagctacactaggggatctgaaacttgtggaaaagccgtctcctttgactcttgctcctcatgacttcgcaaatattaaagctaacgtcaaagtagcatcaacagaaaatggaataatttttggtaatatagtttatgatgtctctggagcagcaagtgacagaaattgtgtggttctcagtgatattcacatcgacatcatggactatatccagcctgcaacttgcactgatgcagaattccgtcagatgtgggccgaatttgaatgggaaaacaaagtgacagttaacaccaacatggttgatttaaatgactacttacagcacatattaaagtcaaccaatatgaaatgcctgactccagaaaaggccctttctggttactgtggctttatggcagccaacctttatgctcgttccatatttggtgaagatgcacttgcaaatgtcagcattgagaagccaattcaccagggaccagatgctgctgttaccggccatataagaattcgtgcaaagagccagggaatggccttaagtcttggagataaaatcaacttgtcacagaagaaaactagtatataaaaataaacaaaaagtccttgaagctttacagttaatttaggtatgggcttactggactccaacatcttttgtactctttcatgcttatatagaatctgagttcatgctgaatacttttcagccaataatttatagcctttcccttaaatcaagattgagtttaaaattatagtttgtcttttgtcttaacagttctgaatgctgtcctcaaagtatataatgtttcatgtaccaagacccttttcacagtacaataaacagatctattcataaatttttgttattttataaataaatgattacataattttagttataaaaaaaaaaaaaaaaaaaaagaaaaaaaaaaaaaaaaaaaaaaaaaa

SEQ ID NO: 392 - DNA, 3067 bp, Homo sapiens
ggtgggtttatctcaaggcctgagtagccggtaacaaacgagggttcccgggattggaccgacgcaccatgcctctgcgacttgatatcaaaagaaagctaactgctagatctgatcgagttaagagtgtggatctgcatcctacagagccatggatgttggcaagtctttacaatggcagtgtgtgtgtttggaatcatgaaacacagacactggtgaagacatttgaagtatgtgatcttcctgttcgagctgcaaagtttgttgcaaggaagaattgggttgtgacaggagcggatgacatgcagattagagtgttcaattacaatactctggagagagttcatatgtttgaagcacactcagactacattcgctgtattgctgttcatccaacccagcctttcattctaactagcagtgatgacatgcttattaagctctgggactgggataaaaaatggtcttgctcacaagtgtttgaaggacacacccattatgttatgcagattgtgatcaaccccaaagataacaatcagtttgccagtgcctctttggacaggactatcaaggtgtggcagttgggctcttcgtcaccaaacttcactttggaaggacatgagaaaggcgtgaattgcattgattactacagtggtggggacaagccatacctcatttcaggtgcagatgaccgtcttgttaaaatatgggattatcagaataaaacatgtgtgcagacactggaaggacatgcccaaaatgtgtcttgtgccagctttcatcctgagttgccaatcattatcacaggttcagaagatggaacagtacgtatttggcattcaagcacctaccggcttgagagcacactgaattatggaatggagagggtatggtgcgtggccagtctaagagggtcaaacaatgtcgctttgggctatgatgaagggagcatcattgttaagcttggtcgggaggaacctgccatgtccatggatgccaatggaaagataatttgggccaagcattcagaagtccagcaggccaacctaaaagcaatgggagatgctgaaattaaagatggtgaaagattgccactggcagtaaaggatatgggcagttgtgaaatataccctcagactattcagcacaatcctaatgggcggtttgtggtggtgtgtggtgatggggagtatatcatctacacagcaatggcattgagaaacaagagctttggatctgctcaggagtttgcatgggcccacgattcttcagagtatgcaataagagagagcaacagcattgtaaagatatttaagaactttaaggaaaaaaaatcatttaaaccagattttggagcagaaagtatctacggcggcttcttattgggagtcagatctgtaaatggcttagccttctatgactgggacaatacagaactcatacgaagaattgaaattcagcccaaacatattttctggtctgactctggagagctagtctgtattgctactgaggaatcattttttatccttaagtatctgtcagaaaaagtcttggctgcacaggaaacacatgagggagttactgaagatggcattgaagatgcctttgaggttcttggtgagattcaggaaattgtgaaaacagggctttgggtaggcgattgcttcatttacacaagttctgtgaacagattaaattattatgttggaggagaaatagtcaccattgcccacttggacaggacgatgtatctcctaggctacattcctaaagacaacaggctttatctgggggataaagaattgaacatcattagctattccctgctggtttcagtcctggaataccagacagctgtcatgcggagggactttagcatggctgataaggtccttcctaccattccaaaagaacagaggaccagagttgcacactttttggaaaagcagggcttcaagcagcaagctcttacagtatccacagatcctgagcatcgttttgagcttgctcttcagcttggagagttaaaaattgcataccagttagcagtggaagcagagtcagaacagaagtggaaacaacttgctgaacttgccattagtaaatgtcagtttggcctagcccaggagtgcctgcatcatgcacaggattatgggggcctgctgcttttggccactgcctctggaaatgctaatatggtgaacaagctagcagagggtgcggagagagatggcaaaaataatgtggcattcatgagctactttttacagggcaaggttgatgcctgcctagagctcttaattagaactggacggctgccagaagctgccttcttggcccgaacttacttacccagtcaggtttcaagggtagtgaaactctggagagagaatctctcaaaagtcaatcagaaagcagcagaatcccttgctgacccaacagagtatgaaaacctgttccctggattaaaagaagcctttgttgttgaagaatgggtgaaggaaacacatgctgatctgtggccagccaaacaatacccacttgtcacgccaaatgaagagagaaatgtcatggaagagggaaaagactttcagccctcaagatctacagctcaacaggaacttgatgggaaacctgcttctcctactccggttattgtggcctcccacacagccaacaaagaagaaaagagtttactcgaactagaagtagatttggataatttggaattagaagatattgacacaacagatatcaatctggatgaagatattttggatgattgactgtaatgctttccatttacctgactaaacagatcattattatatataggtattgattgctaccctgaccacagtgctttggactatgagaaacttcttagatttttatatgtaaatgctgtggaccactgggagcacaatgcccacatcatcttaagaagagtttatgtgcagcatttaaatcactgtgttttccttgttaactaaaacagacatgggctttgatttttttcatactattagaccatatctcataaaaccttttgaattaaaaaaaa

SEQ ID NO: 393 - DNA, 3114 bp, Homo sapiens
ggggcccggaagtggtccctgtagaaccactgtggcaccgctactccgtgccgcgcccgtcgagcattgcgttgctgcattgcgccccaccgactccactatgttgaagaaattcgacaagaaggatgaggagtcaggtggaggctccaacccattccagcaccttgagaagagtgcggtactccaggaggcccgtgtatttaatgaaactcccatcaaccctcggaaatgtgcccacatcctcaccaagattctttatctcataaaccagggggagcacctggggaccacggaagcgaccgaggccttctttgccatgaccaagctctttcagtccaatgatcccacactccgtcggatgtgctacttgaccatcaaggagatgtcttgcattgcagaggatgtcatcattgtcaccagcagcctaacaaaagacatgactgggaaagaagacaactaccggggcccggccgtgcgagccctctgccagatcactgatagcaccatgctgcaggctattgagcgctacatgaaacaagccattgtggacaaggtgcccagtgtctccagctctgccctcgtgtcttccttgcacctgctgaagtgcagctttgacgtggtcaagcgctgggtgaatgaggctcaggaggcagcatccagtgataacatcatggtccagtaccacgcactagggctcctgtaccatgtgcgtaagaatgaccgcctagccgtcaataagatgatcagcaaggtcacacggcatggccttaagtctccctttgcctactgcatgatgatccgggtggccagcaagcagctggaagaggaggatggcagccgtgacagcccactgtttgacttcatcgagagctgcttgcgcaacaagcacgagatggtggtgtatgaagccgcctcggccatcgtcaatctgccaggctgcagtgccaaagagctggccccggctgtgtcagtgctccagcttttctgcagctcacccaaggctgctctccgctatgctgctgttcgtaccctcaataaggttgccatgaagcatccgtcagctgtgacagcttgtaatctggatctggagaacctggtcacagattcaaaccgcagcattgccacgctggccatcaccaccctccttaagacgggcagcgagagcagcatcgaccgcctcatgaagcagatctcctccttcatgtcagaaatctcggatgaattcaaggtggtggttgtccaggccatcagtgccctgtgtcagaaatatcctcgcaaacacgccgtccttatgaacttcctgttcaccatgctgcgggaagagggtggctttgagtataagcgcgctatcgtggactgcatcatcagcatcattgaagagaactcagagagcaaggagacagggctgtcacatctgtgcgagttcatcgaggactgcgagttcacagtgctggccacccgtattctacatctcctgggccaggaggggcccaagaccaccaatccctcaaagtacatccgcttcatctataaccgagtggtcttggagcatgaggaggtccgggcaggtgctgtgagtgctctggcgaagtttggagcccagaatgaagagatgttacccagtatcttggtgttgctgaagaggtgtgtgatggatgatgacaatgaagtaagggaccgagccaccttctacctaaatgtcctggagcagaagcagaaggcccttaatgcaggctatatcctaaatggtctgactgtgtccatccctggtctggagagggctctgcagcagtacactctagaaccatcagaaaaaccttttgacctcaagtctgtgcccctggccacggcgcccatggcagagcagagaacagaaagtacccccatcacagcagtcaaacagcctgagaaagtggcagctaccaggcaggagatcttccaggagcagttggcagcagtgccagagttccgcggtcttgggcccctcttcaagtcctcgcctgagcccgtggccctcaccgagtcagagacggagtatgtcatccgctgcaccaaacacaccttcaccaaccacatggtttttcagtttgactgcacaaacacactcaatgaccagaccttggagaatgtcacagtgcagatggagcccactgaggcctatgaggtgctctgttacgtgcctgcccggagcctgccctacaaccagcccgggacctgctacacactggtggcactgcccaaagaagaccccacagctgtggcctgcacattcagctgcatgatgaagttcactgtcaaggactgtgatcccaccactggggagactgatgacgaaggctatgaggatgagtatgtgctggaagatctggaagttactgtagctgatcacattcaaaaggtcatgaaactgaacttcgaagcagcctgggatgaggtaggggatgaatttgagaaggaggaaacgttcaccttgtctaccatcaagacacttgaagaggctgtgggtaatattgtgaagttcttgggaatgcacccttgtgagaggtcagacaaagtgccggataacaagaacacccacacgttgctcctggctggtgtgttccggggtggtcatgacatcctggtgcgctcccggctgctgcttttggacacagtgacaatgcaggtgacagccagaagtttggaggagctgccagtagacatcatcttggcatctgtgggataagaggccagcctgcataggacctcatacccttccccaacactacctggaagttgtgccttcctcatgaaactggcagaaaccccttcccaagcttctgtattgaaaaacaattaggaatcattgcagatttttttttattctgctcccacctcccacccgggactacttgctggtgactttttttttttttttttttaaataggggatgattttagcttgtcctaaatcttgctgtccacccttccaggaaagggacattgtaaatgaataaaacattctcaactcctcttgaatctatcccccaagaaaccatcttatccctgtaataaatcagcatgtatttattgaaaaaaaaaaaaaaaaaaaaaaaaaaaaaaaaaaaaaaaaaa

SEQ ID NO: 394 - DNA, 1868 bp, Homo sapiens
agcgactcttcagggaggtggcaggaaaggcttggaacagctgccggaggtgacggagcggcggccccgcccggtgcgctggaggtcgaagcttccagctctggacatcctgagcccaagtcccccacactcagtgcagtgatgagtgcggaagtgaaggtgacagggcagaaccaggagcaatttctgctcctagccaagtcggccaagggggcagcgctggccacactcatccatcaggtgctggaggcccctggtgtctacgtgtttggagaactgctggacatgcccaatgttagagagctggctgagagtgactttgcctctaccttccggctgctcacagtgtttgcttatgggacatacgctgactacttagctgaagcccggaatcttcctccactaacagaggctcagaagaataagcttcgacacctctcagttgtcaccctggctgctaaagtaaagtgtatcccatatgcagtgttgctggaggctcttgccctgcgtaatgtgcggcagctggaagaccttgtgattgaggctgtgtatgctgacgtgcttcgtggctccctggaccagcgcaaccagcggctcgaggttgactacagcatcgggcgggacatccagcgccaggacctcagtgccattgcccgaaccctgcaggaatggtgtgtgggctgtgaggtcgtgctgtcaggcattgaggagcaggtgagccgtgccaaccaacacaaggagcagcagctgggcctgaagcagcagattgagagtgaggttgccaaccttaaaaaaaccattaaagttacgacggcagcagcagccgcagccacatctcaggaccctgagcaacacctgactgagctgagggaaccagctcctggcaccaaccagcgccagcccagcaagaaagcctcaaagggcaaggggctccgagggagcgccaagatttggtccaagtcgaattgaaagaactgtcgtttcctccctggggatgtggggtcccagctgcctgcctgcctcttaggagtcctcagagagccttctgtgcccctggccagctgataatcctaggttcatgacccttcacctcccctaaccccaaacatagatcacaccttctctagggaggagtcaaatgtaggtcatgtttttgttggtactttctgttttttgtgacttcatgtgttccattgctccccgctgccatgctctctcccttgtttccttaagagctcagcatctgtccctgttcattacatgtcattgagtaggtgggtagccctgatgggggtcgctctgtctggagcataacccacaggcgttttttctgccaccccatccctgcatgcctgatccccagttcctataccctacccctgacctattgagcagcctctgaagagccatagggcccccacctttactcacaccctgagaattctgggagccagtctgccatgccaggagtcactggacatgttcatcctagaatcctgtcacactacagtcatttcttttcctctctctggcccttgggtcctgggaatgctgctgcttcaaccccagagcctaagaatggcagccgtttcttaacatgttgagagatgattctttcttggccctggccatctcgggaagcttgatggcaatcctggaagggtttaatctccttttgtgagtttggtggggaagggaagggtatatagattgtattaaaaaaaaaaaggtatatatgcatatatctatatataatatgacgcagaaataaatctatgagaaatctatctacaaaaaaaaaaaaaaaaaaaaaaaaaaaaaaaaaaaaaaaaaaaaaaaaaaaaaaaaaaaaaaaaaaaaaaaaaaaa

SEQ ID NO: 395 - DNA, 1900 bp, Homo sapiens
ttttgcggctccacgtcggcaccagctgcggggcaagatggaggcgctgattttggaaccttccctgtatactgtcaaagccatcctgattctggacaatgatggagatcgactttttgccaagtactatgacgacacctaccccagtgtcaaggagcaaaaggcctttgagaagaacattttcaacaagacccatcggactgacagtgaaattgccctcttggaaggcctgacagtggtatacaaaagcagtatagatctctatttctatgtgattggcagctcctatgaaaatgagctgatgcttatggctgttctgaactgtctcttcgactcattgagccagatgctgaggaaaaatgtagaaaagcgagcactgctggagaacatggaggggctgttcttggctgtggatgaaattgtagatggaggggtgatcctagagagtgatccccagcaggtggtacaccgggtggcattaaggggtgaagatgtcccccttacggagcagaccgtgtctcaggtgctgcagtcagccaaagaacagatcaagtggtcactccttcggtgaagacctcactgttcctggctcttcatcctcttcaaaaaatttgcatgtctgctgtgaattttcatctagttccccaatcgatgctctcagggtcatctcggggatcacagggatccttaaatctccattctgtttgtggttgccccctcaacctcccctacacccttcctattctttttcattcttcttgcagttctgggagtaaagctcccagcatatttagataatagggcaggggaagcaccctctttctttctagactggattatgctcacatgctcccttgccctgacatttttgtaaattctgtgccctttgctgtagctacacttcagattaaagtaggagaaagaatgtgctgagtgttttcctccctttgcctctacctggccctcatcccaacagcccagcaaggggagagagaaagagaattcttttctatagaacgagtgggggcggggatgggtagggatttatccaatctaagccctaaccccacttagtgacctcagtgttttcttccattccttcttactgccctgtcctctgccttggaagaggctttgggaatagttcatagggaagggacaacatggaagaaacagcgatttaaattgtattgaacagggcatataaaatgcattctgtaccctgatctggcatatagcttcaaaactgcagtggcgagtgtccatctcttagttagctaccttaactgtccacccttactacctgtgggatcgttgcctggtttgtcttctctgtgtcctggagcaaagccagttcctaaaactaaaactccattctagtcttgggaagaaaagtttctactcagaactggggaaggagtggaacttatgacttgggcctctaggctgtctctgtcccctcagctccccgacatgcatttactctctgccgtgggtctgcagtcgctgcaacctaccctctctctgcctcagccttacacccaagcagtaggtctgtgctctccctgtctctaggtcgctgagagaggtgcttttcttcataaaacctttggggtttggatttccccaggaagatggagaatggaatactcactcttgggtctaatctttccccttgacccagaacttcctccccacaaaaatgcctttaaaaaccttcctgagacttaagcattctgccccacttactaactgccagttctccagcactgaggtggggcagataacggggcatatttaagggggcatctttgtgtaaaagatgcatggagtcaggagaaaaccaccttcataaactgctctgtgcaaagaggaataaaacattttttccaaactgaaa

SEQ ID NO: 396 - DNA, 3531 bp, Homo sapiens
gtgaccgcggcattgggtcccgggtggggccgaggcagcgggagtcgcggttgctcagcgtgcacctgagacccgacgcccggggtcctcgaagacgcgtccgccgccgtgcccgtcgccatgaaccgcttcagggtgtccaagttccggcacaccgaggctcggccgccccgccgcgagtcctggatcagtgacattcgagcaggaaccgccccttcatgcaggaaccacatcaaatcaagctgcagcttgatcgccttcaactccgaccgtcctggtgtactgggcattgtgcctctgcaaggccaaggagaggacaagcgacgcgtggcccacctgggctgccattcagacctagtcaccgacttggacttctcgccctttgatgacttcctcctggccacaggctcggctgacaggacggtaaaactctggcgactgccagggcctggccaggccctgccctcagcacccggggtggtgctgggccccgaggacctcccagtggaggtactgcagttccaccccacctctgacggcattctggtgagcgcagcaggcaccactgtgaaggtctgggacgcagccaagcagcagcccctgacagagctggcagcccatggggacctggtgcagagcgccgtctggagccgagatggagccctggtgggcacggcgtgcaaggacaagcagctgcggatctttgaccccagaacaaagccgcgggcctctcagagcacgcaggcccatgagaacagcagggatagccggctggcatggatgggcacctgggagcaccttgtgtctactggattcaaccagatgcgtgagcgcgaagtgaagctgtgggacacgcggttcttctccagcgccctggcctccctcaccttggacacctcgcttgggtgtctcgtgcctctgctggaccctgactctgggctcctggtcctggcaggaaagggcgagaggcagctgtactgttacgaggtggtcccgcagcagccggcgctgagcccagtgacccagtgtgtcctggagagcgtgctgcgtggggctgcccttgtgccccggcaggcgctggccgtcatgagctgcgaggtactccgcgtcctacagctgagcgacacagccatcgtgcccatcggctaccatgtgccccgcaaggctgtggagttccacgaggacctgttcccggacactgccggctgtgtgcctgccaccgacccccatagctggtgggctggggacaaccagcaggtgcagaaggtcagcctcaaccccgcctgccggccccacccgagcttcacttcctgtctggtgccccctgcggagcccctccctgacacagcccagcctgcggtgatggagacacccgtgggtgatgcagacgcaagcgagggtttctcttcccctcccagttcgctgacctcgccctccacgccctccagcctggggccctcactctccagcaccagtggcatcgggaccagccccagtttgaggtcgctgcagagcctgctgggccccagttccaagttccgccatgctcagggcactgtcctgcaccgagacagccacatcaccaacctcaaggggctcaacctcaccacacctggtgagagtgacggcttctgtgccaacaagctgcgtgtggccgtgccgctgctcagcagcgggggacaggtggctgtgcttgagctacggaagcctggccgcctgcccgacacggcactgcccacgctgcagaatggggcagctgtgactgatctggcctgggacccctttgacccccatcgcctcgctgtggctggtgaggacgccaggatccgactgtggcgggtacccgcagagggcctggaagaggtgctcaccacgccagagactgtgctcacaggccacacggagaagatctgctccctgcgcttccacccactggcagccaatgtgctggcctcgtcctcctatgacctcactgttcgcatctgggaccttcaggctggagctgatcggctgaagctgcagggccaccaagaccagatcttcagcctggcctggagtcctgatgggcagcagctggccactgtctgcaaggatgggcgtgtgcgggtctacaggccccggagtggccctgagcccctgcaggaaggcccagggcccaagggaggacgcggagctcgcattgtctgggtatgtgatggtcgctgtctgctggtgtctggctttgacagccaaagtgagcgccagctgctcctatatgaagctgaggccctggccggcggacccttggcagtgttgggcctggacgtggctccctcaaccctgctgcccagctacgacccagacactggcctggtgctcctgaccggcaagggcgacacccgtgtattcctgtacgagctgctccccgagtcccctttcttcctggagtgcaacagcttcacgtcgcctgacccccacaagggcctcgtcctcctgcctaagacggagtgcgacgtgcgggaagtggagctgatgcggtgcctgcggctgcgtcagtcctccctggagcctgtggccttccggctgccccgagtccggaaagagttcttccaggatgacgtgttcccagacacggctgtgatctgggagcctgtgctcagtgccgaggcctggctgcaaggcgctaatgggcagccctggcttctcagcctgcagcctcctgacatgagcccagtgagccaagccccccgagaggcccctgctcgtcgggccccatcctcagcgcagtacctggaagaaaagtctgaccagcaaaagaaggaggagctgctgaatgccatggtggcaaaactggggaaccgggaggacccactcccccaggactcctttgaaggcgtggacgaggacgagtgggactagcctgcgcccccgtcacctccacctcacctgtgctgccacttcctagtgcacacctcacggctcatcctcaagctggaagatacctctctggccccggcacatgtcacccctgcactcctgccttcccgtgggcacttccacatcctctgggcctctggcagttcccagggactgttttcacctctgctgtctctggggtcagctgctgctcatcagctgcccgctagcatgtggccaggggtgcagggtggcggggggtcagcagcatgtccctgggcaggccctgggcaccctgtctcccctggtctcactgctgacctgggctggtcccagcctggattggcctcatccaggatctttggtcaccccacgctgccccatcttgcctgctgttccagttctggtcaagggccttgggggctggccccccaccaggccttctagagcagcaccagtctcagggccctgggaccagctgccctacttcccaggtttgtagccaggagaagggggcatcacagagctgatggtccaataaggggggtgtgagccccgcagggactggcccgcacctgccttggatgttttcagcaattaaacttttttaagctggccaaaaaaaaaaaaaaaaaa

SEQ ID NO: 397 - DNA, 1850 bp, Homo sapiens
cgcgctcgcagctcgcaggcgccgcgtagccgtcgccaccgccgccagcccgtgcgccctcggcgcgtacccgccgcgctcccatccccgccgccggccaggggcgcgctcggccgccccggacagtgtcccgctgcggctccgcggcgatggccaccaagatcgacaaagaggcttgccgggcggcgtacaacctggtgcgcgacgacggctcggccgtcatctgggtgacttttaaatatgacggctccaccatcgtccccggcgagcagggagcggagtaccagcacttcatccagcagtgcacagatgacgtccggttgtttgccttcgtgcgcttcaccaccggggatgccatgagcaagaggtccaagtttgccctcatcacgtggatcggtgagaacgtcagcgggctgcagcgcgccaaaaccgggacggacaagaccctggtgaaggaggtcgtacagaatttcgctaaggagtttgtgatcagtgatcggaaggagctggaggaagatttcatcaagagcgagctgaagaaggcggggggagccaattacgacgcccagacggagtaaccccagcccccgccacaccaccccttgccaaagtcatctgcctgctccccgggggagaggaccgccggcctcagctactagcccaccagcccaccagggagaaaagaagccatgagaggcagcgcccgccaccctgtgtccacagcccccaccttcccgcttcccttagaaccctgccgtgtcctatctcatgacgctcatggaacctctttctttgatcttctttttcttttctccccctcttttttgttctaaagaaaagtcattttgatgcaaggtcctgcctgccatcagatccgaggtgcctcctgcagtgaccccttttcctggcatttctcttccacgcgacgaggtctgcctagtgagatctgcatgacctcacgttgctttccagagcccgggcctattttgccatctcagttttcctggaccctgcttcctgtgtaccactgaggggcagctgggccaggagctgtgcccggtgcctgcagccttcataagcacacacgtccattccctactaaggcccagacctcctggtatctgccccgggctccctcatcccacctccatccggagttgcctaagatgcatgtccagcataggcaggattgctcggtggtgagaaggttaggtccggctcagactgaataagaagagataaaatttgccttaaaacttacctggcagtggctttgctgcacggtctgaaaccacctgttcccaccctcttgaccgaaatttccttgtgacacagagaagggcaaaggtctgagcccagagttgacggagggagtatttcagggttcacttcaggggctcccaaagcgacaagatcgttagggagagaggcccagggtggggactgggaatttaaggagagctgggaacggatcccttaggttcaggaagcttctgtgtaagctgcgaggatggcttgggccgaagggttgctctgcccgccgcgctagctgtgagctgagcaaagccctgggctcacagcaccccaaaagcctgtggcttcagtcctgcgtctgcaccacacattcaaaaggatcgttttgttttgtttttaaagaaaggtgagattggcttggttcttcatgagcacatttgatatagctctttttctgtttttccttgctcatttcgttttggggaagaaatctgtactgtattgggattgtaaagaacatctctgcactcagacagtttacagaaataaatgttttttttgtttttcagaaaaaaaaaaaaaaaaaaaaaaaaaaa

SEQ ID NO: 398 - DNA, 8025 bp, Homo sapiens
cggcgctgctggaagatggcgagcggccgggacgagcggccgccttggcggctagggcggctcctgttgctcatgtgcctgctgctgctggggagctcggcccgggcggctcacatcaagaaggcggaggcgactaccacaactacgagcgcgggcgccgaggcggccgagggccagttcgaccgctactaccacgaagaggagttggagtcggcgctgagggaggcggcggccgcgggcctccccggcctggcccgcctctttagcatcggccgctcggtggaaggccggccgctgtgggtgcttcgcctcaccgccggcctggggtcgctaatccctgagggcgacgcggggcctgacgctgccgggcccgacgctgcggggccgctgctgcccggccggccccaggtgaagctggtgggcaacatgcatggcgacgagaccgtgtcgcgccaggtgttgatctacttggcccgcgagctggcggccggctaccgccgcggggacccgcgcctggtccgcctgctcaacaccaccgacgtgtacctgctgcccagcctcaaccccgatggcttcgagcgtgcccgcgagggcgactgtggcttcggcgacggcggcccgtccggggccagcggccgcgacaatagtcgcggccgcgacctcaaccgaagctttcccgaccagtttagcaccggcgaaccccccgccctggacgaggtgcccgaggtgcgcgccctcatcgagtggatccgcaggaacaagtttgtgctttctggaaatctgcatggtggctcagtggtagcaagctatccttttgatgattctccagaacataaggccactggaatctatagcaaaacctcagatgatgaagtatttaaatacttggcaaaagcttatgcttcaaaccaccccataatgaaaactggtgagcctcattgtccaggagatgaagacgagactttcaaagatggaatcacaaacggcgcacattggtatgatgtggaaggtggtatgcaagattacaattatgtgtgggccaactgttttgagatcacattagaactgtcttgttgcaagtacccacctgcttcacagcttcgacaggaatgggagaacaatcgtgagtctttgatcacattgattgaaaaggttcacattggagtgaaaggatttgttaaagattccataacaggatctgggttagagaatgcaaccatctcagtggctggtattaatcataatatcacaacaggcagatttggtgatttctaccgattacttgttcctggaacttacaaccttacagtagttttaactgggtatatgccattgactgttactaatgtagtggtgaaagaaggaccagccacagaggtggatttttctcttaggccaactgtaacttcagtaatccctgacacgacagaggctgtatcaactgctagcacagttgctatacctaatattctttctggaacatcatcctcctaccagccaattcagccaaaggactttcaccaccaccatttccctgatatggaaatcttcttgagaaggtttgccaatgaatatcctaacattacccggctttattccttgggaaaatcagtagagtcaagagaactttatgtgatggagatatctgataatccgggtgtccatgaaccaggtgaaccagaatttaagtacattggaaatatgcatggaaatgaagtggttggaagagaactgctgttgaacctcatagaatacctttgtaagaactttggaacagaccctgaagtcacagatttggttcataacactagaattcaccttatgccatccatgaatcctgatgggtatgaaaagtcccaggaaggagattcaataagtgtaattggcagaaacaacagcaacaactttgacctgaaccgaaatttcccagaccagtttgttcagatcacagatcctacgcaaccagaaactattgctgtaatgagctggatgaagtcctatccatttgtactttcagcaaacctgcatggaggttctttggtggttaactacccttttgatgatgatgaacaaggacttgccacatatagtaaatcaccagatgatgctgtgttccaacaaatagcactttcttattccaaggaaaattcccagatgtttcaaggtagaccttgcaagaatatgtatcctaatgaatattttcctcatggaataacaaatggagctagttggtataatgtgccaggaggaatgcaggactggaactatttacaaacaaattgctttgaagtgactattgaactaggttgtgtgaaatatccacttgagaaagagctgccaaacttttgggaacagaatcgaagatcactaatccagtttatgaaacaggttcatcagggcgtcagaggatttgttctagatgccacagatggcaggggtatattaaatgccaccattagtgttgctgagattaatcacccagtgactacttacaaaactggagattactggcgtctcttggttccaggaacttataaaatcacagcatctgctcgagggtataatccagttaccaagaatgtgactgtcaagagtgaaggcgctattcaggtcaacttcacacttgttcgatcctcaacagattcaaacaatgaatcaaagaaaggaaaaggggctagcagcagcaccaatgatgccagtgatccaactactaaagagtttgaaactttaattaaagacctttcagcggagaatggtttggaaagcctcatgttacgctcctcctcaaatctggctctggctctttatcgataccattcctacaaagacttatcagagtttctgagaggacttgtaatgaactatccacatattacaaatcttaccaatttgggacagagcactgaatatcgtcacatttggtcccttgaaatctccaataagcccaatgtatctgagcctgaagaaccaaagattcgttttgttgctggtatccatggaaatgcgccagttggaactgaactgcttttggctctggcagaatttctctgcctgaactacaaaaagaacccagctgttacccaattggttgacaggactaggattgtgattgtcccttctctaaatccagatgggcgagagagagctcaagagaaagactgtacttcaaaaataggacaaacaaatgctcgtggcaaagatttggatacagacttcacaaataatgcctcccaacctgagaccaaagccatcattgaaaatttgattcaaaaacaggactttagtctttctgttgccttagatggtggttccatgctggtcacatatccttatgacaagccagtacagacagtggaaaataaagagactctgaagcatttggcatctctttatgcaaataatcatccatccatgcacatgggtcagcccagttgcccaaataaatcagatgagaatattccaggaggagtaatgcgtggagcagaatggcatagtcacctgggcagcatgaaggattatagtgtcacctatggccattgtccggaaatcacagtatacacaagctgctgttactttcctagtgctgcacgactcccttccttgtgggcagacaataagagatctcttcttagtatgttagtggaggttcacaagggagttcatggatttgttaaagataagactggaaagccaatctctaaagcagtcattgtacttaatgaaggaataaaggtacaaacaaaagagggaggttatttccatgtactcttagcgccaggtgtccataacattattgccatcgctgatgggtaccagcaacaacattcacaggtctttgtgcatcatgatgcagctagttctgtggtgatagtctttgacacagataaccggatatttggtttgccaagggagcttgtggtaactgtatcaggtgctactatgtcggcattgatcctaacagcttgcattatttggtgcatctgctcaatcaagtctaatagacacaaggatggctttcatcggctcaggcagcatcatgatgagtatgaagatgaaattcgcatgatgtctaccggctccaagaagtccctcctaagccatgagttccaggatgaaacagacactgaagaggaaacattatattctagcaaacattgaaaaacacattttgcatatctcccagcataagtaccaagcaaaattacagttcctcttgggagaacactgcattaagaagagagactctcttgcttcttcaaagagctttgggaaattaaattgctaaatttgtattctctgtgaatttcactggcagttttgaacttcccttccttaaagtactctaaacctttaaaaaaaaatctgatttatgcagcagagatgggacagccactttttctttttaatttaagatgagctatttggagcttatgtaataatggcataaagccaactagaggatgttgtattttgcacatcagatgtttactagtggctttagtatttttctttgttttaaatggccaaaagaatccagaaacattaaggcagggacagcagtcagaatcgacataaagctttaaaaactcaaggttttttcaacctactgaggagtacttttctctagttgttaaatagctggagtttttcttattcaggtttaatggaggttgaattgatttttaaacacatataacagtaggaaatgaataaatgggcttctgcatttggctttctacctgttccaaggctagatcggaactggtagactacgctgtaagcaggatttcactacctctcttaaggtttagcaaacttctaaatagcccattttaagggagaacttactaactttattgtgaaaggtctaaatgcccacttgaatgaagctgagagagagatctagcaaaagctaaaactcatgttgtctatctttgaacttggtaaaaacccacaggtgctgctgcttatatctgtgaagcactagcttattctaggaatgcctgattctttaatattgcctaaatcggaacctttttctatgttgcacacatggttttcagatgacccagccatctacaagatctgaattctactgaaaatatctagaaatgtggaagagacctacttgcacattcttaacctgtatttgaacacaaaatatctatacttcatgctccagcccaagcctataccctgtaatagcatactattattgaaatcgcttgaccggtcttgttcacataggcctctgggagtgatttggttctttgccctaatgtttcatttgacggtctctttttgatcaaccaatttttctaaaagttcagtcgaaagcttttaagtatagcttcctcccttgaaaaaaaatgtaaactatgactgctgagtgataaaacactgtggtgtgaaagtgtcatcttcactgccaatcaggcaaagaccggaaagatttgcattttattatgtctgtcttatcatgcaatggaaatgatgctttttgtaagtatgcatcttaccaatgatgtaacggtttaatacctttgaatgttttaataaccaagttgctgctgaacttatactaaatcaggggaccaaaaaacttgctcttatcttctcaaattgtattctatatccattaatgtatcagttatcccaaagccttcaggtggaggggtttaccaccttcctaggtcgttcaaccaggttttgtgaggaatgcattcaaagtggctttataaaagaagattttctttagcaagaataatgaggtcatgtcatttgttaataagtatctgtgataaatccgtggttcaaggttaagccattctggtattctggtattagcaactgtaaattctgccacctcatacatggaacagagcttgtgggatgctaatagttagtgaagtatacatgatttaatttctaataatctttatgttttctttaaggatggtggtgtattgctctttttcagctttatttttaagagtacagtcaggaaaccaacaaggggcctaagagtggctgcccctgcttgggacattacagcaagtgaaacaaagttaatgtgacaagctttgctttgttatcattggtcttcactagaggataccttttacatgtacttctctcttggatcaaatatgtctttaactgtacatctcagtggctggaggccatgccttttaagcatgtgtaaaatttttaaagaaatgaacatacacatagttattttagtaatatttcctgaaagaaaaaccaaattctgctataagtcttgatcttcaatgaacttttaaataatgcatttagctggaaaacaagactttcccagcttgtattacctagaagcgtgaatgtataggatacctgactactaagactatattctcagccctgccctgtcttttatttgcgggtctaatctaatattagaatatattaaccgcttaaggcattgaagccatatgggatggggaatgcatttcttcagtgtttctccgagagactttccatttccttggagttatggcggcaagtaagtatcatagtattaagaaatttgcctaaatctgagttgtgcctttctttactcacaaggcatgggctttgtcctggtgatcagtttgtaagccttcttccttcccagctccttaataaaagcaaagtgattgagtaggtaatgttcaaagtgtctgcctgtgtacatgtacttgtattgattatgtagttcagtaagatgtgcccaagtcatttcagaaagaaagacccttcagttttgatgcattttgctgaacacttgggtagtgagtgggatcctatccagttgaggaatgcttgcaatgctcattgaagggatttgctttgggactttgtcatcttccagaaaggaaacatattgtatatttggcccagtgtgattgattgctttatctttggtaacttttacttgaatgggatttgctgaattaatgactattgaatttaaaactaattatgagttgacaaataaataaaaggtagtgtttatgtctgagcttattgtgtttgagctaacaccaggttactcagtaaccatgacctgctcctccatttccatttattctcaacattaaatagttttatcttgttgttgccagaaatgcacttgtgccaggtattgtccctgctgtatgaaaagcttcttggcaatgaattctgtaatagtgccctacattatggttttctggtggaattgttttaacagtgacaacccaggatttccaatatatttttgttttattgttattaccaaaaattccactatgattgatgttcagtgattttctatagcaacttttttggtaactctttgggtttctgatttgttttagctaaaattttggggatatgatttgggtctttgattaatgtcagctgaacttggatttctagttcatgaagaaatctctcccaatacccatttatcctatttttagcaataattcgttaatgattccacttgattttcagaatattgtcctggttgattttgatttgacagcatacattatgaaatttgaaagtaggttaccattttgaggcagttggatataaattatgtaaatatgtatgattatgatttttataaatggcataacatgagtgtactaactaccttctatgctggccatgctacagattttctggaggtatgacaatagtatttttttatgctcagattaaaaatcagcttttcacctctccagtttttccaagtgatactcccagttctagagcaatctacagctgtttatgtgaggtgcccaacacccattcatctcaagtgcttcagtctttggtttatttcatgcactgtgccttcaaaatgaaatttttaaaagggactttaaatgaagttgaatagtagtttttaaaagtcaatttgtaatttatgtgaaatctaactgtaatgaggtcctttctgttttttatatgtaaacagatctactaatcctgtataaaagttattttacgatg

SEQ ID NO: 399 - DNA, 1976 bp, Homo sapiens
tttcttcaaacctttgcctatgttatttgacaacccgcctcaatttgccttccatctctccactcacctcttaaaggccaggtggtaatgcctccctatggtggggcagcatagcaggtgtctgtccactctctgaccctcacttctgttcccctagactgccaggaactcctgccaccgccaccggctcccatggcccacatacccagtgggggtgccccagcagcgggggcagcccccatgggcccccagtattgcgtgtgcaaggtggagctgtcagtgagtggccagaacctactggaccgggatgttacctccaagtccgaccccttctgtgtcctctttacagagaacaatggcagatggatcgagtacgacaggacagaaaccgcgatcaacaacctcaaccccgccttctccaagaagttcgtgcttgactaccacttcgaggaggtacagaagctcaagttcgcgctctttgaccaggacaagtccagtatgcggctggacgagcatgacttcctgggccagttctcctgcagcctgggcacgatcgtctccagcaagaagatcactaggcctctgctgctgctgaatgacaagcctgcggggaagggcttgattacgatcgctgcccaggagctgtccgacaaccgcgtcatcacactaagcctggcgggcaggaggctggacaagaaggacctctttgggaagtcagacccctttctggagttttataagccaggagacgatggcaagtggatgctggtccacaggactgaggtgatcaagtacacactggaccctgtgtggaagccattcacagtgcccttggtgtccctgtgtgatggggacatggagaagcccatccaggtcatgtgctacgactatgacaatgacgggggccatgacttcatcggcgagttccagacctcagtgtcacagatgtgtgaggctcgagacagcgtcccgctggagttcgagtgcatcaaccccaagaagcagaggaagaagaagaactataaaaactcgggcatcatcatcctgcgatcctgcaagataaaccgagactactccttccttgactacatcctgggaggctgccagctcatgttcaccgttggaatagactttacagcctccaacgggaatcccctcgacccttcctctttgcactatatcaaccctatgggcaccaacgaatatctgtcggccatctgggctgttgggcagatcattcaggactacgacagtgataggatgtttccagctctgggattcggggcccagttacccccagactggaaggtctcccatgagtttgccatcaacttcaaccccaccaaccccttctgctcaggtgtggatggtattgcccaggcgtactcagcttgcctgccccacatccgcttctacggtcctaccaatttctcccccatcgtcaaccacgtggcccggtttgcggcccaggccacacaacagcggacggccacgcagtacttcatcctcctcatcatcacggacggggtcatcagtgacatggaggagacacggcatgccgtggtgcaggcttccaagctgcccatgtccatcatcatcgtgggcgtgggcaatgcggacttcgctgccatggagttcctggatggggacagccgcatgctgcgctcccacacgggggaggaggcagcccgcgatattgtgcagttcgttccctttcgagagttccgcaacgcagcaaaagagaccttggccaaagctgtgctggcggagctgccccaacaagttgtgcagtatttcaagcataaaaacctgccccccaccaactcggagcccgcctgagctccagtgcccagcagcagcatgtcagctgagcctcctgccctcccccaggaacatgcacgctcactctgcttccttgtgggtggcctttttttaccgatccccttttttattttttacaaccggacctccacccc

SEQ ID NO: 400 - DNA, 4868 bp, Homo sapiens
agccctaggttctcctgaatccctgcggtcccagcgtcgctccggacgctgccaacctgttctccaccgtcgctcgacttccacctctaagactcccacgaaactcaggttgaataattcatcaaattacacaactgaactcaagacatggctgcccagtgtgtcacaaaggtggcgctgaatgtttcctgtgccaatcttttggataaagatatagggtcaaagtcagaccctttatgtgtgttgtttttgaatacaagtggtcaacagtggtatgaggttgagcgcacagaaaggattaagaattgcttgaatccccaattttccaagacatttattattgattactactttgaagtggttcagaaattgaaatttggggtttatgacatcgacaacaaaactattgagctgagtgatgatgacttcttaggggaatgtgaatgtacccttggacaaattgtttccagcaagaagctaactcgaccactggtgatgaaaactggcagacctgcaggaaaagggagcattacgatttcagctgaagaaataaaagataatagagtggtcttgtttgaaatggaagccagaaaactggataataaggatctatttggaaagtcagacccatacctggaattccacaagcagacatctgatggaaactggctaatggttcatcggacagaggttgttaaaaacaacttgaatcctgtttggaggcctttcaagatctctcttaactcactgtgttacggagatatggacaaaaccattaaggtggagtgttatgattatgacaatgatgggtcacatgatctcattggaacatttcagaccaccatgacaaaactgaaagaagcctccagaagctcacctgttgaatttgaatgcataaatgagaaaaaaaggcaaaagaaaaaaagctacaagaattcaggtgttatcagtgtgaaacagtgtgagattacagtagaatgcacattccttgactatataatgggaggatgtcagctgaattttactgtgggagtggacttcactggctccaatggtgacccaaggtctccagactcccttcattacatcagccccaatggcgttaatgagtatttgactgctctctggtctgtgggactggtcattcaagattatgatgctgataagatgtttccagcttttggttttggcgctcagatacctcctcagtggcaggtatcacatgaatttccaatgaacttcaacccatccaatccctactgcaatggaatccaaggcattgtagaggcgtatcggtcttgtcttcctcagataaaactctatggaccaactaatttttctccaatcataaatcacgtggccaggtttgctgctgcagccacgcaacagcagacagcttctcaatattttgtgcttttgattattactgatggtgtgatcacagaccttgatgaaaccagacaagctatagttaatgcctccaggctgcctatgtccatcataattgttggagttggaggtgctgacttcagcgccatggagtttctggatggtgatggtggaagtctccgctccccattgggcgaagtggccatcagagatattgtccagtttgtgcctttcagacagttccagaatgctccaaaagaagcacttgctcagtgtgtcttggcagagattccccagcaggtggtgggctacttcaatacatacaaactccttcctcccaagaacccagccacgaaacaacagaagcagtgaccacttcaacagaattcttttgtgttatgtggagcaatgccatctctcaccccaaatcgtgtatctgtcattctacgtactttttacccccagcatttatgatgtaaatctctttctctatggattatatctgtttaaagcattctttctaggttattttggggggacagtgccaagtccatctttgcccagtcaattcagtgattgatagcaatttacattaattgcagtaaagctctttggattagaaattagtgtggggaaagcttattctgttgttgtttttgtttactttcatatgatgaaaatgctgtgtttaagtgtttgtcaataggaagaatggaaaactgttgggatgatgtggtttgcaggttgctgtgcctgattcacagtgtatgttgtataagccaatgtccatacctgattatgagagcttcttaaattatatgatatcaaatttgttcctgtaactctgtatacagtgcttttctgcaaggtaaaaataacctgtctatgcatctgatttttgctacagtttagacactgtggtttacaaaacagcatgcactcaacttgggactttatgaaaagtactgaatgagcaggaaaaggcacatactcagttttttaaatgtacaatcaacaagtaaaaataacctcatgtaagtaagccatttttatttgcctttctagatattttattttattgtggaaaactgtaaacatggtcagatttggctttttttttcattaactgagcaagactttcaggatattgtagatgcacagatggtaggttgtcctgaattctacattattagattactttaattgagatttgttaaaacggttaggactgttttgtccaggaaagataagaggaccaaacatataaggtgaaattcagaattccgtttccttctaactaatgaaaaactgcttactaaaaaaaaattttatactttccttgctaaggtcccatatattgatttgtacagatccacttagtcattttctcctttttttaagaaccattttcatctgatttttaaactcacgataccagttatctgttaatcaaaattgcattttacaatttaataatgtgatatttcctatgtctacagcataccttattaggtataaaacctactgcaacttagaaaaaggaaagaaaaaagaaaacttttccaactgctgcattaagatagggtggattttatgtgctttttttttttaagagttgaatttcttttcctgacttttaccttttacagcgtattacttagtgaacattacattttcagaatagatcctaatattttattgagggcctatgtgctaaaaactatgcatatctatatattggccaattatctttaataatttaccttttgaaattgcatgtttatcatatatccttaagtggacacatacagtgccatgttgatgtgcctctcagttttattgaaaagctgccccacagcccatgtctcttgttctctgcaatgcctcaagggagtgagctctcaaccacagatagctgtggcttctcagaagcagctcattgccaaggccaggctgagaggggacctgcttgctgtggtggttgcctagcccagatgagcatttacctaccaccttcccacttggctagctgtcctttggatatgtgctgttaactggggaaggcatctaactagtagcctgctactccatagtatggctcaatagatgacacatcattttgacattatcaataggagaaaagaaaactaacccttcttctgattgtttggagccatagttgtctcagatgttctaattctctttgtatgcttggaaacagcatagatatgttgctgtggttttcagaattttctcttttaatcacaagaagccttttaaaaaatgacttacacatattctcaatgtacagtaaaacagacagaagtgagcttatctgtttgatgctgtggcagggtcccagtcactgggcatatcctccttctccttaaccagctccacagcagcccctgagtcacctgcacaaggtgcttgggaactgctggttatgagcattcctggttttcttcagccaaataacaggtaatcactgtcaattggatttggtcttcattattttatattctgattttatcagaattattctattttaaaattgttttaaaatttaaaacatttaattcatgatcatgttcatcagtagatgctattattcataagaactgtgattccagcaaactagggtaattggtgcctttttacagttttgaataaaagcatttacaatttctaaattatcagttttcacagtttcagcactcaacctcatcatacgctgatttaatattgttttacattaaaatagtccttttccctgttgtgccaccattcatttaagtgctgtttgttcttaaaatgcatttaaagaaaaattacccatattgactttcacacctcatataatcagatctattacaaatatatatcggagtgacggtgcccaggatagatgtaatatttcttacagatgctggcacagaggaaataatataccagctaatctagtcacctaaccttgtggttagaattgcaattttaagaccagaaaaatttgaagtctgatcagagatttacaactgttcattatagtggtgccttaggcaatctttccaaagtaaattcagggccccattgctacttatgccatatttggacatactttttttttcttcaattttgtaaacttcctggaaagctgtcttcactaagtatcccctagtctctatatatgtggttagtagtcatggaaatgacacataaagtacgccagaagtttgatggaacgtgttagaaactgttttgtgcttttatggatgtcatacttgacaatacatgtgtaagttactaatatatgaattgatgctaaatatatcttacatttgaattccttttggataaagttatttcttgatgtgacagagtagtgtgttttcatttttattctttacatgtgaccaaaacaatagaaaagttaaaaataaaatatagtgttttaggtggcaaaaaaaaaaaaaaaaaaa

SEQ ID NO: 401 - DNA, 5041 bp, Homo sapiens
aaaatggcggctgccactgtggggcttctgccggccggtagtccctggcgctgctgacccagcatcggcttttctacgtcttgaacctggattcgcctaggggttgggaagggctgtggacggcgttgggggaggcctgacgagattaataaagaactcttcagaattcctggtgtttcatcatatatacgactaagatatcaactcttctagcttgctgtttctggaccaaaaaaaatgacgtctattatcaaattaactaccctttctggggtccaagaagaatctgccctttgctatcttctccaagttgatgagtttagatttttattggactgtggctgggatgagcacttttctatggatattattgattccctgaggaagcatgttcaccagattgatgcagtgctgttgtctcaccctgatcctctccaccttggtgccctcccgtatgctgtcggaaagttgggtctgaactgtgctatctatgcaaccattcctgtttataaaatgggacagatgttcatgtatgatctttatcagtctcgacacaatacagaagattttacactctttacattagatgatgtggatgcagcctttgataaaatacagcagctaaaattctctcagattgtgaatttgaaaggtaaaggacatggcctgtctatcacacctctgccagctggtcatatgataggtggaacaatatggaaaatagtcaaagatggagaagaagaaattgtttatgcagttgacttcaaccacaagagggagatccatttaaatggatgttccctggaaatgctaagcaggccttccctacttatcacagattcattcaatgctacatatgtacagcctagaagaaaacagagagatgagcagcttctgacaaatgtcctggaaacacttcgaggtgatggaaatgtgttaatagcagtggacacagcaggcagagttttggaacttgctcaacttcttgatcagatttggaggactaaagatgcaggattgggtgtttactcattggcactcctaaataatgtcagttacaatgtggtggagttttctaagtcccaggtagaatggatgagtgataaattgatgagatgttttgaagacaaaagaaataatccgtttcagtttcgccatctctctttatgtcatggtctttctgacttggcccgtgtacctagccctaaagttgtacttgccagccaacctgacctggaatgcggattttcaagggatctctttattcagtggtgtcaggaccctaaaaactcaatcattctaacctacagaactactcctgggactttagcacgtttcctaattgataatccttctgaaaaaattacagaaatagagttgaggaaacgtgtgaagcttgaagggaaagaacttgaagaatacttggaaaaagagaaactaaagaaagaagctgccaaaaagcttgagcagtcaaaagaggcagatatagattccagtgatgagagtgatattgaggaagatattgaccagccatcagctcataagacgaagcatgacttgatgatgaaaggtgaaggcagtcgtaaaggaagttttttcaaacaggcaaaaaagtcctatcctatgtttcctgccccagaagaaagaattaaatgggatgaatatggagagattatcaaaccagaggatttcttagtgccagagcttcaagctactgaagaagaaaaaagcaaattagaatctggtttgacaaatggagatgaacctatggatcaggatttatctgatgttcctactaaatgtatttctacaacagagtctattgaaataaaagcccgggttacctacatagactatgaaggacgctctgatggggattccattaaaaaaatcattaatcagatgaaaccacgacagttgatcatcgtccatggcccaccagaggccagtcaagatctggcagagtgctgtcgcgcctttggtgggaaagatattaaagtgtacatgccaaagctacatgaaacagttgatgccactagtgaaactcacatctaccaggtgaggttaaaagactcacttgtcagctctcttcagttttgtaaggcaaaagatgctgaattagcttggatagatggtgtcttagatatgagagtttccaaagtggacacaggggttattttagaagaaggagaactaaaggatgatggagaagactcagagatgcaagtggaagctccctcagattctagcgttatagcacaacaaaaggccatgaaaagtctgttcggagatgatgaaaaagaaacaggtgaagaaagtgagatcattcctactttggaacccttgccacctcatgaggttcctggacatcagtcagtttttatgaatgaaccaaggctgtcagacttcaagcaagttctcttacgggaggggattcaagctgaatttgtaggaggtgtacttgtttgcaacaatcaagtagcagtccgcagaacggaaactggacgcattggattagaaggctgcctttgtcaagatttttataggataagagaccttttatatgaacaatatgccattgtataaaggacatgatgtcaagaagtatctgcttgacctttctaagaaaaagggattcttatcttactctgagcttttgatgttttgttttgtaacatacaaaaagaatctgccagaaaaacttacatgtatcagatttttaaaaatataaatagagaacattttgcaaatgctcaaatgagcattctatcttttggctttcagagtgatagagctcctaacaggtgtacaggcccaagagttgaaggtgattggttttctttacagactccttgttctctagaagggctttttacttgaataaaacaatgcaacttagcaaaccaatttatggccttagagaaacatttttgcatgagttcttacaaactgtttgttatattttctggaatgataagtgagaattatttagaaaagacatgctccaaaaaaaaaacaaaactgataaaacagtttttcgaaacttacttttaaaagcatacgtgctatgactctctccagtttgaatatgcaattgttttcacaggcaggatgtctgttttctgcctgtatttcccagtgatttactctagggtaaggtagtacacatttggttcagaaattaatttttatttctcctatatcttgttttatcaagattttgttgtggcatttcaatgtaaattataacaccatcatttgagtatacataattcaaaagaactacttgatgcagtatagtcttaagggttctgcatacattttagaaacatcttagccgtaagttaggtcctgtgttaaactgtttagtgctctgtttttaagaaaacaaatgttgaacctcacacttttatgtggtgacagtgtaatttaattaaaaggtgtaaatgttttcatctcttaggcttgctgtctcctaaggtcacccaagcagtggttggattttatacacattactactaaaataatactgaagttggataaggttatcctttctgtatttgcgtctttcttgtgactaaccaccctgatatagtattaaccactgtgttcaagagtaaaaacaatatatgcaattttcattgaacttaaagagtgaaaaccatgtaaactattgaaactattgtaatccattaatgcttttttagaatggcagaccttgatgtttatttctcaaatggttaagccctcttctttactcttaatttttttttgagacagagtcacccaggctggagtgcagtggtgagattttggctcactataacctcttcctccagggttcaagtgattctcccacctcagcctcccaagtagctgggactacgggcacatgccactgcacctggctaatttttatatttttggtagagacagggtttcaccatgttggccaggctggtctcaaactcctgacctcaagcgatccacccacctaggcctcccaaagtgctgggattacaggcatgaatcaccacaactagcctacccttagatttttggaaggatcgatcttatttaactatgtgtggaacaacccagtaatatcagactcgaattactatttcattctatttcaaatgcttataaagctactattgtagattatagtgttaatgcaaagtttacagacttttgatatggaaaaccagataaaacaatgttacaaaaggcaaatataaagagtatgttttctttttagtgctttggaaaaatttcacttaaactcttattactgtatagattaagccctataatgctatttatattccaggggaacgaaaatctgaatttgttttatgatttaaagcatctggtttgcatattgtattgtaatactgatacagtttggctgtgtccccaccaaattgaattgtgttaatagttcccataatccctacgtgttgtgggagggacccagtgggcagtaatttaatcatggtggtggttaccctcatgctgttcttgtgatggtgagttctcatgagatctgatgggtgtttttttttgttttgttttttgttttttgagatggagttttgctcttgttgcccagactggagtgcaatggcacacgatctcggctcaccgcaacctctgcctcctgggttcaagcgattctcctgcctcagcatctcgagtagctgggattacaggcatgcaccaccacgcccagctaattttgtatttttagtagagacggggtttctccatgttggttaggctggcctcaaactcccgacctcaggtgatccgcccgcctgggcctcccaaagtgctgggattacaggcgtgagccactgctcctggcccaagatctgatggttttgtaagggaattttccccctttgcttggcacttcttcctgctgccatgtgaagaaggatgtgtttgcttccccttccaccatgattgtaagtttcatgaggcctccccagcctgtgggactgtgagtcaattaaacgtgtttactttataaatt

SEQ ID NO: 402 - DNA, 6630 bp, Homo sapiens
ctcggaagtgacgcaagcgcccccccaccgccgctagatccgctgctgctgccgcggcgggcagacctgcaggaggcggcggcggcggcggcggccgaggctgaaggaagatggcggacggcgtggaccacatagacatttacgcggatgtcggcgaagagttcaaccaggaagctgaatatggtgggcatgatcagatagatttgtatgacgatgtcatatctccatctgcaaataatggagatgccccagaagaccgagattacatggatactctcccaccaactgttggtgatgatgtgggtaaaggagcagcaccaaatgttgtctatacatatactggaaagagaattgcattatatattggaaatctaacatggtggacaacagatgaagacttaactgaagcagttcattctttgggagtaaatgatattttggagataaaattttttgaaaatcgggcaaatggccagtcaaaggggtttgcccttgttggtgttggatctgaagcatcttcaaaaaagttaatggatctgttacctaaaagagaacttcatggtcagaatcctgttgtaactccatgcaataaacagttcctgagtcaatttgaaatgcagtccaggaaaactacacaatcaggacaaatgtctggggaaggtaaagctggtcctccaggaggcagttcccgtgcagcatttccacaaggtggtagaggacggggccgttttccaggggctgttcctggtggggacagatttcctgggccagcaggaccaggagggccacccccaccttttccagctggacagactccaccacgtccacccttaggtcctccaggcccacctggtccaccaggtcctccacctcctggtcaggttctgcctcctcctctagctgggcctcctaatcgaggagatcgccctccaccaccagttctttttcctggacaaccttttgggcagcctccattgggtccacttcctcctggccctccacctccagttccaggctacggcccccctcctggcccaccacctccacaacagggaccacctccacctccaggcccctttccacctcgtccacccggtccacttgggccaccccttacactagctcctcctccgcatcttcctggaccacctccaggtgccccaccgccagctccgcatgtgaacccagctttctttcctccaccaactaacagtggcatgcctacatcagatagccgaggtccaccaccaacagatccatatgggcgacctccaccatatgataggggtgactatggcccccctggaagggaaatggatactgcaagaacgccattgagtgaagctgaatttgaagaaatcatgaatagaaatagggcaatctcaagcagtgctatttcgagagctgtgtctgatgccagtgctggtgattatgggagtgctattgagacactggtaactgcaatttctttaattaaacaatccaaagtatctgctgatgatcgttgcaaagttcttattagttctttgcaagattgccttcatggaattgagtccaagtcttatggttctggatcaagacgtgaacgatcaagagagagggaccatagtagatcacgagaaaagagtcgacgtcataaatcccgtagtagagaccgtcatgacgattattacagagagagaagcagagaacgagagaggcaccgggatcgtgaccgagaccgtgaccgagagcgtgaccgagagcgcgaatatcgtcatcgttagaagctgaaggaagaggatcaccttccaagacaaaacagtcttcatgggggaaaaatgacgcttgtccagcagtttgcttcttgtgattgaactgaacctgtaaggattcatggataaaatgaacaggaatagatctgaataaagcaaatctgcataaatggtaaccagtagctctacttttattttttatgttgcttaactgttttatttgaaggaaacctgtgtgatttaaaaagttatagcttttgcaactttattactggttatatacatttggccattatgatgtgcaagcaattggaaaaaaagtcaagtaaatgcttgtttttgtagtagtttgttcttgttaaaaatgtttatatgataatgtctgtaaacagcatcactttgattacaatagatgtagtgttgtaataaactgtttaatggggctgatgtgtaaagctgttcaagttatttgatgtttacacctcagggaaagtcttgtgttcagcaatatctaaagataatgttactatgacaacatttttactgtcctttaaagcattgcaatagcgtttttggatatgcctcaatctaatcttgcgttcagtgaattaaacatagtaattaagtgtcttttgcccttgattttgatattagaataggtgattacatggatatttaatatttctatattctgcttttctagctgtttttacctagttagcttgtgactttgctgaatggtatgtaaacttgtaaaaatagagatttgacagacatagcaatctagtcaatgtgtaaggggtcaaaaaaacagaggttttaacacataagtaaaaacccgtacatatttgatgtgtaatgcaggttaattacaacacagatgtaccgaaacacttaattgtgaaccgctaacattgaagaaattttgacaattccgatttgatgctgcaattacttgctgtttttattgatcttatggtttatttcttaagccatagtcagtgtaaatacagccctgcagcaggtaaatgtgagtaaagagagccttatattttccaattggtataaatttttgaaggatgtgatgttcattaacattcggttgtattccccagtatttgtaatgggaaattacagataaaccgtgtctgcacagtttaaggaatactatgtatattcatgcaccgtattgattcatgctatagttacttaatcaaagatttttttcaaacctgccttacatataggcccactttaaaagcacctgactagcatgtgttcttgattgcaaaattggcagaggcagggtgtcaacttgattaggtgtttttatgggaatgtaatttgaaatcactacttcagaaatttgacttaaaattcttgagcacgttaatatgtttttaagatctgattatctttgagagatcttctgttaatacacattggttgttaaagagtacccaaattctaggacaatgcttaaagtgttaaaataccctagatactgtgttatgtgcaactgtagaaaccctccagaaatttccactgctgttcttcactttcatcttgtctgctatcaaaccacttctgacaaaattagctgttttgaattacccatatcactgccagttttattttaaaatattttgtgtttgaagtatctgtgcatgggatcgttgatgtttatcagaactgttcactttcagaaatgattttttaaagcattttgttgaaaatgcggttgcttttttaacattattttagagttgtatcaaaattttcctgttttctgtatattgttgtgtcatttcttggctttttaatattttgactacaatgccctaatgcgaagaagtatggacatataaatattacaagagaaattagttaatagtaaagggttaaaaggtaagtaaaatgtccatgaaaataaaattttctttgaacagtttaaaaatggaatcacaaaaatctaactgcacttgaaatgaaactggaaattttatactaattaaatcctttatttaccttttcatattttatcaatggaaccttttaattgctccttctatatcactcttctccttgcttggctgatctcattacatgactttcgttacagacagtgtgagtgtactagatttgtttgctgctaatccgttattttaagtgttgtcagaaggaaataacttcttggtttgaccaagtaattttgcaaagtccttctctacctgataacacgtgaatgtatagcagtaaaggtgaaaattgcaggccttgttttgttcttcatacccccttcagttgtttatgggttaatgttatttgaaaactcttcctttttttaatgtgtaaaaacaatccaaagagataaatccttgcatagacaccaaaaacagtgtctcagagaccttttcattttttccttagttaataactgtagtggatgtgaaaacaaacgagttgaattttaaaacatagcatttattagtgctatacagtcacattcctttcagccagtagtaaagttaaacagatgagtgatacagtacctgaatggtactgcttctgaggcaacactttggattgaaagtgctgcttttggttaaaggaactatgttgtggaaagcatattccagtgtaaatttgcagatgtgtgttttttttttttgtcacttttcataaggtttggagtaagttgcagtggcttttgatcatagtttagcccatttaatggtccttttacctagaatgttcttaagcagttaatgacaatttggaatacacagataacttgtagcttaagatactattttcatttaattctcctgtggagaatattgctttattttttactagtttcaggtcagttattaaaataaacatggaggttttaatgaatgttgtataatattttatagtgaaggaaaattgtggaaagggcaaagactttctctttcccttatgtatttaactgtgccaatctaaatacatactgttttatacaatgagatgcattacaagacttttctgttggagtgctctcgacattttggttttcatacctgaatgatcattgcattttctgtattttctaaaatggctccaattttgtgttttaagcttcagcttaagaggaagtttatgttctaattcttgactgagaatacagtattgagattctctgttttacagataacaactggtttttattactcattaagttcatttgcatcccgtagccctctgtaaatgtttcccctagttgtatgtacgtaaatgcacgcttatccagtgtatattagacatttttgtgctaaaatatattaagtgggatttttgtagcaaagcattctatttttctgttcttacagtgtgtgtgtgtgtgtgtgtgtgtgtgtatgcgtttttttaaccttaacttcagtttaaacactggtgtatttatttttttaagcaacttgactcttagaagccttagactgattttttcaataaatattcaaccaaaaattataaatttattaagatgtggccttacatatggcattccttgtgttcgtaatgtgagatttttgatttagataaatcaagattcaggattaaagtttcattgtaagttgaaatagaaaatgtattaaaatgtctaggcttctgggaggaagttcttatactcttctttcttggcattagaaagaagcaatatgaatttttgtgaatattctaaatattcaggcaacactgttcagattgatttaggtttgtcttaaccaatgttctttttttagaatttcaggttgtggcattcactgagtatgcagctactatggtttttgtatgggacgtataaatacttgattatatacgacagattttaatgtctttaaagacttcctgctgtattaacatattgtaatggagtcttttaaatactaggttgaatttaattgaagtcacacacatcttgaagtggtaactgcatagtaaatactaccaagagtttttttcacgtgggagtatcctaaaactctgccatgggtgtaaatgttttacattaatttcataattggacagaccctgcatttagcgaaaacattttgttttgaaagtgtgttctttttgtcgcactgttactgcgtaacacttctcaacattctgtaagttaaattattttaaaataactatggtgaattcatgtttatttttttactttgaaaattgtagtactcaggtggtatttaatgggaaaggatcctttgggtataaatcataatgtattttaaggaatgcatctataacattgataactttagccttaaaaaaaaggtctattattccttcctctgcatcccatggtatattagcaaagtagtttacagccctgtacagccttacaaagttgttttacaatttttaatggaaagcccttaacaacaacaacaaaaaattgtatcattttaccaatatccacgaattactgatcacagtttgtaaataatttgtttaatatcagaaggccaaagaaagtcttaaaattttagctattgactctatggtgacttcacaataagatttctgtgcaaaaaggtaaggtgataattgatctaatagacttttttttttttttttttgctgtccatgagaattagacttcatattagcttcaattaaaaagctcattccattttattaaaatgtttgtaattgcaattttgtgtttaatgtttactttgtctttcctttctttagcatttaggtgactgttcggcagtttgatatatggccattgtcggccttaaactgcactagtaacaagcatggtatttatcttgtattgaaaataaaacaaacttttgataagaaaaaaaaaaaaaaa

SEQ ID NO: 403 - DNA, 8532 bp, Homo sapiens
aacatttacaacaaagttgattctgtgtagggttggaggctagacagttccacaaatttttagtcacattttccatgtcagttaaatctagggagttcaagactactggaaaaattagtctcattactaaaagaaacttagagaccgagggaggtaccagagtctaggaggtacctctgggttgcagaagtaattgtaaaataccagacctgttctttttactaaaagctagtttcactatcttctggtctgaaatactgaggcaaatactcaagacttattttcttcctaatcttgctggtgaaacagaagttactagaaagaaaggaagaaaaaacttgatttggtgactgcaggaagcaacacgttgctgcttttattctacagataatgatttatgaggaatccaagatgaatttggagcaggagaggccgtttgtctgcagtgccccaggctgctcccagcgcttcccaacagaggaccatctgatgattcataggcacaaacatgaaatgactttgaagtttccttcaataaaaacagacaatatgttatcagatcaaactccgaccccaacgagattcctgaagaactgcgaggaggtgggcctcttcagcgagctggactgctccctggagcacgagttcaggaaggctcaggaagaggagagcagcaagcggaatatctcgatgcataatgcagttggtggggccatgacggggcccggaactcaccagcttagcagcgctcggctgcccaaccatgacaccaacgttgtgattcagcaagccatgccgtcgcctcagtccagctctgtcatcactcaggcaccttccaccaaccgccagatcgggcctgtcccaggctctctatcttctctgctacatctccacaacagacagagacagcccatgccagcctccatgcctgggaccctgcccaaccctacaatgccaggatcttccgccgtcttgatgccaatggagcgacaaatgtcagtgaactccagcatcatggggatgcaaggtccaaatctcagcaacccctgtgcttctccccaggtccagccaatgcattcagaagccaaaatgaggttgaaggctgcattgactcaccaccctgctgccatgtcaaatgggaacatgaacaccatgggacacatgatggagatgatgggctcccggcaggaccagacgccacaccatcacatgcactcgcacccgcatcagcaccagacactgccaccccatcacccttacccacaccagcaccagcacccagcacaccatcctcaccctcaaccccatcaccagcagaaccatccacatcaccactcccattcccaccttcatgcacacccagcacatcaccagacctcgccacatccgcccctgcacaccggcaaccaagcacaggtttcaccagcaacacaacagatgcagccaacccagacaatacagccaccccagcccacaggggggcgccggcgaagggtggtagacgaggatccggacgagaggcggcggaaatttctggaacggaaccgggcagctgccacccgctgcagacagaagaggaaggtctgggtgatgtcattggaaaagaaagcagaagaactcacccagacaaacatgcagcttcagaatgaagtgtctatgttgaaaaatgaggtggcccagctgaaacagttgttgttaacacataaagactgcccaataacagccatgcagaaagaatcacaaggatatctaagtccagagagtagccctcctgctagtcctgtcccagcttgctcccagcaacaagtcatccagcataataccatcactacttcctcatcggtcagcgaggtggtaggaagctccaccctcagccagctcaccactcacagaacagacctgaatccgattctttaaaatgcaccatcagacctggcctccaagaagagctgtagcgtaccatgcgtcctttcttttaagggcatttttagaattaactcagacctggaagactcctcagttcttcaaagactggctttcatttttatagttattatggaaatgttgtcttttatacttagttatataagaaaaaagggagttatgcaattaatatctatcagcttgggaaacgctttggtgcttttctccagttttctggtaccagttacttgtttataaactgaaccttttctgtatatagccatggtttcattcttatcagtccaaccctttgcctgaaacattgaatcttgttaaaccacagcttttagctaaaatgaggtatacctagatgtcaagtaagacagatccaaggtaactgggtaggaaatcttttgacatcttaactcatgttgagtttgtgctgtggtgtcaccagaattccagataaacacacagcctttcccatacctttttttttcttactataaaatattataagatccattgatgtccaaataataccaccaagcatctcttcacctctcctcctcttggtccacttgctaatgcccagttttcttctccatttccactttttcttaggctccctatttactattcattttgacttccttctgttttatttttttccctttagcattgcatgtgaataagaaaataatgtttaaagaaaaaaaaaaaaaagcaaacctccaaaacgtggacctaaccattgcttcacttacacttcacccacagctggagttcattcaactcttgcttttcacaaaatagtaaccaggagatgtttaatgtgcctgatttaatgtttttaataatcacagcaaatgaaaggtggtttagttataagtgaagcatggttgaataccagctggggagacactagggaagggagctttgtaagccttgattgcgaaagtccaaattttgatgtggggctataacatgacacccttggattgcgactggttttatacggcctgcctataacgttgaaaatccatgtactacataataattcagaagggctctattcactacacagattacattgttcaatcatcagctgctaatagcctaagatttatttttttttttttcttaagcctatggaaccggctttgctgttctggggggtgaaaatagactaactactggagaaacaaagagagaaagaaaacccagtgtttccataggggcacttttagccttcccacaacagttaagcactctttgactgctgaaggaaccccatggatgaggtgcaggctacttcactctttttttttcttttttgagacagagtctcacctattgcccagactgaagtgcagtggtgcgatcatggatcactgcagcagcatcctccgagttcaagctatccttccacctccgcctcctgagtagctgggaccacaggttcacataaccatgcctggctaatttatttttacttttattttaaaataaaagatgaggtctgtcttatgttgcccaggctggtctcaaactatcctacttcttcctcccaaagtgttgggattataggtgtgagccactgcacccagcctacttcactcttctgaattattctgatttattttcaacaacttttgtgaacttgcccgtgatacaaagcagatagtccctgaaccacagtcgtgcctccttgaaacaagccattctactgtgctaatgttttaatatcacatctcacaaataacaggggtgaatgtttctctctagcaatctaggcaggtgctggtgtttcatctccatttgaatgcttgacctcttaatgtgtgtgtgtgtgtgtgtgtgtgtgtgtgtgttcatgggttttaaaagaacagtattttacaaaaggtgtagcttttataagagtgcagaaaagggaaggatgtgtttttttctctcactatagtataagaatctattttggagaaaaaaagaaaatatgagggtctcgaagcatgatttttatataactagtttcagttttatctaataacttactttttaaatcaatatttatcaacaatctttccttgtatgcagtgctttcaaaagatggttttgagtgtccagtgaaacttatgacttggatatatggttgaagaatcaaaacaaaagcaaaaaaaaaaagcaaaaaaagaaaagagaaaaaaagaaaaaatgcaaatggaataattttctattatattttagacaaacatatcattttcgagtattttaaatactgaattcatagttgttgttttttaaattccaacagtaacagctgaatggtttaatctgactggcttcctaagaaatgtttaagactcagctttaaaaagaagttaacattcatatctctgttttgaaatcaaaaatcatatttcaaaattctttcctaggaccatctatgtgtctcccctcccctccacaaaaaggagaaagagtgcattaaaatgtttagttgggttttttaatttttaatttttatgttatgttttgctttgttttaagtaaacaaaaatttttctttctttactgcatgcatagcacttaataaaatggatttttaaaaaatccactagtaatatcagaatgtccagggagtgactgtcactacaatgatggtttagtttacttctgttccaccttttgattgaaatatttagttgttaggctgaaagcctcggcagttaagaacttgcctgagttttcttcgttcagcaacttgacagtttgactgatgtgcattatatatagctcaattatgtctgttttttatgctaagtaggaaaaccaaccacacacattagcaaaccggcctcaacatataattagaataaactgtcttcttgttctactcagggcctttaggtgtgttcattcacggtatggaaatacagtaaatgaaagattccaactagttgtcagtgcttcttgaaattccaaacagaaagatacattggtcaaatccaacacttggcttatcaatattaagtcttttacctaaaggcccagccgtcaccagacaacagaataatcaatctgcctgaaaatccctcctccttgtcctacactttttgcctgtttgggagaatatctttgtactccattctcctccctcagccagttactgggtcacccatccatgtgttcatgaatcaatcatcacggcctgcagagcacctgtcctaaggagggaaaatcctgtcacactgcctctccccattcgtgtgtggttttcttgatcggtgagatctgtctctgaagtcactgccagcctccctgggaacgtctatagtgcctcccctgccttatgtgatgggagttaacaactcagataagtacacctgagagcatttctatcaggtaaactgtcacttaaatggaggtgtccacatcttaattgtttctccttgacacatttctcaatccacgaagccaggagaggtagagtgaaaatcccagccatggatgaatgtactaatttgaaagccaagtgttaagtcggatgttttcccgttacactactactcagccctctcctgcggccacatcaacggatgcaagtcacagtcttaacacagcctgtgggagacaagcagtttgtgtgctcacagtatatattatagtaattagggtgacttagagcaaatactcttcagatcctatgtagtcagtgaaacaaaatggagagcgtattctgatagaaggacgtcgacggtgaatgttctggtggttgttgcctgttaagtaaactttagtgtgtaagttgagtttgtcattaaaatcataaaccagctgcggtaacagacaagcctttggctggggagttttaagcctcggtaactgctataaaactagccatccagttaggatagaatgtgtttctttctggttaaaaaaaggaaaaaccatctaagaaaatatatatgtatgtatgtgtgtatacagtggaattcaaaggaccaaagcaaaatttgaacaggaatctattaatttagaattttataagatatttattaataaatgttatttttaaacattccatttgaacagtattctgtaggatctacttgtttttaaagtgttagtccataataaactactatagttatgtgtattttcatttttcagggtttcaaatggctattctccatcatttggtggaaatgtttgcttagatctctgtgcatagacatttcaaggatttttattgctctgtgagttattttttaatcaacattctgaacagttttttttaaacatttatttctgtgtgttcatttttaaagtaagctctttcatttaggaagcagagttcagctaaagggaatcagtaactctaactggaacagctttcttgtagaagtgtaaaaacagcttcatctctgcctctctccaccccaccccaatttcctagaaagccttgcactattcagctcccttagtgctttttgtcccttcccgaacaatatgcagtagctttaagccattcaagctccattatgcagtatatctgagaagggaaaggaaacaacccatttaaatttgaataaaaccgtgcctatgcgaacagtagcaatttagaatctcttttctgcttttaaaataatttatatttaaaaattgcactttagctttttgatccctttgtatttctcttattctctttctaacctcttctctgtcctcaaacttgcctttgctctcctttacaataccccccacccctcctccaaggctctgagcggcatcatttaaaatactttacagatatttgcaccaggtacatttatgtgcgtccattggtagcacagctgagacctgtgtctcacatcagcctaggtgaagcctactacaagaatgccaaggagaagagccagtacactatatggtttatactctttatccctttattcatagcatgttttttaaaaatgttatattatgcaacagatgtgaggcagcagctaagctatacttaagaattttctctcaccttccaaaccaaagtgtcctgaataagccaggagacttattcttttgtgcaccctggtgcacatctgactgttgtcctagccatagactctctgaggccactgaaagaacagtggccctatcgatttcattcctaggtctcaaaaatacaatgttgccttgtaacataattagggacagcacctctatttcacaattataatctaaggtaggataagacgacacagcagcaataaacttacaagtaaaattcaataccaaaacaaacacaaagaaatttaaaaaacaaaaaacctagctcatcatgttgtgaaaatgaaaaagtgaatgtccattcaaaatattttactatttcttgtggagtttttcagtgatgtaatgcttgtagccaaattgcttaaagagtgtttatatatttttttccttataaattgtctattttttaaaaaagctatttaaccacagctgaagtggggggtaaggccaaattgccaacacttgttaaaagattaatactcttaagtggcactctgatacctttccaacttgtcatcagaaaggaatcaataattaccaactgttgtatttagaccaacttacaatatctagctcattagaagccaggatctagaaagctccttctaagccatttaagatattcttacattgagcttcatattatagaactttataggattggatattttacaatagaataatttagcctcaggactgagaatgtggaagctgaataaattagctttaaatacatcattaaaatcttatgcacaataagctcattagattctagttttctcctttagaataccaatgccacagacactacaggagataatgaaaggtatcagttgtgttgagtggagggagtttaagagaaaggacccttcccaaccagcagccagtagaaaatacaacctactcacctttttcccttctaagttctgctaaatcacatctgcctcatagagaaaggaatgttgcctttgagaactgtcttggagaacagataagcttgaaatgttctctctagagaggacatagggtttgggatcctctgaaaaggcccagaaaaatagctcagttcaaatacaatgttctaggacaattggaatataaatattgtccaaaaatataattaaaagaaaaaagtttagcactgtgtaaagtaagtgttaactgaggaagtcccaaaaaggtgctgtcactttaagttctggacttggggttctttgtatttgtaaacagcaaagcatttgtgtttgtttgtctatttgtaaagcaaccaccttccttattggaaggagaaaaaaaggggtacatacatgtaaatacttgctgcagcatttaatatgtttaattttgtgttaagctttttgttgcatcgtgaacacatttattgttaccaatggacaatgagttcattaagactgttcaactaggtcagatttttacatctctttctagcaagaagagacaagattttgtgcatttgtacaaatgttaatatcactgcaattccaatataataaagcactcaaatgcaaataa

SEQ ID NO: 404 - DNA, 3199 bp, Homo sapiens
gcgggggaccgcgcccggggatcctgcaggggcgggaagggggctcgggctccttgcttccgccgcagtggggcgctgccgggctccccggcactagcgctgctggcggccccggcggccgggcgtgctgcctgcaagatgtccgtgcgccgcggccggcggccggcgcggccggggacccgcctctcctggctgctgtgctgcagcgccctgctgtccccggccgcgggctacgtgatcgtgagctccgtgtcttgggccgtcaccaacgaggtggacgaggagctggacagcgcctccactgaggaggctatgcccgcgctgctagaggattcgggcagcatctggcagcaaagcttccccgcctctgcccacaaggaggacgcgcacctgcggccccgggcgggcgccgcccgggccaggccgccccccgcgccacccgggatgttctcctaccggcgcgagggcggccagacggccagtgcgcccccgggccctagactgcgcgccgccaccgcccgctccctggcccatgccagcgtctggggctgcctggccaccgtgtccacccacaagaagatccaaggactgccatttgggaactgcctgcccgtcagtgatggccccttcaacaatagcactgggattcctttcttctacatgacagccaaggaccccgtggtggctgatctgatgaagaaccccatggcctcgctgatgctgccagaatcagaaggggagttctgcagaaaaaacatcgttgatccggaagatccccgatgtgtccagttaacgctcactggccagatgatcgcagtgtctccagaagaagtagaatttgccaagcaagccatgttttcaaggcacccagggatgaggaagtggcctcgtcaatatgaatggttctttatgaagatgaggatagaacatatctggcttcagaaatggtatggaggcgcatccagtatttcaagggaggaatatttcaaagcagttcccagaaaggcctgatggagtgagaagaaagtccttggtgtttgcacttaaataaaaaccttttcagtgatgcagccagacagctattgaccactgtctctttgttgaagggttcatagcagccctgccatccctgcagcagaatgagagagggtgaacagggaactctatgctagatttgagattaaagtggtcatttgcagatctccaactcacacagatacttcacgtagatagtctttattccattgtattcaatccagactcatcgattcagaaatcatataatagctggtggtcaaaatgacatgttgagatcattgttgtttcattgtttaagaaaaaaaaaaaatgcctgtacctacaatgtgattgctttgtattgtgagagtatctttgttgcttgctctgccaaatgcagtcttggttctaagttcacttgtgaccacgaagcagctgactgtgcatcacgcagtcacaatattgtttttagggtgagggtgggaggactgtgtgtccgtggattactcctcctgctggtggattgcagatgcattattaggtcatactggctagaatgcagcttttctcccaccataacatgaaaacagtgtaagaacatagggtgctttgtgcatagcccttctctatgtaagcagccatggcagtcattaaagagaaaggagtagctttgacattaagctccccagatccctgctgctcatacttctggcaagggttcccctctctcatgcatgaacaggggcatccaaaataagaagctctccattctgtggtggggaaagcggagaggggagtgggtgaagctgggaaagtaaaggcagcacgttacagaaggaagaaaggaagccagtaactgagggcccactgcctgcccggccctgggccaggccctcaacagaagccatctcatttaagcccttgcaaccaatgagatgcacgtcatcattggctcttacagacaagaaaactagactcagaggggctgagtccacatcccagacagctcactgcagacacaggtggagtggttcctacaagacatccagttttaacaacaaaagagttattgaaatgcatgggtagaaattgaaccaggaaaatcagtaaagtgattgtaaaaaagaaggactagcttgcctggagatgatgtttcttgcttttggaaaaaaaaaaaaaagtctctgaaatttgattcttactacagatttaaaactttctacatattatatgtaggagctcctagtgtttttgagaaattagactgtacctgtgtacacttctaaggtctacatggacctatgtatatatatctaagacctctgatcattaaaacctataaagggttgagctgtcccaagttttctgtctttctgtaatggctacaaactttctttggtaggttagggaggttgtataacataaaaaacacatcactatatgtaggaaatatacatttttcaagtaaataagagtgttattaatgattatgaacttttgcttaacaaaataacatacaacgagagcttgagttgtcaaaatatattttaattatctattgctaaaaacatagtaagatgcagagaattctttatttgtcataagccagtcctcaaaagagttcctaacagtagtgatttctaatatataagaataaggtacttctgagggaattttatattttcagagtttaaaattattgctactcccaatttagaaaaatggggagaaagctggaagaacaaatgacatgctcaaatgtattgcataagtcaacctcacaccttaatactgggagcttctctgcctcctgatcctgtcttgcagataaggtcccctggctaggtttgcgtttatagtcaggttccatttagctcattaaaggtcactgctgcttcaaaggactttgcccagtggatgccattcataaccacagatgaatgttatcagctatttatccaaattacaggaaatgaaacctgaaaaggttgggtaagaatagtgttgaaaattcatagttttaagtttgatggtctccattcaggcaagtgtgtttcagcaaatctctagaaatttacattgattaaaatgttagaggctgttctggaagttctagacatggcaataaggcaagaaaaagagattaaatgcatacagacctcaaaaaaaaaaaaaaaaaaaa

SEQ ID NO: 405 - DNA, 956 bp, Homo sapiens
atgagctggacctgtccgcgttgccagcaacctgttttcttcgctgagaaggtgagctccctgggcaagaactggcaccgcttctgcctgaaatgtgagcgctgccacagcatcctgtcccctggcgggcatgcagagcacaatgggaggccatactgccacaagccatgctatggggctctctttggacccaggggggtgaacattggtggtgtaggctcctacttgtacaatccccccactcccagccctggctgcaccactcctctcagccccagcagcttcagccctcccaggccaaggactggcctcccccaaggcaagaaaagccctccccatatgaagacattcactggggagacctcgctgtgccctggctgtggggagcccgtctattttgctgagaaggtgatgtcattaggcagaaattggcaccgaccgtgtctgaggtgccagcgttgccacaagaccctgactgctgggagtcatgctgagcatgatggagtcccctactgccacgtcccctgctacggctacctgtttggccccaaaggtgtgaacattggcgatgtgggctgctacatctatgacccagtgaagataaaattcaaatgagacgctcacaaaaaaggtcaccctaactcaggcctcccatcatgcccctcatggtccaatggaagctacaaaaatctccagtcccatgggggttggggaaggtgggatcttgggggcctgggcctaggctccatggtaggccagagagtctagactttctctgccaattttttccctttcccatttctatctggttagggaacagcccgttttgaagggtatcctcctcctggccatcacaacccctttccccagcacattctggagcttcaaggtactcataaaacttgtgtttattgaatttcagcctctgtggcttcttcaataaaatgttggctccc

SEQ ID NO: 406 - DNA, 8310 bp, Homo sapiens
aagtgccgtttcggtttaatctagtgtgtgactgggtctgtgtgagggagagagtgtgtgtggtgtggaggtgaaacggaggcaagaaagggggctacctcaggagcgagggacaaagggggcgtgaggcacctaggccgcggcaccccggcgacaggaagccgtcctgaaccgggctaccgggtaggggaagggcccgcgtagtcctcgcagggccccagagctggagtcggctccacagccccgggccgtcggcttctcacttcctggacctccccggcgcccgggcctgaggactggctcggcggagggagaagaggaaacagacttgagcagctccccgttgtctcgcaactccactgccgaggaactctcatttcttccctcgctccttcaccccccacctcatgtagaagggtgctgaggcgtcgggagggaggaggagcctgggctaccgtccctgccctccccacccccttcccggggcgctttggtgggcgtggagttggggttgggggggtgggtgggggttgctttttggagtgctggggaacttttttcccttcttcaggtcaggggaaagggaatgcccaattcagagagacatgggggcaagaaggacgggagtggaggagcttctggaactttgcagccgtcatcgggaggcggcagctctaacagcagagagcgtcaccgcttggtatcgaagcacaagcggcataagtccaaacactccaaagacatggggttggtgacccccgaagcagcatccctgggcacagttatcaaacctttggtggagtatgatgatatcagctctgattccgacaccttctccgatgacatggccttcaaactagaccgaagggagaacgacgaacgtcgtggatcagatcggagcgaccgcctgcacaaacatcgtcaccaccagcacaggcgttcccgggacttactaaaagctaaacagaccgaaaaagaaaaaagccaagaagtctccagcaagtcgggatcgatgaaggaccggatatcgggaagttcaaagcgttcgaatgaggagactgatgactatgggaaggcgcaggtagccaaaagcagcagcaaggaatccaggtcatccaagctccacaaggagaagaccaggaaagaacgggagctgaagtctgggcacaaagaccggagtaaaagtcatcgaaaaagggaaacacccaaaagttacaaaacagtggacagcccaaaacggagatccaggagcccccacaggaagtggtctgacagctccaaacaagatgatagcccctcgggagcttcttatggccaagattatgaccttagtccctcacgatctcatacctcgagcaattatgactcctacaagaaaagtcctggaagtacctcgagaaggcagtcggtcagtcccccttacaaggagccttcggcctaccagtccagcacccggtcaccgagcccctacagtaggcgacagagatctgtcagtccctatagcaggagacggtcgtccagctacgaaagaagtggctcttacagcgggcgatcgcccagtccctatggtcgaaggcggtccagcagccctttcctgagcaagcggtctctgagtcggagtccactccccagtaggaaatccatgaagtccagaagtagaagtcctgcatattcaagacattcatcttctcatagtaaaaagaagagatccagttcacgcagtcgtcattccagtatctcacctgtcaggcttccacttaattccagtctgggagctgaactcagtaggaaaaagaaggaaagagcagctgctgctgctgcagcaaagatggatggaaaggagtccaagggttcacctgtatttttgcctagaaaagagaacagttcagtagaggctaaggattcaggtttggagtctaaaaagttacccagaagtgtaaaattggaaaaatctgccccagatactgaactggtgaatgtaacacatctaaacacagaggtaaaaaattcttcagatacagggaaagtaaagttggatgagaactccgagaagcatcttgttaaagatttgaaagcacagggaacaagagactctaaacccatagcactgaaagaggagattgttactccaaaggagacagaaacatcagaaaaggagacccctccacctcttcccacaattgcttctcccccaccccctctaccaactactacccctccacctcagacaccccctttgccacctttgcctccaataccagctcttccacagcaaccacctctgcctccttctcagccagcatttagtcaggttcctgcttccagtacttcaactttgcccccttctactcactcaaagacatctgctgtgtcctctcaggcaaattctcagccccctgtacaggtttctgtgaagactcaagtatctgtaacagctgctattccacacctgaaaacttcaacgttgcctcctttgcccctcccacccttattacctggagatgatgacatggatagtccaaaagaaactcttccttcaaaacctgtgaagaaagagaaggaacagaggacacgtcacttactcacagaccttcctctccctccagagctccctggtggagatctgtctcccccagactctccagaaccaaaggcaatcacaccacctcagcaaccatataaaaagagaccaaaaatttgttgtcctcgttatggagaaagaagacaaacagaaagcgactgggggaaacgctgtgtggacaagtttgacattattgggattattggagaaggaacctatggccaagtatataaagccaaggacaaagacacaggagaactagtggctctgaagaaggtgagactagacaatgagaaagagggcttcccaatcacagccattcgtgaaatcaaaatccttcgtcagttaatccaccgaagtgttgttaacatgaaggaaattgtcacagataaacaagatgcactggatttcaagaaggacaaaggtgccttttaccttgtatttgagtatatggaccatgacttaatgggactgctagaatctggtttggtgcacttttctgaggaccatatcaagtcgttcatgaaacagctaatggaaggattggaatactgtcacaaaaagaatttcctgcatcgggatattaagtgttctaacattttgctgaataacagtgggcaaatcaaactagcagattttggacttgctcggctctataactctgaagagagtcgcccttacacaaacaaagtcattactttgtggtaccgacctccagaactactgctaggagaggaacgttacacaccagccatagatgtttggagctgtggatgtattcttggggaactattcacaaagaagcctatttttcaagccaatctggaactggctcagctagaactgatcagccgactttgtggtagcccttgtccagctgtgtggcctgatgttatcaaactgccctacttcaacaccatgaaaccgaagaagcaatatcgaaggcgtctacgagaagaattctctttcattccttctgcagcacttgatttattggaccacatgctgacactagatcctagtaagcggtgcacagctgaacagaccctacagagcgacttccttaaagatgtcgaactcagcaaaatggctcctccagacctcccccactggcaggattgccatgagttgtggagtaagaaacggcgacgtcagcgacaaagtggtgttgtagtcgaagagccacctccatccaaaacttctcgaaaagaaactacctcagggacaagtactgagcctgtgaagaacagcagcccagcaccacctcagcctgctcctggcaaggtggagtctggggctggggatgcaataggccttgctgacatcacacaacagctgaatcaaagtgaattggcagtgttattaaacctgctgcagagccaaaccgacctgagcatccctcaaatggcacagctgcttaacatccactccaacccagagatgcagcagcagctggaagccctgaaccaatccatcagtgccctgacggaagctacttcccagcagcaggactcagagaccatggccccagaggagtctttgaaggaagcaccctctgccccagtgatcctgccttcagcagaacagacgacccttgaagcttcaagcacaccagctgacatgcagaatatattggcagttctcttgagtcagctgatgaaaacccaagagccagcaggcagtctggaggaaaacaacagtgacaagaacagtgggccacaggggccccgaagaactcccacaatgccacaggaggaggcagcagcatgtcctcctcacattcttccaccagagaagaggccccctgagccccccggacctccaccgccgccacctccaccccctctggttgaaggcgatctttccagcgccccccaggagttgaacccagccgtgacagccgccttgctgcaacttttatcccagcctgaagcagagcctcctggccacctgccacatgagcaccaggccttgagaccaatggagtactccacccgaccccgtccaaacaggacttatggaaacactgatgggcctgaaacagggttcagtgccattgacactgatgaacgaaactctggtccagccttgacagaatccttggtccagaccctggtgaagaacaggaccttctcaggctctctgagccaccttggggagtccagcagttaccagggcacagggtcagtgcagtttccaggggaccaggacctccgttttgccagggtccccttagcgttacacccggtggtcgggcaaccattcctgaaggctgagggaagcagcaattctgtggtacatgcagagaccaaattgcaaaactatggggagctggggccaggaaccactggggccagcagctcaggagcaggccttcactgggggggcccaactcagtcttctgcttatggaaaactctatcgggggcctacaagagtcccaccaagagggggaagagggagaggagttccttactaacccagagacttcagtgtcctgaaagattcctttcctatccatccttccatccagttctctgaatctttaatgaaatcatttgccagagcgaggtaatcatctgcatttggctactgcaaagctgtccgttgtattccttgctcacttgctactagcaggcgacttacgaaataatgatgttggcaccagttccccctggatgggctatagccagaacatttacttcaactctaccttagtagatacaagtagagaatatggagaggatcattacattgaaaagtaaatgttttattagttcattgcctgcacttactgatcggaagagagaaagaacagtttcagtattgagatggctcaggagaggctctttgatttttaaagttttggggtgggggattgtgtgtggtttctttcttttgaattttaatttaggtgttttgggtttttttcctttaaagagaatagtgttcacaaaatttgagctgctctttggcttttgctataagggaaacagagtggcctggctgatttgaataaatgtttctttcctctccaccatctcacattttgcttttaagtgaacactttttccccattgagcatcttgaacatactttttttccaaataaattactcatccttaaagtttactccactttgacaaaagatacgcccttctccctgcacataaagcaggttgtagaacgtggcattcttgggcaagtaggtagactttacccagtctctttccttttttgctgatgtgtgctctctctctctctttctctctctctctctctctctctctctctctctctctctctgtctcgcttgctcgctctcgctgtttctctctctttgaggcatttgtttggaaaaaatcgttgagatgcccaagaacctgggataattctttactttttttgaaataaaggaaaggaaattcagactcttacattgttctctgtaactcttcaattctaaaatgttttgttttttaaaccatgttctgatggggaagttgatttgtaagtgtggacagcttggacattgctgctgagctgtggttagagatgatgcctccattcctagagggctaataacagcatttagcatattgtttacacatatatttttatgtcaaaaaaaaaacaaaaacctttcaaacagagcattgtgatattgtcaaagagaaaaacaaatcctgaagatacatggaaatgtaacctagtttagggtgggtatttttctgaagatacatcaatacctgaccttttttaaaaaaataattttaaaacagcatactgtgaggaagaacagtattgacatacccacatcccagcatgtgtaccctgccagttcttttagggatttttcctccaaagagatttggatttggttttggtaaaaggggttaaattgtgcttccaggcaagaactttgccttatcataaacaggaaatgaaaaagggaagggctgtcaggatgggataatttgggaggcttctcattctggcttctatttctatgtgagtaccagcatatagagtgttttaaaaacagatacatgtcatataatttatctgcacagacttagaccttcaggaaacataggttaagcccccttttacaaagaaaaagtaaacatacttcagcatcttggagggtagttttcaaaactcaagtttcatgtttcaatgccaagttcttattttaaaaaataaaatctacttataagagaaaggtgcattacttaaaaaaaaaaaactttaaagaaatgaaagaagaaccctcttcagatacttacttgaagactgttttcccctgttaatgagatatagctagatatcggtgtgtgtatttctttattattctctggtttttgatctggccttgcctccagggccaaacactgatttagaaagagagccttctagctattttggcattgatggctttttataccagtgtgtccagttagatttactaggcttactgacatgctattggtaaatcgcattaaagttcatctgaaccttctgtctgttgacttcttagtcctcagacatgggcctttgtgttttagaatatttgaatttgagttattgggccccactccctgttttttattaaagaacgtgagcctgggatactttcagaagtatctgttcaatgaaaaaaagttggtttcccatcaaatatgaataaaattctctatatatttcattgtattttggttatcagcagtcatcaataatgtttttccctcccctctcccacctcttatttttaattatgccaaatatcctaaataatatacttaagcctccattccctcatccctactagggaagggggtgagtgtatgtgtgagtgtatgtgtatgtatgatcccatctcacccccacccccattttgggagtcttttaaaatgaaaacaaagtttggtagttttgactatttctaaaagcagaggagaaaaaaaaacttatttaaatatcctggaatctgtatggaggaagaaaaggtatttgttaatttttcagttacgttatctataaacatgatggaagtaaaggtttggcagaatttcaccttgactatttgaaaattacagacccaattaattccattcaaaagtggttttcgttttgttttaattattgtacaatgagagatattgtctattaaatacattattttgaacagatgagaaatctgattctgttcatgagtgggaggcaaaactggtttgaccgtgatcatttttgtggttttgaaaacaaatatacttgacccagtttccttagttttttcttcaactgtccataggaacgataagtatttgaaagcaacatcaaatctatacgtttaaagcagggcagttagcacaaatttgcaagtagaacttctattagcttatgccatagacatcacccaaccacttgtatgtgtgtgtgtatatataatatgcatatatagttaccgtgctaaaatggttaccagcaggttttgagagagaatgctgcatcagaaaagtgtcagttgccacctcattctccctgatttaggttcctgacactgattcctttctctctcgtttttgacccccattgggtgtatcttgtctatgtacagatattttgtaatatattaaatttttttctttcagtttataaaaatggaaagtggagattggaaaattaaatatttcctgttactataccaaaaaaaaaaaaaaaaaaaaa

SEQ ID NO: 407 - DNA, 6768 bp, Homo sapiens
gcacggcttcctgttctgaggcggcccggcggtaggcggtggcgactctgcccgctcccgtttcggcgcggtgaccgagcgcccgggaggctcgaggaccgcatcgtgtgccgttgcgccaagcccggtcctgcgccgccatggccccagtgcagctggagaaccaccagctggtcccgcccggaggcggcggcgggggcagcggcggacccccgtcagccccagcccctcctcccccgggagccgccgtggcggcggccgctgcagctgcggctagcccgggctaccggctgagcaccctcattgaatttctgctgcaccgggcctactcggagcttatggtgttgacggacctactgccaaggaaatctgatgtggaaaggaaaatagaaatagtgcagtttgctagccggacacgccaactcttcgttcgattattagctttagtgaaatgggctaataatgctggcaaagtggaaaaatgtgcgatgatttcaagctttttagatcagcaagccatcctgtttgtggacactgctgatcgcctggcctcgttagctagagatgctctggtccatgcacgcctgcctagttttgccatcccatatgccattgatgtactaactactggatcttacccacggctgccaacctgcattagggacaaaattattcctccagacccaattaccaaaattgaaaaacaagccacactccatcagctgaatcagattcttagacatcggcttgtaaccacagatcttcctcctcagttagcaaatcttacagttgcaaatggccgggtgaagtttcgtgttgaaggagaatttgaagccaccttgactgtgatgggagatgaccctgatgttccatggcgtcttctcaagctagaaattctagttgaggataaggaaacaggagatgggcgagctttggttcatagcatgcaaatcagcttcatccatcaactggtgcagtctaggctctttgctgatgagaaacctcttcaggatatgtacaactgcctacattctttctgtttatcacttcagttagaagtgttacattcccaaactctaatgttaatccgagaacggtggggagaccttgtgcaggtggaaaggtatcatgctggaaagtgcctctccctttcagtttggaatcaacaggttcttgggagaaaaactggaacagcatctgttcacaaagttacaattaaaattgatgagaatgatgtctccaagcctttacagatttttcacgatcctcctttgccagcttctgattccaaattagtagaaagagccatgaagatcgaccacttatcaatagaaaaactcctgattgacagtgtccatgcaagagctcatcagaagctccaagaactgaaggccattcttagaggcttcaatgccaatgaaaactcttccatagagactgcactcccagctcttgttgttcccatcttggagccctgtggtaattcagagtgtctgcacatttttgtagatttacattctggaatgtttcaattgatgctttatggacttgaccaggccactctggatgacatggagaagtctgtgaatgatgatatgaaacgaatcataccctggattcagcaacttaagttttggcttggacaacagcgttgcaagcagtctataaaacatctgcctacgataagcagtgaaacattgcagctttccaattactcaactcatcctattggaaacctttctaagaataaactgttcattaaacttacccgccttccacaatactacattgttgtggagatgttggaggttcccaataaacccacacaactgtcgtacaagtactactttatgtctgtgaatgctgcagatcgtgaagacagccctgcaatggcattgctgctgcagcagttcaaggaaaacattcaggacttggtttttcgtacaaaaaccgggaaacagaccagaaccaatgccaagcgcaagttgtctgatgatccatgtccagtagaatccaagaaaacaaaacgagcaggagaaatgtgtgccttcaataaagttttagcccacttcgtcgctatgtgtgatacaaatatgccatttgtaggacttcggttggagttgtccaatctggagattccacatcaaggagtgcaagtggaaggtgatggcttcagccatgcaattcgcttattaaaaattcctccctgtaagggtataactgaggaaacccaaaaggctctggaccgctctcttcttgattgcactttccgattacaaggtagaaataaccgcacttgggtagcagagttagtgtttgcaaattgtccacttaatggcacttctactagggagcaaggaccatcccggcacgtttacctgacatatgaaaatctgttgtctgagcctgttggtggtagaaaggtggttgaaatgtttcttaatgactggaatagcattgcacgattatatgagtgtgtgttggaatttgcacgttctctaccagacatacctgctcatctaaatattttctcagaagttcgtgtttataattaccgaaaacttatcttgtgttatggaaccaccaagggaagctcaattagtatccaatggaattcgatccatcaaaaattccacatttctttgggaactgttggcccaaactcaggttgcagtaactgtcacaataccattctccatcagcttcaagaaatgttcaacaaaacaccaaatgtggttcagttattacaggtactgtttgatactcaggctccattaaatgccatcaacaaactccccactgtgccgatgttgggcttgacccagagaaccaatactgcctaccagtgcttctccattctgccacagtcgtccacccacatcagactggccttcaggaacatgtattgcattgatatatactgccggagtcgaggtgttgtggcaatacgggatggtgcctatagtctttttgataacagcaaactagttgaaggtttctatcctgcaccaggactaaagacgttcctgaatatgtttgttgacagcaatcaggatgctcgaagaaggtctgtaaatgaggacgataatcccccttctcctataggaggagatatgatggattctttaatatcgcagctccagccaccaccccagcaacagccatttccaaagcagccaggaacatcaggtgcttatcctcttacttcaccccctacatcttatcatagcacagtcaatcagtctccctcaatgatgcacacacagtctccaggaaatctgcatgctgccagctcccccagtggggctttgagagccccatcaccagcgtcatttgttccaactcctcccccatcctcgcatggaatctcaataggaccaggggccagttttgctagtccacatggaactcttgaccctagttccccatacactatggtgtcaccaagtggacgagcagggaactggccaggatctcctcaagtgtctggcccctcaccagcagcacgcatgcctggaatgtcaccagccaacccctcactacattctccggttccagatgcttctcattcccctcgagctggaacaagttctcaaacaatgccaacaaacatgcctccacctcgtaaactacctcagcgctcttgggcggcatccatacctaccatcctcactcacagtgccttgaacattttactgctgccctctccaactccaggccttgtgcccggcctggcaggtagttacctttgttctccacttgagagattccttggatcagtcatcatgagacgacatcttcaaagaattattcaacaagaaacgctgcagctgataaattctaatgaacccggagtgatcatgtttaagactgatgcactgaaatgcagagtagctcttagtcccaaaaccaaccaaacgcttcagctaaaagtgacacctgaaaatgcaggacagtggaaacctgatgaacttcaagttttggagaaattctttgaaacaagagttgcaggaccaccatttaaagctaatacgttaatagccttcaccaagctattaggagctcctacacacatcctcagggattgtgtgcacattatgaagctggagctgttccctgaccaagcaacacagctaaaatggaatgttcagttttgcctgacgatccctcccagcgcgccgccgattgcacctcctgggacgcctgctgtggtgctgaaatccaaaatgctattttttcttcaactaactcagaaaacatcggtccctccccaagaacctgttagtattatagttccaatcatttatgacatggcttcaggtacaacccagcaggcagacattcccagacagcagaactcttctgttgctgctcccatgatggtcagcaacattctgaagaggtttgcagagatgaatccaccacgacaaggtgaatgcacaatatttgcagctgttcgtgatttaatggctaatcttacactgccccctggtgggcgtccatagacactattgtttttaaaccaggaaggctgacagatgagacaacaaaaaaaatctgaattcagccttcagtttaaaaaaggaaaaggactttttttttaaactttaagagctaaatattctaaactggcaaaaattttcagggtgcacttctttcatcaaaatgatcatccatcttttgtataatgaacttgtatagtgtgtttaaatgggacacatttcaaaggaaataaatcagtgtccgtttgccagtaataaatttaatattctgttttatactataaagttatgaaaatgccaaacttgtttatttaattgttttcttatgttttgggtgtaatagtccttttttggtttttgttttgttttttaaggcaggtctgtcatttttgaatactgtaaaactgtgataaactttatattgaagctgtattttaatatgaccgctttgaatccttacatgaaatgttctgggagttgttataaacacaccccaaggaagcaatatttaataaaactaggtcaaaaacaaaacaaaacagtgacactcacttgtgtgtatataaactctagagacatcttaggccctcccttcatctttaacctggtggatggagccagttattaatttataataatacatgtctgaaatttgaccaaaaacatcttctttatgtcaaggttaatatattttcttcagacattcctaacttgactagtggttaacatttagcaccttggttgtctttcaatatataggatttgggtgaaaaataaggaacttagtctttgagaagggacagtatgtggttcgtattgatcaaggatcccaaataatgcaatcattctcatctgttgaggatgtgggaacttttctgtcaggaaaatttagtttacagaatacttctgcatacaacattaattaggaaacaaagaactttaatgctgtacctctgcatgaagtttctgtgagctttctttatcttgcttaacttatcctcctttccttccccaccaaaattgggattgttctaaacaatttcaatttaattcattgtcaacaaaacgatagaatgttttgcttggaagaaacctggtccattcccctcattgtgaagaatcccgaatcctgggcctgtccagggtcaaatggagtttttggtattaatacatctctgcagggtttctttttggagcactgtgctgtctttcctagtcagtcagggacttttttaagcttcaaagaacatggtctgatgcaaaggtcttctaccgacttcatggtatttaggaaaaatttttaagtgataataccatgccgagttacctggtcactgtaatactggttctccattaaaatgtagatgctttgtctaattccacttcaagatgatttaattgagcttctataactatcaactatcaaattctagtttcaagtatctcactgtacctatatcatatctgttctcaactttgtttgattctccactcattttcaatcagagttgaagccttctttgcctttcttctttgtcttatttctgccttcatctcccacttctcacccaactctgccactgttcaggagcagttgactaaacttttatccttcctttaacttaatctttttatccttctgtttttagttcttacagtggtaatcacatcagtttggcaatctaagatgtctttatcaagggtcagcccttttctatttggagctgaatcttttctttcatgtagaaatctacatgtatatacaagaaatgtatttttatctgcaggataatattgtttcaaataattttattaagagttaactttttaggtattttcccttttaatgtggttttgaaatgttaattgcatttttacacatgatgcattcagtggacactcttttttcctaattataactcatctctgaatgcattgtgccaatcaagagtaagataggattcagtgcgcaaaatttgcttttgatgcttattaagagtaaacccatgaatttgaatttttatattatgcttggtacttggaattgatatataccttattaaagcttgaaaacatttagcatttgaatagtaagtttcatcacaaatcatgtcttttgcctcttttgttacccaggttcgatcaaggggactggatgcccaagtgattttctctaataatcgggttgggacttaactttaaggtgttttcaatgtgattttagtatttacagtaataaataaaatttatacaaagtttcagagaa

SEQ ID NO: 408 - DNA, 1803 bp, Homo sapiens
atgacagcggctccggcgtctccgcagcagatcagggaccggctgctgcaggccatcgacccccagagcaacatccggaacatggtggcggtgctggaagtcatctccagcctggagaaataccctattaccaaagaggcacttgaggaaacacgacttgggaagctcatcaacgacgtccgcaagaaaaccaagaacgaggagctcgccaagcgggccaagaagctgctgcggagctggcagaagctcatcgagccggcacaccagcatgaggcggcgctgcgggggctggcgggggccaccggctctgccaacgggggcgcacacaactgccggccggaggtgggggcggctggcccacccaggagcatccatgacctgaagagccgcaatgacctccagaggctgcccgggcagcggctggacaggctgggcagccgcaagcgccggggtgaccagcgtgacctcggccacccagggccgccacccaaggtctccaaagctagccacgaccccctggtccccaactcatcccccctccccaccaacgggatcagtgggagtccagagagcttcgccagctccctggatggcagtgggcatgcaggcccagagggcagccgcctggagcgtgacgagaatgacaagcacagtggcaagatccccgtcaacgccgtgcgaccgcacaccagctccccgggcctgggcaagccccctggaccctgcttgcagccaaaggcttcggtgctgcagcagctggacagggtggacgagactccggggcctccccatcccaagggaccccctcgctgctctttcagtcctcggaactcacggcatgagggctcctttgcccggcagcagagcttgtatgcacccaagggctccgtgcccagcccctcaccgcggccccaggcactcgatgccacacaggtgccgtcaccgcttccactggcacagccgtccacaccccccgtacggcggctcgagctgctgcccagtgcggaaagcccagtgtgctggcttgagcagcctgagagccaccagcggctggcggggccgggctgcaaggcagggctgtccccagccgagcccctcctgtcccgggcaggcttttccccagactcctccaaggcggacagtgatgctgcctcctcagggggctcggacagtaaaaagaagaagaggtaccgacctcgagactatacggttaacttggacgggcaggtggctgaggcgggcgtcaagcctgtccggttaaaagagcggaagctcacctttgaccccatgacgagacagatcaaacctctgacccagaaagagccagtgcgggcagacagccctgtgcacatggagcagcagtccaggacagagctggacaagcaggaggccaaggccagcctccagagccccttcgaacagacgaactggaaggagctgtcacgcaacgagatcatccagtcctacctgagccggcagagcagcctgctctcatcatcgggcgcgcagaccccaggggctcaccacttcatgtctgagtacctgaagcaggaggagagcacccggcaaggggccaggcagctgcatgtgctggtgcctcaaagcccgcccacggacctccctggtctgacccgggaggtcacacaggacgatctcgacagaatccaggccagccagtggccgggggtgaacgggtgtcaggacacacagggtaactggtatgactggacgcagtgcatatcgctcgatccgcacggcgacgacgggcgcttgaacattctgccttatgtctgcttggactga

SEQ ID NO: 409 - DNA, 2376 bp, Homo sapiens
taaaatctccccatgtgaggggatgtgtttccttcagcctctgctgtctggccgctctgtctaggtcctgggccacgggagagccccgtccctcctttctgaaggccccctgacttgggcctcagtgtccccgaagatcatgatggcgtatatgaacccggggccccactattctgtcaacgccttggccctaagtggccccagtgtggatctgatgcaccaggctgtgccctacccaagcgcccccaggaagcagcggcgggagcgcaccaccttcacccggagccaactggaggagctggaggcactgtttgccaagacccagtacccagacgtctatgcccgtgaggaggtggctctgaagatcaatctgcctgagtccagggttcaggtttggttcaagaaccggagggctaaatgcaggcagcagcgacagcagcagaaacagcagcagcagcccccagggggccaggccaaggcccggcctgccaagaggaaggcgggcacgtccccaagaccctccacagatgtgtgtccagaccctctgggcatctcagattcctacagtccccctctgcccggcccctcaggctccccaaccacggcagtggccactgtgtccatctggagcccagcctcagagtcccctttgcctgaggcgcagcgggctgggctggtggcctcagggccgtctctgacctccgccccctatgccatgacctacgccccggcctccgctttctgctcttccccctccgcctatgggtctccgagctcctatttcagcggcctagacccctacctttctcccatggtgccccagctagggggcccggctcttagccccctctctggcccctccgtgggaccttccctggcccagtcccccacctccctatcaggccagagctatggcgcctacagccccgtggatagcttggaattcaaggaccccacgggcacctggaaattcacctacaatcccatggaccctctggactacaaggatcagagtgcctggaagtttcagatcttgtagaggacgcagtctccatctctctccatcgggcctcgggaccctttctcttctgaatctgcttccctgcagtttagatcccgggatggcattcctgagaaagcaacccgaaccagctgtccttctgacagctcggtgttcagcttacagagaccacccctttcctccacagggagaggctcctccctctcctgggacagctcacaggtcctagtgattctctcaaccctaacaccgtctggcacgattgtgaccgctgaagtacaccacgagctccaggcttcagaaagtggtgctgagaacttgctccaagaagaagtcaaaccaaacttgcagttgatttggggtcatgtttaggtcagaatcaccgtgcccttgaacaagcaggtaggggggcttgataacttaactttccacgtggacagaatttttttttttgttttgtttttgttttgccactgtgctctagcctgggtcacaagagcgaaactccgtctcaataataacaacaacaaaaataacccaggagtggctcaagagtccagtgtgggatgaaaatataaacagaggaagacaacatatgtcactggggaggctgggggagctagacaaaattcacacgggaggggcagggatgagacaatattgtgccctgggtctgtgcaaacgttgggaccagaatccactataagtttcattcttcggagacacggaagctctgcactggaggccgggactcaggcgtggaagagaatcttctccttattcaccggggaggctgtgtcttgtgcaaacaagtcatagaaacttgatgggagttggggagggactgaaggatgcatgcaaggttctgggaaggagtgagaagtagtgaaggccaaggggcccccatcacaggccgatggggtaagacttcgagagagcctgatcctggggtcttctgagactccaccaggagccggagagggcagggagccaaatccagctaggaggttacagattgcttttcctgggctgggctcctgagtgttggttcttccagctgtgcacaggggatttcaaacgttctacgtcctaaagccaggaagagtgacaaggcaggtggggacagaaggaagaagccaggagcctccctgagaaggtgtcaccttatctgtcctcctcttccccacacactggcctctgggtcccccttctctgtccacccacagagtgaaaccaattaaaatgttggatctcaaaaaaaaaaaaaaaaaaaaaaaaaaaaaaaaaaaaaaaaaaaaaaaaaaaaaaaaaaaaaaaaaaaaaaaaaaaaaaaaaaaaaaaaaaaaaaaaaaaaa

SEQ ID NO: 410 - DNA, 781 bp, Homo sapiens
ctcgcaggggctggtgtcactggtcattcctgcacaggacagtccaccatggcctcagatcaccagacccaggcgggcaagccacagtccctcaaccccaagatcatcatctttgagcaggaaaactttcaaggccactcgcatgagctcaatgggccctgccccaacctgaaggaaactggcgtggagaaggcaggttctgtcctagtgcaggctggaccctgggtgggctatgaacaggccaactgcaagggcgagcagtttgtgtttgagaagggtgagtacccccgctgggactcatggaccagcagccgaaggacggactccctcagctccctgaggcccatcaaagtggacagccaagagcacaagatcatcctctatgaaaaccccaacttcaccgggaagaagatggaaatcatagatgacgatgtacccagcttccacgcccatggctaccaggagaaggtgtcatctgtgcgggtgcagagtggcacgtgggttggctaccagtaccccggctaccgtgggctgcagtacctgctggagaagggagactacaaggacagcagcgactttggggcccctcacccccaggtgcagtccgtgcgccgtatccgcgacatgcagtggcaccaacgtggtgccttccacccctccaactagtgccctccccaccatgcctccttcccaggacccaggtctgctgcccaggaaccctccagacctcccagagagtgaataaagtgtgacttgcaacttgaaaaaaaaaaaaaaaaaa

SEQ ID NO: 411 - DNA, 2420 bp, Homo sapiens
tccggggcggcccccggcagccagcgcgacgttccaaaatcgaacctcagtggcggcgctcggaagcggaactctgccggggccgcgccggctacattgtttcctccccccgactccctcccgcccccttcccccgcctttcttccctccgcgacccgggccgtgcgtccgtccccctgcctctgcctggcggtccctcctcccctctccttgcacccatacctctttgtaccgcaccccctggggacccctgcgcccctcccctcccccctgaccgcatggaccgtcccgcaggccgctgatgccgcccgcggcgaggtggcccggaccgcagtgccccaagagagctctaatggtaccaagtgacaggttggctttactgtgactcggggacgccagagctcctgagaagatgtcagcaatacaggccgcctggccatccggtacagaatgtattgccaagtacaacttccacggcactgccgagcaggacctgcccttctgcaaaggagacgtgctcaccattgtggccgtcaccaaggaccccaactggtacaaagccaaaaacaaggtgggccgtgagggcatcatcccagccaactacgtccagaagcgggagggcgtgaaggcgggtaccaaactcagcctcatgccttggttccacggcaagatcacacgggagcaggctgagcggcttctgtacccgccggagacaggcctgttcctggtgcgggagagcaccaactaccccggagactacacgctgtgcgtgagctgcgacggcaaggtggagcactaccgcatcatgtaccatgccagcaagctcagcatcgacgaggaggtgtactttgagaacctcatgcagctggtggagcactacacctcagacgcagatggactctgtacgcgcctcattaaaccaaaggtcatggagggcacagtggcggcccaggatgagttctaccgcagcggctgggccctgaacatgaaggagctgaagctgctgcagaccatcgggaagggggagttcggagacgtgatgctgggcgattaccgagggaacaaagtcgccgtcaagtgcattaagaacgacgccactgcccaggccttcctggctgaagcctcagtcatgacgcaactgcggcatagcaacctggtgcagctcctgggcgtgatcgtggaggagaagggcgggctctacatcgtcactgagtacatggccaaggggagccttgtggactacctgcggtctaggggtcggtcagtgctgggcggagactgtctcctcaagttctcgctagatgtctgcgaggccatggaatacctggagggcaacaatttcgtgcatcgagacctggctgcccgcaatgtgctggtgtctgaggacaacgtggccaaggtcagcgactttggtctcaccaaggaggcgtccagcacccaggacacgggcaagctgccagtcaagtggacagcccctgaggccctgagagagaagaaattctccactaagtctgacgtgtggagtttcggaatccttctctgggaaatctactcctttgggcgagtgccttatccaagaattcccctgaaggacgtcgtccctcgggtggagaagggctacaagatggatgcccccgacggctgcccgcccgcagtctatgaagtcatgaagaactgctggcacctggacgccgccatgcggccctccttcctacagctccgagagcagcttgagcacatcaaaacccacgagctgcacctgtgacggctggcctccgcctgggtcatgggcctgtggggactgaacctggaagatcatggacctggtgcccctgctcactgggcccgagcctgaactgagccccagcgggctggcgggcctttttcctgcgtcccagcctgcacccctccggccccgtctctcttggacccacctgtggggcctggggagcccactgaggggccagggaggaaggaggccacggagcgggcggcagcgccccaccacgtcgggcttccctggcctcccgccactcgccttcttagagttttattcctttccttttttgagattttttttccgtgtgtttattttttattatttttcaagataaggagaaagaaagtacccagcaaatgggcattttacaagaagtacgaatcttatttttcctgtcctgcccgtgaggtgggggggaccgggcccctctctagggacccctcgccccagcctcattccccattctgtgtcccatgtcccgtgtctcctcggtcgccccgtgtttgcgcttgaccatgttgcactgtttgcatgcgcccgaggcagacgtctgtcaggggcttggatttcgtgtgccgctgccacccgcccacccgccttgtgagatggaatcgtaataaaccacgccatgaggaaaaaa

SEQ ID NO: 412 - DNA, 6419 bp, Homo sapiens
aggggcggaggtgacagcgggctggggactggcggctgcaactgcctgccgcgccgagggaccgccgggcggcggaaagcaggttataaaacatggaggctggctcagtggttcgagccatttttgacttctgccctagcgtatcagaagaactgccgctctttgtgggagatattattgaggtgctggcagtggtggatgaattttggcttctaggaaagaaggaggatgttacaggacaattccccagcagttttgtggaaattgtgaccattcccagtctaaaagagggagagaggctgtttgtgtgcatttgtgaattcacatcccaagagttggataatcttcccctccatcgaggtgacctggtgattctcgatggcattcccactgcaggctggctgcagggccgaagctgctggggcgcacggggcttcttcccatcttcatgtgtccgcgagctctgcctctcctcacagagccggcagtggcactcccagagcgccctgtttcagattccggaatattccatgggacaagcccgggccctaatggggctttctgctcagctggatgaagagctggacttcagggaaggggatgtgatcaccattattggagttcctgaaccaggctggtttgaaggggagttagagggccgaagaggcatttttccagaaggttttgtagagctgttggggcccctgaggactgtggatgagtcagtaagttctggaaatcaagatgactgcattgttaatggtgaagtagatacccctgtaggagaagaagagatagggccggatgaggatgaggaggagccagggacctatggggtcgccctgtacagattccaagccctggagccaaatgagctggatttcgaggtcggggataaaatccgaattctggcgaccttggaagatggctggctggaaggatccctgaagggcaggacaggcatctttccttaccggtttgtgaaattatgtcctgacacacgggtggaggaaaccatggctctgccccaggaaggcagccttgccaggatcccggaaacttctttggattgtttggagaacaccttaggagtagaggaacaaagacatgaaaccagtgaccatgaggccgaggagcctgactgcattatttctgaagcacccacttctcccctcggtcatctgacttcagagtatgacacagacagaaactcttatcaggacgaggacaccgcaggagggcccccgagaagcccaggcgtggagtgggaaatgcctcttgccacagactctcccacatctgaccctacagaagtagtcaatggtatttcctcccaacctcaggtcccttttcatcccaacttgcagaaaagccagtattattctacagtgggagggagccacccgcactcagaacagtaccccgaccttcttcccctagaagcaaggactagagactatgccagcctacctcccaaaagaatgtattcccagctaaaaactcttcagaagccagtgctccctctttacaggggctcttctgtttcagcttcaagggtagtcaaacccagacaatcaagtcctcagctccacaacctagcaagttatactaaaaagcaccacacgtccagtgtttactccatctcagagagattggagatgaagcctggtccgcaagcccaagggcttgttatggaagcagcaacacattcacagggagacggcagcactgacctggactcgaagctgacacaacagctgatcgagtttgagaagagcttggcagggcccggcacagagccagataaaattttacgccacttttcaatcatggactttaactctgagaaggatattgtccgaggttcctcaaagttaatcaccgagcaggagctgccggaaaggagaaaggccctaaggccaccgccacctcgtccctgtactccggtatccacttctccccatttgctggttgaccagaacctaaaacctgcaccacccttggtggtgcgaccctctcgcccagctcccctgcctccctcagcacagcagagaacgaatgcggtatcccccaagctcctatctcgacaccgtcctacctgtgagaccttagaaaaggagggccctggtcatatgggaaggagtctggaccagacctccccatgccccttagtgctggtgaggattgaggaaatggagcgggacttggatatgtacagtagagctcaagaagagctaaacctcatgctggaggagaagcaggatgaatcatcaagagcagagaccctcgaggatctcaagttctgtgaaagtaacattgaaagtttgaatatggaactccagcaactaagagaaatgacgctcctctcctcccagtcttcatcactggtggccccttctgggtctgtgtctgccgaaaatccagagcagaggatgctggagaagagagccaaggtcatagaagaacttcttcagacagaaagagactacattcgggatctggaaatgtgtattgagcggatcatggtacccatgcagcaggcacaggtaccaaacattgattttgagggactttttggaaatatgcagatggtgattaaggtctcgaagcaattattggctgctctggaaatcagcgatgctgtaggacctgtgtttcttggtcaccgggatgagcttgagggaacatacaagatttactgccagaatcatgatgaggccattgcgctgcttgaaatctacgagaaggatgagaagatccagaagcatcttcaggactccttggcagatctgaagagcctatacaacgaatggggatgcacaaattatattaacctgggctccttcctcatcaaaccagtacagagagtaatgcgttacccgctgttgctaatggagttgctgaattccaccccagaatcccacccagataaagtgcctttaaccaatgcagtccttgcggtcaaggaaatcaacgttaacattaatgaatataaacggcgaaaggacctggtcctcaagtaccgtaagggtgatgaagatagccttatggagaaaatttccaaactgaacatccactccatcatcaagaaatccaaccgagttagcagtcacctgaagcatctcactggctttgctcctcagataaaagatgaagtatttgaagaaacagaaaaaaacttccgaatgcaagaaagattgattaagtcttttatccgagacctgtctctctacctccagcacatccgggagtccgcatgtgtgaaagtggtggctgctgtgagcatgtgggatgtgtgcatggagagaggacaccgggacctggagcagtttgagagggtgcatcgctacatcagtgaccagctcttcacaaactttaaggagaggacagagcggcttgtcatctcccccttaaatcagttactgagcatgtttacagggccccataagctggtacagaaacgctttgacaagctcctggacttctataactgtacagaacgggcagaaaagctaaaggacaagaagaccctggaggagctgcagtcggcccggaacaactatgaggccctgaatgcacagctgctggatgagctgcccaagttccaccagtacgcccagggcctcttcaccaactgtgtccacggctatgctgaagcccactgtgactttgtgcaccaggctctggagcaattaaagccactgctttcgttactcaaagtggctggcagagagggaaaccttattgccatcttccacgaagagcacagcagagttctgcagcaactccaggtttttaccttcttcccggagtctcttccagctaccaagaagccatttgagaggaaaaccattgaccgccagtctgctcgaaagccactcctgggcctgccaagttacatgctacagtcagaagaactccgggcctccctcctggccaggtatccccctgaaaaactcttccaggcagaacggaacttcaatgctgctcaagacttggatgtctcacttttggaaggtgacctggtgggtgtgattaagaaaaaagaccccatgggcagccagaaccgctggctgattgacaatggagtcaccaaaggcttcgtgtacagctctttcctaaagccctacaatcctcgccgcagccactccgatgcctccgtgggtagccactcctccacagagtctgagcacggcagctcctcccccaggttcccacgccagaacagcggcagcaccctgaccttcaaccccagcagcatggctgtatcctttacctcggggtcttgccagaagcagcctcaagatgcatctcctccgccaaaagaatgtgaccaaggaactctcagtgcatccctaaatccgagtaattcagagagtagtccttccagatgcccttcagacccagactccacctcccagccaaggtcaggggactctgcagatgtagctagagatgtaaagcaacccactgccacgccgaggagctaccggaacttcaggcatccagaaatagttggctactccgtaccaggacgaaatgggcaaagtcaagacctcgtcaaaggatgtgcaagaacagcccaggctccggaagacagaagtacagagccagatggcagtgaggcagaaggcaaccaggtctattttgctgtctacaccttcaaggcacgaaacccaaatgagctgagcgtgtcagccaatcagaaactcaagatcctcgagtttaaagatgttacaggaaatacagagtggtggttagctgaggttaacgggaagaagggctacgttccctccaattatatccgcaaaaccgagtacacctgagcccacgttgcctgccacccagccttgctgcctttgctttcagtccgccgagggttctggcggcccaccgagagggcgcctgctcctgagacacaggccctgtctgcgttgcttaaccatggcatggtggagcacaccacagatcttgttctcctcgattgggttgtaaaccttgatgctcactagaatctctagaatttgaaatggaccctggggctttgcaaatgacttagtgactatgagaagagagacaagtcttagagctggcttttggaaaggagaaacttgcagtcagaagcccagtgtcctatgtatgcaggaagctgtgctctagcaatagacagtgttggtaatggttgtgctgtacggcgtttggggtggccccatgttccatgctcagctgaccggatgccaactcagatgaaaagaattcatggctctgggcaccccgtgaggcagtgcttgcacatggctgggagtttgtcgggattgaaccaaacctagtgcttcaaagctcctgggacacctccagtgtccagcacacattctcatacatactgcccctaatttctaaagtccctaaagcactacattctgtaaccttgtttcttttactccattcccagattagttatgcaaaattcaactgcgttctacttttagaagtgtttagggtctttattttctgttgacccttcatctgaaagattctcttcccttgttaggtacaatcactgcccccccgcttttttttttgagatggggtcttgctatgttgcccaggctggtcttaaacgcctgggctcaagcaaccctcccgcctccctgctgagattacaggtgtaagccaccataccgcaacctcaatgacacctttctgatggtctttacacagtctgtgatgtctggtggcccccctgccctggactcaataattgatagattttcctagagtaacagtatgagagctccagccattccattaaaagtattagttctgctttgagctgaaaccagttgagcctaatggaagactggatgtctttcttcttcatccaagcaccctaatgactgtttagttacatccatagatgcagacaacataacacctgtgacttacttgaattgggataagccattccagaagtagcttatcctagacttggaaataagatttttttcaccactaacttccatgcttcagagatgacattcaaagccagattcccaagtgcctgatcatacctcccagtctcaggaagatatttgcttaccccttagaccaagaatcttaagatcttccccagctatgaagcctatcttggaatgggaaaccatgaaatttgtcttttaaaagaaagggaagaaatagccttacagcccctgttcctccaagtgcacatttagccttaaaatcctgggagtcgggagacaccgtggagtcctaacatccacagtgtctgctggtcgtggtcagaaggcagtaatgcaagagtccttttgtgaagagtgtttctatgtagagatgtttatatttaagtagttcttttataaataaaagcatttctaatggcaaaaaaaaaaaaaaaaaaa

SEQ ID NO: 413 - DNA, 2670 bp, Homo sapiens
ggttgggatctgaggggtcctctctgtgcccatcacagtttgagcttcagggaaaagaagaagaggtctttgcccttcgtttttccacgggaggagaatcaagagtgagccatggagctacgtgtggggaacaagtaccgcctgggacggaagatcgggagcgggtccttcggagatatctacctgggtgccaacatcgcctctggtgaggaagtcgccatcaagctggagtgtgtgaagacaaagcacccccagctgcacatcgagagcaagttctacaagatgatgcagggtggcgtggggatcccgtccatcaagtggtgcggagctgagggcgactacaacgtgatggtcatggagctgctggggcctagcctcgaggacctgttcaacttctgttcccgcaaattcagcctcaagacggtgctgctcttggccgaccagatgatcagccgcatcgagtatatccactccaagaacttcatccaccgggacgtcaagcccgacaacttcctcatggggctggggaagaagggcaacctggtctacatcatcgacttcggcctggccaagaagtaccgggacgcccgcacccaccagcacattccctaccgggaaaacaagaacctgaccggcacggcccgctacgcttccatcaacacgcacctgggcattgagcaaagccgtcgagatgacctggagagcctgggctacgtgctcatgtacttcaacctgggctccctgccctggcaggggctcaaagcagccaccaagcgccagaagtatgaacggatcagcgagaagaagatgtcaacgcccatcgaggtcctctgcaaaggctatccctccgaattctcaacatacctcaacttctgccgctccctgcggtttgacgacaagcccgactactcttacctacgtcagctcttccgcaacctcttccaccggcagggcttctcctatgactacgtctttgactggaacatgctgaaattcggtgcagcccggaatcccgaggatgtggaccgggagcggcgagaacacgaacgcgaggagaggatggggcagctacgggggtccgcgacccgagccctgccccctggcccacccacgggggccactgccaaccggctccgcagtgccgccgagcccgtggcttccacgccagcctcccgcatccagccggctggcaatacttctcccagagcgatctcgcgggtcgaccgggagaggaaggtgagtatgaggctgcacaggggtgcgcccgccaacgtctcctcctcagacctcactgggcggcaagaggtctcccggatcccagcctcacagacaagtgtgccatttgaccatctcgggaagtgaggagagcccccattggaccagtgtttgcttagtgtcttcactgtattttctttaaaaaaaaaaaaaaaaaaaaaaaggcaaaaataaaccactcaaaagaacaacaaaaaaacccagcacaaaaccgacgatggagtttgtttctttgatttctttgccaatggcaagaagatgagatgccctcagcactgaggattcttgcccccttgtggtgcccgctgcccccaaccttcaggctgccagatgctcccctgacaacaccaggctacaggagccagacgccagggcctgcccggcctcctgttcctgcccccacccaccacctgcctggagaggaacgggtcgggtccgtgtcggagaagtgacaggtcccagagccaaagccggccctcaagcatcatcagggagtggtgtagtcagttgaaggcagttcccaccgagttttccgagcctcagaatccaggagatacgcacagccccacccactctgagatgacagtggctgacttcccgtgctgggcttttccattgtccccctggcctccaggctcctcctctgcctctccatggagtgggtggggaggtggtgggggccggcgtcccctgcgtgtgtgtgtgtgtgtgtgtgtgtggatgtattgacctgtgtttcccaagacagcaggtgccacggcccgccccgcctgccagcccgaattcccgttctcctgtgtctactaacaaggacatgggggtgggcggtgacctccgcatccctcagagctcagagggtcctcgctgccaccggtccccccctagcccgtcatcagccggtggcagctccatcttccattcctggttttagggcagaatccatggagactgcttccagaaggcatctggctctgagttataaattacttccctggtcctgacagtcacctggggtcccccctctccctggttccacctttctgaggaggagcctggagtcagggctgggttttggattaacccatccttcctagttaacacctttttgtttttattttattttatttttgtttgttttctccgtgtgtgtgttttcctaatttatttacctctgtttcccctttttcctttttttttttaattaaagagcaaagctttttattactttgtaatttaaaaaactgaaaaaaaaaaaactgaagaactttggggggaattttgtacttttttcctgtgtaaatattggacttttttgagctttatcgtggttgttaatttgaagtaataaagtagaaaagataaagtgaaaaaaaaaaaaaaaaaaaaaaaaaaaaa

SEQ ID NO: 414 - DNA, 8089 bp, Homo sapiens
tggttccggttcggctccagccgcccctcggctcctcgccttccccctcccgtccgccttctcccctccctcccgctcctgggaaagagagaaaccaccgctgcgggtgggtagagaagcacttggcgcctcggggaggggaccgcgcccgcctcatttgcgccttgcagcactgctggaccaggttacaagatgttcacctaagattgagacctagtgactacatttcctacgggaacaaataaatggtttttcatctcccggagatacattacaaacaaatatggtgctaaaagaactccttacctttctctgactacaatttatttggacatacttttgtattgaagagaggtatacatactgaagctacttgctgtactataggagactctgtcctgtaggatcatggaccatcctagtagggaaaaggatgaaagacaacggacaactaaacccatggcacaaaggagtgcacactgctctcgaccatctggctcctcatcgtcctctggggttcttatggtgggacccaacttcagggttggcaagaagataggatgtgggaacttcggagagctcagattaggtaaaaatctctacaccaatgaatatgtagcaatcaaactggaaccaataaaatcacgtgctccacagcttcatttagagtacagattttataaacagcttggcagtgcaggtgaaggtctcccacaggtgtattactttggaccatgtgggaaatataatgccatggtgctggagctccttggccctagcttggaggacttgtttgacctctgtgaccgaacatttactttgaagacggtgttaatgatagccatccagctgctttctcgaatggaatacgtgcactcaaagaacctcatttaccgagatgtcaagccagagaacttcctgattggtcgacaaggcaataagaaagagcatgttatacacattatagactttggactggccaaggaatacattgaccccgaaaccaaaaaacacataccttatagggaacacaaaagtttaactggaactgcaagatatatgtctatcaacacgcatcttggcaaagagcaaagccggagagatgatttggaagccctaggccatatgttcatgtatttccttcgaggcagcctcccctggcaaggactcaaggctgacacattaaaagagagatatcaaaaaattggtgacaccaaaaggaatactcccattgaagctctctgtgagaactttccagaggagatggcaacctaccttcgatatgtcaggcgactggacttctttgaaaaacctgattatgagtatttacggaccctcttcacagacctctttgaaaagaaaggctacacctttgactatgcctatgattgggttgggagacctattcctactccagtagggtcagttcacgtagattctggtgcatctgcaataactcgagaaagccacacacatagggatcggccatcacaacagcagcctcttcgaaatcaggtggttagctcaaccaatggagagctgaatgttgatgatcccacgggagcccactccaatgcaccaatcacagctcatgccgaggtggaggtagtggaggaagctaagtgctgctgtttctttaagaggaaaaggaagaagactgctcagcgccacaagtgaccagtgcctcccaggagtcctcaggccctggggactctgactcaattgtacctgcagctcctgccatttctcattggaagggactcctctttgggggagggtggatatccaaaccaaaaagaagaaaacagatgcccccagaaggggccagtgcgggcagccagggcctagtgggtcattggccatctccgcctgcctaaggctctgagcaggtcccagagctgctgttcctccactgcttgcccatagggctgcctggttgactctccttcccattgtttacagtgaaggtgtcattcacaaaaactcaaggactgctattctccttcttccccttagtttactcctggtttttaccccaccctcaaccctctccagcataaaacctagtgagctaaaggctttgtctgcagaaggagatcaagaggctgggggtaaggccaagaaggtaggaggaaaatggcagacctgggctggagaagaaccttctccgtatcccaggtgtgcctggcagtatggtttcctcttcctctgtgcctgtgcagcattcatcccagctggccttggggttcaggttccttcttccctccctcctgtgaagttacactgtaggacacaagctgtgagcaatctgcagtctactgtccctgtgtgttggcgttcttagcttttttgacaaactcttttctccaggtagtaggacaatgaaaattgttctaagcaaaggaaagaaaactgactttgttgcacttttagtttttttaaaaaaaacaaaaacaaaaacatggcagatgcatattgtgtctggttatattgggggttttacttttacctgttttgagggggatggggccggccaagccattcagagagaacatgggtccagaggacattctcagtggaaagagtttgatctgcagcacccagaagagaagccaaactcggtgtcattctgagtgaacactcaggttggcaagaaaacatacttgaattttcattcatcttctcagcagctgaagaatgtccctaccagagcatcttgacctaatcagcttacagtttgaaaacctagctctccagaacatgagatgagccagccgagccagactgtgaccaggaaacagctcatcccagagaaggagatgcttaacaaaaaaaaattgaaattgtttcccatgctgccagggacttccaactagatagccatgtgacgtcctggtgacttgggggaaaaattagtgatgaaacagccaccaccatattgccattagtggaaaaaaagaggacagtgaacctgccttccacctgccagagggacctcagggtgtggcattatagggccaggaaaagaaaatcggtgtatcctatctgccccaatagctgagctgtagcatttgggctggcctgccttatcagaaaccaagcttatgaagatcttctcccagcaggtccatagcagtaggcttaggatgcagtatatggggccgcatttaaaaggagggaaagattgtttggtgctggaacattccagggaaaaggagactggaatgaaaggtctgaaattatcttctcaattggactccttccagaaaggtggccgtgcctctaagcatgtttttcccagtatgccctaggcctccccccatggtgttttcatatgaggtactactgtgaaggatctggttcctcattcactgtttgacaagtctttcatgtgtggagttactcttctcatgcccaattttcatttgagtttagtggcttaaccaaacaatgactcctcattccagcggtgacagaagagaaagggtcatttacatcaggaaagaggtcttgtatctgggagtagagagctaaccatggagcacagtggctggtgggtgacttagtctgatggtttgtggaccatagaagtcttcacctctggtttgaggtgcagggctgtcttttgtactggagggtgtggggatattttctgatagttgccatttcttgaaaaattcccttgatgtaccttacacagagcagaaataacattaacatggatcagaggtactgggcttcatctgttccattggaccttggctagggaatatcatttcactggcatcaaacctgcttagcttatgaaaagatggtaatatgtcatttctataaatgtttctatatatgaaacataaagtggcagggagatacaatatcacaccccttccccacaaggactgtgaatattgggatttatgtccttgccattacctagtggttacagccctatcactaaaatttacatcgtttctcagttgggatttgggcattgctaacttactgtatagaaagtttaacttttcctcacccctgtatagaaaatgccttgcctctcaagagagggcagagggggggccaggtgcagtggctcacgcctgtaatcccagcagtttgggaggccaaggcaagtggatcatgtgaggtcaagagttcgagaccagcctggccaacatggtgaaaccccgtctctacaaaaaatacaaaaattagctgggcatggtggcatgctcccgtagtcccagctactcgggaggctgaggcaggagaatcacttgagcctgggaggcagaagttgcagtgagccgagatcgcaccactgcactccagcctgggcaacagagtgagactctgtctaaaaagaaaaaaaaaaaagggcagagggaaatggtgggaatgcctggagcatcctggcactctatactctactgagtgcctctcttcagcccctcaccctgcttccacacacacacacacaaaagcaaaggcactgaccagcttggctgcagggcaagctgccttgcagctggatttgcgactttttttttgtcttaaaatttttactggatcagttgtaggggactgtacttcctaagacactgttctcaccttccaacctcacaaatctcttactagatatttggtttttataacaagggtaaagaatcccaggtccctttagcatgcagagtaatggtgatccctccagagccattggcacttcaaagtggtcccagacctgggagattctggtgggatcttccttaaaaataagcaaaaaacctgagtaccctagatgcaattggccatttgtttcaggcccatcagcgaatcagggctccctcctcaaccctactgctacagttccttagctgtatgcctcagccagatccttggggttagggcatgcactcgctgactgtccccacccatccacttgctctgtagtttctgagctttctccatttcacaagtatggtgcctaacgatctttttctttaggattgatgcagttgtttttcctgaaagctaactcagcatctattcataaaaacccttaatagtatacattaggagttttcccaagctctacagtccctcagacattgcatcctaaacagatttgaggcacacaggccaagactccaccaaggcataaatggtcccccctactcccttttgaccagggtatcacttgtgtctctgcagtaagagttggtcaagttgctctacgcaccttggtgctttccagagatctcactccagactgcccccaagggtggatagagtatcctgacagccagtgtgcactcatgactgccttaattaacattcttctgctattatggagcctgtccagcaataaacagggtctaggaaggtacaagattagcttccagttaaaatcccattttatattggaatgcatgagctacagatgacagcagagatcctgaggtttctagacatgttgattgtctcttttttctaaatgaactccaagtacttagaaaacagtccctgtccatcagccagaaaaggtgaccatcacccctaaagtaatttccaaacttagttcagtgggaagatatgctggtagtgcatattcagtgttgattttcagtgctagtaaccacttttaatgccagaaatatgtaacaatgataatgtaacgtcaaagtggttactaaagattatagccttaacttttttatgtaaaagataaaatccattcctcctcccagtgagcaagcatggcttgcatttctcaaaaatgagaacttccatggcagccaagaaaacgtcttctcagaggaactttcgtttgatgcatctcccaagcccacatgcctcctgtgttccagccacctcttccatttcacatttaaaccagctctccattcccattgagttgccctaacaacattgtctccagtgtcagaaccatattaaggttcgtttctcagattgggagcctgcaacaccatacagccaacattgcctttgccacgccactgccaccatccccaccattgccctatggtgggcagatgaattccagaaaccctcagggagccaggataattaggcaacccatctgaattggccacgtaagtgacaggcacttatctctcgggttcttgcttttgcagactccagggaagtcctgtctagaggtcgatggcagagactcctagtctttcccatgaggggttgataggaatcaaattgggattcctttggctttgggttttgtttttttgttgttgtttttggttttcagtttgttttttggtgtatggggggtgattttgtttctgaataagaaaaagaagaggcaaccatggcccttatgtgggtttatcctttttgagcaatgttttagccacaagtaaggaatcttgaaagtcttttgtccagcaagcagtcttaaaaatgtttttcctaactccttttgcaggtgactaagtacaaaaaaatagttttctcattgtattcaaaatagtgagtaggttccctggataatacacagtggtagttgacatattttctcaaaacacaaccagaaaacccacttccggtatttgtaaatcacctttcaagggaaaaagtgaacacgtattccttgtatttctagtttgattaccaaacctgatgttacaaagaaacctccgttctgtagacagaatttcttttatttttcttcttttactcctcacaatcactttcccagtgccatcaccatctataaggtctcagagcagaggattattcatggtaataagtgggggtgtggtgcagccattccagtaacacccacaagaggacagctgttctgaatgtccccacccacccctctttcagtacaggtgagacattttcagttcatgagctccagaccaaatcccaggccagcccttgcaccaaaagccttttttagaaggcttatcagtctattaggaatgtctcaggaaagatgagccatttctttggggagaaatatatttacagatggaagtgtgtgactgcgtgtctgtgtgtgtgtgtggtgtgtgtgcgcacgtgagtgcgtgtgttcatctatgtgcatttcacttccataaagacccagcccaagctgctgggaaccatgtgttcctgagtattctcagaggttaaacaagtgacaagtgagcttctgaaattagtgtctcagcaagctggctttaggaatgagccccattttatcaagcagagaaaaaaaataacagcagaaaagataaagataaaccaaaaatatataccccccaatggaaaataatgttgattcagcaattcccataggatgtattacatgctctaatttattatattattatttatctgtctttgatctttgcccattgtactcttaaaaagatgttgggatgttgattgcgatttttaaacaactagataatgtataaatcagcagtggaaatcagttttaatgtgtggatgtgtctgattattgttaaatgcctctttttttactttttttttttttagatgtataatgtttcataaaccctggcactggtcacaaagctcagctgtgaaaatgaaatttgtagtatttttaaacatgaatgtcaatttcaagtgtatttgaaatggttcctccaggagagatatttgtgcaccattaggaaaatcttctctgcagaggaagtagccttctttggagaaaatggaaaatgggttctgatatgtgatctcagagtagcccatttcctagggcaccatggaaaacacaaatgtgatctttaagtatacctcttccccagtttggggaggaaaggactcagtttgcaccctttttgtatgtaaaataaaatgtcttacctttcttggctacttctgcttgtttggttggttgattggtttgtctgtttttaatctccctcggctcatttgtaattaacaatctagctaggactaactttgatgcgattcaagactcctgtgaacaaaaataatttggcattcttgtttcattccttggattaaatattgtcttctcctgtgagtcacttcaaaaataaatactgctgtctctcttcgagtgctg

SEQ ID NO: 415 - DNA, 8163 bp, Homo sapiens
ctgcccaaagtttgtcctattaggcccgccagggtactctgcgactccgggacgagggcggggccgcgctagtggttccggttcggctccagccgcccctcggctcctcgccttccccctcccgtccgccttctcccctccctcccgctcctgggaaagagagaaaccaccgctgcgggtgggtagagaagcacttggcgcctcggggaggggaccgcgcccgcctcatttgcgccttgcagcactgctggaccaggttacaagatgttcacctaagattgagacctagtgactacatttcctacgggaacaaataaatggtttttcatctcccggagatacattacaaacaaatatggtgctaaaagaactccttacctttctctgactacaatttatttggacatacttttgtattgaagagaggtatacatactgaagctacttgctgtactataggagactctgtcctgtaggatcatggaccatcctagtagggaaaaggatgaaagacaacggacaactaaacccatggcacaaaggagtgcacactgctctcgaccatctggctcctcatcgtcctctggggttcttatggtgggacccaacttcagggttggcaagaagataggatgtgggaacttcggagagctcagattaggtaaaaatctctacaccaatgaatatgtagcaatcaaactggaaccaataaaatcacgtgctccacagcttcatttagagtacagattttataaacagcttggcagtgcaggtgaaggtctcccacaggtgtattactttggaccatgtgggaaatataatgccatggtgctggagctccttggccctagcttggaggacttgtttgacctctgtgaccgaacatttactttgaagacggtgttaatgatagccatccagctgctttctcgaatggaatacgtgcactcaaagaacctcatttaccgagatgtcaagccagagaacttcctgattggtcgacaaggcaataagaaagagcatgttatacacattatagactttggactggccaaggaatacattgaccccgaaaccaaaaaacacataccttatagggaacacaaaagtttaactggaactgcaagatatatgtctatcaacacgcatcttggcaaagagcaaagccggagagatgatttggaagccctaggccatatgttcatgtatttccttcgaggcagcctcccctggcaaggactcaaggctgacacattaaaagagagatatcaaaaaattggtgacaccaaaaggaatactcccattgaagctctctgtgagaactttccagaggagatggcaacctaccttcgatatgtcaggcgactggacttctttgaaaaacctgattatgagtatttacggaccctcttcacagacctctttgaaaagaaaggctacacctttgactatgcctatgattgggttgggagacctattcctactccagtagggtcagttcacgtagattctggtgcatctgcaataactcgagaaagccacacacatagggatcggccatcacaacagcagcctcttcgaaatcaggtggttagctcaaccaatggagagctgaatgttgatgatcccacgggagcccactccaatgcaccaatcacagctcatgccgaggtggaggtagtggaggaagctaagtgctgctgtttctttaagaggaaaaggaagaagactgctcagcgccacaagtgaccagtgcctcccaggagtcctcaggccctggggactctgactcaattgtacctgcagctcctgccatttctcattggaagggactcctctttgggggagggtggatatccaaaccaaaaagaagaaaacagatgcccccagaaggggccagtgcgggcagccagggcctagtgggtcattggccatctccgcctgcctaaggctctgagcaggtcccagagctgctgttcctccactgcttgcccatagggctgcctggttgactctccttcccattgtttacagtgaaggtgtcattcacaaaaactcaaggactgctattctccttcttccccttagtttactcctggtttttaccccaccctcaaccctctccagcataaaacctagtgagctaaaggctttgtctgcagaaggagatcaagaggctgggggtaaggccaagaaggtaggaggaaaatggcagacctgggctggagaagaaccttctccgtatcccaggtgtgcctggcagtatggtttcctcttcctctgtgcctgtgcagcattcatcccagctggccttggggttcaggttccttcttccctccctcctgtgaagttacactgtaggacacaagctgtgagcaatctgcagtctactgtccctgtgtgttggcgttcttagcttttttgacaaactcttttctccaggtagtaggacaatgaaaattgttctaagcaaaggaaagaaaactgactttgttgcacttttagtttttttaaaaaaaacaaaaacaaaaacatggcagatgcatattgtgtctggttatattgggggttttacttttacctgttttgagggggatggggccggccaagccattcagagagaacatgggtccagaggacattctcagtggaaagagtttgatctgcagcacccagaagagaagccaaactcggtgtcattctgagtgaacactcaggttggcaagaaaacatacttgaattttcattcatcttctcagcagctgaagaatgtccctaccagagcatcttgacctaatcagcttacagtttgaaaacctagctctccagaacatgagatgagccagccgagccagactgtgaccaggaaacagctcatcccagagaaggagatgcttaacaaaaaaaaattgaaattgtttcccatgctgccagggacttccaactagatagccatgtgacgtcctggtgacttgggggaaaaattagtgatgaaacagccaccaccatattgccattagtggaaaaaaagaggacagtgaacctgccttccacctgccagagggacctcagggtgtggcattatagggccaggaaaagaaaatcggtgtatcctatctgccccaatagctgagctgtagcatttgggctggcctgccttatcagaaaccaagcttatgaagatcttctcccagcaggtccatagcagtaggcttaggatgcagtatatggggccgcatttaaaaggagggaaagattgtttggtgctggaacattccagggaaaaggagactggaatgaaaggtctgaaattatcttctcaattggactccttccagaaaggtggccgtgcctctaagcatgtttttcccagtatgccctaggcctccccccatggtgttttcatatgaggtactactgtgaaggatctggttcctcattcactgtttgacaagtctttcatgtgtggagttactcttctcatgcccaattttcatttgagtttagtggcttaaccaaacaatgactcctcattccagcggtgacagaagagaaagggtcatttacatcaggaaagaggtcttgtatctgggagtagagagctaaccatggagcacagtggctggtgggtgacttagtctgatggtttgtggaccatagaagtcttcacctctggtttgaggtgcagggctgtcttttgtactggagggtgtggggatattttctgatagttgccatttcttgaaaaattcccttgatgtaccttacacagagcagaaataacattaacatggatcagaggtactgggcttcatctgttccattggaccttggctagggaatatcatttcactggcatcaaacctgcttagcttatgaaaagatggtaatatgtcatttctataaatgtttctatatatgaaacataaagtggcagggagatacaatatcacaccccttccccacaaggactgtgaatattgggatttatgtccttgccattacctagtggttacagccctatcactaaaatttacatcgtttctcagttgggatttgggcattgctaacttactgtatagaaagtttaacttttcctcacccctgtatagaaaatgccttgcctctcaagagagggcagagggggggccaggtgcagtggctcacgcctgtaatcccagcagtttgggaggccaaggcaagtggatcatgtgaggtcaagagttcgagaccagcctggccaacatggtgaaaccccgtctctacaaaaaatacaaaaattagctgggcatggtggcatgctcccgtagtcccagctactcgggaggctgaggcaggagaatcacttgagcctgggaggcagaagttgcagtgagccgagatcgcaccactgcactccagcctgggcaacagagtgagactctgtctaaaaagaaaaaaaaaaaagggcagagggaaatggtgggaatgcctggagcatcctggcactctatactctactgagtgcctctcttcagcccctcaccctgcttccacacacacacacacaaaagcaaaggcactgaccagcttggctgcagggcaagctgccttgcagctggatttgcgactttttttttgtcttaaaatttttactggatcagttgtaggggactgtacttcctaagacactgttctcaccttccaacctcacaaatctcttactagatatttggtttttataacaagggtaaagaatcccaggtccctttagcatgcagagtaatggtgatccctccagagccattggcacttcaaagtggtcccagacctgggagattctggtgggatcttccttaaaaataagcaaaaaacctgagtaccctagatgcaattggccatttgtttcaggcccatcagcgaatcagggctccctcctcaaccctactgctacagttccttagctgtatgcctcagccagatccttggggttagggcatgcactcgctgactgtccccacccatccacttgctctgtagtttctgagctttctccatttcacaagtatggtgcctaacgatctttttctttaggattgatgcagttgtttttcctgaaagctaactcagcatctattcataaaaacccttaatagtatacattaggagttttcccaagctctacagtccctcagacattgcatcctaaacagatttgaggcacacaggccaagactccaccaaggcataaatggtcccccctactcccttttgaccagggtatcacttgtgtctctgcagtaagagttggtcaagttgctctacgcaccttggtgctttccagagatctcactccagactgcccccaagggtggatagagtatcctgacagccagtgtgcactcatgactgccttaattaacattcttctgctattatggagcctgtccagcaataaacagggtctaggaaggtacaagattagcttccagttaaaatcccattttatattggaatgcatgagctacagatgacagcagagatcctgaggtttctagacatgttgattgtctcttttttctaaatgaactccaagtacttagaaaacagtccctgtccatcagccagaaaaggtgaccatcacccctaaagtaatttccaaacttagttcagtgggaagatatgctggtagtgcatattcagtgttgattttcagtgctagtaaccacttttaatgccagaaatatgtaacaatgataatgtaacgtcaaagtggttactaaagattatagccttaacttttttatgtaaaagataaaatccattcctcctcccagtgagcaagcatggcttgcatttctcaaaaatgagaacttccatggcagccaagaaaacgtcttctcagaggaactttcgtttgatgcatctcccaagcccacatgcctcctgtgttccagccacctcttccatttcacatttaaaccagctctccattcccattgagttgccctaacaacattgtctccagtgtcagaaccatattaaggttcgtttctcagattgggagcctgcaacaccatacagccaacattgcctttgccacgccactgccaccatccccaccattgccctatggtgggcagatgaattccagaaaccctcagggagccaggataattaggcaacccatctgaattggccacgtaagtgacaggcacttatctctcgggttcttgcttttgcagactccagggaagtcctgtctagaggtcgatggcagagactcctagtctttcccatgaggggttgataggaatcaaattgggattcctttggctttgggttttgtttttttgttgttgtttttggttttcagtttgttttttggtgtatggggggtgattttgtttctgaataagaaaaagaagaggcaaccatggcccttatgtgggtttatcctttttgagcaatgttttagccacaagtaaggaatcttgaaagtcttttgtccagcaagcagtcttaaaaatgtttttcctaactccttttgcaggtgactaagtacaaaaaaatagttttctcattgtattcaaaatagtgagtaggttccctggataatacacagtggtagttgacatattttctcaaaacacaaccagaaaacccacttccggtatttgtaaatcacctttcaagggaaaaagtgaacacgtattccttgtatttctagtttgattaccaaacctgatgttacaaagaaacctccgttctgtagacagaatttcttttatttttcttcttttactcctcacaatcactttcccagtgccatcaccatctataaggtctcagagcagaggattattcatggtaataagtgggggtgtggtgcagccattccagtaacacccacaagaggacagctgttctgaatgtccccacccacccctctttcagtacaggtgagacattttcagttcatgagctccagaccaaatcccaggccagcccttgcaccaaaagccttttttagaaggcttatcagtctattaggaatgtctcaggaaagatgagccatttctttggggagaaatatatttacagatggaagtgtgtgactgcgtgtctgtgtgtgtgtgtggtgtgtgtgcgcacgtgagtgcgtgtgttcatctatgtgcatttcacttccataaagacccagcccaagctgctgggaaccatgtgttcctgagtattctcagaggttaaacaagtgacaagtgagcttctgaaattagtgtctcagcaagctggctttaggaatgagccccattttatcaagcagagaaaaaaaataacagcagaaaagataaagataaaccaaaaatatataccccccaatggaaaataatgttgattcagcaattcccataggatgtattacatgctctaatttattatattattatttatctgtctttgatctttgcccattgtactcttaaaaagatgttgggatgttgattgcgatttttaaacaactagataatgtataaatcagcagtggaaatcagttttaatgtgtggatgtgtctgattattgttaaatgcctctttttttactttttttttttttagatgtataatgtttcataaaccctggcactggtcacaaagctcagctgtgaaaatgaaatttgtagtatttttaaacatgaatgtcaatttcaagtgtatttgaaatggttcctccaggagagatatttgtgcaccattaggaaaatcttctctgcagaggaagtagccttctttggagaaaatggaaaatgggttctgatatgtgatctcagagtagcccatttcctagggcaccatggaaaacacaaatgtgatctttaagtatacctcttccccagtttggggaggaaaggactcagtttgcaccctttttgtatgtaaaataaaatgtcttacctttcttggctacttctgcttgtttggttggttgattggtttgtctgtttttaatctccctcggctcatttgtaattaacaatctagctaggactaactttgatgcgattcaagactcctgtgaacaaaaataatttggcattcttgtttcattccttggattaaatattgtcttctcctgtgagtcacttcaaaaataaatactgctgtctctcttcgagtgctgaa

SEQ ID NO: 416 - DNA, 4438 bp, Homo sapiens
actcggctgttttcgctgatgcgggcagcttgggggccgccgccgctaaacagacgctttcctttttaattttttttccatgtgttcacttccgggtccggcgtcgatccggatgcccgaggcagaaggatgtttgacctccggataagcgaggcgctgctgtgcattcattccgggctgcatcggtggcgacagcagaggctcgggcggcgactctccggccagcggcggcggtaggaggcaccagcggcagtgcagggaccgaatccgagcagcgctgcgttacctctctctctcgctccttcccccctacctcgctcgctcgctcgctcgctccctgcgtggctcgctttcctcctccggccgccggcgggtgtgatgtgccgccgccgctgcccccgccggcgctgacggactgggggcgccgcccgcgcccgggaccgacccctctgctcgcggccgcgcctttgagctctctatcaatatcagctcacatcattgaaaagataattttgaagacatgttttgctgaaaagacactaagaaaaattttacgaatgggatgaacatgctccagttaattgactacctactgcaatttgaatgttaacattacccatctggtacagttacctagtgatgtacctattttcacaataccctgtttcagtgtgcttgtcttgattaaagaattcaaagtggagtaccgcaaacttgatatggaaaataaaaagaaagacaaggacaaatcagatgatagaatggcacgacctagtggtcgatcgggacacaacactcgaggaactgggtcttcatcgtctggagttttaatggttggacctaactttagagttggaaaaaaaattggatgtggcaattttggagaattacgattagggaaaaatttatacacaaatgaatatgtggcaattaagttggagcccatgaaatcaagagcaccacagctacatttggaatacagattctataagcagttaggatctggagatggtatacctcaagtttactatttcggcccttgtggtaaatacaatgctatggtgctggaactgctgggacctagtttggaagacttgtttgacttgtgtgacagaacattttctcttaaaacagttctcatgatagctatacaactgatttctcgcatggaatatgtccattcaaagaacttgatatacagagatgtaaaacctgagaacttcttaataggacgaccaggaaacaaaacccagcaagttattcacattatagattttggtttggcaaaggaatatattgatccggagacaaagaaacacataccatacagagaacacaagagccttacaggaacagctagatatatgagcataaacacacatttaggaaaagaacaaagtagaagagacgatttagaagctttaggtcatatgttcatgtattttctgagaggcagtcttccttggcaaggcttaaaggctgacacattaaaggagaggtatcagaaaattggagatacaaaacgggctacaccaatagaagtgttatgtgaaaattttccagaaatggcaacatatcttcgttatgtaagaaggctagatttttttgaaaaaccagactatgactacttaagaaagctttttactgacttgtttgatcgaaaaggatatatgtttgattatgaatatgactggattggtaaacagttgcctactccagtgggtgcagttcagcaagatcctgctctgtcatcaaacagagaagcacatcaacacagagataagatgcaacaatccaaaaaccagtcggcagaccacagggcagcttgggactcccagcaggcaaatccccaccatttgagagctcaccttgcagcagacagacatggtggctcggtacaggttgtaagttctacaaatggagagttaaacacagatgaccccaccgcaggacgttcaaatgcacccatcacagcccctactgaagtagaagtgatggatgaaaccaagtgctgctgttttttcaaacgaaggaaaaggaaaaccatacagcgccacaaatgactctggacacagacagatcctggggagttacttacatgttcatctgctgtcttgtgattaaaatcatctctgtagtgaccacgtatattttcaaggactcactcttagaaacaaaaatgtcatactttcatacttcattttgtggttgtcttacattctttttctttttttttttttctctaatttaacctttatggaagctttaaagttttgtcaaaacatgagtgctttgcccatcagtgaatggaatggaccaatgaggtggtatcaatgaatatagttccatagaacattttccagaagttcttctgttgtagaaagcagtacagtatcttaagtgtcaaccagttatatacctaatctggttttttataacttctgtaagagcataatcaaacaggaattttcttttctcagtggataatacaacagagaaaacagagttgcccaaatatttaaaagaagttattccttgagaagttcatattttgtgacatctgcattgatttcagtattactgatggtactgttattcataagtcatattaacattctctccgtgaaatcatggtacagtcactgcccagaggtactgaggaaaaagcaatatgggttcggcagatggtggtggtaaaatgaatcttaaggagtgtggtaaatatgtgctccgcttttgttgcatcactatgtgaagtactgtgttgcagaagtggcaaaagcgcttatttttaaaaatgcaaaatatttgtacaatgtaactttatgcttccaaataataatgtatgttagacagcaagaaatgaatactttaaaaagtgatgtatgttggagttataaagaaatacactaaggagaggtagtaaatgtgaaccttgttgcagtgtataaggtggaagcctaaagaaatctcaccgaaacttactgctgaatgattacattctcccttaagcagaaaactttggatgtgccatgcaatggtgtctgtgtaattattttgctctttgattaaaaaaaagacccccagcaataaaaagtgggtcactctatgccctctgtgcacattagtctcttgtattcaactttgctgattctctggaattttcctactctttagcataattttgatgattgaaaaatattttggaaaggatgggtcaggtgctttgcctccatagtcttttgaagtgcctgcatatgaacaacaacaacaacaacaaaaaattctgtaaaaaaggaagcccattccacttttcaagtatgctttgttttaagccataaagacacacatgtagttttgtcacattctactagccaaaattttcaagaagggttaaaacaaagactggctagaaagataattattttgaataaatctcatattcatctttcatttatataattgttacttattcctcccatgcagtctcttcgttgtctttaagtgtgtgcctccaggcatgcttatttatttttattgtctcaaggtaacatttaagatgtatattaaagtaaagctacatttttttacttcattattgcatttacagggatttaattgtactttgtaatttatttttcttattagccaaaagtttaatgcatttttttttgatgaattaggcacccacatgaacaccacaaatcaggacattgtttatcattgttgctatgaatcctatgaatgatcttttttttattttaaagacctacacttaacctacaaaacatttgctgtataatttggtcaacagtttctatctatctgtatactgtcatgatgtcttaaactgcaggagttacatactgagtttatatttttatttgctttgagcaaggtagataaacattttggccattataatgtgaaaccacttcttctttctttacagtatttgaccaaacttgtgtgtctatgatatttgtaaatacatgcgaatatctgtatttcttatcataagcctatttagttttattctcagtagggttttttggattgtacagtgtttatatgatctgaactccttatacataagaaggtgtgtatattaatccaattatggacttaaaatattttaaaagtataaatacccttatttgctgcaaagaccagtgtgtaggcatttgctttttagcaatatttttaagtgctccattttaatgccgaggaataagtcttttggcaacacaaactggtcaataataggtaatgcaggtatgttcaggttaagccaacaatgttttgcatttttatgcttattttctgtcaacactaatgaagtcaacattgcctgaatgtctgaataatgaaacacatccctgtttaaaagtatgtaactgaaaaagaaataaaaaaaaataaaagtagtttttttaaa

SEQ ID NO: 417 - DNA, 1674 bp, Homo sapiens
gcggccgcccgccgccgcgctcctcctcctcctcctccagcgcccggcggcccgctgcctcctccgcccgacgccccgcgtcccccgccgcgccgccgccgccaccctctgcgccccgcgccgccccccggtcccgcccgccatgcccggcccggccgcgggcagcagggcccgggtctacgccgaggtgaacagtctgaggagccgcgagtactgggactacgaggctcacgtcccgagctggggtaatcaagatgattaccaactggttcgaaaacttggtcggggaaaatatagtgaagtatttgaggccattaatatcaccaacaatgagagagtggttgtaaaaatcctgaagccagtgaagaaaaagaagataaaacgagaggttaagattctggagaaccttcgtggtggaacaaatatcattaagctgattgacactgtaaaggaccccgtgtcaaagacaccagctttggtatttgaatatatcaataatacagattttaagcaactctaccagatcctgacagactttgatatccggttttatatgtatgaactacttaaagctctggattactgccacagcaagggaatcatgcacagggatgtgaaacctcacaatgtcatgatagatcaccaacagaaaaagctgcgactgatagattggggtctggcagaattctatcatcctgctcaggagtacaatgttcgtgtagcctcaaggtacttcaagggaccagagctcctcgtggactatcagatgtatgattatagcttggacatgtggagtttgggctgtatgttagcaagcatgatctttcgaagggaaccattcttccatggacaggacaactatgaccagcttgttcgcattgccaaggttctgggtacagaagaactgtatgggtatctgaagaagtatcacatagacctagatccacacttcaacgatatcctgggacaacattcacggaaacgctgggaaaactttatccatagtgagaacagacaccttgtcagccctgaggccctagatcttctggacaaacttctgcgatacgaccatcaacagagactgactgccaaagaggccatggagcacccatacttctaccctgtggtgaaggagcagtcccagccttgtgcagacaatgctgtgctttccagtggtctcacggcagcacgatgaagactggaaagcgacgggtctgttgcggttctcccacttttccataagcagaacaagaaccaaatcaaacgtcttaacgcgtatagagagatcacgttccgtgagcagacacaaaacggtggcaggtttggcgagcacgaactagaccaagcgaagggcagcccaccaccgtatatcaaacctcacttccgaatgtaaaaggctcacttgcctttggcttcctgttgacttcttcccgacccagaaagcatggggaatgtgaagggtatgcagaatgttgttggttactgttgctccccgagcccctcaactcgtcccgtggccgcctgtttttccagcaaaccacgctaactagctgaccacagactccacagtggggggacgggcgcagtatgtggcatggcggcagttacatattattattttaaaagtatatattattgaataaaaggttttaaaagaaaaaaaaaaaaaaaaaa

SEQ ID NO: 418 - DNA, 1128 bp, Homo sapiens
gcttctcgttgtgccccgcccgcaagcgccctcctccgggccttcgtgacagccaggtcgtgcgcgggtcatcctgggattggtagttcgctttctctcatttagccagtttctttctctaccggggactccgtgtcccggcatccaccgcggcacctgacccttggcgcttgcgtgttgccctcttccccaccctccctaatttccactccccccaccccacttcgcctgccgcggtcgggtccgcggcctgcgctgtagcggtcgccgccgttccctggaagtagcaacttccctaccccaccccagtcctggtccccgtccagccgctgacgtgaagatgagcagctcagaggaggtgtcctggatttcctggttctgtgggctccgtggcaatgaattcttctgtgaagtggatgaagactacatccaggacaaatttaatcttactggactcaatgagcaggtccctcactaccgacaagctctagacatgatcttggacctggagcctgatgaagaactggaagacaaccccaaccagagtgacctgattgagcaggcagccgagatgctttatggattgatccacgcccgctacatccttaccaaccgtggcatcgcccagatgttggaaaagtaccagcaaggagactttggttactgtcctcgtgtgtactgtgagaaccagccaatgcttcccattggcctttcagacatcccaggtgaagccatggtgaagctctactgccccaagtgcatggatgtgtacacacccaagtcatcaagacaccatcacacggatggcgcctacttcggcactggtttccctcacatgctcttcatggtgcatcccgagtaccggcccaagagacctgccaaccagtttgtgcccaggctctacggtttcaagatccatccgatggcctaccagctgcagctccaagccgccagcaacttcaagagcccagtcaagacgattcgctgattccctcccccacctgtcctgcagtctttgacttttcctttcttttttgccaccctttcaggaaccctgtatggtttttagtttaaattaaaggagtcgttattgtggtgggaatatgaaataaagtagaagaaaaggcc

SEQ ID NO: 419 - DNA, 4315 bp, Homo sapiens
agagcagccttggcgctacggaggagcctagggctaaccctcagccatacctggggctggtcctggagttgctacgcagggttgtggcagcactgactgaaggtatgagacccgattctcatccttatggttttccatgggaattggtgatacgtgcagctgttgctggattttttgctgttctcttcttgtggagaagttttagatcagttacgagtcggctttatgtgagaagagagaaaaagtttgctgtggcactttctggactaattgaagaaaaatgtaaactacttgaaaaatttagccttgttcaaaaagagtatgaaggctatgaagtagagtcatctttaaagaatgccagctttgagaaggaggcaacagaagcacaaagtttggaggcaacctgcgaaaagctgaacaggttcaattctgaacttgtgcatgaaatactctgtctagaaaaagagttaaaagaagagaaatctaaacattctgaacaaaatgaattgatggcggatatttccaaaaggatacagtcgctagaagatgagtcaaaatccctcaaatcacaagtagctgaagccaaaatgaccttcaagagatttcaagcgaatgaagaacggttggagatagaaatacaagatgcttggaaagaaaattctgaacttcaggaaagccagaaacagcttttgcaagaagctgaagtatggaaagaacaagtgagtgaacttattaaacagaaaagaacatttgaagactccaaagtacatgcagaacaagttctaaatgataaagaaaatcacatcaagactctgactgaacgcttgctaaagatgaaagatggggttgctatgcttgaagaagatgtaacggatgatgataacttggaattagaaatgaacagtgaatcggaagatggtgcttacttagataatcctccaaaaggagctttgaagaaactgattcatgctgctaagttaaatgcttccttaaaaaccttagaaggagaaagaaaccaaatttatattcaattatctgaagttgataaaacaaaggaagagcttacagagcatattaaaaatcttcagactgaacaagcatctttgcagtcagaaaacacacattttgaaagtgagaatcagaagcttcagcagaaacttaaagtaatgactgaattatatcaagaaaatgaaatgaaactctacaggaaattaatagtagaggaaaaatgccggttagagaaagaagagaaactttctaaagtagacgaaatgatcagccatgccactgaagagctggagacctaccgaaagcgagccaaagatcttaaagaatttgagaaaactattcatttttatcaaaagaagattattctccatgagaaaaaagcacatgataattggtcggcagcttggactgctgaaagaaacctcaatgatttaaggaaagaaaatgctcacaacagacaaaaattaactgaaatagagtttaaaataaaacttttagaaaaagatccttatggacttgatgttccaaatacagcatttggcagacagcattccccatatggtccctcaccattgggttggccttcatctgaaacgagagcttctctctatcctccaactttgttggaaggtcctctcagactctcacctttgcttccacggggaggaggaagaggctccagaggcccagggaatcctccggaccatcagattaccaaagaaagaggagaatcaagctgtgataggttaactgatcctcacagggctccttctgacgctgggcccctggcacctccgtgggaacaggactataggatgatgtttcctccaccaggacaatcatatcctgattcagctctccctccacaaaggcaagacagattttattctaattgtgctagactctctggaccagcagaactcagaagttttaatatgccttctttggataaaatggatgggtcaatgccttcagaaatggaatccagtagaaatgataccaaagataatcttggtaatttaaaggtgcctgattcatctctccccgctgaaaatgaagcaactggccctggctttgttcctccacctcttgctccaatcagaggtttattgtttccggtagatacaaggggcccgttcataagaagaggacctcctttccccccacctcctccaggaaccgtgtttggagcttctccagattatttttctccaagggatgtcccaggtccaccacgtgctccatttgcaatgagaaatgtctatttaccgagaggttttcttccttaccgtcccccaagacctgcatttttccccccagcccccacattctgaaggtagaatgagtttccatcagggttgagtccgacttcaaatgagcctgctgctgaacatccagaacgacagcaagaaacctaacaacatgtttgccctcttcaaaagtaattttgactgatctcattttcagtttaagtaactgctgttacttaagtgattacacttttgttcagattgaaacttaatggaactataattcccaggatagtattttgtaaatgaggatgatttaaatatgaatcttatgagtaaattatttcattttattttattctagatagtataacttttaatttgattaatccactattatataaagaatggtgggagctttatatatgtaatcttgcaggtggggaggctttaaattgtctttatgtcaagaactgtatttactgtggttgtagacaaatgtgaaagtaactttatgcttaaataagttttagttgattaaaaaaatttaaaaaatttaaaaaaagaaatatataaatatgcacaggtgggaaggtagaatactatgtaactgttagaatatttcactttaaaccaagatgatcttggatctcctgtcttatagattttatatcctctttcagtactttgagagtgtaaaacatttatagcagaaagtattcgtgtttcctctgttttcctcaagaatggtttcttcgccctccctttccttcccttcgtcttccctaagctaatttcttcctatgtttgtcatcatatcattacataattgtgttgttatttcttttgttttatttttatttggtgggaacaactttatccagaacttttacttgccccagaattatatagatcagtttctcctgacttctttcccaacctttacctctgttggtgttctaatagttttagttttatgttctgcttttctcttgctgtggcaaggggaaggagtaaatctaagatagtgcttaattgcagttggtgaatttgatctctgattgagctctcttctctggaattctgttaaaagatgaaatgtatcgtgttccctgagagacgccctcaaattttggattagtccttcatgcaagctgggccaccaagccattgcttcttttggggacaacctgccctcacttttaaaaagcatcctagctcacatgcctcccctagcagttaatgccactccagtctctgcttgaatgtaataaaataaaagaaaagtaactatttgagacatgaggtgcccttattgtacactggggcttcctatacattttccgtcttcccttgaaccaccactatcctcagctactttatgcttctgttctgttaaagccctatttgctagtggaaaaatttaactcctggtgatttttttaatactaggcctcttgccttccttccagtgagagaaaaatagaatggtaagcctagtggtttcttccttcactgttgaatactatttatccaaggtatcaaggaagaacttctaatcagaaaagacatgtattattttcacaactgggtagcatatctcactcccagaatggaagttaggtgggaattgcaagattaaggagatttttctggatttctgtctatgtatcatatccacagaactctttctagaggaattttatattgagccaggcatccatttccacagtcttgcatttctagatacttccaaagttatagcactgttcctaaatcatttttggctttatttattaatttattgttcacttcatttcattaggttcagtatgaaacaggtattgtcatctctttgtgtctactttgccacctttccccagaataggcctgaatgagattgaaaacgttacttcagttccttgtgtctgacattgcttgtttgtaactaagaaaaataatatttgcttttgttgaatgactactaatttttttccatgaacctaataaactaaaaagaaagttgaaataataaagagtgaataagtataaaaatc

SEQ ID NO: 420 - DNA, 2601 bp, Homo sapiens
tgagagcagccttggcgctacggaggagcctagggctaaccctcagccatacctggggctggtcctggagttgctacgcagggttgtggcagcactgactgaaggtatgagacccgattctcatccttatggttttccatgggaattggtgatacgtgcagctgttgctggattttttgctgttctcttcttgtggagaagttttagatcagttacgagtcggctttatgtgagaagagagaaaaagtttgctgtggcactttctggactaattgaagaaaaatgtaaactacttgaaaaatttagccttgttcaaaaagagtatgaaggctatgaagtagagtcatctttaaagaatgccagctttgagaaggaggcaacagaagcacaaagtttggaggcaacctgcgaaaagctgaacaggttcaattctgaacttgtgcatgaaatactctgtctagaaaaagagttaaaagaagagaaatctaaacattctgaacaaaatgaattgatggcggatatttccaaaaggatacagtcgctagaagatgagtcaaaatccctcaaatcacaagtagctgaagccaaaatgaccttcaagagatttcaagcgaatgaagaacggttggagatagaaatacaagatgcttggaaagaaaattctgaacttcaggaaagccagaaacagcttttgcaagaagctgaagtatggaaagaacaagtgagtgaacttattaaacagaaaagaacatttgaagactccaaagtacatgcagaacaagttctaaatgataaagaaaatcacatcaagactctgactgaacgcttgctaaagatgaaagatggggttgctatgcttgaagaagatgtaacggatgatgataacttggaattagaaatgaacagtgaatcggaagatggtgcttacttagataatcctccaaaaggagctttgaagaaactgattcatgctgctaagttaaatgcttccttaaaaaccttagaaggagaaagaaaccaaatttatattcaattatctgaagttgataaaacaaaggaagagcttacagagcatattaaaaatcttcagactgaacaagcatctttgcagtcagaaaacacacattttgaaagtgagaatcagaagcttcagcagaaacttaaagtaatgactgaattatatcaagaaaatgaaatgaaactctacaggaaattaatagtagaggaaaaatgccggttagagaaagaagagaaactttctaaagtagacgaaatgatcagccatgccactgaagagctggagacctaccgaaagcgagccaaagatcttaaagaatttgagaaaactattcatttttatcaaaagaagattattctccatgagaaaaaagcacatgataattggtcggcagcttggactgctgaaagaaacctcaatgatttaaggaaagaaaatgctcacaacagacaaaaattaactgaaatagagtttaaaataaaacttttagaaaaagatccttatggacttgatgttccaaatacagcatttggcagacagcattccccatatggtccctcaccattgggttggccttcatctgaaacgagagcttctctctatcctccaactttgttggaaggtcctctcagactctcacctttgcttccacggggaggaggaagaggctccagaggcccagggaatcctccggaccatcagattaccaaagaaagaggagaatcaagctgtgataggttaactgatcctcacagggctccttctgacgctgggcccctggcacctccgtgggaacaggactataggatgatgtttcctccaccaggacaatcatatcctgattcagctctccctccacaaaggcaagacagattttattctaattgtgctagactctctggaccagcagaactcagaagttttaatatgccttctttggataaaatggatgggtcaatgccttcagaaatggaatccagtagaaatgataccaaagataatcttggtaatttaaaggtgcctgattcatctctccccgctgaaaatgaagcaactggccctggctttgttcctccacctcttgctccaatcagaggtttattgtttccggtagatacaaggggcccgttcataagaagaggacctcctttccccccacctcctccaggaaccgtgtttggagcttctccagattatttttctccaagggatgtcccaggtccaccacgtgctccatttgcaatgagaaatgtctatttaccgagaggttttcttccttaccgtcccccaagacctgcatttttccccccagcccccacattctgaaggtagaatgagtttccatcagggttgagtccgacttcaaatgagcctgctgctgaacatccagaacgacagcaagaaacctaacaacatgtttgccctcttcaaaagtaattttgactgatctcattttcagtttaagtaactgctgttacttaagtgattacacttttgttcagattgaaacttaatggaactataattcccaggatagtattttgtaaatgaggatgatttaaatacgaaaaaaaaaaaaaaaa

SEQ ID NO: 421 - DNA, 4455 bp, Homo sapiens
gcggccgccgcgccgcgcacccatggacggcccggccatcatcacccaggtgaccaaccccaaggaggacgagggccggttgccgggcgcgggcgagaaagcctcccagtgcaacgtcagcttaaagaagcagaggagccgcagcatccttagctccttcttctgctgcttccgtgattacaatgtggaggcccctccacccagcagccccagtgtgcttccgccactggtggaggagaatggtgggcttcagaagggtgaccagaggcaggtcattcccataccaagtccaccagctaagtaccttcttccagaggtgacggtgcttgactatggaaagaaatgtgtggtcattgatttagatgaaacattggtgcacagttcgtttaagcctattagtaatgctgattttattgttccggttgaaatcgatggaactatacatcaggtgtatgtgctgaagcggccacatgtggacgagttcctccagaggatggggcagctttttgaatgtgtgctctttactgccagcttggccaagtatgcagaccctgtggctgacctcctagaccgctggggtgtgttccgggcccggctcttcagagaatcatgtgtttttcatcgtgggaactacgtgaaggacctgagtcgccttgggcgggagctgagcaaagtgatcattgttgacaattcccctgcctcatacatcttccatcctgagaatgcagtgcctgtgcagtcctggttcgatgacatgacggacacggagctgctggacctcatccccttctttgagggcctgagccgggaggacgacgtgtacagcatgctgcacagactctgcaataggtagccctggcctctgcctgcctcccgcctgtgcactctggaacctctggcctcaggggacctgcctgtcctcagctccctgggagctgaaagtgaggatactccgtgctccaggccacagggtgaatgtggccatgcctacctgttttgtttttttaagaacagaaacaactattttaaaagaactcttttaagaaatttcataaagggacatgcattttactgggtttgcttttcttaaaacataccaaaaaagaaaaaaatagaaaaaaaaaaaaaaaaagcttgatctctatcagacttcctttcaactgtcctcccctccaagcagaccacctgtccccttctatcccagctcagagcagctgacccaactcagaatctctttcctacaggatgaagtgccttttgaatgttattttaagccgagagttaatttttctacacaacatatttccagacatcttttagtcttttattgtcttagatactataagaagatgaacatgacaattttctagaacctggtagcgtgtgtgtgtgtggcggggggtgctgagggaggggagtgagtcacaggagcctgtcccccaacaggtgtgactgctctgacaacctgtggcatgctgcagggtcaggctcctgataggaggatttcatgactatgtcattgtctccactcatttttgacccagtttggaatgtatctgcaattgtgtggctcaacactttaggaaacaatagattattttatattattatttctgatggtgacaagtttgtcttgaggtcacattttctccttgaaaagtgacatcctgtcacttctgctctcacactactgccatacatttgtgttttttgttgttattgtttgggtagagcagttacaagaaaccctaaaacccttggatataaaagaaatctgtttattgatttttaaatctttcctttccaaaagctggatacacatggagctgtttgggaattttccttgctgctaccgcgctgccaccaaatggaattgaccagcggctgttacactgttctttgccactgtgcctatgctcagaatatgctcactgctaagctacaaactcggacagggtcagaaacagaggtgtcccatcccattgcagcctccaccacctgtaaccccttcctggcattggccactgaagggtacaaaggcaaaaggaccacagcaccacttaggtgtagcatggattttaaactgcagtcagtatcagatcctgtttgataaataagctgactgttctctcttgagaacctgtggcctcaaccagccaccaagctgatgtggcccaagtccatctcttggtcttctcctttgaagcacagcctatttctgagccaagggttggggaagcctgtctagatgtgggactcattgccccaaaccagggagaggaagagctcccacagggagagcccaggctctctttgcagcctttcccagtttggtgtttaagcagtgccatgttccttgtttgacaacaagacagtctgtaaagtattgctcttaaaaacaattaaaaagaaccctttcatattggcaccattgccttagtcctctgtgggttggtcttcagccagcattctggtgggagtgactggcattaacaagactggaaatcgggggtcaaagtaaaatatctttgttttgctttcattcacaaagtaatgaagccagctgccaattacatcctcccaacagcactttggtctgtggactgctgtgtgaatattcagaagggaagtaagtattcagggggtaaacaggtctcccagcattctgagtgttccaaaccagtaatccacatgccaattcaaatagaacagccccttgctagatattaccacagataatgacagttacatggtagaactgcccatgccacaaatatttatttggaaaagtagtcattaaatgaacccactgccttaaatgtcttgaatgttgcagtcaagtgtctgtcatgtgttgatatccacacagaattaggccctaatgagagccttagaccctcaaccatgcccccttcgttggcatcacagggccttatttggaagagcgggcaaagaggatggaaatcataaaatatttcatgggaatcgaacctagggatagtgctccacttctgacgatggagtgaagacacttggcagacttgagccagacacttcacctagtagttcctgaaactgtgagcaccactgcactaagccagtgcggagctgttagggacgggcccagctcctgcaccacggacacagaatgtctggagagggccagcaggccctctgagggttctggaatctgtgcaccttatttgaccacactccaaaattctgtttttattttaacccttgaatctgctttatgtacataatcaaaatatctatatctatatctatatctatatctatatatttttaatcatctacatgtaaatgaagcaatagaattctaacataaggccaagaaatgagacgaatgtttggggtttatgttttttaaggtaaatacgggtattgtttttaattattaccatgtattaaattgtgggctttgaaacctaatgaaacctgttagccacttctctgtgccatatacttcccatgttaccaaaatacccccaactctttagccaaaagagaaccctgacctcctgagtttccatgctcctttctgtaccaggtttaaatgtagtcttctggagaagtatttttgacattgagctctgggacaggacaccttgggtttgtggactgcagcccactatgatgttattacttctctggccaggcctccagtggaagtgcacaggcactcccaatgttgttaatgctctgtcttccatttgttctggaatcctacgtgttggtctgtggttccatgcattagctgtttgtaaataatgcatttgcatactgaaaaaggaatgccacctgccacagttgatggtgaggaagctcctttgacgtggtgcaattttgatgagatgtctctggggacacgaggatgccctaatgatgctgacttgtcatggttgcagcatttgaacttttggtgttaaaaaaaaaaacctgtaagtctgtaacctggcaacattttacaaccctgtatttttaaagatggctttctaataaaaaatccagaaccacacagccctatggtcaaacaatcctacgtttgtgcctctgcttttaaaggtgctgtgctggacagttggcatgccagggttcgagaagagtgaatggcttgacgtacttgcagttaactgtgcaaaattggctggctgcctctgttcctactgtactgtaactttgatcatgtctgttcctgttccattctcccaggagcttctctgcagactgacacaccctcccccaccccgggtagtggagatgctggtgtctgggtagtcatggatttctgctggacatttgaatgtgataaacaatccagcattacttaggaaatgctacatgcggaatgtgcacgtttccaggggcgagtattgtcaatcaaaaggtttgcaatgatttccttcctgccaaaaataaacatgtgaaactgca

SEQ ID NO: 422 - DNA, 3389 bp, Homo sapiens
agtgcctccctccagactcgggagggtcgagggggcgcgggagagagcgcgggcggccgccggggctggtcgcctgcagggatgggggacgagcggccccactactacgggaaacacggaacgccacagaagtatgatcccactttcaaaggacccatttacaataggggctgcacggatatcatatgctgtgtgttcctgctcctggccattgtgggctacgtggctgtaggcatcatagcctggactcatggagaccctcgaaaggtgatctaccccactgatagccggggcgagttctgcgggcagaagggcacaaaaaacgagaacaaaccctatctgttttatttcaacattgtgaaatgtgccagccccctggttctgctggaattccaatgtcccactccccagatctgcgtggaaaaatgccccgaccgctacctcacgtacctgaatgctcgcagctcccgggactttgagtactataagcagttctgtgttcctggcttcaagaacaataaaggagtggctgaggtgcttcgagatggtgactgccctgctgtcctcatccccagcaaacccttggcccggagatgcttccccgctatccacgcctacaagggtgtcctgatggtgggcaatgagacgacctatgaggatgggcatggctcccggaaaaacatcacagacctggtggagggcgccaagaaagccaatggagtcctagaggcgcggcaactcgccatgcgcatatttgaagattacaccgtctcttggtactggattatcataggcctggtcattgccatggcgatgagcctcctgttcatcatcctgcttcgcttcctggctggtattatggtctgggtgatgatcatcatggtgattctggtgctgggctacggaatatttcactgctacatggagtactcccgactgcgtggtgaggccggctctgatgtctctttggtggacctcggctttcagacggatttccgggtgtacctgcacttacggcagacctggttggcctttatgatcattctgagtatccttgaagtcattatcatcttgctgctcatctttctccggaagagaattctcatcgcgattgcactcatcaaagaagccagcagggctgtgggatacgtcatgtgctccttgctctacccactggtcaccttcttcttgctgtgcctctgcatcgcctactgggccagcactgctgtcttcctgtccacttccaacgaagcggtctataagatctttgatgacagcccctgcccatttactgcgaaaacctgcaacccagagaccttcccctcctccaatgagtcccgccaatgccccaatgcccgttgccagttcgccttctacggtggtgagtcgggctaccaccgggccctgctgggcctgcagatcttcaatgccttcatgttcttctggttggccaacttcgtgctggcgctgggccaggtcacgctggccggggcctttgcctcctactactgggccctgcgcaagccggacgacctgccggccttcccgctcttctctgcctttggccgggcgctcaggtaccacacaggctccctggcctttggcgcgctcatcctggccattgtgcagatcatccgtgtgatactcgagtacctggatcagcggctgaaagctgcagagaacaagtttgccaagtgcctcatgacctgtctcaaatgctgcttctggtgcctggagaagttcatcaaattccttaataggaatgcctacatcatgattgccatctacggcaccaatttctgcacctcggccaggaatgccttcttcctgctcatgagaaacatcatcagagtggctgtcctggataaagttactgacttcctcttcctgttgggcaaacttctgatcgttggtagtgtggggatcctggctttcttcttcttcacccaccgtatcaggatcgtgcaggatacagcaccacccctcaattattactgggttcctatactgacggtgatcgttggctcctacttgattgcacacggtttcttcagcgtctatggcatgtgtgtggacacgctgttcctctgcttcttggaggacctggagaggaatgacggctcggccgagaggccttacttcatgtcttccaccctcaagaaacccttgaacaagaccaacaagaaggcagcggagtcctgaaggccccgtgctccccacctctcaaggagtctcatgccgcagggtgctcagtagctgggtctgttcccccagccccttgggctcacctgaagtcctatcactgccgctctgcccctccccatgagccagatcccaccagtttctggacgtggagagtctggggcatctccttcttatgccaaggggcgcttggagttttcatggctgcccctccagactgcgagaaacaagtaaaaacccattggggcctcttgatgtctgggatggcacgtggcccgacctccacaagctccctcatgcttcctgtcccccgcttacacgacaacgggccagaccacgggaaggacggtgtttgtgtctgagggagctgctggccacagtgaacacccacgtttattcctgcctgctccggccaggactgaaccccttctccacacctgaacagttggctcaagggccaccagaagcatttctttattattattattttttaacctggacatgcattaaagggtctattagctttctttccgtctgtctcaacagctgagatggggccgccaaggagtgccttccttttgctccctcctagctgggagtgacgggtgggagtgtgtgtgcccaggtgggggtgtctcctggctgggaaggagggaaagggagggagagttttgcgggggttggcagtggagagcaggctggagaggagatggctaatagctgtttaatggaaacctgctgggctggagggagttaggctgaatttcccgacttcctctgccagttattgacacagctctctttgtaagagaggaaagaaactaaacccacccaagggatgatttcagggggagaggtggagggcagatgtcctgggcaaaccgggcccctctgcccacacacctcacttgatccttttgccaaacttgtcaaactcaggggaactggcttcccagttgcccctttgccatattccaagtccccctcagacttcatgtctctgctcatcagcactgtcccaggatcctggagagggagaacccctggccccaggggaaagaggggggggtctcccgtttcctgtgcctgcaccagccctgcccccattgcgtctgcacacccctgcgtgtaactgcattccaaccactaataaagtgcctattgtacaggtaaaaaaaaaaaaaaaa

SEQ ID NO: 423 - DNA, 1458 bp, Homo sapiens
ccacgctcgtgccgctccccccccgcgctcccagttgacgctctgggccgccacctccgcggaccctgagcgcaagagccaagccgccagcgctgcgatgtgggccacgctgccgctgctctgcgccgccgaactgtgcgtgaactccttagagaagtttcacttcaagtcatggatgtctaagcaccgtaagacctacagtacggaggagtaccaccacaggctgcagacgtttgccagcaactggaggaagataaacgcccacaacaatgggaaccacacatttaaaatggcactgaaccaattttcagacatgagctttgctgaaataaaacacaagtatctctggtcagagcctcagaattgctcagccaccaaaagtaactaccttcgaggtactggtccctacccaccttccgtggactggcggaaaaaaggaaattttgtctcacctgtgaaaaatcagggtgcctgcggcagttgctggactttctccaccactggggccctggagtctgcgatcgccatcgcaaccggaaagatgctgtccttggcggaacagcagctggtggactgcgcccaggacttcaataatcacggctgccaagggggtctccccagccaggctttcgagtatatcctgtacaacaaggggatcatgggtgaagacacctacccctaccagggcaaggatggttattgcaagttccaacctggaaaggccatcggctttgtcaaggatgtagccaacatcacaatctatgacgaggaagcgatggtggaggctgtggccctctacaaccctgtgagctttgcctttgaggtgactcaggacttcatgatgtatagaacgggcatctactccagtacttcctgccataaaactccagataaagtaaaccatgcagtactggctgttgggtatggagaaaaaaatgggatcccttactggatcgtgaaaaactcttggggtccccagtggggaatgaacgggtacttcctcatcgagcgcggaaagaacatgtgtggcctggctgcctgcgcctcctaccccatccctctggtgtgagccgtggcagccgcagcgcagactggcggagaaggagaggaacgggcagcctgggcctgggtggaaatcctgccctggaggaagttgtggggagatccactgggacccccaacattctgccctcacctctgtgcccagcctggaaacctacagacaaggaggagttccaccatgagctcacccgtgtctatgacgcaaagatcaccagccatgtgccttagtgtccttcttaacagactcaaaccacatggaccacgaatattctttctgtccagaagggctactttccacatatagagctccagggactgtcttttctgtattcgctgttcaataaacattgagtgagcacctccccagatggagcatgctggtcctggaaaaaaaaa

SEQ ID NO: 424 - DNA, 3226 bp, Homo sapiens
aggaggagggccgggcgggcaggggaggaggaggaggcgggcgccgtgtcgcacgcagctccaggcggggcagccccggtagctgagggacgcagctagaccttggcgggacggggctttcgccggggcccaggcccagggaccaggcggaggcgtcgcgggagcctttggggcaccacagagatgcgggtttgcctgcaatgagatttcattctctacatttaaaggacatcctttctgagctgctgtgaataaatttggaatggtactgtatattttcatctaatggagaactagctgtactttgaataaggattgctgcactggacgactttagaacatccctcacaatgtcgtcaacccggagccagaacccccacggcctgaagcagattggcctggaccagatctgggacgacctcagagccggcatccagcaggtgtacacacggcagagcatggccaagtccagatatatggagctctacactcatgtttataactactgtactagtgttcaccagtcaaaccaagcacgaggagctggagttcctccttctaagtcgaaaaaggggcagacacctggaggagctcagtttgttggcctggaattatataaacgacttaaggaatttttgaagaattacttgacaaatcttcttaaggatggagaagatttgatggatgagagtgtactgaaattctacactcaacaatgggaagattatcgattttcaagcaaagtgctgaatggaatttgtgcctacctcaatagacattgggttcgccgtgaatgtgacgaaggacgaaaaggaatatatgaaatctattcgcttgcattggtgacttggagagactgtctgttcaggccactgaataaacaggtaacaaatgctgttttaaagctgattgaaaaggaaaggaatggtgaaaccatcaatacaagattgattagtggagttgtacagtcttacgtggaattggggctgaatgaagatgatgcatttgcaaagggccctacgttaacagtgtataaagaatcctttgaatctcaatttttggctgacacagagagattttataccagagagagtactgaattcttgcagcagaacccagttactgaatatatgaaaaaggcagaggctcgtctgcttgaggaacaacgaagagttcaggtttaccttcatgaaagcacacaagatgaattagcaaggaaatgtgaacaagtcctcattgaaaaacacttggaaattttccacacagaatttcagaatttattggatgctgacaaaaatgaagatttgggacgcatgtataatcttgtatctagaatccaggatggcctaggagaattgaaaaaactgttggagacacacattcataatcagggtcttgcagccattgaaaagtgtggagaagctgctttaaatgaccccaaaatgtatgtacagacagtgcttgatgttcataaaaaatacaatgccctggtaatgtctgcattcaacaatgacgctggctttgtggctgctcttgataaggcttgtggtcgcttcataaacaacaacgcggttaccaagatggcccaatcatccagtaaatcccctgagttgctggctcgatactgtgactccttgttgaagaaaagttccaagaacccagaggaggcagaactagaagacacactcaatcaagtgatggttgtcttcaagtacatagaagacaaagacgtatttcagaagttctatgcgaagatgctcgccaagaggctcgtccaccagaacagtgcaagtgacgatgccgaagccagcatgatctccaagttaaagcaagcttgcgggttcgagtacacctctaaacttcagcgcatgtttcaagacattggcgtgagcaaagatctgaacgagcaattcaaaaagcacttgacaaactcagaacccctagacttggatttcagcattcaagtgctgagctccgggtcctggcccttccagcagtcttgtacatttgccttgccgtcagagttggaacgtagttatcagcgattcacagctttctacgccagccgccacagtggccgaaaattgacgtggttatatcagttgtctaaaggagaattggtaactaactgcttcaaaaacagatatactttgcaggcgtcgacattccagatggctatcctgcttcagtacaacacggaagatgcctacactgtgcagcagctgaccgacagcactcaaattaaaatggacattttggcgcaagttttacagattttattaaagtcgaagctattggtcttggaagatgaaaatgcaaatgttgatgaggtggaattgaagccagataccttaataaaattatatcttggttataaaaataagaaattaagggttaacatcaatgtgccaatgaaaaccgaacagaagcaggaacaagaaaccacacacaaaaacatcgaggaagaccgcaaactactgattcaggcggccatcgtgagaatcatgaagatgaggaaggttctgaaacaccagcagttacttggcgaggtcctcactcagctgtcctccaggttcaaacctcgagtccctgtgatcaagaaatgcattgacattctaattgagaaagaatatttggagcgagtggatggtgaaaaggacacctacagttacttggcttaacccttctggaagggtctgactgtgtgacccgcagcaaatagttcatgttggaaagaatgaaaacaactcaagttcatagcagccagcctgccgccattggacctcccttttaaaaactgagaccaagactcccatcagctggtctcggatttacatcggaactgctcaggattgatacatttcaagtctgtaaatacggacaccaacgccatttaccctaatttaagaacagcggggactgaccctccgtgccgagggctgcatgctaccgcactaagtcaatacatgggctccccgattcgcagctgtcgtcttggcagcacttgtcacgttggcagcactttgagagcaagtctgagtggacccacatgtaacctgctatgaaaaccatttgtatagtgtgtttcattttttaatgtgtgaaaataaagaaaattaaaggatttctgtacaagtcgcattgggttttgttttaagttttactaatttctatatgtaaataaaagatataatgattgtgcaaatttaaaaaaaaaaaaaaaaaa

SEQ ID NO: 425 - DNA, 2910 bp, Homo sapiens
ggcggcggccggccggggaggcggcctcggcgcacagtaatggcagcgctgtgagcaggggaacgcgagctgacagccgccgccgccgccgcctccgcccaccttcctcgccggggcttcgtctttcactccttcgggctgcctccccctccccttgtcccctgccccttgccctgcttctgcagaagatttcaacactacacttgcacaatgtctttgaaaccaagagtagtagattttgatgaaacatggaacaaacttttgacgacaataaaagccgtggtcatgttggaatacgtcgaaagagcaacatggaatgaccgtttctcagatatctatgctttatgtgtggcctatcctgaaccccttggagaaagactttatacagaaactaagatttttttggaaaatcatgttcggcatttgcataagagagttttggagtcagaagaacaagtacttgttatgtatcataggtactgggaagaatacagcaagggtgcagactatatggactgcttatataggtatctcaacacccagtttattaaaaagaataaattaacagaagcggaccttcagtatggctatggtggtgtagatatgaatgaaccacttatggaaataggagagctagcattggatatgtggaggaaattgatggttgaaccacttcaggccatccttatccgaatgctgctccgagaaatcaaaaatgatcgtggtggagaagacccaaaccagaaagtaatccatggggttattaactcctttgttcatgttgaacagtataagaaaaaattccccttaaagttttatcaggaaatttttgagtctccctttctgactgaaacaggagagtattacaaacaagaagcttcaaatttattacaagaatcaaactgctcacagtatatggaaaaggttctaggtagattaaaagatgaagaaattcgatgtcgaaaatacctacatccaagttcatatactaaggtgattcatgaatgtcaacaacgaatggtagcagaccacttacagtttttacatgcagaatgtcataatataattcgacaagagaaaaaaaatgacatggcaaatatgtacgtcttactccgtgctgtgtccactggtttacctcatatgattcaggagctgcaaaaccacatccatgatgagggccttcgagcaaccagcaaccttactcaggaaaacatgccaacactatttgtggagtcagttttggaagtgcatggtaaatttgttcagcttatcaacactgttttgaatggtgatcagcattttatgagtgcgttggataaggcccttacgtcagttgtaaattacagagaacctaagtctgtttgcaaagcacctgaactgcttgctaagtactgtgacaacttactgaagaagtcagcgaaagggatgacagagaatgaagtggaagacaggctcacgagcttcatcacagtgttcaaatacattgatgacaaggacgtctttcaaaagttctacgcaagaatgctggcaaaacgtttaattcatgggttatccatgtctatggactctgaagaagccatgatcaacaaattaaagcaagcctgtggttatgagtttaccagcaagctacatcggatgtatacagatatgagtgtcagcgctgatctcaacaataagttcaacaattttatcaaaaaccaagacacagtaatagatttgggaattagttttcaaatatatgttctacaggctggtgcgtggcctcttactcaggctccttcatctacgtttgcaattccccaggaattagaaaaaagtgtacagatgtttgaattattttatagccaacatttcagtggaaggaaacttacatggttacattatctgtgtacaggtgaagttaaaatgaactatttgggcaaaccatatgtagccatggttacaacataccaaatggcagttcttcttgcctttaacaacagtgaaactgtcagttataaagagcttcaggacagcactcagatgaatgaaaaggaactgacaaaaacaatcaaatcattacttgatgtgaaaatgattaaccatgattcagaaaaggaagatattgatgcagaatcttcgttttcattaaatatgaactttagcagtaaaagaacaaaatttaaaattactacatcaatgcagaaagacacaccacaagaaatggagcagactagaagtgcagttgatgaggaccggaaaatgtatctccaagctgctatagttcgtatcatgaaagcacgaaaagtgcttcggcacaatgcccttattcaagaggtgattagccagtcaagagctaggtttaatcccagtatcagcatgattaagaagtgtattgaagttctgatagacaaacaatacatagaacgcagccaggcgtcggcagatgaatacagctacgtcgcgtgatgtcgctctcctccagcgtggtgtgagaagatcattgccatcaccatttggtgtgttcctgtgggaaaaagcaggactgtgcctccataatttggtcatttggcagcccctgttttctgctgtttacaacatcaccagtgccacgtcatgagcgtcaaagaaaatgcctagagatatttcaagctcatgtcattatgacatttcttaaaactttattaaaagaatgagtgaagtattgctgaaaagtggaaattcggttgggtaccatgctttttctccccttcacgtttgcagttgatgtgtctttttttttttttttaatgtatcttaaaggacataaaatttaaaaacttaaatattgtaatatgacagataacctaataattgtatctacattaaaatgacaaacatgatactgctgcttgtcaaataaaaaaaaaaaaaaaaaaaaaaaaaaaaaaa

SEQ ID NO: 426 - DNA, 2339 bp, Homo sapiens
gaggccacctgtttgtgatgtgcaggcacagaagaaaggcacagctccccatcagtttcatggaaaataactcagtgcctgctgggaaccagctgctggagatccctacagagagcttccactgggggcaacccttccaggaaggagttggggagagagaaccctcactgtggggaatgctgataaaccagtcacacagctgctctattctcacacaaatctaccccttgcgtggctggaactgacgtttccctggaggtgtccagaaagctgatgtaacacagagcctataaaagctgtcggtccttaaggctgcccagcgccttgccaaaatggagcttgtaagaaggctcatgccattgaccctcttaattctctcctgtttggcggagctgacaatggcggaggctgaaggcaatgcaagctgcacagtcagtctagggggtgccaatatggcagagacccacaaagccatgatcctgcaactcaatcccagtgagaactgcacctggacaatagaaagaccagaaaacaaaagcatcagaattatcttttcctatgtccagcttgatccagatggaagctgtgaaagtgaaaacattaaagtctttgacggaacctccagcaatgggcctctgctagggcaagtctgcagtaaaaacgactatgttcctgtatttgaatcatcatccagtacattgacgtttcaaatagttactgactcagcaagaattcaaagaactgtctttgtcttctactacttcttctctcctaacatctctattccaaactgtggcggttacctggataccttggaaggatccttcaccagccccaattacccaaagccgcatcctgagctggcttattgtgtgtggcacatacaagtggagaaagattacaagataaaactaaacttcaaagagattttcctagaaatagacaaacagtgcaaatttgattttcttgccatctatgatggcccctccaccaactctggcctgattggacaagtctgtggccgtgtgactcccaccttcgaatcgtcatcaaactctctgactgtcgtgttgtctacagattatgccaattcttaccggggattttctgcttcctacacctcaatttatgcagaaaacatcaacactacatctttaacttgctcttctgacaggatgagagttattataagcaaatcctacctagaggcttttaactctaatgggaataacttgcaactaaaagacccaacttgcagaccaaaattatcaaatgttgtggaattttctgtccctcttaatggatgtggtacaatcagaaaggtagaagatcagtcaattacttacaccaatataatcaccttttctgcatcctcaacttctgaagtgatcacccgtcagaaacaactccagattattgtgaagtgtgaaatgggacataattctacagtggagataatatacataacagaagatgatgtaatacaaagtcaaaatgcactgggcaaatataacaccagcatggctctttttgaatccaattcatttgaaaagactatacttgaatcaccatattatgtggatttgaaccaaactctttttgttcaagttagtctgcacacctcagatccaaatttggtggtgtttcttgatacctgtagagcctctcccacctctgactttgcatctccaacctacgacctaatcaagagtggatgtagtcgagatgaaacttgtaaggtgtatcccttatttggacactatgggagattccagtttaatgcctttaaattcttgagaagtatgagctctgtgtatctgcagtgtaaagttttgatatgtgatagcagtgaccaccagtctcgctgcaatcaaggttgtgtctccagaagcaaacgagacatttcttcatataaatggaaaacagattccatcataggacccattcgtctgaaaagggatcgaagtgcaagtggcaattcaggatttcagcatgaaacacatgcggaagaaactccaaaccagcctttcaacagtgtgcatctgttttccttcatggttctagctctgaatgtggtgactgtagcgacaatcacagtgaggcattttgtaaatcaacgggcagactacaaataccagaagctgcagaactattaactaacaggtccaaccctaagtgagacatgtttctccaggatgccaaaggaaatgctacctcgtggctacacatattatgaataaatgaggaagggcctgaaagtgacacacaggcctgcaaaaaaaaaaaaaaaaaaaaaaaaaaaaaaaaaaaaaaaaaaaaaaaaaaaaaaaaaaaaaaaa

SEQ ID NO: 427 - DNA, 3100 bp, Homo sapiens
actcgtctctggtaaagtctgagcaggacagggtggctgactggcagatccagaggttcccttggcagtccacgccaggccttcaccatggatcagttccctgaatcagtgacagaaaactttgagtacgatgatttggctgaggcctgttatattggggacatcgtggtctttgggactgtgttcctgtccatattctactccgtcatctttgccattggcctggtgggaaatttgttggtagtgtttgccctcaccaacagcaagaagcccaagagtgtcaccgacatttacctcctgaacctggccttgtctgatctgctgtttgtagccactttgcccttctggactcactatttgataaatgaaaagggcctccacaatgccatgtgcaaattcactaccgccttcttcttcatcggcttttttggaagcatattcttcatcaccgtcatcagcattgataggtacctggccatcgtcctggccgccaactccatgaacaaccggaccgtgcagcatggcgtcaccatcagcctaggcgtctgggcagcagccattttggtggcagcaccccagttcatgttcacaaagcagaaagaaaatgaatgccttggtgactaccccgaggtcctccaggaaatctggcccgtgctccgcaatgtggaaacaaattttcttggcttcctactccccctgctcattatgagttattgctacttcagaatcatccagacgctgttttcctgcaagaaccacaagaaagccaaagccattaaactgatccttctggtggtcatcgtgtttttcctcttctggacaccctacaacgttatgattttcctggagacgcttaagctctatgacttctttcccagttgtgacatgaggaaggatctgaggctggccctcagtgtgactgagacggttgcatttagccattgttgcctgaatcctctcatctatgcatttgctggggagaagttcagaagatacctttaccacctgtatgggaaatgcctggctgtcctgtgtgggcgctcagtccacgttgatttctcctcatctgaatcacaaaggagcaggcatggaagtgttctgagcagcaattttacttaccacacgagtgatggagatgcattgctccttctctgaagggaatcccaaagccttgtgtctacagagaacctggagttcctgaacctgatgctgactagtgaggaaagatttttgttgttatttcttacaggcacaaaatgatggacccaatgcacacaaaacaaccctagagtgttgttgagaattgtgctcaaaatttgaagaatgaacaaattgaactctttgaatgacaaagagtagacatttctcttactgcaaatgtcatcagaactttttggtttgcagatgacaaaaattcaactcagactagtttagttaaatgagggtggtgaatattgttcatattgtggcacaagcaaaagggtgtctgagccctcaaagtgaggggaaaccagggcctgagccaagctagaattccctctctctgactctcaaatcttttagtcattatagatcccccagactttacatgacacagctttatcaccagagagggactgacacccatgtttctctggccccaagggaaaattcccagggaagtgctctgataggccaagtttgtatcaggtgcccatccctggaaggtgctgttatccatggggaagggatatataagatggaagcttccagtccaatctcatggagaagcagaaatacatatttccaagaagttggatgggtgggtactattctgattacacaaaacaaatgccacacatcacccttaccatgtgcctgatccagcctctcccctgattacaccagcctcgtcttcattaagccctcttccatcatgtccccaaacctgcaagggctccccactgcctactgcatcgagtcaaaactcaaatgcttggcttctcatacgtccaccatggggtcctaccaatagattccccattgcctcctccttcccaaaggactccacccatcctatcagcctgtctcttccatatgacctcatgcatctccacctgctcccaggccagtaagggaaatagaaaaaccctgcccccaaataagaagggatggattccaaccccaactccagtagcttgggacaaatcaagcttcagtttcctggtctgtagaagagggataaggtacctttcacatagagatcatcctttccagcatgaggaactagccaccaactcttgcaggtctcaacccttttgtctgcctcttagacttctgctttccacacctgcactgctgtgctgtgcccaagttgtggtgctgacaaagcttggaagagcctgcaggtgccttggccgcgtgcatagcccagacacagaagaggctggttcttacgatggcacccagtgagcactcccaagtctacagagtgatagccttccgtaacccaactctcctggactgccttgaatatcccctcccagtcaccttgtgcaagcccctgcccatctgggaaaataccccatcattcatgctactgccaacctggggagccagggctatgggagcagcttttttttcccccctagaaacgtttggaacaatgtaaaactttaaagctcgaaaacaattgtaataatgctaaagaaaaagtcatccaatctaaccacatcaatattgtcattcctgtattcacccgtccagaccttgttcacactctcacatgtttagagttgcaatcgtaatgtacagatggttttataatctgatttgttttcctcttaacgttagaccacaaatagtgctcgctttctatgtagtttggtaattatcattttagaagactctaccagactgtgtattcattgaagtcagatgtggtaactgttaaattgctgtgtatctgatagctctttggcagtctatatgtttgtataatgaatgagagaataagtcatgttccttcaagatcatgtaccccaatttacttgccattactcaattgataaacatttaacttgtttccaatgtttagcaaatacatattttatagaacttc

SEQ ID NO: 428 - DNA, 2344 bp, Homo sapiens
ggtgcgtccgcgggtggctgccccgcaggtgcgcgcggccggggctggcggcgactctctccaccgggccgcccgggaggctcatgcagcgcggctgggtcccgcggcgcccggatcggggaagtgaaagtgcctcggaggaggagggccggtccggcagtgcagccgcctcacaggtcggcggacgggccaggcgggcggcctcctgaaccgaaccgaatcggctcctcgggccgtcgtcctcccgcccctcctcgcccgccgccggagttttctttcggtttcttccaagattcctggccttccctcgacggagccgggcccagtgcgggggcgcagggcgcgggagctccacctcctcggctttccctgcgtccagaggctggcatggcgcgggccgagtactgagcgcacggtcggggcacagcagggccggggggtgcagctggctcgcgcctcctctccggccgccgtctcctccggtccccggcgaaagccattgagacaccagctggacgtcacgcgccggagcatgtctgggagtcagagcgaggtggctccatccccgcagagtccgcggagccccgagatgggacgggacttgcggcccgggtcccgcgtgctcctgctcctgcttctgctcctgctggtgtacctgactcagccaggcaatggcaacgagggcagcgtcactggaagttgttattgtggtaaaagaatttcttccgactccccgccatcggttcagttcatgaatcgtctccggaaacacctgagagcttaccatcggtgtctatactacacgaggttccagctcctttcctggagcgtgtgtgggggcaacaaggacccatgggttcaggaattgatgagctgtcttgatctcaaagaatgtggacatgcttactcggggattgtggcccaccagaagcatttacttcctaccagccccccaatttctcaggcctcagagggggcatcttcagatatccacacccctgcccagatgctcctgtccaccttgcagtccactcagcgccccaccctcccagtaggatcactgtcctcggacaaagagctcactcgtcccaatgaaaccaccattcacactgcgggccacagtctggcagctgggcctgaggctggggagaaccagaagcagccggaaaaaaatgctggtcccacagccaggacatcagccacagtgccagtcctgtgcctcctggccatcatcttcatcctcaccgcagccctttcctatgtgctgtgcaagaggaggagggggcagtcaccgcagtcctctccagatctgccggttcattatatacctgtggcacctgactctaatacctgagccaagaatggaagcttgtgaggagacggactctatgttgcccaggctgttatggaactcctgagtcaagtgatcctcccaccttggcctctgaaggtgcgaggattataggcgtcacctaccacatccagcctacacgtatttgttaatatctaacataggactaaccagccactgccctctcttaggcccctcatttaaaaacggttatactataaaatctgcttttcacactgggtgataataacttggacaaattctatgtgtattttgttttgttttgctttgctttgttttgagacggagtctcgctctgtcatccaggctggagtgcagtggcatgatctcggctcactgcaacccccatctcccaggttcaagcgattctcctgcctcctcctgagtagctgggactacaggtgctcaccaccacacccggctaattttttgtatttttagtagagacggggtttcaccatgttgaccaggctggtctcgaactcctgacctggtgatctgcccacccaggcctcccaaagtgctgggattaaaggtgtgagccaccatgcctggccctatgtgtgttttttaactactaaaaattatttttgtaatgattgagtcttctttatggaaacaactggcctcagcccttgcgcccttactgtgattcctggcttcattttttgctgatggttccccctcgtcccaaatctctctcccagtacaccagttgttcctcccccacctcagccctctcctgcatcctcctgtacccgcaacgaaggcctgggctttcccaccctccctccttagcaggtgccgtgctgggacaccatacgggttggtttcacctcctcagtcccttgcctaccccagtgagagtctgatcttgtttttattgttattgcttttattattattgcttttattatcattaaaactctagttcttgttttgtctctccgaaaaaaaaaaaaaaaaaaaaaa

SEQ ID NO: 429 - DNA, 1234 bp, Homo sapiens
gagctccgggaatttccctggcccgggactccgggctttccagccccaaccatgcataaaaggggttcgccgttctcggagagccacagagcccgggccacaggcagctccttgccagctctcctcctcgcacagccgctcgaaccgcctgctgagccccatggcccgcgccacgctctccgccgcccccagcaatccccggctcctgcgggtggcgctgctgctcctgctcctggtggccgccagccggcgcgcagcaggagcgcccctggccactgaactgcgctgccagtgcttgcagaccctgcagggaattcacctcaagaacatccaaagtgtgaaggtgaagtcccccggaccccactgcgcccaaaccgaagtcatagccacactcaagaatgggcagaaagcttgtctcaaccccgcatcgcccatggttaagaaaatcatcgaaaagatgctgaaaaatggcaaatccaactgaccagaaggaaggaggaagcttattggtggctgttcctgaaggaggccctgcccttacaggaacagaagaggaaagagagacacagctgcagaggccacctggattgcgcctaatgtgtttgagcatcacttaggagaagtcttctatttatttatttatttatttatttgtttgttttagaagattctatgttaatattttatgtgtaaaataaggttatgattgaatctacttgcacactctcccattatatttattgtttattttaggtcaaacccaagttagttcaatcctgattcatatttaatttgaagatagaaggtttgcagatattctctagtcatttgttaatatttcttcgtgatgacatatcacatgtcagccactgtgatagaggctgaggaatccaagaaaatggccagtgagatcaatgtgacggcagggaaatgtatgtgtgtctattttgtaactgtaaagatgaatgtcagttgttatttattgaaatgatttcacagtgtgtggtcaacatttctcatgttgaagctttaagaactaaaatgttctaaatatcccttggacattttatgtctttcttgtaaggcatactgccttgtttaatgttaattatgcagtgtttccctctgtgttagagcagagaggtttcgatatttattgatgttttcacaaagaacaggaaaataaaatatttaaaaatataaaaaaaaaaaaaaaaaaaaaaaaaaaaaaaaa

SEQ ID NO: 430 - DNA, 8090 bp, Homo sapiens
cacgcgcccgcccccagcttcgcgcccagatcgtcgcctatcctgcttgcgcagccgctatcgcgtctgcccaccgacgaagcatgggtgtccagggcttccaagagttcctggagaagcgctgtcccggggccgtggtgcccgtggacctcctaaaactcgcgcgcacggtctcgcgccagcagcagcagcagcacttgcaccgccagctgccgccgactgcagccctagcgcccggggctccacgcgccgccaggggctccgtgcctctgcaaccgccgcttccgcccgctgccttgggtgcctactccgggggcgcggggccgattcggcaccatcaccccgctcaccacttccaccatcatggccaagcgcagcccgggctgcaccctccgctgccgccgccgccgccccctcagctgcccggggcccgggtgctggtggacgccggctcggcgctgccgcggctctatggcggctaccagacggattgggtgtgtggcggccaatggaacgccatgctgggctacttgtcagcgctgtgccaggcttgtgcctatcctggcggcgacggcctggagctcgtggtcatgttcccggggggcctgggcaaggaccggctggccgagtggggccgtcggtgccaggccgagcggcagacagcgcaactgatcgtgggacacgtgggcaacaagggcacccctccaccgcgggcctggttcctgccaccggcctgcctgagccactgcgtgaggctagcactcatccgcttccgggtcaaggtctttcagagccttgaagaccaccatttggaagtggtggcgtttttcagggaaaatggcttccatggccttcttgcccatgactccgagtatgctctctacaatattccctcttactacagttcccatgctctgaaactgagctggaatgggaagaacctcactaccaaccagttcctgatgcaagaagtagccaagcagctgggcctgaagaggatgaatttccccatatttgctgcactgctaggtaaccacatcctcccagatgaggacctggctgcttttcactggagcctcttgggaccagaacatcctcttgcatcacttaaggttcgagctcatcagctggttcttcctccctgtgacgtggtgatcaaggctgtttctgagtatgtcagttccatcaaagatccctcaaacctggatgtagttgggaaggatgttttcaaacagtctcagtccaggacagaagataaaatagagcgattcaagaaagcagttgagtattattcagtcacaaccaaactctcttcgctgccagtgggtccctcctttctaggttttcggaataataggcttggaaatcctccccttccacgaaatcaagtgggcaccatttctgctggaaagccaatgttttctcatcaagtgccccagaaagtgaaatatccaccaccattcccagtgggacccaactcatctcttctcttctcctcccatgctttgggggaatcccatgctttttctgaggatcccatgctgcagaacagcccctttgccaattgggctgtctcctatgactcttctgcatcccagtttcccaattacctgccttctaaagcctcacctcctttgggaccagactcttcccactcctcttcctctgatggtgatgagccaaatggagctagctctgatcatatcacagaagcatttcatcaccagcctgagtggggaaatcccaatcgtgacagagggtcctgggcacagcctgttgatactggagtttcagaagcgagcctaggtgatggtgagccccacatcccatctctgctgtctatgtctacaaggaaccacatggatatcaccattccacccttacctccagtagctccagaagtcttgagagttgctgaacacagacaccggaggggtcttatgtacccatatatctaccatgtcctcactaagggtgaaattaagatccccgtatgtattgaggatgagtgtaacatggagctgcctccagctgctctcttattccggtcagctcgtcaatatgtatatggagttctttttagtctggcagagacacagaggaaaatggaacgcttggccatgcgacggcggctgcctgtggaagttccttcagtgatccttaaagagtggtctgcctataaagggaagtcacctcaaacccctgagctggtgtctgcactgacatttcgggaatggacttgcccaaacctcaagaagctctggctaggcaaagcagttgaagacaagaacagaaggatgcgggccttcctggcctgtatgaagtcggacacgcccagtatgctcaatccagctaatgtccccacccatctgctgctcatgtgttgtgtactccggtacatggttcagtggcctggtggccgaatcctgcatcgccatgagctagacaccttccttgcacaggcagtgtctacccagctttatgaaccagatcgactccaagaactcaagattgagaaactggatgcccgagggatccagcttgctgccctcttcatgagtggagtcgacacagctctgtttgctaatgatgcctgtggccagccagtcccttgggagcattgctgtccatggatttactttgatggcaagctgttccagagcaagctaattaaagcaggccgagagcgagtatctctggttgagctctgtgatggccaggctgacctggcaaccaaagtggaaaagatgagacagagcatccttgaaggagtcaacatgaatcatccaccgccttctgctctacttccgtcacctacttttgtgcctcccatggtgccctctctctaccctgtttcactttattcccgagctatgggctccatgccacttccccctcaagggaggagccggggatttgcaggtctccatccaatcccaccccaaggaggaaaactggagattgctgggatggttgtgggccagtgggctggcagcagatcctccaggggccgaggatccttcggcatgcaagtggtttctgtcggtgggccaggaaaggggcatggaaaagaacagactggtagaggatccaagggacacaaaaaaggaaataagcaaggctcttcagatggagtttctaaatccctggagcttcatcaaggtcggtctcgctcccaggtaaatggaaacagtggcgcattgatcaaggaagagaagagtgatcatcgtcttccagctccatcacaatgtgccttatccagagacagcaatgagtgtaataatggtaaccgctacctccctatgaataatagggagaagaaccacttacaagagcaaaagctagaaactgtggcacaacggaaagaggactgataagctgaagatggcttcaccaaaccaggaagagggaaaaacttttacttttctgattttaggcccaagctagaggaggatataaatgcttaccctagatttctccaggattttggtgggatgtcctattgtgtccatcttttccccttccctgcctgtttctgggacttcagattcagtggtctgtttctggagaagttctggtcaaagatgaatggcagtaagactaggtcctagtctcaaattgaagatatagcaccaatagtttatttatctcctctgggagcctagtaaggcagtagctgtcagaaattgggtatcatcacataaggtcctatagaaaagctctagctttggtttttctgagcatttataatgatactcattatcaaagacttatatgataaacctatgaggttgtggggacagctgtggcctcctgaggtttttttttgttttttttttttctctatgaagtggtatctacctcttcttcactccttccaacttacctacccctggattttgtaccaccacctctagctttggcctgacaatcagataggtagatgttttcagaaaagtaaggtagtattggttattttaatttttattttttattttatacacttcaaaaaaactatcaatggcctttgtactgggggattcaagtgaatcagaaaagtactgggcagatttttcctgcctctcaaccagtgcattgtttgtaaaatagaagatgtggcacagttcattcactccctattgcccacaccatgaaagggtgggaatcagtgtaatgaacttgagtacgaaagggactcaagagactgtgtgtgtgtgtgtgtgtgtgtgtgtgtgtgtgtgtgtgtgaatgtgtgcttgtgtgtgggtgtgggtggatgttgtgtgggtgggtgtatatatgaatgtgtgtatatgcatacacataccctttatataaagagacagatctatttatctatacatattttatatatatgtaagtgtgtgtgtatgtgtgtatatatgtgtgtatatatatatacacacatatatacacacatacatacatacatacatacatacatacatacatggtgatgtcccagaggatttactcaatttcccagaaatgcttccactgctatggagtggaaggtttcaaaagaccacacttttaatctgaaattcttactaagtcacagtgcattcacaactatgagaagttggatgggcttctctaaatcagacaaaaagtactttccagaaattgcctgttcagaacaataaactcttgggttgttacaagcttaatcttgaacagagccctcacatcccatatggtgaaaacaggaggttggaatgggattgggaagagttgggcatttccttatgaaggtttggagagaaaaggggggatgggaggtgactaccatttgaaagggctttcagccaatttggaggaaatctcttctggaactccagggtcaaattggtttcaggctagaattgattgacatgaatccctgaaggagagaggactagctttggaaagatagggtagggaagtgtgaggaaactatttgattttacacgcctagattgtttcatttgttcattgacattctgactactggatcttttcatttgctttgcaaggaagactttagaggactctggcctgggccttgagaagaattctattaaaagattctcagcctcctgtgtggccaggatctgcccaggataaagaggctattcctccttgctggagataatcttgagacaaccttgcatttccagtttccctccttgggcagcctaactatgagggagggaaacatggcttgcaataaattagcattgtgtcttcattcaggaattgaggcttccagcctcatatacctccttttgggctttgtgatattcttgcccaagaagtaccatttctacagaaatacaactgactaatcttctagcagggttctttttgaaaaaccccatgcaccttaacccacagcaggtccttggtgatttttgcccagacaaccagaaggctatttgcttactgcccacttacaatgaccagatcataggaaattgaaaacagtgtcagactatttagtcctaatctgtcccagattaagagaatccatgattttcagggggagggagccctgcaatgccttgacccctgcccagatacttcttacataaaccaaagaaaaatgacaagagtgtacatctaaccagacagaagtagaaacaaagtatagaaaaacctcctctttggaatcagctcccttaatgtggtcccccttctcttggacctgcccaacctttcacaacgtcttgaaggtaggacttctatatccagcaaaggaagggatagtagtaaatttacatggcttggaattttctttctggagccacagagggatgaatcctttggagctctaaaagcaaccagtatcactgagctgtgagatacctatatctccattttctaataggaagcacttggacttaaaattgctaagatattttttgcagttgctatttctgtgcatcttgaatctatctgacacaatcaaatgacagtattgttaactctcacaccattaagaaaatttcttattttgtaggcattcactgtgagaggtaaaattgctgctttggcaggtatgattccagtttgccaaacggcttttcttccttccacaacctctttttcccctagcccagggtgaaacaagtgggtcatctccaaccttgatttttatttggattcagcattttgggtttggaaggttacaagaaggaaccataaatggccatattcctagatttttatttatctgacaaaatacacaacttaaaagccaggaaaactaaggttcattacagggagatgaactttttctaattggaggacaaattgtggaaggtggggtctgatctttgcttcaccacttgaagagactgtcatccttcacctgaggttccatttctagcttttatgtgacctctcttgaacaaagtcatttgggaacccccagaaatgacccctttacattgtaggaccataagcaaaacactggttgtgtatagtcactgatccccaaggacttgcagttttttatttctgctggtgtgtcttgggatcagcttataactcctactcttacttagtcagtgaccagtccagtctggtctggaccaggcctgacaaacttctgctcacttgcatcattttcattctgagccagtaggactttgggtagactttaaagcccaagaattggtactcgctttggctagtgacatttgatttttgtctccatcttgatttctgacatcattggccaagtcacattaactttttttgatcactgagaaaaacagtcgaacaaggcattacagagggtggttaaggtagagggtggggggcaggaatgcttatgtaggatagaaagaatgtgggggtagctgtttggttatggtgatccagtcctttggaaccttacaaggctcctgtgggcatgtcaatgttaccattacagcctctacgacccacccacctttgaaaagtcagtacaagtagaccacagtttaaagtagttagtataattctactaaggtttaatcattatacttgttcacttcctggtgcatatttcctaaatatgcttggggtgtggggtggggggttgagttttcactgttccattgcgtgtcatcttatatttttctccatcctgtgactttggcatcttactcgactttctattttcttttcccttggcttattgcagtagtctgctggtgcaggtagagagctcagtgcacctattcccctgttactgctaattatcttgaatattgtcagaggttattttgatgttctaagaatataaagtcattttttacaaaatcatcttttccaagttaaaagcaaaataaaaaaatcccctgtgctagggtgcccatttcagcttttgacattgcccctgtacttttatagatgctctttttgtccgtgttggtagtaactaatgactagtgaattttcatgtaaatgaagcaaaataaatatttcagattttattaatctctcataacccagccaaatctgatgacttcattttaattgcttcccagaaagcacttcccctcctaccttctattctattctattctattctattctattctattctattctattctattctattctgttctattctgttctattctgtttttagaataacacactaggtaaagaaactttaactgcaaggagtcagtgacttttagtgctccctgataaatgatgttattgacaaaagtaaaaaattatttcattgtttttttcctgtattactatctcctctcctgtgcttttgacagtgtgtttagtggatggataatatgtatttctctttcccactcccagattccaaattccctgcctttttggcccacctcaccacaaaagctccatagtttattaatgtaagtttgaatggatgcttctttggggaaacttcaggagttaatggaagagtttcagaaaggaatgagaatgcctcaggagttgttctgtgatggaaattggtctgttgttctgttaatgctgatggaaagaaacttacaacgcttaataaaaatctattcttttagtaaaaaaaattgtgaaataaaaaaaaa

SEQ ID NO: 431 - DNA, 2359 bp, Homo sapiens
gttttgccaacgtactcgcaatagttcccatggtttcctttgctcccagcggttgcgcgggctgggtttttggagcaaaggcaacggatactgctgaggctcctgagaatgtcccgttttcgaggctgcagtagctccggtgtccggttctgcagtgccgagagggaggcctcgggctccgggcgtgggaatgtgttgcagtttgtccaagagccccaagcccagcaaagccgcccgttccccgctggggcgcaactctcactggaactcttgttctctgactggggaatggaatgggctcagccaaggctcccgaaaccagccctgccgctcccagttgtggtcgcattctcaagagcggctgactgcgccgtggaccatcactttcgcttctgcctgctcttgcgcctattgcggcaactactcacgctcctacgggacgaggagagggaggtgaatccgtggcagagaaaaatagtagtctagtcattcaagtgaaaggtccaagaaaggaagaaagaaaaatttatcaaaaagaaaacacaagaagtattctgaagatagcgacagtgactctgattctgaaacagactccagtgatgaagacacaaaaatgagagcaaagacagctaagaaaaaggaaaagaaatgcagatggccagattttttcctttaatttttattatggaaaaggtcaaatgtgtataaacatacatagaatggtataatgatccctcaggcacgtagcacccagcttgaacaattaacaacttgtgggaaattgccattgccccctaattaatttgaaaccaatcccaggtatagtgtcatttataaacaattcagcatgtttctctaaaagactgttttctttattagtctgttttcacacaccataaagacatacttgagactgagtaatttataaagaaaagaggtattgattcatagttctgtatggcttgggaggcctcaggaaatttacaatcatggcggaagccaaaggggaagcaaggcacatctgacatgggagcagaagagagagtgagaagggggaagcaccagacactttacagataaccagttctcatgaaaactcactcagtatcatgacaacagcatgggggaaacccatccatccaattacctcccaccagacccctccctccacatgtggggattataatacaagatgagatttgggtggggacagagccaaaccatatcagatacacgttctttttctaaaaacataactacaataccattatcatgcctaaaaaaattaacaataactcctcaactctcatcacactccatttttaaatttttgttgttttctagcctagcagtttcacatgaggaagacagcataaagaaagccaaggtctgactgcttctttttgatgatcaattaatctagaatattaatcagggaactacctcctccctcttgcttctagcagcactaaacaaaaggttccctttttgtgtttttatcatcaggaaccagggtcctttcaaggaggttgaatgagacaaaatacatttgaatgcatgattgtcagcttctgagctggggaatatgcaacaatatgccttctgggctggggatgggtgagcaaagggagaactgcctcattctggctttggtagagtctcctcttgtgtttcatttgatgcagaggaactttgggccagaatgattcctatttccctatgtcctccacagaaagggaggatagtgaacagaatttgcaatatactagatagatgtttggctgccaccttcccataaagccctatgagtagcttcttcggaagattcctttagactacagggttgtgtctaagctcttcagcataaatggagatgggccctgtcttgaaacacactgttcttttactagggactttccccacccccattttgcatatgtatgtatgtgagccgtacagggcgtattggtgattgaggaatgtcagctcataaaatgaggcttccttgtaattctgtttaaatgacttttcctttgaaattcttatccataccttatttggcacacaaaacagatatacagttgacccttgaacaacacaggttagagctgcatatgtccacttatatgtggattttttttcaataaatagaattggccccccatatccacaggtttcacacctgcaaccaaatgcagatcaaaaatacagtattcgtgggatgcaaaacctgcagataggtaaggccaactttttgtatacttggattctgcaggttcaagtgtggggcttgagtatgcatggattttggtatctgcaggggtcctgggaaccaatgtttacaaggaattcacaactt

SEQ ID NO: 432 - DNA, 2639 bp, Homo sapiens
gctgaaggctcggttcatgccgtgcccccgggcagttctggtgaggctaagcaagaggcctctgcatcttgacacctaggagagcagggacggagtctcccagggtggaggaccatgctgcgccgcaagccctccaatgccagtgagaaggagcccactcagaagaaaaagctctcccttcagcgctccagcagcttcaaggattttgccaaatccaaacccagctcccccgtggtgagcgagaaggagtttaatctggatgataacattccagaagatgactcaggtgtccccaccccagaagatgctgggaagagtggcaaaaagctggggaagaagtggagggcagtgatttcccgaaccatgaacaggaagatgggcaagatgatggtgaaggccctgtcagaagagatggcagacactctggaggagggctctgcctccccgacatctccagactacagcctggacagccctggccctgagaagatggcgctggccttttctgagcaagaggagcatgaacttccggtgctcagccgccaggcatcaacaggcagtgagctctgcagccccagcccaggttctggcagcttcggggaggaaccacctgccccccagtacacagggcctttctgtggccgggcacgagtccacaccgacttcactcccagcccctatgaccacgactcgctgaaactgcagaaaggagatgtgatccagatcattgaaaagccacctgtgggcacgtggctgggcctactcaatggcaaggtgggctctttcaaattcatctatgtggatgtgctgcccgaggaggccgtggggcatgcccgccccagccgccgacagagcaagggcaagaggcccaagcctaagaccctgcatgagctgctggagcgcatcggcctggaggagcacacatccaccctcctgctcaatggctaccagacactggaagacttcaaagagctgcgagaaacacacctcaatgagctgaacatcatggatccacagcaccgggccaagctgctcacggccgccgagctgctgctggactatgacactggcagtgaggaggctgaagagggcgccgagagcagccaggagccagtggcacacacagtgtcggaacccaaggtggacatcccgcgcgactcaggctgctttgagggctcggagagcgggcgcgatgacgcagagctggcaggcactgaggagcagctgcaaggcctctccctggccggggcaccttgaggtggcggtggcaataggccaaggctgggacccagctgcaaaggctgtaggagtgggcccagcctcccgtggtggcccaggtcctgaggactggcactgagcctggccctgcttccccagggacacttagggccacagaggccaggccagggccctacaggttccaggctcagctggagtggttggggagtcgcccaagggcacatcccacctgcctgagccccgccctccaccagcgactgacagcgcagcccctcctggcaccaactgctcccctgccatggccacggccacagcaagtggggcactgggaaaccctgcccatgtccctcaccaacaaggcctccaaatcctcctcacccccacaccacctacccctgtcgcactgctcctgaaaagggggccaagtcaatgtttcaggtcagtctaaaaaccctagggaagctggccatttaaaagaacccaaactgaccatgggtaaatccagttcccctaaataaggcctgaagaaatccacaggtaccattcccactttccttctccctagctttcttagaggtttggccactaaatcttatgagacttgaaccaagtggcttcctctttctaggcttaggacgggttggggttagaaagggtgatcactgaaggccttgcctgctctgacattctgtgacattaaatgtctattctcctgttacctgtggcctgggacaccagtggggtttatcgaggggaccagaggggcctcaggctttcagatgaaatggctcctcctactcacccactttattcctctccatgtaattcaggacaagctgcaacttcccccagcttaacacaatgcccatacctcatacgatatgcgccctcccgttccatccctggccccctcaaacgagacttctcacaaggctgattacagatggtcaaacctggcttccaaggacagaattgcctctcggaagccagctgtggatctgagtccagagttggccacttgtgtgggtcctcacaagcaaagagagcactaaacttgacattgggggtccaccactccaactttgctttctgaaggttttggtgtacattgagccccagaaggaaaggagagtatctgtgagtgggggcctcccttgaccccagtacgaagtctatgccctgaatccccagagtagcccttcctggtgcccaactggcctggggacaaacagcgtccactacatctaggactgccggctaagtggacacacttcttgacctcctaccaggaactttggtaaaagctagctttggggaaggggttgggtgtaaatatgagagggtggagggagaccagctggtagcaataaacatgggtagaactaaaaaaaaaaaaaaaa

SEQ ID NO: 433 - DNA, 784 bp, Homo sapiens
ggctgagtcgcgcgctctgctccacccgacggggctgtgtgtgctgggcctggctcgcggcgaaccgagatggcagagcagtcggacgaggccgtgaagtactacaccctagaggagattcagaagcacaaccacagcaagagcacctggctgatcctgcaccacaaggtgtacgatttgaccaaatttctggaagagcatcctggtggggaagaagttttaagggaacaagctggaggtgacgctactgagaactttgaggatgtcgggcactctacagatgccagggaaatgtccaaaacattcatcattggggagctccatccagatgacagaccaaagttaaacaagcctccggaaactcttatcactactattgattctagttccagttggtggaccaactgggtgatccctgccatctctgcagtggccgtcgccttgatgtatcgcctatacatggcagaggactgaacacctcctcagaagtcagcgcaggaagagcctgctttggacacgggagaaaagaagccattgctaactacttcaactgacagaaaccttcacttgaaaacaatgattttaatatatctctttctttttcttccgacattagaaacaaaacaaaaagaactgtcctttctgcgctcaaatttttcgagtgtgcctttttattcatctactttattttgatgtttccttaatgtgtaatttacttattataagcatgatcttttaaaaatatatttggcttttaaagtaaaaaaaaaaaaaaaaaaaaaaa

SEQ ID NO: 434 - DNA, 716 bp, Homo sapiens
atggcagagcagtcggacgaggccgtgaagtactacaccctagaggagattcagaagcacaaccacagcaagagcacctggctgatcctgcaccacaaggtgtacgatttgaccaaatttctggaagagcatcctggtggggaagaagttttaagggaacaagctggaggtgacgctactgagaactttgaggatgtcgggcactctacagatgccagggaaatgtccaaaacattcatcattggggagctccatccagatgacagaccaaagttaaacaagcctccagaaccttaaaggcggtgtttcaaggaaactcttatcactactattgattctagttccagttggtggaccaactgggtgatccctgccatctctgcagtggccgtcgccttgatgtatcgcctatacatggcagaggactgaacacctcctcagaagtcagcgcaggaagagcctgctttggacacgggagaaaagaagccattgctaactacttcaactgacagaaaccttcacttgaaaacaatgattttaatatatctctttctttttcttccgacattagaaacaaaacaaaaagaactgtcctttctgcgctcaaatttttcgagtgtgcctttttattcatctactttattttgatgtttccttaatgtgtaatttacttattataagcatgatcttttaaaaatatatttggcttttaaagt

SEQ ID NO: 435 - DNA, 3321 bp, Homo sapiens
gttcgggcagctggagtgtacgggcccgcgggccacggccatgcagcccctggaggtaggtctggttcccgctccagctggggagccgagactgacccgctggctgcggagaggcagtgggatcttggcgcacctggtagctttgggcttcaccatctttctgacagcgctgtcccggccaggaaccagtcttttctcctggcaccctgtattcatggccttggcgttctgcctctgcatggctgaagccatcctactcttctcacctgaacactccctgttcttcttctgctcccgaaaagcacggatccggctccactgggcagggcagaccctagccatcctctgtgcagctctgggcctgggcttcatcatctccagcaggacccgcagtgagctgcctcatctggtgtcctggcacagctgggtgggagccctgacactgctggccactgctgtccaggcactgtgtgggctctgcctcctttgtccccgggcagccagggtctcaagggtggctcgcctcaagctctaccatctgacatgtggactggtggtctacctgatggctacagtaacggtgcttctgggcatgtactcagtatggttccaggcccagatcaaaggtgcggcctggtacctgtgcctggcactgcccgtctatccagccctggtgatcatgcaccagatttccagatcctacttgccgaggaagaaaatggaaatgtgagttcctgcgaacgctgaatctaggtgggacgcttgccttgaacatcatggttcctttggtgatctataagggatctatttaagaagtggtcaggttttcgcacttcttggctggtccagggactgcagaaaccaaagctgctattgttgaggaataattcagtgggtcaaaatggggagatgtactgggtatgagtggaaggtgatggagagcctgatcctgaagcctctacttgatgagagacagagttttgggtggtggtagtgatgtgctggtggtcatttcttgcttgtgtgcctgatgaaaaactgggttcctgtaagttatgaatggcatccagggatatttgggttacttttaagaaagcagtgtgatgtagtggagagagcccatgggtcttatttatgggatatggtcctcttaggctctgttgtacaaccttaggtacattccatatcttaagaccactgtttcttcatctgtgaaatgtttctaaacaatctctaagtcccttccttctctaatatacagcgtctgtcaggtcgatgtctcagaacactctcccagctgtggaccacgtggaccacttagcagactcagggggtagttctttactctccctttactaccctggagggacagctctgcccttgaggcccttcagaaatttgtgctgatttggtccctgtgccagggcacagggggtcaggcactgtggaaagaagggactcaggtgagggtcttctggactctaagacggtaaaggcactaaagtcactttaaagcttttggagaagcaggagggcattggcttaaccaagccgaaggctgctggctgggctgcctagcccagctaagatcttccttcagcccacctcaggatccgggcttgagggctgcagggcctgcgtgcgctccctcccccgaaatcacttctcagggcaaaggagccccaggcatctcatgctttgcccttcttagggctcaggttcttgccttagcacatagcttctgggagcttttttgaagcatttcataagggccaaggaagtggggcagggcttttctgatccaaagaaaacaaagtttctctggttacccctcttcccttgttatctaagctttcctcagttgtcatctcttcccagctctttggtccaagagggggctgagtttggtgtcagctggcaaatgagggctggactctcttccctccagagaccaccccgctccttgctgcagctgaaagtagttccccaggctgccctcggtggtgaggactggatgctagactgctgagctgtggtctgggctcagttgagaagataggatctccctagatcatggcaaggcctgacaacagctgagccaggaaagtgctgctgaggcaagtcgacatagctcacagggaactctgggaagcctggggtgtaggcgctggagctccagttcccaggagcaggggcaggtgttcctagatgttagtgttgtggatgtccttggtcttctgaagattcaggtcctcctctccgggtagcttagaagtaaggaggttggtttgattcaatagtacaagaatggggacagcaagggcagaagtgtcctctccacgtaactcattatgcccctcctgggggagattgcatctccaggacaagcatctaaaggaggcccctgctgtgcagaggggtattgttcctgtctctttcattgtcctccctcctctcaaactctccagtgtggtgtgaactcagaagaaacggttactggggctgcatggagaatttcacctgcggtgattttgatccagggactgcatctcctctttcctcatcacagccagtgctgagaggctccttctacctgccgcagggtaggagggccaggcaaagttcaccagcttgctctaagagcaagcaggcaatgccgtaaagcctgagcctgcctgaggtgctgcctcctcccaggtggtgcggggggtggtgggcgggcgggcaggcgtgctgacagccggcagtttgcgtgggctgtgccatctgatgtctattcccagccctggtaggaagggggagtcatttatattctgcaggaggaaggggccccagctgtcgcctttctgaccagcaggcctggagggcaggggcacagagcagagaggagggcactggtggtctcctgcttagcctggtctgactgcagtgtagggaataggtcaccaggaggagcccttcatcctggcaggccggattgtggagggacttccctccccctcttttccatttctccctccatcaccacctgccctcacatcctggggcagcagctggacagccattagacctcagtgccagggcactcttcctccagctgggatctcagtggctcccagctgcatgggctcctgcttgtgtgttccctcctccgccatcctctgttccccgcacctcccttattctgctcatgtctggggtattcacttggctcctcagcaaggaagcaaacgccttggaggagaagcacatggttgcccttttgtccttgctccctggctagggaaagctgctagtggtcagcctgttttgccttttttt

SEQ ID NO: 436 - DNA, 687 bp, Homo sapiens
gcagtgtcccagccgggttcgtgtcgccatggggcagatcgagtgggccatgtgggccaacgagcaggcgctggcgtccggcctgatcctcatcaccgggggcatcgtggccacagctgggcgcttcacccagtggtactttggtgcctactccattgtggcgggcgtgtttgtgtgcctgctggagtacccccgggggaagaggaagaagggctccaccatggagcgctggggacagaagcacatgaccgccgtggtgaagctgttcgggccctttaccaggaattactatgttcgggccgtcctgcatctcctgctctcggtgcccgccggcttcctgctggccaccatccttgggaccgcctgcctggccattgcgagcggcatctacctactggcggctgtgcgtggcgagcagtggacgcccatcgagcccaagccccgggagcggccgcagatcggaggcaccatcaagcagccgcccagcaaccccccgccgcggcccccggccgaggcccgcaagaagcccagcgaggaggaggctgcggcggcggcggggggacccccgggaggtccccaggtcaaccccatcccggtgaccgacgaggtcgtgtgacctcgccccggacctgccctcccaccaggtgcacccacctgcaataaacgcagcgaaggccgggaaaaaaa

SEQ ID NO: 437 - DNA, 2994 bp, Homo sapiens
ggagctttcgctgttcggggcccggcctgctccgggccctcccagcgtcgccgctagctgacttagggctcccgcccacactgcgcacggccttgctgagggccggctcgtagtgggaggcttcgcgttcacctgaacatttccgcctcctctggatgggggatgagaggcggggctgatgcatcgcagcagtcctggaccctgacttcggacttggagaagaaacgccgaggaggaacgggagttagggggttagcagcttggcgcgctgggagccggccacccctggtctccggacttcacttcccaggaggcctcgcgcgcgactggaagtgctgcgagcctataagaaggcgaggcggcacccgccgctctgctctggggcggcattgccagccggctgtaggcattcagggcagtgtcttctgcatctcctaggaacctcgggagcggcagctccggcgcctggtagcgagaggcgggttccggagatcccggcctcacttcgtcccactgtggttaggggtgagtcctgcaaatgttaagtgatttgctcaaggtgcccatttcgcaggaattggagcccaggccagttctctgagcctatcattagggctaaaggagtgcgtgatcagaatggtgtctggacggttctacttgtcctgcctgctgctggggtccctgggctctatgtgcatcctcttcactatctactggatgcagtactggcgtggtggctttgcctggaatggcagcatctacatgttcaactggcacccagtgcttatggttgctggcatggtggtattctatggaggtgcgtcactggtgtaccgcctgccccagtcgtgggtggggcccaaactgccctggaaactcctccatgcagcgctgcacctgatggccttcgtcctcactgttgtggggctggttgctgtctttacgtttcacaaccatggaaggactgccaacctctactcccttcacagctggctgggcaccaccactgtcttcctcttcgcctgccagtggttcctgggctttgctgtcttcctcctgccctgggcgtccatgtggctgcgcagcctcctaaaacctatccacgtcttttttggagccgccatcctctctctgtccatcgcatccgtcatttcgggcattaatgagaagcttttcttcagtttgaaaaacaccaccaggccataccacagcctgcccagtgaggcggtctttgccaacagcaccgggatgctggtggtggcctttgggctgctggtgctctacatccttctggcttcatcttggaagcgcccagagccggggatcctgaccgacagacagcccctgctgcatgatggggagtgaagcagcaggaaggggctcccaagagctcctggtggtgcagcctgtgctcccctcagaagctctgctcttcccagggctcccggctggtttcagcaggcgactttcttccaatgctgggcccagacttcttgcctgggtgctggcctgccctctccggccgcttgctgcctgtctgctttccttggtggctttgcctgggtgctgggcctgccctctccggccgcttgctgcctgtctgctttccttggtggctttgcctgggtgctgggcctgccttctctggctgcttgctgcctgtctgctttccttggtggctttggcttctgcactccttggcgtcagcctctcaggtcctccattcacacgaggtcctcctcgctctggccgctcttgctgctcctgtctgaagaaatcagactgatttcctcttaagactcctagggatgtggtgaagagctgggactcaagtgcagtccacggtgtgaaacatgagggaggtgaggtgtccgtccacttcccccataaaggtgtgcatttcagttaggctgccccgccacagagcaggcttcatctgctctgccatccagccccatctggatgtgaggtggggtggagacatcatggggtgattgcagaaagggggagtggcggcccacgcagcttctgctgaggagctgaccgctctgagctgttctgtttcgtattgctgctctgtgtctgcatgtattgtgaccgtgcggctccacctcttccagctgctgctacagctgaggcctggatcccggcctttccctgtgacttacgtgtctgtcaccggcaggcagccctacaaatcctggtgacctgctctcccaagaacagagcctgtccccagatgtcccagtagcgatgagtaacagaggtggctgtggacttcctctacttctccttgctggatcagggccttcctgcctcccgctgggcaggtctggccttgctctcttggcagggccccagcccctctgaccactctgcagctcaccatgcagctgatgccaaagttgtggtgtccagtgtgcagcagccctgggagccactgccaccttcagaggggttccttgctgagacccacattgcttcacctggccccaccatggctgcttgcctggcccaacctagcgttctgtgccatgctagagcttgagctgttgctcttcttcaggggaggaaatagggtggagagcgggaagggtcttgctcctaagtgttgctgctgtggcttttttgccttctccaaagacgcactgccaggtcccaagcttcagactgctgtgcttagtaagcaagtgagaagcctggggtttggagcccacctactctctggcagcatcagcatcctactcctggcaacatcaggccaacgtccaccccagcctcacattgccagatgttggcagaagggctaatattgaccgtcttgactggctggagccttcaaagccactgggatgtcctccaggcacctgggtcccatgaccagctccccgtctccataggggtaggcatttcactggtttatgaagctcgagtttcattaaatatgttaagaatcaaaaaaaaaaaaaaaaaaaaaaaaaaaaaaaaaaaaaa

SEQ ID NO: 438 - DNA, 8730 bp, Homo sapiens
gtgcggttcggaggcggggcaggtgggggcgggcccaggtagcaggtttggctgcgcgggggccgcgcgtcggagtttccccctttctagggtgaggatggttctacacagccacccggagttccttagttgaaaggtgcgccctgctgtgacagaatgtggtaattgtaatctttaacattttcatgtaaaacatatttcctgatcatctttccattgtcttcatggaaaattgataaatatttgtgccttccaactctcgtcttggttgaatgacttcatcttaatacaacatggacaccacgttgctgaaaacatgctttgggactgccactgaatttatcttttgcggttttatgacaaagttattagtagtttcccttttttgaattagtattttgaagttaatatcacaatgagttcaggcttatggagccaagaaaaagtcacttcaccctactgggaagagcggattttttacttgcttcttcaagaatgcagcgttacagacaaacaaacacaaaagctccttaaagtaccgaagggaagtataggacagtatattcaagatcgttctgtggggcattcaaggattccttctgcaaaaggcaagaaaaatcagattggattaaaaattctagagcaacctcatgcagttctctttgttgatgaaaaggatgttgtagagataaatgaaaagttcacagagttacttttggcaattaccaattgtgaggagaggttcagcctgtttaaaaacagaaacagactaagtaaaggcctccaaatagacgtgggctgtcctgtgaaagtacagctgagatctggggaagaaaaatttcctggagttgtacgcttcagaggacccctgttagcagagaggacagtctccggaatattctttggagttgaattgctggaagaaggtcgtggtcaaggtttcactgacggggtgtaccaagggaaacagctttttcagtgtgatgaagattgtggcgtgtttgttgcattggacaagctagaactcatagaagatgatgacactgcattggaaagtgattacgcaggtcctggggacacaatgcaggtcgaacttcctcctttggaaataaactccagagtttctttgaaggttggagaaacaatagaatctggaacagttatattctgtgatgttttgccaggaaaagaaagcttaggatattttgttggtgtggacatggataaccctattggcaactgggatggaagatttgatggagtgcagctttgtagttttgcgtgtgttgaaagtacaattctattgcacatcaatgatatcatcccagctttatcagagagtgtgacgcaggaaaggaggcctcccaaacttgcctttatgtcaagaggtgttggggacaaaggttcatccagtcataataaaccaaaggctacaggatctacctcagaccctggaaatagaaacagatctgaattattttataccttaaatgggtcttctgttgactcacaaccacaatccaaatcaaaaaatacatggtacattgatgaagttgcagaagaccctgcaaaatctcttacagagatatctacagactttgaccgttcttcaccaccactccagcctcctcctgtgaactcactgaccaccgagaacagattccactctttaccattcagtctcaccaagatgcccaataccaatggaagtattggccacagtccactttctctgtcagcccagtctgtaatggaagagctaaacactgcacccgtccaagagagtccacccttggccatgcctcctgggaactcacatggtctagaagtgggctcattggctgaagttaaggagaaccctcctttctatggggtaatccgttggatcggtcagccaccaggactgaatgaagtgctcgctggactggaactggaagatgagtgtgcaggctgtacggatggaaccttcagaggcactcggtatttcacctgtgccctgaagaaggcgctgtttgtgaaactgaagagctgcaggcctgactctaggtttgcatcattgcagccggtttccaatcagattgagcgctgtaactctttagcatttggaggctacttaagtgaagtagtagaagaaaatactccaccaaaaatggaaaaagaaggcttggagataatgattgggaagaagaaaggcatccagggtcattacaattcttgttacttagactcaaccttattctgcttatttgcttttagttctgttctggacactgtgttacttagacccaaagaaaagaacgatgtagaatattatagtgaaacccaagagctactgaggacagaaattgttaatcctctgagaatatatggatatgtgtgtgccacaaaaattatgaaactgaggaaaatacttgaaaaggtggaggctgcatcaggatttacctctgaagaaaaagatcctgaggaattcttgaatattctgtttcatcatattttaagggtagaacctttgctaaaaataagatcagcaggtcaaaaggtacaagattgttacttctatcaaatttttatggaaaaaaatgagaaagttggcgttcccacaattcagcagttgttagaatggtcttttatcaacagtaacctgaaatttgcagaggcaccatcatgtctgattattcagatgcctcgatttggaaaagactttaaactatttaaaaaaatttttccttctctggaattaaatataacagatttacttgaagacactcccagacagtgccggatatgtggagggcttgcaatgtatgagtgtagagaatgctacgacgatccggacatctcagctggaaaaatcaagcagttttgtaaaacctgcaacactcaagtccaccttcatccgaagaggctgaatcataaatataacccagtgtcacttcccaaagacttacccgactgggactggagacacggctgcatcccttgccagaatatggagttatttgctgttctctgcatagaaacaagccactatgttgcttttgtgaagtatgggaaggacgattctgcctggctcttctttgacagcatggccgatcgggatggtggtcagaatggcttcaacattcctcaagtcaccccatgcccagaagtaggagagtacttgaagatgtctctggaagacctgcattccttggactccaggagaatccaaggctgtgcacgaagactgctttgtgatgcatatatgtgcatgtaccagagtccaacaatgagtttgtacaaataactggggtcatcgggaaaggcaaagaaactgaaggcagagtcctaacgttgcatcttattcgagctggcagttctgttcacgtccattgccggcaatggatgtctttgtggtgatgatccttcagaaaaggatgcctctgtttaaaaacaaattgcttttgtgtccctgaagtatttaataagaagcattttgcactctagaaagtatgtttgtgttggttttttaagaagtctaaatgaagttattaatacctgaagctttaagttaagtgcattgatcatatgatatttttggaagcatacaattttaattgtggaagtttaaagcctcttttagtccattgagaatgtaaataaatgtgtcttctttatggaccaaggatatgaaatcatttttcttttgtagctaacggttgccttgaggaagaaataatttggttttattaagagtctactctcaatccagttattagagatgtactgagtttgatttgttaatcctttctatatactgctgatcttgcatgtctacaatctgctcagtttttctgtgtttctgcaatagtggtcagaaaaatacttaaattcccttaatggtgttgttttctatttgttctggttttgagataaatgagtgattctgtccccaaatgtccatttttgaagtgattttcctggaggattagggtatttagcagttgaagctcttcattcatagtagttactgtcagctaacaggttttttaaggcttttaactattaatattttatggaatggggcaaagtaaattgatgaaagaattggagtgataatagtcctttacaaacatacagtccataagaaaatgaatttggcatatagaattattacaatttcctgggagagatggatatttaaacctctattattttagacaagactgtctagaacttaagtttgatctgtcagccagtactcccattaaattcagtgtagtttcacttgatagaatcagatatgttatcgaaatgttagcagcagcttcatcctccttctgattaaagtaagtagaaatgggatgttttgtttaataacagccatagtgtgtgtttagaccacagcggatgttgtagaccaggaccatagatgatacatgtcagtgctgtggaatgtgcattctctgagtgttgttttgtggtatcattgtctttcctgaatgactttctaactgtgcagaaaggcagaaaagtcatcatatgtatatgtcatatgactttataaaatatttaatgtgacaaaaagtggaaagaatctttacaaaccctgcaattacttttttaaaggcacttttactctttggttttatcattccattttgctaatatttactagctttataaattacagtaaggtacaaaaactcatcttgtaatattttcatttttgaagtgaaaaagtacatatattttgcacaaggttttatactgctaagtgcttggttggggtggtgagatgatgattagatcaggggtgaggctgagagactctgggtttagggctagccctgcctccatctcccttgggtaaaatgaagggtgtggggtaaaagatgcataaggccttttctagctctgacagcctagaagtccaatcaccctgtaataaatatgtgttgaatgaagaaatgggtgaatgagcttgtcaatgtgattttaaaaaattgactacctggaggaatgattaggaatctaaatgaagccagccctcggtatctgcaggtttctcatccatggattcaaccaactgcaaatggaaaatacgattttttttaaaaaaaggatggttacatccgtattgaacatgtacagacttttttcttgtcattattctctgaacaatacaagaactctttatgtagcatttacatttattaggtattataagtaatctagagattatttaattaaaatatacaggaggatgtgtgtcagttatatgcaaattctgtaccattttgtatcagggaattgagcatcttcagatgttggtatctgcagggatcctggaaccaaacccctgcagatactaagggctgacgatctaggtaagactggatttaacagttggaaaaaaaaaaaaaaaaggagagagaagacagttcctttcctgtagaaattaaaacaaaatacaaattgaggaagctctgctacccaggctgtcatggtagagaacttgaagaagacctgtttggatggacacctggtttcaaaagtcaggtgtggagactgttaaatgggagggcctcatccataaatgatttctggcaacgtcttcttcaggtggagcttgacgtctttttaatgttacttggggagggagtgctcattaagggatgccagggccagctctggtggttcctggggaggctgcgtccttccctgcttctgcatgtcatgaggcagcaggaaggtttcccctgcacctgtctgtcctggctccctctgggtagccccctactgttctgtgcttcagcacagcctggtttgtcaagaggcacatagttggggctgggctgcatggcacaggggcttatgtgcctgctggttatttaattttcagccttaagttttctttaatattttcctgttggctatttaaaggttttggttatcttttattccttatctacaatcaagatgacaatgtaattgaattatcttatttataacacggttcgtgattcatgattcatgattacaagtagaaaatatgtcatgttcctcacctccaaataaatatgtgtgtgtctgtgtgtgtgtatatatgtatgtggcggagagggagagagtggggaaggagagcagtgttatcatacatagagaggctaaatgtgtcccatccctcactgtcagctttataaaggagtttgactccatccacagaagaatgttttataagactaggaaaacacgttgaaaactaggataaacagcaacaaaaatcaactaaatatgttgttactgttgctaaggattttctccttagaataatttaggatttttaaaaatttctgtttgccaaatgctgtagataaatggccagattcttcctatccctaggattcctttattattttttttcacagattttgagaacaagggggagagatagtatggaagattaagattccattaatcttatagaactgtgttgtcacccaaattcctgcttgtttgaacatggcatcttcatagattcaggattcactaccctctatagctggatcttgaaaattatctggccagataattttgcatctgcttggatgattgtagactgagatgtgagtggaggataaagtattagacttttgctgagtaactgccaaccaagaagtatttatcggacacttactaggtgcctaggattgtatcagagggaatatgaaatgtgtccctgccctacctagttttaacgacagaatatctattaaaggctacttagctgaagggtaagggtgacaggtctaggggaagctttgggaggtggtgtgctgtgacagaaaaagtggcagagtagggacgagagacctgcattctagccctgtttctgtcacttgctctgtacacttagacaacagcttgacctcttgagctttagtttcctcctctgcataatgagagggttagactactgaattgtatgggaaaaaaatacaaattcctgggtcctaggccatgcctgctgaatccgactgttcaggaagaggcctaggaaatctgtgagggaatccccaggggaatctcgtgaccagccaggtgtgaaatctgctaactggaagatctcaaagcttccttcactttttgtgattttgtggtcatgtaacgttactgtattattctacgtaaatgtgggtacttggatgtttatcatactgtttctctgtgtttacatactaatttgtgtaagaaatgcattttagtctgtgtacctcaacctgctgtttgtttcctagaggtgttagtagtctttaaatacaagtaagacttaagaggatatttgatgttatttacctggatattttcttccccttttatttatttagaggaaattgagattctaggagccaaaaaaatgaaaacaaaattctaaggcaaagttaaagaaaaaaattacattatttcttaccatttgctactttataatgaaaatttaaaaattatatgggaagatttttctctgggataacaaatccttgtcataaagtaagaggtctttttaaagtaggtaggctataaggcctgtaatttaaaataatactcctttctctagggtttggtgcaattctccattaatgaagataacatttgaattccccaaagcaggtgaggagtcggggaggagaaagcgatgttaaaatgaaaactcactgcaaaagaggaggcagaggaagaaggaatgtaaaccccttaaagcagatgtgtgtggggccttatgaagaccaggattctgcgggtgtcaggggattgcccctcttgacagagactagggttttagactgaggcttcctgcagggtgttcgcattgcccttctccgttccccttcagacctttctggggagaagaggtgggaggaggggagaaagactgttcatcttattctgaatcctggagcagctgaaggttttctcttgagtcaggatgcagtggtaatgcattaaccagcaagtgtggccaaggataatgaaaaagtgggaaaggaaggtcctcctcctccctgattgtagcatccagcagtctctgtagccaggttactcaagaaccacatttgatttcctggccctttgccttggcagtgatggcatttttatttcactgtgttttaaagtcttcatttatttttataacatgggttagggagaagggccacaaatggagggattgtcctttcaagcaccacagcttcagataaaattagtactttcaaatattgtccactttaacttaaaaaattctagagggattatattggagactcaactgcccttggttttagtttataaaatggcctagtactgtggaattttaattttagaaagtcttagcatcagatcataaacattcattaaaagaactcacatcccatctgaaacttcccaggggagttgggattcttagtagattggtagaaaggggctcattttctactgcatttcccatttttggtatcttgttcagcatgttttatttttatttcttgtctgcagaacatcctatatttatgagaacattctttaagaagaccaccacatagaataccccttcctatcagctcgctctgatttagccttaattttgttaaattttttagagatgaatgaagtgctgctgtggaaagaaatgtacatatactatttctgtatcattaaaattacatttttatggttcaaaaaaaaaaaaaaaaa

SEQ ID NO: 439 - DNA, 2602 bp, Homo sapiens
ctcaccctgaaggtgacagttccttggaaccttccctgatccttgtgatcccaggctccaagagtccacccttcccagctcagctcagtacctcagccacctccaagatccctacactgatcatgcttttcccaatctccatgtcggccacggagtttcttctggcctctgtcatcttctgtctggtattctgggtaatcagggcctcaagacctcaggtccccaaaggcctgaagaatccaccagggccatggggctggcctctgattgggcacatgctgaccctgggaaagaacccgcacctggcactgtcaaggatgagccagcagtatggggacgtgctgcagatccgaattggctccacacccgtggtggtgctgagcggcctggacaccatccggcaggccctggtgcggcagggcgatgatttcaagggccggcccgacctctacaccttcaccctcatcagtaatggtcagagcatgtccttcagcccagactctggaccagtgtgggctgcccgccggcgcctggcccagaatggcctgaaaagtttctccattgcctctgacccagcctcctcaacctcctgctacctggaagagcatgtgagcaaggaggctgaggtcctgataagcacgttgcaggagctgatggcagggcctgggcactttaacccctacaggtatgtggtggtatcagtgaccaatgtcatctgtgccatttgctttggccggcgctatgaccacaaccaccaagaactgcttagcctagtcaacctgaataataatttcggggaggtggttggctctggaaacccagctgacttcatccctattcttcgctacctacccaacccttccctgaatgccttcaaggacctgaatgagaagttctacagcttcatgcagaagatggtcaaggagcactacaaaacctttgagaagggccacatccgggacatcacagacagcctgattgagcactgtcaggagaagcagctggatgagaacgccaatgtccagctgtcagatgagaagatcattaacatcgtcttggacctctttggagctgggtttgacacagtcacaactgctatctcctggagcctcatgtatttggtgatgaaccccagggtacagagaaagatccaagaggagctagacacagtgattggcaggtcacggcggccccggctctctgacagatcccatctgccctatatggaggccttcatcctggagaccttccgacactcttccttcgtccccttcaccatcccccacagcacaacaagagacacaagtttgaaaggcttttacatccccaaggggcgttgtgtctttgtaaaccagtggcagatcaaccatgaccagaagctatgggtcaacccatctgagttcctacctgaacggtttctcacccctgatggtgctatcgacaaggtgttaagtgagaaggtgattatctttggcatgggcaagcggaagtgtatcggtgagaccattgcccgctgggaggtctttctcttcctggctatcctgctgcaacgggtggaattcagcgtgccactgggcgtgaaggtggacatgacccccatctatgggctaaccatgaagcatgcctgctgtgagcacttccaaatgcagctgcgctcttaggtgcttgagagccctgaggcctagactctgtctacctggtctggttgggcagccagaccagcaggctggcctatgtggtctaagattcagcctgaaactcatagacactgatctggctgcagttttgctatctgggctgtgggcaagcctaagggatcctgcctgcccctaccctggacttgcctctgcacaccctccagagacaacaggtaaaacagggccacatagatgctgatggagccttcccaagttgtgcttgagccaggaggcctgctagggttaggaggtccttaggcctctgagaagctctgaagaactctctggaagcccctgggcccagtacctagctggctctgtgagggtgctgactggcttcagcaagttagaactagccaaaccaggaccctgtccaatctttgacaattgggagctgccaagagtgaagggaagagacagcccaggatactggcacagaggtagtctcactgcttgaactaggctgagcaatctgaccctatgggtctaggacacagttcctgggaacatcacattcctctgcccttcctgcaggcaggaacaaacagggctgccttctggccttgtaagacccttattgctgtcctggaggggctggggacttgtgtctgcggggatccagagcgcacagggagtgcacatatccaggcaccaggactagggctggagtgaggggggggtatttcaattaccttctattggtctcccttctctacactcttgtaataaaatgtctatttttaatgtttgtacacaacaatccttctattctagcctgcattgagcttgcatgcttgcataagagcttaagaaccattgatttaatgtaatagggaaaattctaacccaggtatccaaaaatgtgtaagaacaactacctgagctaaataaagatattgttcaga

SEQ ID NO: 440 - DNA, 3265 bp, Homo sapiens
tggagagggacaggaggaaacgcagcgccagcagcatctcatctaccctccttgacacctccccgtggctccagcaagccctagaggtcagccttgcggaccaacaggaggactcccagctttcccttttcaagaggtaccccagacaccggccaccctcttccagcccctgcggccagtgcaaggaggcaccaatgctctgaggctgtcgcgtggtgcagcgtcgagcatcctcgccgagtccttctgctgcctgtcccgcctcaccccgctccatcacaccagctggccctctttgcttccttttcccagaatcgttaagccccgactcccactagcacctcgtaccaacctcgccccaccccatcctcctgccttcccgcgctccggtgtcccccgctgccatgagctcccccatcagcaagagccgctcgcttgccgccttcctgcagcagctgcgcagtccgaggcagcccccgagactggtgacatctacggcgtacacgtcccctcagccgcgagaggtgccagtctgcccgctgacagctggtggcgagactcagaacgcggccgccctgccgggccccaccagctggccactgctggcgagcctgctgcagattctctggaaagggggtctcaagaaacagcacgacaccctggtggagtaccacaagaagtatggcaagattttccgcatgaagttgggttcctttgagtcggtgcacctgggctcgccatgcctgctggaagcgctgtaccgcaccgagagcgtaccccagcggctggagatcaaaccgtggaaggcctatcgcgactaccgcaaagaaggctacgggctgctgatcctggaaggggaagactggcagcgggtccggagtgcctttcaaaagaaactaatgaaaccaggggaagtgatgaagctggacaacaaaatcaatgaggtcttggccgattttatgggcagaatagatgagctctgtgatgaaagaggccacgtcgaagacttgtacagcgaactgaacaaatggtcgtttgaaagtatctgcctcgtgttgtatgagaagagatttgggcttctccagaagaatgcaggggatgaagctgtgaacttcatcatggccatcaaaacaatgatgagcacgtttgggaggatgatggtcactccagtcgagctgcacaagagcctcaacaccaaggtctggcagggacacactctggcctgggacaccattttcaaatcagtcaaagcttgtatcgacaaccggttagagaagtattctcagcagcctagtgcagatttcctttgtgacatttatcaccagaatcggctttcaaagaaagaattgtatgctgctgtcacagagctccagctggctgcggtggaaacgacagcaaacagtctaatgtggattctctacaatttatcccgtaatccccaagtgcaacaaaagcttcttaaggaaattcaaagtgtattacctgagaatcagaggccacgggaggaagatttgaggaatatgccgtatttaaaagcctgtctgaaagaatctatgaggcttaccccgggtgtaccatttacaactcggactcttgacaaggcaacagttctgggtgaatatgctttacccaaaggaacagtgctcatgctaaatacccaggtgttgggatccagtgaagacaattttgaagattcaagtcagtttagacctgaacgttggcttcaggagaaggaaaaaattaatccttttgcgcatcttccatttggcgttggaaaaagaatgtgcattggtcgccgattagcagagcttcaactgcatttggctctttgttggattgtccgcaaatacgacatccaggccacagacaatgagcctgttgagatgctacactcaggcaccctggtgcccagccgggaactccccatcgcgttttgccagcgataatacgcctcagatggtggtatttgctaacatcatatccaactcagggaagcggactgagtgctgggatccaaggcattctacagggttcactgctggtttacacttcacctgtgtcagcaccatcttcaggtgcttagaatggcctgggagcctgttctgtcttgcatcttccatgacatgaaagggaggctggcacttgtcagtcaggtagaggttacaaaccgtttcaggccctgctaccacattcactgtttgaatctttaattcccaagaataagtttacatttcacaatgaatgacctacaacagctaaattttctggggctgggagtaatactgacaatccatttactgtagctctgcttaatgtactacttaggaaaatgtccctgcttaataatgtaagccaagctaaatgatggttaaagttatcaggcctcccatgaaattgcgttcttcctgcattgaaataaaaacattattgggaaactagagaacacctctatttttaaaaggactttaacgaagtcaaacaacttctaagactagtgattcactggggcattatttgttagaggaccttaaaattgtttattttttaaatgtgattcctttatggcattagggtaaagatgaagcaataatttttaaattgtgtatgtgcatatgaagcacagacatgcatgtgtgtgtgtgtctgtgtgtgtgtgtccgtgtatgtgtgtgtgggttctaatggtaatttgcctcagtcatttttttaatatttgcagtacttgatttaggatctgtggtgcagggcatgtttcaaagtttagtcacagcttaaaaacattcagtgtgactttaatattataaaatgatttcccatgccataatttttctgtctattaaatgggacaagtgtaaagcatgcaaaagttagagatctgttatataacatttgttttgtgatttgaactcctaggaaaaatatgatttcataaatgtaaaatgcacagaaatgcatgcaatacttataagacttaaaaattgtgtttacagatggtttatttgtgcatatttttactactgcttttcctaaatgcatactgtatataattctgtgtatttgataaatatttcttcctacattatatttttagaatatttcagaaatatacatttatgtctttatattgtaataaatatgtacatatctaggtatatgctttctctctgctgtgaaattatttttagaattataattcacgtcttgtcatatttcatctgtataccttcaaattctctgaaagtaaaaataaaagtttttaaatatt

SEQ ID NO: 441 - DNA, 2329 bp, Homo sapiens
atggaggcgaccggcacctgggcgctgctgctggcgctggcgctgctcctgctgctgacgctggcgctgtccgggaccagggcccgaggccacctgccccccgggcccacgccgctaccactgctgggaaacctcctgcagctacggcccggggcgctgtattcagggctcatgcggctgagtaagaagtacggaccggtgttcaccatctacctgggaccctggcggcctgtggtggtcctggttgggcaggaggctgtgcgggaggccctgggaggtcaggctgaggagttcagcggccggggaaccgtagcgatgctggaagggacttttgatggccatggggttttcttctccaacggggagcggtggaggcagctgaggaagtttaccatgcttgctctgcgggacctgggcatggggaagcgagaaggcgaggagctgatccaggcggaggcccggtgtctggtggagacattccaggggacagaaggacgcccattcgatccctccctgctgctggcccaggccacctccaacgtagtctgctccctcctctttggcctccgcttctcctatgaggataaggagttccaggccgtggtccgggcagctggtggtaccctgctgggagtcagctcccaggggggtcagacctacgagatgttctcctggttcctgcggcccctgccaggcccccacaagcagctcctccaccacgtcagcaccttggctgccttcacagtccggcaggtgcagcagcaccaggggaacctggatgcttcgggccccgcacgtgaccttgtcgatgccttcctgctgaagatggcacaggaggaacaaaacccaggcacagaattcaccaacaagaacatgctgatgacagtcatttatttgctgtttgctgggacgatgacggtcagcaccacggtcggctataccctcctgctcctgatgaaataccctcatgtccaaaagtgggtacgtgaggagctgaatcgggagctgggggctggccaggcaccaagcctaggggaccgtacccgcctcccttacaccgacgcggttctgcatgaggcgcagcggctgctggcgctggtgcccatgggaataccccgcaccctcatgcggaccacccgcttccgagggtacaccctgccccagggcacggaggtcttccccctccttggctccatcctgcatgaccccaacatcttcaagcacccagaagagttcaacccagaccgtttcctggatgcagatggacggttcaggaagcatgaggcgttcctgcccttctccttagggaagcgtgtctgccttggagagggcctggcaaaagcggagctcttcctcttcttcaccaccatcctacaagccttctccctggagagcccgtgcccgccggacaccctgagcctcaagcccaccgtcagtggccttttcaacattcccccagccttccagctgcaagtccgtcccactgaccttcactccaccacgcagaccagatgaaggaaggcaacttggaagtggtgggtgcccaggacggtgcctccagcctcaacagtgggcatggacagggttaatgtctccagagtgtacactgcaggcagccacatttacacgcctgcagttgttttccggagtctgtcccacggcccacacgctcacttgactcatgctgctaagatgcacaaccgcacacccatacacaactacaagggccacaaagcaactgctgggttagctttccacagacataaatatagtccatctgcaatcacaagcacatagccaggtaacccaccaactcccctggatctgcagcccacacgtgggagtctggctgtcaccttcacaagccacagaaacggccacacatgttcacagctcacacgccctctccattcatcgaacttctcagtgtccctgtccctggtgcctggcacagggaacagcatgccccctccggggtcatgccacccagagactgtcgctgtctatggccccaactcatgctccctctcttggctacaccactctcccagcctgtgaccaccgatgtccacacacccccaaccacttgtccacacagctacccacgtacgacatcgtcctggctccccagagtatcttcccactgagacacgccgcccccacagaggcacagtccccagccacctctgcaactgcagccctcagtcacccctttttaagcaccctgattctaccaaatgcaaacacatctgggtctgcgattatgcacagagactttggacatacgaggaccctcagaccggaggaacacctgcccaaccccaacacg

SEQ ID NO: 442 - DNA, 1765 bp, Homo sapiens
atctgcctccagcactgcccatccttgcccctttccactgtccttggagcttcctgggcccttccctgggcctcaggatcccaccctccatcccgtctgccctgcaggatgccgcagctgagcctgtcctggctgggcctcgggcccgtggcagcatccccgtggctgcttctgctgctggttgggggctcctggctcctggcccgcgtcctggcctggacctacaccttctatgacaactgccgccgtctccagtgttttcctcaacccccgaaacagaactggttttggggacaccagggcctggtcactcccacggaagagggcatgaagacattgacccagctggtgaccacatatccccagggctttaagttgtggctgggtcctaccttccccctcctcattttatgccaccctgacatcatccggcctatcaccagtgcctcagctgctgtcgcacccaaggatatgattttctatggcttcctgaagccctggctgggggatgggctcctgctgagtggtggtgacaagtggagccgccaccgtcggatgttgacgcctgccttccatttcaacatcttgaagccttatatgaagattttcaacaagagtgtgaacatcatgcacgacaagtggcagcgcctggcctcagagggcagcgccagactggacatgtttgaacacatcagcctcatgaccttggacagtctgcagaaatgtgtcttcagctttgaaagcaattgtcaggagaagcccagtgaatatattgccgccatcttggagctcagtgcctttgtagaaaagagaaaccagcagattctcttgcacacggacttcctgtattatctcactcctgatgggcagcgcttccgcagggcctgccacctggtgcacgacttcacagatgccgtcatccaggagcggcgccgcaccctccccactcagggtattgatgatttcctcaagaacaaggcaaagtccaagactttagacttcattgatgtgcttctgctgagcaaggatgaagatgggaaggaattgtctgatgaggacataagagcagaagctgacaccttcatgtttgagggccatgacactacagccagtggtctctcctgggtcctataccaccttgcaaagcacccagaataccaggaacagtgccggcaagaagtgcaagagcttctgaaggaccgtgaacctatagagattgaatgggacgacctggcccagctgcccttcctgaccatgtgcattaaggagagcctgcggttgcatcccccagtcccggtcatctcccgatgttgcacgcaggactttgtgctcccagacggccgcgtcatccccaaaggcattgtctgccttatcaatattatcgggatccattacaacccaactgtgtggccagaccctgaggtctacgaccccttccgtttcaaccaagagaacatcaaggagaggtcacctctggcttttattcccttctcggcagggcccagaaactgcatcgggcaggcgttcgccatggctgagatgaaggtggtcctggcgctcacgttgctgcacttccgcatcctgccgacccacattgaaccccgcaggaaacccgagctgatattgcgcgcagagggtggactttggctgcgggtggagcccctgggtgcgaactcacagtgactgccctacccacccacccacctttgtagagtcccagaaacaaaactatgctgacaaaaaaaaaaaaaaaaaaaaaaaaaaa

SEQ ID NO: 443 - DNA, 745 bp, Homo sapiens
gtcgggtacgggaaggtccaagccgctgccgggtgcccgagggccgtcgtggccgccgtcgccacgggtcccaatggagccgccgaatctctatccggtgaagctctacgtgtacgacctgtccaaaggcctggcccggcggctcagccccatcatgctggggaaacaactggaaggcatctggcacacatccatagttgtgcacaaggatgagttcttcttcggcagtggtggtatctccagctgccccccgggagggacattgcttgggcctccagactctgtggttgatgtggggagtacagaagtcacagaagaaatctttctggagtacctctcctccctgggggagtccctgttccgaggtgaggcctacaacctctttgaacacaattgtaacaccttcagcaacgaagtggcacagttcctgactgggcggaagattccttcttacatcacagacctgccctctgaagttctctccacgccctttggacaggcacttcggcccctcctggactccattcagatccagcctccaggagggagctccgtgggcagacccaacggccagagctaacaggactgcctgggaccgccctgcctcaccagggcttttcctttttaaacaaaacaaaccctaccagatttctattttataattttacatcagagctaacaaccaggggacggctttttaaatttcccagggaaggagaccgtcaggccgcatgtagacaatgct

SEQ ID NO: 444 - DNA, 8087 bp, Homo sapiens
cggccgccgccggcacccacagcgccaagagcggcggctccgaggcggctctcaaggagggtggaagcgccgccgcgctgtcctcctcctcctcctcctccgcggcggcagcggcggcatcctcttcctcctcgtcgggcccgggctcggccatggagacggggctgctccccaaccacaaactgaaaaccgttggcgaagcccccgccgcgccgccccaccagcagcaccaccaccaccaccatgcccaccaccaccaccaccatgcccaccacctccaccaccaccacgcactacagcagcagctaaaccagttccagcagcagcagcagcagcagcaacagcagcagcagcagcagcagcaacagcaacatcccatttccaacaacaacagcttgggcggcgcgggcggcggcgcgcctcagcccggccccgacatggagcagccgcaacatggaggcgccaaggacagtgctgcgggcggccaggccgaccccccgggcccgccgctgctgagcaagccgggcgacgaggacgacgcgccgcccaagatgggggagccggcgggcggccgctacgagcacccgggcttgggcgccctgggcacgcagcagccgccggtcgccgtgcccgggggcggcggcggcccggcggccgtcccggagtttaataattactatggcagcgctgcccctgcgagcggcggccccggcggccgcgctgggccttgctttgatcaacatggcggacaacaaagccccgggatggggatgatgcactccgcctccgccgccgccgccggggcccccggcagcatggaccccctgcagaactcccacgaagggtaccccaacagccagtgcaaccattatccgggctacagccggcccggcgcgggcggcggcggcggcggcggcggcggaggaggaggaggcagcggaggaggaggaggaggaggaggagcaggagcaggaggagcaggagcgggagctgtggcggcggcggccgcggcggcggcggcagcagcaggaggcggcggcggcggcggctatgggggctcgtccgcggggtacggggtgctgagctccccccggcagcagggcggcggcatgatgatgggccccgggggcggcggggccgcgagcctcagcaaggcggccgccggctcggcggcggggggcttccagcgcttcgccggccagaaccagcacccgtcgggggccaccccgaccctcaatcagctgctcacctcgcccagccccatgatgcggagctacggcggcagctaccccgagtacagcagccccagcgcgccgccgccgccgccgtcgcagccccagtcccaggcggcggcggcgggggcggcggcgggcggccagcaggcggccgcgggcatgggcttgggcaaggacatgggcgcccagtacgccgctgccagcccggcctgggcggccgcgcaacaaaggagtcacccggcgatgagccccggcacccccggaccgaccatgggcagatcccagggcagcccaatggatccaatggtgatgaagagacctcagttgtatggcatgggcagtaaccctcattctcagcctcagcagagcagtccgtacccaggaggttcctatggccctccaggcccacagcggtatccaattggcatccagggtcggactcccggggccatggccggaatgcagtaccctcagcagcagatgccacctcagtatggacagcaaggtgtgagtggttactgccagcagggccaacagccatattacagccagcagccgcagcccccgcacctcccaccccaggcgcagtatctgccgtcccagtcccagcagaggtaccagccgcagcaggacatgtctcaggaaggctatggaactagatctcaacctcctctggcccccggaaaacctaaccatgaagacttgaacttaatacagcaagaaagaccatcaagtttaccagatctgtctggctccattgatgacctccccacgggaacggaagcaactttgagctcagcagtcagtgcatccgggtccacgagcagccaaggggatcagagcaacccggcgcagtcgcctttctccccacatgcgtcccctcatctctccagcatcccggggggcccatctccctctcctgttggctctcctgtaggaagcaaccagtctcgatctggcccaatctctcctgcaagtatcccaggtagtcagatgcctccgcagccacccgggagccagtcagaatccagttcccatcccgccttgagccagtcaccaatgccacaggaaagaggttttatggcaggcacacaaagaaaccctcagatggctcagtatggacctcaacagacaggaccatccatgtcgcctcatccttctcctgggggccagatgcatgctggaatcagtagctttcagcagagtaactcaagtgggacttacggtccacagatgagccagtatggaccacaaggtaactactccagacccccagcgtatagtggggtgcccagtgcaagctacagcggcccagggcccggtatgggtatcagtgccaacaaccagatgcatggacaagggccaagccagccatgtggtgctgtgcccctgggacgaatgccatcagctgggatgcagaacagaccatttcctggaaatatgagcagcatgacccccagttctcctggcatgtctcagcagggagggccaggaatggggccgccaatgccaactgtgaaccgtaaggcacaggaggcagccgcagcagtgatgcaggctgctgcgaactcagcacaaagcaggcaaggcagtttccccggcatgaaccagagtggacttatggcttccagctctccctacagccagcccatgaacaacagctctagcctgatgaacacgcaggcgccgccctacagcatggcgcccgccatggtgaacagctcggcagcatctgtgggtcttgcagatatgatgtctcctggtgaatccaaactgcccctgcctctcaaagcagacggcaaagaagaaggcactccacagcccgagagcaagtcaaagaagtccagctcctccaccactactggggagaagatcacgaaggtgtacgagctggggaatgagccagagagaaagctctgggtcgaccgatacctcaccttcatggaagagagaggctctcctgtctcaagtctgcctgccgtgggcaagaagcccctggacctgttccgactctacgtctgcgtcaaagagatcgggggtttggcccaggttaataaaaacaagaagtggcgtgagctggcaaccaacctaaacgttggcacctcaagcagtgcagcgagctccctgaaaaagcagtatattcagtacctgtttgcctttgagtgcaagatcgaacgtggggaggagcccccgccggaagtcttcagcaccggggacaccaaaaagcagcccaagctccagccgccatctcctgctaactcgggatccttgcaaggcccacagaccccccagtcaactggcagcaattccatggcagaggttccaggtgacctgaagccacctaccccagcctccacccctcacggccagatgactccaatgcaaggtggaagaagcagtacaatcagtgtgcacgacccattctcagatgtgagtgattcatccttcccgaaacggaactccatgactccaaacgccccctaccagcagggcatgagcatgcccgatgtgatgggcaggatgccctatgagcccaacaaggacccctttgggggaatgagaaaagtgcctggaagcagcgagccctttatgacgcaaggacagatgcccaacagcagcatgcaggacatgtacaaccaaagtccctccggagcaatgtctaacctgggcatggggcagcgccagcagtttccctatggagccagttacgaccgaaggcatgaaccttatgggcagcagtatccaggccaaggccctccctcgggacagccgccgtatggagggcaccagcccggcctgtacccacagcagccgaattacaaacgccatatggacggcatgtacgggcccccagccaagcgccacgagggcgacatgtacaacatgcagtacagcagccagcagcaggagatgtacaaccagtatggaggctcctactcgggcccggaccgcaggcccatccagggccagtacccgtatccctacagcagggagaggatgcagggcccggggcagatccagacacacggaatcccgcctcagatgatgggcggcccgctgcagtcgtcctccagtgaggggcctcagcagaatatgtgggcagcacgcaatgatatgccttatccctaccagaacaggcagggccctggcggccctacacaggcgcccccttacccaggcatgaaccgcacagacgatatgatggtacccgatcagaggataaatcatgagagccagtggccttctcacgtcagccagcgtcagccttatatgtcgtcctcagcctccatgcagcccatcacacgcccaccacagccgtcctaccagacgccaccgtcactgccaaatcacatctccagggcgcccagcccagcgtccttccagcgctccctggagaaccgcatgtctccaagcaagtctccttttctgccgtctatgaagatgcagaaggtcatgcccacggtccccacatcccaggtcaccgggccaccaccccaaccacccccaatcagaagggagatcacctttcctcctggctcagtagaagcatcacaaccagtcttgaaacaaaggcgaaagattacctccaaagatatcgttactcctgaggcgtggcgtgtgatgatgtcccttaaatcaggtcttttggctgagagtacgtgggctttggacactattaatattcttctgtatgatgacagcactgttgctactttcaatctctcccagttgtctggatttctcgaacttttagtcgagtactttagaaaatgcctgattgacatttttggaattcttatggaatatgaagtgggagaccccagccaaaaagcacttgatcacaacgcagcaaggaaggatgacagccagtccttggcagacgattctgggaaagaggaggaagatgctgaatgtattgatgacgacgaggaagacgaggaggatgaggaggaagacagcgagaagacagaaagcgatgaaaagagcagcatcgctctgactgccccggacgccgctgcagacccaaaggagaagcccaagcaagccagtaagttcgacaagctgccaataaagatagtcaaaaagaacaacctgtttgttgttgaccgatctgacaagttggggcgtgtgcaggagttcaatagtggccttctgcactggcagctcggcgggggtgacaccaccgagcacattcagactcactttgagagcaagatggaaattcctcctcgcaggcgcccacctccccccttaagctccgcaggtagaaagaaagagcaagaaggcaaaggcgactctgaagagcagcaagagaaaagcatcatagcaaccatcgatgacgtcctctctgctcggccaggggcattgcctgaagacgcaaaccctgggccccagaccgaaagcagtaagtttccctttggtatccagcaagccaaaagtcaccggaacatcaagctgctggaggacgagcccaggagccgagacgagactcctctgtgtaccatcgcgcactggcaggactcgctggctaagcgatgcatctgtgtgtccaatattgtccgtagcttgtcattcgtgcctggcaatgatgccgaaatgtccaaacatccaggcctggtgctgatcctggggaagctgattcttcttcaccacgagcatccagagagaaagcgagcaccgcagacctatgagaaagaggaggatgaggacaagggggtggcctgcagcaaagatgagtggtggtgggactgcctcgaggtcttgagggataacacgttggtcacgttggccaacatttccgggcagctagacttgtctgcttacacggaaagcatctgcttgccaattttggatggcttgctgcactggatggtgtgcccgtctgcagaggcacaagatccctttccaactgtgggacccaactcggtcctgtcgcctcagagacttgtgctggagaccctctgtaaactcagtatccaggacaataatgtggacctgatcttggccactcctccatttagtcgtcaggagaaattctatgctacattagttaggtacgttggggatcgcaaaaacccagtctgtcgagaaatgtccatggcgcttttatcgaaccttgcccaaggggacgcactagcagcaagggccatagctgtgcagaaaggaagcattggaaacttgataagcttcctagaggatggggtcacgatggcccagtaccagcagagccagcacaacctcatgcacatgcagcccccgcccctggaaccacctagcgtagacatgatgtgcagggcggccaaggctttgctagccatggccagagtggacgaaaaccgctcggaattccttttgcacgagggccggttgctggatatctcgatatcagctgtcctgaactctctggttgcatctgtcatctgtgatgtactgtttcagattgggcagttatgacataagtgagaaggcaagcatgtgtgagtgaagattagagggtcacatataactggctgttttctgttcttgtttatccagcgtaggaagaaggaaaagaaaatctttgctcctctgccccattcactatttaccaattgggaattaaagaaataattaatttgaacagttatgaaattaatatttgctgtctgtgtgtataagtacatcctttggggttttttttttctcttttttttaaccaaagttgctgtctagtgcattcaaaggtcactttttgttcttcacagatctttttaatgttctttcccatgttgtattgcatttttgggggaagcaaattgactttaaagaaaaaagttgtggcaaaagatgctaagatgcgaaaatttcaccacactgagtcaaaaaggtgaaaaattatccatttcctatgcgttttactcctcagagaatgaaaaaaactgcatcccatcacccaaagttctgtgcaatagaaatttctacagatacaggtataggggctcaaggaggtatgtcggtcagtagtcaaaactatgaaatgatactggtttctccacaggaatatggttccattaggctgggagcaaaaacaatgttttttaagattgagaatacatacctgacaacgatccggaaactgctcctcaccactcccgtcatgcctgctgtcggcgtttgaccttccacgtgacagttcttcacaattcctttcatcattttttaaatattttttttactgcctatgggctgtgatgtatatagaagttgtacattaaacataccctcatttttttcttttcttttttttttttttttttagtacaaagttttagtttctttttcatgatgtggtaactacgaagtgatggtagatttaaataattttttatttttattttatatattttttcattagggccatatctccaaaaaaagaaagaaaaaatacaaaaaacaaaaacaaaaaaaaaagagggtaatgtacaagtttctgtatgtataaagtcatgctcgatttcaggagagcagctgatcacaatttgcttcatgaatcaaggtgtggaaatggttatatatggattgatttagaaaatggttaccagtacagtcaaaaaagagaaaatgaaaaaaatacaactaaaaggaagaaacacaacttcaaagatttttcagtgatgagaatccacatttgtatttcaagataatgtagtttaaaaaaaaaaaaaagaaaaaaacttgatgtaaattcctccttttcctctggcttaatgaatatcatttattcagtataaaatctttatatgttccacatgttaagaataaatgtacattaaatcttgttaagcactgtgaaaaaaaaaaaaaaaaaaaaaa

SEQ ID NO: 445 - DNA, 8126 bp, Homo sapiens
cggccgccgccggcacccacagcgccaagagcggcggctccgaggcggctctcaaggagggtggaagcgccgccgcgctgtcctcctcctcctcctcctccgcggcggcagcggcggcatcctcttcctcctcgtcgggcccgggctcggccatggagacggggctgctccccaaccacaaactgaaaaccgttggcgaagcccccgccgcgccgccccaccagcagcaccaccaccaccaccatgcccaccaccaccaccaccatgcccaccacctccaccaccaccacgcactacagcagcagctaaaccagttccagcagcagcagcagcagcagcaacagcagcagcagcagcagcagcaacagcaacatcccatttccaacaacaacagcttgggcggcgcgggcggcggcgcgcctcagcccggccccgacatggagcagccgcaacatggaggcgccaaggacagtgctgcgggcggccaggccgaccccccgggcccgccgctgctgagcaagccgggcgacgaggacgacgcgccgcccaagatgggggagccggcgggcggccgctacgagcacccgggcttgggcgccctgggcacgcagcagccgccggtcgccgtgcccgggggcggcggcggcccggcggccgtcccggagtttaataattactatggcagcgctgcccctgcgagcggcggccccggcggccgcgctgggccttgctttgatcaacatggcggacaacaaagccccgggatggggatgatgcactccgcctccgccgccgccgccggggcccccggcagcatggaccccctgcagaactcccacgaagggtaccccaacagccagtgcaaccattatccgggctacagccggcccggcgcgggcggcggcggcggcggcggcggcggaggaggaggaggcagcggaggaggaggaggaggaggaggagcaggagcaggaggagcaggagcgggagctgtggcggcggcggccgcggcggcggcggcagcagcaggaggcggcggcggcggcggctatgggggctcgtccgcggggtacggggtgctgagctccccccggcagcagggcggcggcatgatgatgggccccgggggcggcggggccgcgagcctcagcaaggcggccgccggctcggcggcggggggcttccagcgcttcgccggccagaaccagcacccgtcgggggccaccccgaccctcaatcagctgctcacctcgcccagccccatgatgcggagctacggcggcagctaccccgagtacagcagccccagcgcgccgccgccgccgccgtcgcagccccagtcccaggcggcggcggcgggggcggcggcgggcggccagcaggcggccgcgggcatgggcttgggcaaggacatgggcgcccagtacgccgctgccagcccggcctgggcggccgcgcaacaaaggagtcacccggcgatgagccccggcacccccggaccgaccatgggcagatcccagggcagcccaatggatccaatggtgatgaagagacctcagttgtatggcatgggcagtaaccctcattctcagcctcagcagagcagtccgtacccaggaggttcctatggccctccaggcccacagcggtatccaattggcatccagggtcggactcccggggccatggccggaatgcagtaccctcagcagcaggactctggagatgccacatggaaagaaacattctggttgatgccacctcagtatggacagcaaggtgtgagtggttactgccagcagggccaacagccatattacagccagcagccgcagcccccgcacctcccaccccaggcgcagtatctgccgtcccagtcccagcagaggtaccagccgcagcaggacatgtctcaggaaggctatggaactagatctcaacctcctctggcccccggaaaacctaaccatgaagacttgaacttaatacagcaagaaagaccatcaagtttaccagatctgtctggctccattgatgacctccccacgggaacggaagcaactttgagctcagcagtcagtgcatccgggtccacgagcagccaaggggatcagagcaacccggcgcagtcgcctttctccccacatgcgtcccctcatctctccagcatcccggggggcccatctccctctcctgttggctctcctgtaggaagcaaccagtctcgatctggcccaatctctcctgcaagtatcccaggtagtcagatgcctccgcagccacccgggagccagtcagaatccagttcccatcccgccttgagccagtcaccaatgccacaggaaagaggttttatggcaggcacacaaagaaaccctcagatggctcagtatggacctcaacagacaggaccatccatgtcgcctcatccttctcctgggggccagatgcatgctggaatcagtagctttcagcagagtaactcaagtgggacttacggtccacagatgagccagtatggaccacaaggtaactactccagacccccagcgtatagtggggtgcccagtgcaagctacagcggcccagggcccggtatgggtatcagtgccaacaaccagatgcatggacaagggccaagccagccatgtggtgctgtgcccctgggacgaatgccatcagctgggatgcagaacagaccatttcctggaaatatgagcagcatgacccccagttctcctggcatgtctcagcagggagggccaggaatggggccgccaatgccaactgtgaaccgtaaggcacaggaggcagccgcagcagtgatgcaggctgctgcgaactcagcacaaagcaggcaaggcagtttccccggcatgaaccagagtggacttatggcttccagctctccctacagccagcccatgaacaacagctctagcctgatgaacacgcaggcgccgccctacagcatggcgcccgccatggtgaacagctcggcagcatctgtgggtcttgcagatatgatgtctcctggtgaatccaaactgcccctgcctctcaaagcagacggcaaagaagaaggcactccacagcccgagagcaagtcaaagaagtccagctcctccaccactactggggagaagatcacgaaggtgtacgagctggggaatgagccagagagaaagctctgggtcgaccgatacctcaccttcatggaagagagaggctctcctgtctcaagtctgcctgccgtgggcaagaagcccctggacctgttccgactctacgtctgcgtcaaagagatcgggggtttggcccaggttaataaaaacaagaagtggcgtgagctggcaaccaacctaaacgttggcacctcaagcagtgcagcgagctccctgaaaaagcagtatattcagtacctgtttgcctttgagtgcaagatcgaacgtggggaggagcccccgccggaagtcttcagcaccggggacaccaaaaagcagcccaagctccagccgccatctcctgctaactcgggatccttgcaaggcccacagaccccccagtcaactggcagcaattccatggcagaggttccaggtgacctgaagccacctaccccagcctccacccctcacggccagatgactccaatgcaaggtggaagaagcagtacaatcagtgtgcacgacccattctcagatgtgagtgattcatccttcccgaaacggaactccatgactccaaacgccccctaccagcagggcatgagcatgcccgatgtgatgggcaggatgccctatgagcccaacaaggacccctttgggggaatgagaaaagtgcctggaagcagcgagccctttatgacgcaaggacagatgcccaacagcagcatgcaggacatgtacaaccaaagtccctccggagcaatgtctaacctgggcatggggcagcgccagcagtttccctatggagccagttacgaccgaaggcatgaaccttatgggcagcagtatccaggccaaggccctccctcgggacagccgccgtatggagggcaccagcccggcctgtacccacagcagccgaattacaaacgccatatggacggcatgtacgggcccccagccaagcgccacgagggcgacatgtacaacatgcagtacagcagccagcagcaggagatgtacaaccagtatggaggctcctactcgggcccggaccgcaggcccatccagggccagtacccgtatccctacagcagggagaggatgcagggcccggggcagatccagacacacggaatcccgcctcagatgatgggcggcccgctgcagtcgtcctccagtgaggggcctcagcagaatatgtgggcagcacgcaatgatatgccttatccctaccagaacaggcagggccctggcggccctacacaggcgcccccttacccaggcatgaaccgcacagacgatatgatggtacccgatcagaggataaatcatgagagccagtggccttctcacgtcagccagcgtcagccttatatgtcgtcctcagcctccatgcagcccatcacacgcccaccacagccgtcctaccagacgccaccgtcactgccaaatcacatctccagggcgcccagcccagcgtccttccagcgctccctggagaaccgcatgtctccaagcaagtctccttttctgccgtctatgaagatgcagaaggtcatgcccacggtccccacatcccaggtcaccgggccaccaccccaaccacccccaatcagaagggagatcacctttcctcctggctcagtagaagcatcacaaccagtcttgaaacaaaggcgaaagattacctccaaagatatcgttactcctgaggcgtggcgtgtgatgatgtcccttaaatcaggtcttttggctgagagtacgtgggctttggacactattaatattcttctgtatgatgacagcactgttgctactttcaatctctcccagttgtctggatttctcgaacttttagtcgagtactttagaaaatgcctgattgacatttttggaattcttatggaatatgaagtgggagaccccagccaaaaagcacttgatcacaacgcagcaaggaaggatgacagccagtccttggcagacgattctgggaaagaggaggaagatgctgaatgtattgatgacgacgaggaagacgaggaggatgaggaggaagacagcgagaagacagaaagcgatgaaaagagcagcatcgctctgactgccccggacgccgctgcagacccaaaggagaagcccaagcaagccagtaagttcgacaagctgccaataaagatagtcaaaaagaacaacctgtttgttgttgaccgatctgacaagttggggcgtgtgcaggagttcaatagtggccttctgcactggcagctcggcgggggtgacaccaccgagcacattcagactcactttgagagcaagatggaaattcctcctcgcaggcgcccacctccccccttaagctccgcaggtagaaagaaagagcaagaaggcaaaggcgactctgaagagcagcaagagaaaagcatcatagcaaccatcgatgacgtcctctctgctcggccaggggcattgcctgaagacgcaaaccctgggccccagaccgaaagcagtaagtttccctttggtatccagcaagccaaaagtcaccggaacatcaagctgctggaggacgagcccaggagccgagacgagactcctctgtgtaccatcgcgcactggcaggactcgctggctaagcgatgcatctgtgtgtccaatattgtccgtagcttgtcattcgtgcctggcaatgatgccgaaatgtccaaacatccaggcctggtgctgatcctggggaagctgattcttcttcaccacgagcatccagagagaaagcgagcaccgcagacctatgagaaagaggaggatgaggacaagggggtggcctgcagcaaagatgagtggtggtgggactgcctcgaggtcttgagggataacacgttggtcacgttggccaacatttccgggcagctagacttgtctgcttacacggaaagcatctgcttgccaattttggatggcttgctgcactggatggtgtgcccgtctgcagaggcacaagatccctttccaactgtgggacccaactcggtcctgtcgcctcagagacttgtgctggagaccctctgtaaactcagtatccaggacaataatgtggacctgatcttggccactcctccatttagtcgtcaggagaaattctatgctacattagttaggtacgttggggatcgcaaaaacccagtctgtcgagaaatgtccatggcgcttttatcgaaccttgcccaaggggacgcactagcagcaagggccatagctgtgcagaaaggaagcattggaaacttgataagcttcctagaggatggggtcacgatggcccagtaccagcagagccagcacaacctcatgcacatgcagcccccgcccctggaaccacctagcgtagacatgatgtgcagggcggccaaggctttgctagccatggccagagtggacgaaaaccgctcggaattccttttgcacgagggccggttgctggatatctcgatatcagctgtcctgaactctctggttgcatctgtcatctgtgatgtactgtttcagattgggcagttatgacataagtgagaaggcaagcatgtgtgagtgaagattagagggtcacatataactggctgttttctgttcttgtttatccagcgtaggaagaaggaaaagaaaatctttgctcctctgccccattcactatttaccaattgggaattaaagaaataattaatttgaacagttatgaaattaatatttgctgtctgtgtgtataagtacatcctttggggttttttttttctcttttttttaaccaaagttgctgtctagtgcattcaaaggtcactttttgttcttcacagatctttttaatgttctttcccatgttgtattgcatttttgggggaagcaaattgactttaaagaaaaaagttgtggcaaaagatgctaagatgcgaaaatttcaccacactgagtcaaaaaggtgaaaaattatccatttcctatgcgttttactcctcagagaatgaaaaaaactgcatcccatcacccaaagttctgtgcaatagaaatttctacagatacaggtataggggctcaaggaggtatgtcggtcagtagtcaaaactatgaaatgatactggtttctccacaggaatatggttccattaggctgggagcaaaaacaatgttttttaagattgagaatacatacctgacaacgatccggaaactgctcctcaccactcccgtcatgcctgctgtcggcgtttgaccttccacgtgacagttcttcacaattcctttcatcattttttaaatattttttttactgcctatgggctgtgatgtatatagaagttgtacattaaacataccctcatttttttcttttcttttttttttttttttttagtacaaagttttagtttctttttcatgatgtggtaactacgaagtgatggtagatttaaataattttttatttttattttatatattttttcattagggccatatctccaaaaaaagaaagaaaaaatacaaaaaacaaaaacaaaaaaaaaagagggtaatgtacaagtttctgtatgtataaagtcatgctcgatttcaggagagcagctgatcacaatttgcttcatgaatcaaggtgtggaaatggttatatatggattgatttagaaaatggttaccagtacagtcaaaaaagagaaaatgaaaaaaatacaactaaaaggaagaaacacaacttcaaagatttttcagtgatgagaatccacatttgtatttcaagataatgtagtttaaaaaaaaaaaaaagaaaaaaacttgatgtaaattcctccttttcctctggcttaatgaatatcatttattcagtataaaatctttatatgttccacatgttaagaataaatgtacattaaatcttgttaagcactgtgaaaaaaaaaaaaaaaaaaaaaa

SEQ ID NO: 446 - DNA, 8246 bp, Homo sapiens
cggccgccgccggcacccacagcgccaagagcggcggctccgaggcggctctcaaggagggtggaagcgccgccgcgctgtcctcctcctcctcctcctccgcggcggcagcggcggcatcctcttcctcctcgtcgggcccgggctcggccatggagacggggctgctccccaaccacaaactgaaaaccgttggcgaagcccccgccgcgccgccccaccagcagcaccaccaccaccaccatgcccaccaccaccaccaccatgcccaccacctccaccaccaccacgcactacagcagcagctaaaccagttccagcagcagcagcagcagcagcaacagcagcagcagcagcagcagcaacagcaacatcccatttccaacaacaacagcttgggcggcgcgggcggcggcgcgcctcagcccggccccgacatggagcagccgcaacatggaggcgccaaggacagtgctgcgggcggccaggccgaccccccgggcccgccgctgctgagcaagccgggcgacgaggacgacgcgccgcccaagatgggggagccggcgggcggccgctacgagcacccgggcttgggcgccctgggcacgcagcagccgccggtcgccgtgcccgggggcggcggcggcccggcggccgtcccggagtttaataattactatggcagcgctgcccctgcgagcggcggccccggcggccgcgctgggccttgctttgatcaacatggcggacaacaaagccccgggatggggatgatgcactccgcctccgccgccgccgccggggcccccggcagcatggaccccctgcagaactcccacgaagggtaccccaacagccagtgcaaccattatccgggctacagccggcccggcgcgggcggcggcggcggcggcggcggcggaggaggaggaggcagcggaggaggaggaggaggaggaggagcaggagcaggaggagcaggagcgggagctgtggcggcggcggccgcggcggcggcggcagcagcaggaggcggcggcggcggcggctatgggggctcgtccgcggggtacggggtgctgagctccccccggcagcagggcggcggcatgatgatgggccccgggggcggcggggccgcgagcctcagcaaggcggccgccggctcggcggcggggggcttccagcgcttcgccggccagaaccagcacccgtcgggggccaccccgaccctcaatcagctgctcacctcgcccagccccatgatgcggagctacggcggcagctaccccgagtacagcagccccagcgcgccgccgccgccgccgtcgcagccccagtcccaggcggcggcggcgggggcggcggcgggcggccagcaggcggccgcgggcatgggcttgggcaaggacatgggcgcccagtacgccgctgccagcccggcctgggcggccgcgcaacaaaggagtcacccggcgatgagccccggcacccccggaccgaccatgggcagatcccagggcagcccaatggatccaatggtgatgaagagacctcagttgtatggcatgggcagtaaccctcattctcagcctcagcagagcagtccgtacccaggaggttcctatggccctccaggcccacagcggtatccaattggcatccagggtcggactcccggggccatggccggaatgcagtaccctcagcagcagatgccacctcagtatggacagcaaggtgtgagtggttactgccagcagggccaacagccatattacagccagcagccgcagcccccgcacctcccaccccaggcgcagtatctgccgtcccagtcccagcagaggtaccagccgcagcaggacatgtctcaggaaggctatggaactagatctcaacctcctctggcccccggaaaacctaaccatgaagacttgaacttaatacagcaagaaagaccatcaagtttaccagatctgtctggctccattgatgacctccccacgggaacggaagcaactttgagctcagcagtcagtgcatccgggtccacgagcagccaaggggatcagagcaacccggcgcagtcgcctttctccccacatgcgtcccctcatctctccagcatcccggggggcccatctccctctcctgttggctctcctgtaggaagcaaccagtctcgatctggcccaatctctcctgcaagtatcccaggtagtcagatgcctccgcagccacccgggagccagtcagaatccagttcccatcccgccttgagccagtcaccaatgccacaggaaagaggttttatggcaggcacacaaagaaaccctcagatggctcagtatggacctcaacagacaggaccatccatgtcgcctcatccttctcctgggggccagatgcatgctggaatcagtagctttcagcagagtaactcaagtgggacttacggtccacagatgagccagtatggaccacaaggtaactactccagacccccagcgtatagtggggtgcccagtgcaagctacagcggcccagggcccggtatgggtatcagtgccaacaaccagatgcatggacaagggccaagccagccatgtggtgctgtgcccctgggacgaatgccatcagctgggatgcagaacagaccatttcctggaaatatgagcagcatgacccccagttctcctggcatgtctcagcagggagggccaggaatggggccgccaatgccaactgtgaaccgtaaggcacaggaggcagccgcagcagtgatgcaggctgctgcgaactcagcacaaagcaggcaaggcagtttccccggcatgaaccagagtggacttatggcttccagctctccctacagccagcccatgaacaacagctctagcctgatgaacacgcaggcgccgccctacagcatggcgcccgccatggtgaacagctcggcagcatctgtgggtcttgcagatatgatgtctcctggtgaatccaaactgcccctgcctctcaaagcagacggcaaagaagaaggcactccacagcccgagagcaagtcaaaggatagctacagctctcagggtatttctcagcccccaaccccaggcaacctgccagtcccttccccaatgtcccccagctctgctagcatctcctcatttcatggagatgaaagtgatagcattagcagcccaggctggccaaagactccatcaagccctaagtccagctcctccaccactactggggagaagatcacgaaggtgtacgagctggggaatgagccagagagaaagctctgggtcgaccgatacctcaccttcatggaagagagaggctctcctgtctcaagtctgcctgccgtgggcaagaagcccctggacctgttccgactctacgtctgcgtcaaagagatcgggggtttggcccaggttaataaaaacaagaagtggcgtgagctggcaaccaacctaaacgttggcacctcaagcagtgcagcgagctccctgaaaaagcagtatattcagtacctgtttgcctttgagtgcaagatcgaacgtggggaggagcccccgccggaagtcttcagcaccggggacaccaaaaagcagcccaagctccagccgccatctcctgctaactcgggatccttgcaaggcccacagaccccccagtcaactggcagcaattccatggcagaggttccaggtgacctgaagccacctaccccagcctccacccctcacggccagatgactccaatgcaaggtggaagaagcagtacaatcagtgtgcacgacccattctcagatgtgagtgattcatccttcccgaaacggaactccatgactccaaacgccccctaccagcagggcatgagcatgcccgatgtgatgggcaggatgccctatgagcccaacaaggacccctttgggggaatgagaaaagtgcctggaagcagcgagccctttatgacgcaaggacagatgcccaacagcagcatgcaggacatgtacaaccaaagtccctccggagcaatgtctaacctgggcatggggcagcgccagcagtttccctatggagccagttacgaccgaaggcatgaaccttatgggcagcagtatccaggccaaggccctccctcgggacagccgccgtatggagggcaccagcccggcctgtacccacagcagccgaattacaaacgccatatggacggcatgtacgggcccccagccaagcgccacgagggcgacatgtacaacatgcagtacagcagccagcagcaggagatgtacaaccagtatggaggctcctactcgggcccggaccgcaggcccatccagggccagtacccgtatccctacagcagggagaggatgcagggcccggggcagatccagacacacggaatcccgcctcagatgatgggcggcccgctgcagtcgtcctccagtgaggggcctcagcagaatatgtgggcagcacgcaatgatatgccttatccctaccagaacaggcagggccctggcggccctacacaggcgcccccttacccaggcatgaaccgcacagacgatatgatggtacccgatcagaggataaatcatgagagccagtggccttctcacgtcagccagcgtcagccttatatgtcgtcctcagcctccatgcagcccatcacacgcccaccacagccgtcctaccagacgccaccgtcactgccaaatcacatctccagggcgcccagcccagcgtccttccagcgctccctggagaaccgcatgtctccaagcaagtctccttttctgccgtctatgaagatgcagaaggtcatgcccacggtccccacatcccaggtcaccgggccaccaccccaaccacccccaatcagaagggagatcacctttcctcctggctcagtagaagcatcacaaccagtcttgaaacaaaggcgaaagattacctccaaagatatcgttactcctgaggcgtggcgtgtgatgatgtcccttaaatcaggtcttttggctgagagtacgtgggctttggacactattaatattcttctgtatgatgacagcactgttgctactttcaatctctcccagttgtctggatttctcgaacttttagtcgagtactttagaaaatgcctgattgacatttttggaattcttatggaatatgaagtgggagaccccagccaaaaagcacttgatcacaacgcagcaaggaaggatgacagccagtccttggcagacgattctgggaaagaggaggaagatgctgaatgtattgatgacgacgaggaagacgaggaggatgaggaggaagacagcgagaagacagaaagcgatgaaaagagcagcatcgctctgactgccccggacgccgctgcagacccaaaggagaagcccaagcaagccagtaagttcgacaagctgccaataaagatagtcaaaaagaacaacctgtttgttgttgaccgatctgacaagttggggcgtgtgcaggagttcaatagtggccttctgcactggcagctcggcgggggtgacaccaccgagcacattcagactcactttgagagcaagatggaaattcctcctcgcaggcgcccacctccccccttaagctccgcaggtagaaagaaagagcaagaaggcaaaggcgactctgaagagcagcaagagaaaagcatcatagcaaccatcgatgacgtcctctctgctcggccaggggcattgcctgaagacgcaaaccctgggccccagaccgaaagcagtaagtttccctttggtatccagcaagccaaaagtcaccggaacatcaagctgctggaggacgagcccaggagccgagacgagactcctctgtgtaccatcgcgcactggcaggactcgctggctaagcgatgcatctgtgtgtccaatattgtccgtagcttgtcattcgtgcctggcaatgatgccgaaatgtccaaacatccaggcctggtgctgatcctggggaagctgattcttcttcaccacgagcatccagagagaaagcgagcaccgcagacctatgagaaagaggaggatgaggacaagggggtggcctgcagcaaagatgagtggtggtgggactgcctcgaggtcttgagggataacacgttggtcacgttggccaacatttccgggcagctagacttgtctgcttacacggaaagcatctgcttgccaattttggatggcttgctgcactggatggtgtgcccgtctgcagaggcacaagatccctttccaactgtgggacccaactcggtcctgtcgcctcagagacttgtgctggagaccctctgtaaactcagtatccaggacaataatgtggacctgatcttggccactcctccatttagtcgtcaggagaaattctatgctacattagttaggtacgttggggatcgcaaaaacccagtctgtcgagaaatgtccatggcgcttttatcgaaccttgcccaaggggacgcactagcagcaagggccatagctgtgcagaaaggaagcattggaaacttgataagcttcctagaggatggggtcacgatggcccagtaccagcagagccagcacaacctcatgcacatgcagcccccgcccctggaaccacctagcgtagacatgatgtgcagggcggccaaggctttgctagccatggccagagtggacgaaaaccgctcggaattccttttgcacgagggccggttgctggatatctcgatatcagctgtcctgaactctctggttgcatctgtcatctgtgatgtactgtttcagattgggcagttatgacataagtgagaaggcaagcatgtgtgagtgaagattagagggtcacatataactggctgttttctgttcttgtttatccagcgtaggaagaaggaaaagaaaatctttgctcctctgccccattcactatttaccaattgggaattaaagaaataattaatttgaacagttatgaaattaatatttgctgtctgtgtgtataagtacatcctttggggttttttttttctcttttttttaaccaaagttgctgtctagtgcattcaaaggtcactttttgttcttcacagatctttttaatgttctttcccatgttgtattgcatttttgggggaagcaaattgactttaaagaaaaaagttgtggcaaaagatgctaagatgcgaaaatttcaccacactgagtcaaaaaggtgaaaaattatccatttcctatgcgttttactcctcagagaatgaaaaaaactgcatcccatcacccaaagttctgtgcaatagaaatttctacagatacaggtataggggctcaaggaggtatgtcggtcagtagtcaaaactatgaaatgatactggtttctccacaggaatatggttccattaggctgggagcaaaaacaatgttttttaagattgagaatacatacctgacaacgatccggaaactgctcctcaccactcccgtcatgcctgctgtcggcgtttgaccttccacgtgacagttcttcacaattcctttcatcattttttaaatattttttttactgcctatgggctgtgatgtatatagaagttgtacattaaacataccctcatttttttcttttcttttttttttttttttttagtacaaagttttagtttctttttcatgatgtggtaactacgaagtgatggtagatttaaataattttttatttttattttatatattttttcattagggccatatctccaaaaaaagaaagaaaaaatacaaaaaacaaaaacaaaaaaaaaagagggtaatgtacaagtttctgtatgtataaagtcatgctcgatttcaggagagcagctgatcacaatttgcttcatgaatcaaggtgtggaaatggttatatatggattgatttagaaaatggttaccagtacagtcaaaaaagagaaaatgaaaaaaatacaactaaaaggaagaaacacaacttcaaagatttttcagtgatgagaatccacatttgtatttcaagataatgtagtttaaaaaaaaaaaaaagaaaaaaacttgatgtaaattcctccttttcctctggcttaatgaatatcatttattcagtataaaatctttatatgttccacatgttaagaataaatgtacattaaatcttgttaagcactgtgaaaaaaaaaaaaaaaaaaaaaa

SEQ ID NO: 447 - DNA, 1650 bp, Homo sapiens
gccttttttgcagtctcaggacgggcgctttggagccggccccaggcagcgtgtgtcggtcgcctagtctggagaactagtcctcgactcacggtgagggaatggaccgacacgggtattgtaccgctgagggaaaggagcgggactccggacctccaggagtgcaaggatgatgctgaaaggaataacaaggcttatctctaggatccataagttggaccctgggcgttttttacacatggggacccaggctcgccaaagcattgctgctcacctagataaccaggttccagttgagagtccgagagctatttcccgcaccaatgagaatgacccggccaagcatggggatcagcacgagggtcagcactacaacatctccccccaggatttggagactgtatttccccatggccttcctcctcgctttgtgatgcaggtgaagacattcagtgaagcttgcctgatggtaaggaaaccagccctagaacttctgcattacctgaaaaacaccagttttgcttatccagctatacgatatcttctgtatggagagaagggaacaggaaaaaccctaagtctttgccatgttattcatttctgtgcaaaacaggactggctgatactacatattccagatgctcatctttgggtgaaaaattgtcgggatcttctgcagtccagctacaacaaacagcgctttgatcaacctttagaggcttcaacctggctgaagaatttcaaaactacaaatgagcgcttcctgaaccagataaaagttcaagagaagtatgtctggaataagagagaaagcactgagaaagggagtcctctgggagaagtggttgaacagggcataacacgggtgaggaacgccacagatgcagttggaattgtgctgaaagagctaaagaggcaaagttctttgggtatgtttcacctcctagtggccgtggatggaatcaatgctctttggggaagaaccactctgaaaagagaagataaaagcccgattgcccccgaggaattagcacttgttcacaacttgaggaaaatgatgaaaaatgattggcatggaggcgccattgtgtcggctttgagccagactgggtctctctttaagccccggaaagcctatctgccccaggagttgctgggaaaggaaggatttgatgccctggatccctttattcccatcctggtttccaactataacccaaaggaatttgaaagttgtattcagtattatttggaaaacaattggcttcaacatgagaaagctcctacagaagaagggaaaaaagagctgctgttcctaagtaacgcgaacccctcgctgctggagcggcactgtgcctacctctaagccaagatcacagcatgtgaggaagacagtggacatctgctttatgctggacccagtaagatgaggaagtcgggcagtacacaggaagaggagccaggcccttgtacctatgggattggacaggactgcagttggctctggacctgcattaaaatgggtttcactgtgaatgcgtgacaataagatattcccttgttcctaaaactttatatcagtttattggatgtggtttttcacatttaagataattatggctcttttcctaaaaaataaaatatctttct

SEQ ID NO: 448 - DNA, 2628 bp, Homo sapiens
gaccgcggcagctcagcctcccgccgattgtatgttccaggcctcaatgaggagtccaaacatggagccattcaagcagcagaaggtggaggacttttatgacatcggagaggagctggggagtggccagtttgccatcgtgaagaagtgccgggagaagagcacggggcttgagtatgcagccaagttcatcaagaagcggcagagccgggcgagccggcgcggtgtgagccgggaggagatcgagcgggaggtgagcatcctgcggcaggtgctgcaccacaatgtcatcacgctgcacgacgtctatgagaaccgcaccgacgtggtgctcatccttgagctagtgtctggaggagagctcttcgatttcctggcccagaaggagtcactgagtgaggaggaggccaccagcttcattaagcagatcctggatggggtgaactaccttcacacaaagaaaattgctcactttgatctcaagccagaaaacattatgttgttagacaagaatattcccattccacacatcaagctgattgactttggtctggctcacgaaatagaagatggagttgaatttaagaatatttttgggacgccggaatttgttgctccagaaattgtgaactacgagcccctgggtctggaggctgacatgtggagcataggcgtcatcacctacatcctcttaagtggagcatcccctttcctgggagacacgaagcaggaaacactggcaaatatcacagcagtgagttacgactttgatgaggaattcttcagccagacgagcgagctggccaaggactttattcggaagcttctggttaaagagacccggaaacggctcacaatccaagaggctctcagacacccctggatcacgccggtggacaaccagcaagccatggtgcgcagggagtctgtggtcaatctggagaacttcaggaagcagtatgtccgcaggcggtggaagctttccttcagcatcgtgtccctgtgcaaccacctcacccgctcgctgatgaagaaggtgcacctgaggccggatgaggacctgaggaactgtgagagtgacactgaggaggacatcgccaggaggaaagccctccacccacggaggaggagcagcacctcctaactggcctgacctgcagtggccgccagggaggtctgggcccagcggggctcccttctgtgcagacttttggacccagctcagcaccagcacccgggcgtcctgagcactttgcaagagagatgggcccaaggaattcagaagagcttgcaggcaagccaggagaccctgggagctgtggctgtcttctgtggaggaggctccagcattcccaaagctcttaattctccataaaatgggctttcctctgtctgccatcctcagagtctggggtgggagtgtggacttaggaaaacaatataaaggacatcctcatcatcacggggtgaaggtcagactaaggcagccttcttcacaggctgagggggttcagaaccagcctggccaaaaattacaccagagagacagagtcctccccattgggaacagggtgattgaggaaagtgaaccttgggtgtgagggaccaatcctgtgacctcccagaaccatggaagccaggacgtcaggctgaccaacacctcagaccttctgaagcagcccattgctggcccgccatgttgtaattttgctcatttttattaaacttctggtttacctgatgcttggcttcttttagggctacccccatctcatttcctttagcccgtgtgcctgtaactctgagggggggcacccagtggggtgctgagtgggcagaatctcagaaggtcctcctgaaccgtccgcgcaggcctgcagtgggcctgcctcctccttgcttccctaacaggaaggtgtccagttcaagagaacccacccagagactgggagtggtggctcacgcctataatccctgcgctttggcagtccgaggcaggggaattgcttgaactcaggagttggagaccagcctgggcaacatggcaaaacgcagtctgtacaaaaaatacaaaaaattagccaggtgtaggggtaggcacctggcatcccagctactccaggggctgaggtgacagcattgcttaagcccagaaggtcgaggctgcagtgagctgagatcacgccactgcactccagtctgggtgacagagagagaccatatccaaaaaaaaaaaaagttgccagagacgagtatgcccatgctccctctacctcactgccaccactcctgctgttaggagctgagtgtgtctccctaaaatttctatgttgaagtcttaacccttggtaccacagaatatcactgtatttggagatggggtctttagaaaggcacttaaattaaaatgagctcactgatatgggccccgatgcaatataattggtgtccttataagaaggggaggttaggacacgcaggaaagaccacatgaaggcccaggagtgggagggggaatagccatcgacaaactaagggggcctcagaggaaaccaaccctgctgacacctcaatcttagactctggcctcaaaaattgtaagaaaataaacttctgtcttttaagcca

SEQ ID NO: 449 - DNA, 3056 bp, Homo sapiens
attggctgaggccgataccacgcgccccgatacccggcgcaggagccacctccctgagccccgcggaccacgcctcagtccgcctgcgctcctcagcctgacggtccgcctttcggggctcctcagccttgtcacccgctcttggttttccttttctcttcatctttggctcctttgaccactcgaagccgcgcagcgggttccagcggacctcacagcagccccagaagtggtgcgccaagcacagcctctgctcctcctggagccggtcgggaactgctgcctgccgccatcatgtctactgcaaatcctgaaactccaaactcaaccatctccagagaggccagcacccagtcctcatcagctgcaaccagccaaggctatattttaccagaaggcaaaatcatgccaaacactgtttttgttggaggaattgatgttaggatggatgaaactgagattagaagcttctttgctagatatggttcagtgaaagaagtgaagataatcactgatcgaactggtgtgtccaaaggctatggatttgtttcattttttaatgacgtggatgtgcagaagatagtagaatcacagataaatttccatggtaaaaagctgaagctgggccctgcaatcaggaaacaaaatttatgtgcttatcatgtgcagccacgtcctttggtttttaatcatcctcctccaccacagtttcagaatgtctggactaatccaaacactgaaacttatatgcagcccacaaccacgatgaatcctataactcagtatgttcaggcatatcctacttacccaaattcaccagttcaggtcatcactggatatcagttgcctgtatataattatcagatgccaccacagtggcctgttggggagcaaaggagctatgttgtacctccggcttattcagctgttaactaccactgtaatgaagttgatccaggagctgaagttgtgccaaatgaatgttcagttcatgaagctactccaccctctggaaatggcccacaaaagaaatctgtggaccgaagcatacaaacggtggtatcttgtctgtttaatccagagaacagactgagaaactctgttgttactcaagatgactacttcaaggataaaagagtgcatcactttagaagaagtcgggcaatgcttaaatctgtttgatcctcctggcttatctagttacatgggaagttgctggttttgaatattaagctaaaaggtttccactattatagaaattctgaattttggtaaatcacactcaaactttgtgtataagttgtattattagactctctagttttatcttaaactgttcttcattagatgtttatttagaaactggttctgtgttgaaatatagttgaaagtaaaaaaataattgagactgaaagaaactaagatttatctgcaaggattttttaaaaattggcattttaagtgtttaaaagcaaatactgattttcaaaaaaatgtttttaaaaacctattttgaaaggtcagaattttgttggtctgaatacaaacatttcacttctccaacaagtacctgtgaacagtacagtatttacagtattgagctttgcatttatgatttctccagaaatttaccacaaaagcaaaatttttaaaactgcatttttaatcagtggaactcaatatatagttagctttattgaagtcttcttatctaaacccagcaaaacagattcaaagcgaacagtccaatcagtgggtcatatgtttattcaaaatattttatcttttagctagaatccacacatatatatcctatttgattagggtagtaattaggataactaaaattctgggcctaattttttaaagaatccaagacaaactaaactttactaggtacataagcttctcaatgagtcaccattcttcttttttgtaaaaacttttttctttgaaatgctaaacttggctgtatgtcaaattgtgcaaaatattggtattaaagaatgctgcaacttttttatgtctcttagaggttaatcagagtatctgaagggaattgtttttataaaaacattgaaatattagttacttgctataaatagatttagtctgttatatttccttttgtaaagtaaaatatgtccagaagagtcaaagtagttagttttggttatttctaaaccacaaaagttgtttaataagtatatcttaagaatgtgctagagttaaaagttagcattgtttctagattagctggtgtcttcattttacattgtgacaaacagctagagcatcagagcccttttgctataccacagtctttcgtttccagcctttgtcactagtctttgaggaggtttgctcctagaactggtgatataaagaatgaaagtagctgtatgagcagagcagttcaagggccaaaccctggaacggtagcaatgggatataatacctttctaagggaaaaagttgtatcagtaccatttgatctgccatggacatgagtttaaagcggctttctggcccttctttcagtgacttcttccctaaaatgtagaaattctaacttaatgtagttactgtgagccatattactagtgccccctagggtctataattccttaaaattttcattctgaatctgaaggagagagtcttttaactttagaattcccaagagggctttattacacctcagaaattgaaagcactatgaatttgtccatttaaaaatgatctgtagtttttttggtgctataacattctgacacatatcattctgtgattaaatctccagcttactataaatgatatctatattctaaagagctacttctaattattccaatatgaccttaaggaaaagtaagggaataaatttttgtctttgttggagtgaagcatttaaaagagtaagggtaaaaaagataaagtcctgaacctttcaaaatggaaaattaattctaaacttagaaatatgcttctgcctattgctgatactgtctttgcatacatgaataaaaataaactttttttcttcaaaaaaaaaa

SEQ ID NO: 450 - DNA, 10759 bp, Homo sapiens
gcggggggaggggaggggaggggagggggcgcggggccgcggcagcggagctcgcatcctcggcggggcggctgtgcaggaggcggcgcccgggcgtcagcggacggaccgatcgacggccaagggcgcgcggaccgacggcggctgcccggaggggatcgcgggcctcggagacagcgactgcggacgatgcgcggccccaggccccgcgcgagcgggcgctgcccggggggctgaccgcggccggacggcgccccagcaccgggcgagggagcccgcgtcgcgcggaggtcagggagcctgagctggagccagggccccagtgggacctgacccaaagtctgaggtcaagctgggcccagagcctggcctggagctggagcccaaggcacagctggactacccttgtcatgcagaaggagctgggcattgtgccttcctgccctggcatgaagagccccaggccccacctcctgctaccattgctgctgctgctgctgctgctgctgggggctggggtgccaggtgcctggggtcaggctgggagcctggacttgcagattgatgaggagcagccagcgggtacactgattggcgacatcagtgcggggcttccggcaggcacggcagctcctctcatgtacttcatctctgcccaagagggcagcggcgtgggcacagacctggccattgacgaacacagtggggtcgtccgtacagcccgtgtcttggaccgtgagcagcgggaccgctaccgcttcactgcagtcactcctgatggtgccaccgtagaagttacagtgcgagtggctgacatcaacgaccatgctccagccttcccacaggctcgggctgccctgcaggtacctgagcatacagcttttggcacccgctacccactggagcctgctcgtgatgcagatgctgggcgtctgggaacccagggctatgcgctatctggtgatggggctggagagaccttccggctggagacacgccccggtccagatgggactccagtacctgagctggtagttactggggaactggaccgagagaaccgctcacactatatgctacagctggaggcctatgatggtggttcacccccccggagggcccaggccctgctggacgtgacactgctggacatcaatgaccatgccccggctttcaatcagagccgctaccatgctgtggtgtctgagagcctggcccctggcagtcctgtcttgcaggtgttcgcatctgatgccgatgctggtgtcaatggggctgtgacttacgagatcaaccggaggcagagcgagggtgatggacccttctccatcgacgcacacacggggctgctgcagttagagcggccactggactttgagcagcggcgggtccatgaactggtggtgcaagcacgagatggtggggctcaccctgagctgggctcggcctttgtgactgtgcatgtgcgagatgccaatgacaatcagccctccatgactgtcatctttctcagtgcagatggctccccccaagtgtctgaggccgccccacctggacagctcgttgctcgcatctctgtgtcagacccagatgatggtgactttgcccatgtcaatgtgtccctggaaggtggagagggccactttgccctaagcacccaagacagcgtcatctatctggtgtgtgtggctcggcggctggatcgagaggagagggatgcctataacttgagggttacagccacagactcaggctcacctccactgcgggctgaggctgcctttgtgctgcacgtcactgatgtcaacgacaatgcacctgcctttgaccgccagctctaccgacctgagcccctgcctgaggttgcgctgcctggcagctttgtagtgcgggtgactgctcgggatcctgaccaaggcaccaatggtcaggtcacttatagcctagcccctggcgcccacacccactggttctccattgaccccacctcaggcattatcactacggctgcctcactggactatgagttggaacctcagccacagctgattgtggtggccacagatggtggcctgccccctctagcctcctctgccacagttagcgtggccctgcaagatgtgaatgataatgagccccaattccagaggactttctacaatgcctcactgcctgagggcacccagcctggaacttgcttcctgcaggtgacagccacagacgcggatagtggcccatttggcctcctctcctattccttgggtgctggacttgggtcctccggatctcccccattccgcattgatgcccatagcggtgatgtgtgcacaacccggaccctggaccgtgaccaggggccctcaagctttgacttcacagtgacagctgtggatgggggaggcctcaagtccatggtatatgtgaaggtgtttctgtcagacgagaatgacaaccctcctcagttttatccacgggagtatgctgccagtataagtgcccagagtccaccaggcacagctgtgctgaggttgcgtgcccatgaccctgaccagggatcccatgggcgactctcctaccatatcctggctggcaacagccccccactttttaccttggatgagcaatcagggctgttgacagtagcctggcccttggccagacgggccaattctgtggtgcagctggagatcggggctgaggacggaggtggcctacaggcagaacccagtgcccgagtggacatcagcattgtgcctggaacccccacaccacccatatttgagcaactacagtatgttttttctgtgccagaggatgtggcaccaggcaccagtgtgggcatagtccaggcacacaacccaccaggtcgcttggcacctgtgaccctttccctatcaggtggggatccccgaggactcttctccctagatgcggtatcaggactgttgcaaacacttcgccctctggaccgggagctactgggaccagtgttggagctggaggtgcgagcaggcagtggagtgcccccagctttcgctgtagctcgggtgcgtgtgctgctggatgatgtgaatgacaactcccctgcctttcctgcacctgaagacacggtattgctaccaccaaacactgccccagggactcccatctatacactgcgggctcttgaccccgactcaggtgttaacagtcgagtcacctttaccctgcttgctgggggtggtggagccttcaccgtggaccccaccacaggccatgtacggcttatgaggcctctggggccctcaggagggccagcccatgagctggagctggaggcccgggatgggggctccccaccacgcaccagccactttcgactacgggtggtggtacaggatgtgggaacccgtgggctggctccccgattcaacagccctacctaccgtgtggacctgccctcaggcaccactgctggaactcaggtcctgcaagtgcaggcccaagcaccagatgggggccctatcacctatcaccttgcagcagagggagcaagtagcccctttggcctggagccacagagtgggtggctatgggtgcgggcagcactagaccgtgaggcccaggaattgtacatactgaaggtaatggcagtgtctgggtccaaagctgagttggggcagcagacaggcacagccaccgtgagggtcagcatcctcaaccagaatgaacacagtccccgcttgtctgaggatcccaccttcctggctgtggctgagaaccagcccccagggaccagcgtgggccgagtctttgccactgaccgagactcaggacccaatggacgtctgacctacagcctgcaacagctgtctgaagacagcaaggccttccgcatccacccccagactggagaagtgaccacactccaaaccctggaccgtgagcagcagagcagctatcagctcctggtgcaggtgcaggatggagggagcccaccccgcagcaccacaggcactgtgcatgttgcagtgcttgacctcaacgacaacagccccacgttcctgcaggcttcaggagctgctggtgggggcctccctatacaggtaccagaccgcgtgcctccaggaacactggtgacgactctgcaggcgaaggatccagatgagggggagaatgggaccatcttgtacacgctaactggtcctggctcagagcttttctctctgcaccctcactcaggggagctgctcactgcagctcccctgatccgagcagagcggccccactatgtgctgacactgagtgctcatgaccaaggcagccctcctcgaagtgccagcctccagctgctggtgcaggtgcttccctcagctcgcttggccgagccgcccccagatctcgcagagcgggacccagcggcaccagtgcctgtcgtgctgacggtgacagcagctgagggactgcggcccggctctctgttgggctcggtggcagcgccagagcccgcgggtgtgggtgcactcacctacacactggtgggcggtgccgatcccgagggcaccttcgcgctggatgcggcctcagggcgcttgtacctggcgcggcccctggacttcgaagctggcccgccgtggcgcgcgctcacggtacgcgctgaggggccgggaggcgcgggcgcgcggctgctgcgagtgcaggtgcaagtgcaggacgagaatgagcatgcgcccgcctttgcgcgcgacccgctggcgctggcgctgccagagaacccggagcccggcgcagcgctgtacactttccgcgcgtcggacgccgacggccccggccccaatagcgacgtgcgctaccgcctgctgcgccaggagccgcccgtgccggcgcttcgcctggacgcgcgcaccggggcgctcagcgctccgcgcggcctggaccgagagaccactcccgcgctgctgctgctggtggaagccaccgaccggcccgccaacgccagccgccgtcgtgcagcgcgcgtttcagcgcgcgtcttcgtcacggatgagaatgacaacgcgcctgtcttcgcctcgccgtcacgcgtgcgcctcccagaggaccagccgcctgggcccgcggccctgcacgtggtagcccgggacccggatctgggcgaggctgcacgcgtgtcctatcggctggcatctggcggggacggccacttccggctgcactcaagcactggagcgctgtccgtggtgcggccgttggaccgcgaacaacgagctgagcacgtactgacagtggtggcctcagaccacggctccccgccgcgctcggccacgcaggtcctgaccgtcagtgtcgctgacgtcaacgacgaggcgcctactttccagcagcaggagtacagcgtcctcttgcgtgagaacaaccctcctggcacatctctgctcaccctgcgagcaaccgaccccgacgtgggggccaacgggcaagtgacttatggaggcgtctctagcgaaagcttttctctggatcctgacactggtgttctcacgactcttcgggccctggatcgagaggaacaggaggagatcaacctgacagtgtatgcccaggacaggggctcacctcctcagttaacgcatgtcactgttcgagtggctgtggaggatgagaatgaccatgcaccaacctttgggagtgcccatctctctctggaggtgcctgagggccaggacccccagacccttaccatgcttcgggcctctgatccagatgtgggagccaatgggcagttgcagtaccgcatcctagatggggacccatcaggagcctttgtcctagaccttgcttctggagagtttggcaccatgcggccactagacagagaagtggagccagctttccagctgaggatagaggcccgggatggaggccagccagctctcagtgccacgctgcttttgacagtgacagtgctggatgccaatgaccatgctccagcctttcctgtgcctgcctactcggtggaggtgccggaggatgtgcctgcagggaccctgctgctgcagctacaggctcatgaccctgatgctggagctaatggccatgtgacctactacctgggcgccggtacagcaggagccttcctgctggagcccagctctggagaactgcgcacagctgcagccttggacagagaacagtgtcccagctacaccttttctgtgagtgcagtggatggtgcagctgctgggcccctaagcaccacagtgtctgtcaccatcacggtgcgcgatgtcaatgaccatgcacccaccttccccaccagtcctctgcgcctacgtctgccccgcccaggccccagcttcagtaccccaaccctggctctggccacactgagagctgaagatcgtgatgctggtgccaatgcttccattctgtaccggctggcaggcacaccacctcctggcactactgtggactcttacactggtgaaatccgcgtggcccgctctcctgtagctctaggcccccgagatcgtgtcctcttcattgtggccactgatcttggccgtccagctcgctctgccactggtgtgatcattgttggactgcagggggaagctgagcgtggaccccgctttccccgggctagcagtgaggctacgattcgtgagaatgcgcccccagggactcctattgtctcccccagggccgtccatgcaggaggcacaaatggacccatcacctacagcattctcagtgggaatgagaaagggacattctccatccagcctagtacaggtgccatcacagttcgctcagcagaggggctagacttcgaggtgagtccacggctgcgactggtgctgcaggcagagagtggaggagcctttgccttcactgtgctgaccctgaccctgcaagatgccaacgacaatgctccccgtttcctgcggccccattatgtggccttccttcctgagtcccggcccttggaggggcccctgctgcaggtggaggcggatgacctggatcaaggctctggaggacagatttcctacagtctggctgcatcccagccggcacgtggattgttccacgtagacccaaccacaggcactatcactaccacagccatcctggaccgtgagatctgggctgaaacacggttggtgctgatggccacagacagagggagcccagccctggtgggctcagctaccttgacggtgatggtcatcgacaccaatgacaatcgccccaccatcccccaaccctgggagctccgagtgtcagaagatgcgttattgggctcagagattgcacaggtaacagggaatgatgtggactcaggacccgtgctgtggtatgtgctaagcccatctgggccccaggatcccttcagtgttggccgctatggaggccgtgtctccctcacggggcccctggactttgagcagtgtgaccgctaccagctgcagctgctggcacatgatgggcctcatgagggccgtgccaacctcacagtgcttgtggaggatgtcaatgacaatgcacctgccttctcacagagcctctaccaggtaatgctgcttgagcacacacccccaggcagtgccattctctccgtctctgccactgatcgggactcaggtgccaacggtcacatttcctaccacctggcttcccctgccgatggcttcagtgttgaccccaacaatgggaccctgttcacaatagtgggaacagtggccttgggccatgacgggtcaggagcagtggatgtggtgctggaagcacgagaccacggggctccaggccgggcagcacgagccacagtgcacgtgcagctgcaggaccagaacgaccacgccccgagcttcacattgtcacactaccgtgtggctgtgactgaagacctgccccctggctccactctgctcaccctggaggctacagatgctgatggaagccgcagccatgccgctgtggactacagcatcatcagtggcaactggggccgagtcttccagctggaacccaggctggctgaggctggggagagtgctggaccaggcccccgggcactgggctgcctggtgttgcttgaacctctagactttgaaagcctgacacagtacaatctaacagtggctgcagctgaccgtgggcagccaccccaaagctcagtcgtgccagtcactgtcactgtactagatgtcaatgacaacccacctgtctttacccgagcatcctaccgtgtgacagtacctgaggacacacctgttggagctgagctgctgcatgtagaggcctctgacgctgaccctggccctcatggcctcgtgcgtttcactgtcagctcaggcgacccatcagggctctttgagctggatgagagctcaggcaccttgcgactggcccatgccctggactgtgagacccaggctcgacatcagcttgtagtacaggctgctgaccctgctggtgcacactttgctttggcaccagtgacaattgaggtccaggatgtgaatgatcatggcccagccttcccactgaacttactcagcaccagcgtggccgagaatcagcctccaggcactctcgtgaccactctgcatgcaatcgacggggatgctggggcttttgggaggctccgttacagcctgttggaggctgggccaggacctgagggccgtgaggcatttgcactgaacagctcaacaggggagttgcgtgcgcgagtgccctttgactatgagcacacagaaagcttccggctgctggtgggtgctgctgatgctgggaatctctcagcctctgtcactgtgtcggtgctagtgactggagaggatgagtatgaccctgtatttctggcaccagctttccacttccaagtgcccgaaggtgcccggcgtggccacagcttgggtcacgtgcaggccacagatgaggatgggggtgccgatggcctggttctgtattcccttgccacctcttccccctattttggtattaaccagactacaggagccctgtacctgcgggtggacagtcgggcaccaggcagcggaacagccacctctgggggtgggggccggacccggcgggaagcaccacgggagctgaggctggaggtgatagcacgggggcctctgcctggttcccggagtgccacagtgcctgtgaccgtggatatcacccacaccgcactgggcctggcacctgacctcaacctgctattagtaggggccgtggcagcctccttgggagttgtggtggtgcttgcactggcagccctggtcctaggacttgttcgggcccgtagccgcaaggctgaggcagcccctggcccaatgtcacaggcagcacccctagccagtgactcactgcagaaactgggccgggagccacctagtccaccaccctctgagcacctctatcaccagactcttcccagctatggtgggccaggagctggaggaccctacccccgtggtggctccttggacccttcacattcaagtggccgaggatcagcagaggctgcagaggatgatgagatccgcatgatcaatgagttcccccgtgtggccagtgtggcctcctctctggctgcccgtggccctgactcaggcatccagcaggatgcagatggtctgagtgacacatcctgcgaaccacctgcccctgacacctggtataagggccgaaaggcagggctgctgctgccaggtgcaggagccactctctacagagaggaggggcccccagccactgccacagccttcctggggggctgtggcctgagccctgcacccactggggactatggcttcccagcagatggcaagccatgtgtggcaggtgcgctgacagccattgtggccggcgaggaggagctccgtggcagctataactgggactacctgctgagctggtgccctcagttccaaccactggccagtgtcttcacagagatcgctcggctcaaggatgaagctcggccatgtcccccagctccccgtatcgacccaccacccctcatcactgccgtggcccacccaggagccaagtctgtgccccccaagccagcaaacacagctgcagcccgggccatcttcccaccagcttctcaccgctcccccatcagccatgaaggctccctgtcctcagctgccatgtcccccagcttctcaccctctctgtctcctctggctgctcgctcacccgttgtctcaccatttggggtggcccagggtccctcagcctcagcactcagcgcagagtctggcctggagccacctgatgacacggagctgcacatctagctgtggcccaggctgggccccgacctgggatgcgcacagtgtccccaacgcaggccccactctgagcctgccctgggcagcctcggactatgactggctacggggaggccaccaccaggccccagctctccaccctgaactccccagccccctcagagtactaggaccacagaagccctgttgctcactgacctgtgaccaggtccaatgtggggagaaatatgaaggaggtagcagccctgggttctcctcagtgagggatccctgccctgcaccagcaccctgagatggagctgagactttatttattgggggtagggggatggaggaggtccctccaacatgtttggacccagctcctttgggttccactgacacccctgcccctgcccctgcccagaaccaagtgccatttctcactctggagccttaataaactgcaatttgtatcc

SEQ ID NO: 451 - DNA, 2460 bp, Homo sapiens
aaagtcaaaccccgacaccgcggcgggccggtgagctcactagctgacccggcaggtcaggatctggcttagcggcgccgcgagctccagtgcgcgcacccgtggccgcctcccagccctctttgccggacgagctctgggccgccacaagactaaggaatggccaccccgcccaagagaagctgcccgtctttctcagccagctctgaggggacccgcatcaagaaaatctccatcgaagggaacatcgctgcagggaagtcaacatttgtgaatatccttaaacaattgtgtgaagattgggaagtggttcctgaacctgttgccagatggtgcaatgttcaaagtactcaagatgaatttgaggaacttacaatgtctcagaaaaatggtgggaatgttcttcagatgatgtatgagaaacctgaacgatggtcttttaccttccaaacatatgcctgtctcagtcgaataagagctcagcttgcctctctgaatggcaagctcaaagatgcagagaaacctgtattattttttgaacgatctgtgtatagtgacaggtatatttttgcatctaatttgtatgaatctgaatgcatgaatgagacagagtggacaatttatcaagactggcatgactggatgaataaccaatttggccaaagccttgaattggatggaatcatttatcttcaagccactccagagacatgcttacatagaatatatttacggggaagaaatgaagagcaaggcattcctcttgaatatttagagaagcttcattataaacatgaaagctggctcctgcataggacactgaaaaccaacttcgattatcttcaagaggtgcctatcttaacactggatgttaatgaagactttaaagacaaatatgaaagtctggttgaaaaggtcaaagagtttttgagtactttgtgatcttgctgaagactacaggcagccaaatggttccagatacttcagctttgtgtatcttcgtaacttcatattaatataagtttctttagaaaacccaagtttttaatcgtttttgttttaaggaaaaaagatttttaaaatgaatcttatgcaaaactttttgatcagtttcttttcttttgttttttttttaaaaaagacatttaaagacaaagacattatttctcatagcaggaaatgtagaggtagatggttccagtatcagcatagtgactaaactacattataaaagatccagcttccttctgtcattcccctcttttgtcttcctcagcaggttggcttttttccctggtgcctctcacttcgttggtgaccagtttcttaaactgaaagctttaatgttacatagtaaatggtagtgtgtcctgtgtaaattagtgtacctattaaaagttgcaaagtggaattaaaggaatccctagaataaggattctgaagttttattttaaattattatcttcttaacagtttagtcccacctcttacttcctgcctcagtctgctttctctactgtctggattaattaggcagcctgctataaagttaaagtcacacatttctattttgcaaacactgtgattactctttgctttgtagtttgctttgctttgtagggttctgcttttaagtttttctctttttcagacaaattactgataaaaatgatattgctctatatgtaatatatcctgaaagcattattttttgttgaataggaaataaaattaatgaagacagaggctagaaagcatccattaattaatgagacacacttaactacttatctctaaaccatctatgtgaatatttgtaaaaataatgaatggactcatcttagttctgtatataaatatattttctttctagtttgtttagttaaggtgtgcagtgtttttcctgtgtattaaacctttccattttacgttttagaaaattttatgtattttaaaataaggggaagagtcattttcacctttaaactactatttttctttccaagtcatttttgtttttggtttcttattcaaagatgataatttagtggattaaccagtccagacgcactgatctttgcaaaggagacttaatttcaaatctgtaattaccatacataaactgtctcattatacgtatgcatttttttagtttgtttttgtttggtataaattaatttgttaattaaatatttcttaagtataaaccttatgaactacagtggagctacactcattgaaatgtaatttcagttctaaaaagatgtaataatcattttagaattaaaatttattctacttttaaataaattatgaatattaaaggtgaaaattgtataaattactttgattccattttaagtggagacatatttcagtgatttttagtaacctttaaaaatgtataatgacttttaaaatttgtagaattgaaaagacgctaataaaaatttattattt

SEQ ID NO: 452 - DNA, 4270 bp, Homo sapiens
gggattgttcattgctgctggaggaagatcatggactgtcgcgggaaactgaagtggttgagtatccactagtcgtggatgagggcagtgacttcgcagttttttgcgaattacacatctctttgattatgttgtgactagttttgttagatagtcatttagtgtttgggatacctgttaagccctttgtccagggactgtggttggatttatgaattatttggacggttgtccacttgaaagaactgacagtagcttcataacaatgttacaaatctcgttctaagattaagctgttgaacctatatttgccattagcgcttaatttttgaagtattatttttatgaatcaagccctggaaaaggacaagatatttgaatgaaatagcacccataatggagaacttcacagttgctactcctgtgataggtttatcttagtttcattgtggtataaatggaatagcaggtgttgtcaggtacaaggtttgtagcttgccaatatgttcattaccaacactgcagattcccattgagttggtgggggttttgttacctttgttttttttctcagcaaaataattctataactttttgtttgtgacaagaaatggactttcagtttacttaagattaatacttcttgaatgataaaatcattttgccatgttagaagacatttccgaagaagacatttgggaatacaaatctaaaagaaaaccaaaacgagttgatccaaataatggctctaaaaatattctaaaatctgttgaaaaagcaacagatggaaaataccagtcaaaacggagtagaaacagaaaaagagccgcagaagctaaagaggtgaaggaccatgaagtgccccttggaaatgcaggttgtcagacttctgttgcttctagtcagaattcaagttgtggagatggtattcagcagacccaagacaaggaaactactccaggaaaactctgtagaactcaaaaaagccaacacgtgtccccaaagatacgtccagtttatgatggatactgtccaaattgccagatgcctttttcctcattgatagggcagacacctcgatggcatgtttttgaatgtttggattctccaccacgctctgaaacagagtgtcctgatggtcttctgtgtacctcaaccattccttttcattacaagagatacactcacttcctgctagctcaaagcagggctggtgatcatccttttagcagcccatcacctgcgtcaggtggcagtttcagtgagactaagtcaggcgtcctttgtagccttgaggaaagatggtcttcgtatcagaaccaaactgataactcggtttcaaatgatcccttattgatgacacagtattttaaaaagtctccgtctctgactgaagccagtgaaaagatttctactcatatccaaacatcccaacaagctctacaatttacagattttgttgagaatgacaaactagtgggagttgctttgcgtcttgcaaacaactcagaacacataaatttgccattgccagaaaatgacttcagtgactgtgaaatctcctattctccacttcaaagtgatgaagacactcatgatatcgatgaaaaaccgcatgattcacaagaacaactgttttttaccgaaagctcaaaagatggcagcctcgaagaagatgatgacagctgtggtttttttaaaaaacgacatggtcccttactgaaggaccaggatgagagctgccccaaagtgaacagcttcttaactcgggataagtatgatgaaggattgtatagattcaatagtctaaatgatttgtctcaacctatttctcaaaataatgagagtactttgccttatgatctggcatgtactggtggtgattttgtgttgtttccacctgcattggcagggaagcttgctgcttctgttcatcaggcaactaaagcaaaacctgatgagccagaatttcactcagctcaatcaaataaacagaaacaggtaattgaagaatcatctgtttacaatcaagtttctcttccgttagttaagagtttaatgttgaaaccttttgaaagtcaggtagaagggtatctttcttcccaaccaacccaaaatacaattagaaaattatcaagtgagaacttgaatgctaagaataatactaactcagcatgtttctgcagaaaggcattagagggtgtgccagttggtaaagctacaattttaaatacagaaaacttgtctagtacacctgctccgaagtatttgaaaatattgccttctggtcttaagtataatgcaagacatccttctaccaaggtaatgaagcaaatggatataggtgtgtattttggactacctcccaaaagaaaggaagagaaattgctaggggaaagtgcattagaatggataaacttaaatccagttccaagtcctaatcaaaagaggtcctcgcagtgcaagaggaaagcagaaaaatctttaagtgatttagaatttgatgcaagtactttacatgagagtcagctttctgtggaactttctagtgagaggtcacagcgtcaaaaaaagagatgtagaaagtcaaattcactgcaggaaggagcgtgtcagaagagatcagatcaccttattaatacagaatctgaagcagtcaatttaagtaaagtcaaagtcttcacaaaatcagctcatggtgggctgcaaaggggcaacaagaaaatcccagagtcatctaatgtaggaggatcaagaaaaaagacatgtccattctataagaaaatacctggaaccggctttacagttgatgcctttcagtatggcgtggttgaaggttgcacagcctattttctcacacattttcattctgatcattatgctggattgtctaaacacttcacatttccagtttattgtagtgagataactggcaatttgttgaagaacaagcttcatgtgcaagaacaatatattcacccattgccactggacactgaatgtattgtgaatggtgtcaaagttgttttgcttgatgccaatcactgtccaggtgctgtcatgatcctcttttatcttcctaatggtactgtcatattacacacgggagacttcagagcagatcccagcatggaacgttctcttcttgcggaccagaaagtccatatgctgtacttagataccacatattgtagcccagaatacacctttccatctcagcaagaggttatccggtttgccatcaacactgcctttgaggctgtaactctaaacccacatgctcttgttgtctgtggcacttactctattggaaaagagaaagtcttcctagccattgctgatgttttaggttcaaaagtgggcatgtcccaggaaaaatataaaactctacagtgcctcaatataccagaaattaattcactcatcactaccgacatgtgcagttcattggttcaccttctcccaatgatgcaaattaattttaagggcttacagagtcatttgaagaagtgtggtgggaaatacaatcagattttggcatttcgacctacaggatggacacactctaacaagttcactagaatagcagatgttattccccagaccaaaggaaacatttcaatatatggaattccttacagtgaacacagcagctacctagaaatgaagcgctttgtccagtggctgaagccccagaaaatcatacctactgtaaatgtgggcacctggaaatctaggagcacaatggagaaatattttagagagtggaaattggaagctggatattgatgatacctccgaggattcagtagtagttaagttccttggatgtagcttgttagtagttaaatctatagaaatgtgaaatacactttgtgtggaaaaacctcatgaagattgttcagatactttattttctcatttatgtttgaacaacatgttcgtggtgctgaatgcctctcagcatcatcaaggataactgaaactgggtctccctgggacccttaatttcttgtcccctgccctccatgggcagttatattctgcatcaagccttagaagaggaagcaaaggcagattcagggaccaaaaggattaatgataattaataaagtagtttgaagcattatatatataagtaattatgtgtctttaaaattatgagatgaaacttttatatgacgtgtatacttaaataaaattaatataaaatttgaaaaaaaaaaaaaaaaaaaaaaaaaaaaaaaaaaaaaaaaaaaaaaaaaaaaaa

SEQ ID NO: 453 - DNA, 2105 bp, Homo sapiens
tgcgaggcagctcgctcgttctgcgatctattgagagtggcttccaagagccccgtgcctatgtctgggagggagggaagatggcagccgtggcggcaggcggcctggtgggaaaggggcgcgacatcagcctagcggccctgcagcgccacgacccctatatcaaccgcatcgtggacgtggccagccaggtggctctgtacaccttcggccatcgggccaacgagtgggagaaaactgatgtggaaggaaccttatttgtttatacaaggtctgcttctccaaagcatggattcaccattatgaataggctgagcatggaaaataggacagaacctattactaaagacttggatttccaactccaggaccctttccttctctacagaaatgccagattgtccatctatggaatttggttttatgataaggaagaatgccaaagaattgcagagcttatgaaaaacctaactcagtatgaacagttgaaagcccatcagggaactggagcaggaatttccccagtgatcctcaattcaggagagggcaaagaagtagacattttacgaatgctcatcaaggccaaagacgaatacacaaagtgtaaaacctgttctgagccaaaaaagataaccagttcctctgccatctatgacaatccaaatctcatcaaaccaattccagtgaaacccagtgaaaaccagcaacagcgtatacctcagcccaaccagaccttagaccctgaaccccaacacttatccttgacagctctgtttgggaagcaggacaaagctacatgtcaggaaactgtggagcctccgcagactctccaccagcagcagcagcagcagcagcagcagcaagagaagcttccaattaggcagggggttgtacgctccctgtcctatgaggaacccagaagacactcaccccccattgagaagcagctctgtccagccattcagaaactcatggtcaggagcgcagacctccacccattgtcagagctgcctgaaaaccggccttgtgaaaatggcagtacccattctgcgggagaattttttacaggacctgtccagccagggtctcctcacaacattggaacttctcgtggtgtacaaaatgcttccagaactcagaacctgttcgagaaacttcagagtaccccaggggcagcaaacaagtgtgaccctagtacaccagcacctgccagctcagctgccctgaaccgcagcagagctcccacttctgtcacccctgtggctccaggaaagggtctggctcagccaccacaggcctatttcaatggctcccttccacctcagacagtaggacatcaggctcatggaagagaacagtccacactcccaagacaaacactccccatctctggtagtcagactggcagctctggagtgatctcccctcaagagttactgaagaagcttcagattgtacagcaggagcagcagctgcatgcctctaaccggccagccttggccgctaagtttcctgtgctcgctcagagctctggaacagggaaacccttggaatcctggatcaacaagacacccaacacagaacagcagactcctcttttccaggtcatctcacctcagcgcatccctgctacagcagctccgtctctgcttatgtcccccatggtgttcgcacaacccacctccgtcccgccaaaggaaagggagagcggcctcttgcctgtgggaggccaggagccacctgctgctgccaccagcctcctcctgcccatacagagcccggagccctccgtgatcaccagcagcccactcaccaagctccagctccaggaggcactgctgtacctcattcagaatgatgacaacttcttaaatataatctatgaagcctatctcttcagcatgactcaagcagccatgaaaaagactatgtgacagcaaggccttttaaaactgattttcaaggtccttctagaactccggcacaaggttctttcatgttgagtgttgtttccttcaatgtttctgccttttttaaaaaaaaagtatgtgtaatatgaagtaaaatgtttcagacttttttttatactcaaaaaaaaaaaaaaa

SEQ ID NO: 454 - DNA, 1044 bp, Homo sapiens
caaccctgccaggctctccaatcgcatgtggaattatcgctctacccaggcggtggtgtcgatctacgttccaattggggccgtaccatggcggagaagactcaaaagagtgtgaagattgctcctggagcagttgtatgtgtagaaagtgaaatcagaggagatgtaactatcggacctcggacagtgatccaccctaaagcaagaattattgcggaagccgggccaatagtgattggcgaagggaacctaatagaagaacaggcccttatcataaatgcttacccagataatatcactcctgacactgaagatccagaaccaaaacctatgatcattggcaccaataatgtgtttgaagttggctgttattcccaagccatgaagatgggagataataatgtcattgaatcaaaagcatatgtaggcagaaatgtaatattgacaagtggctgcatcattggggcttgttgcaacctaaatacatttgaagtcatccctgagaatacggtgatctatggtgcagactgccttcgtcgggtgcagactgagcgaccgcagccccagacactacagctggatttcttgatgaaaatcttgccaaattaccaccacctaaagaagactatgaaaggaagctcaactccagtaaagaactaagaacagtgtataacatgaagataacattttgtctttgaccactgtcttttgaatgggcccacagtgtttatgtactcttaacaactcacagaataatacatgttcactttattttgtaaaattgggttgagaggaaactaatggagtttcattgtaactgtcctttgtaatttatataaatgtattattttcctatatccttggttcttttctgataatttacagatttagcttttcttttgttatataaactgctagccacaaattttagttatgtaaaaggctacccttgacaagaaaagacatactgtcatgtatttatattctagcatagactaaactgaataaaaatgctgataacaggacctttaaaaaaaaaaaaaa

SEQ ID NO: 455 - DNA, 4355 bp, Homo sapiens
gcctccttcggttggcggcctcgggcttcgggagtcctccaagaggccaggtgaggccgtcccgtgatgccccgcgccccggccgctctggcctgcaacgtgtctctggggcggaggcagcggcagtggagttcgctgcgcgctgttgggggccacctgtcttttcgcttgtgtccctctttctagtgtcgcgctcgagtcccgacgggccgctccaagcctcgacatgtcgtacaactacgtggtaacggcccagaagcccaccgccgtgaacggctgcgtgaccggacactttacttcggccgaagacttaaacctgttgattgccaaaaacacgagattagagatctatgtggtcaccgccgaggggcttcggcccgtcaaagaggtgggcatgtatgggaagattgcggtcatggagcttttcaggcccaagggggagagcaaggacctgctgtttatcttgacagcgaagtacaatgcctgcatcctggagtataaacagagtggcgagagcattgacatcattacgcgagcccatggcaatgtccaggaccgcattggccgcccctcagagaccggcattattggcatcattgaccctgagtgccggatgattggcctgcgtctctatgatggccttttcaaggttattccactagatcgcgataataaagaactcaaggccttcaacatccgcctggaggagctgcatgtcattgatgtcaagttcctatatggttgccaagcacctactatttgctttgtctaccaggaccctcaggggcggcacgtaaaaacctatgaggtgtctctccgagaaaaggaattcaataagggcccttggaaacaggaaaatgtcgaagctgaagcttccatggtgatcgcagtcccagagccctttgggggggccatcatcattggacaggagtcaatcacctatcacaatggtgacaaatacctggctattgcccctcctatcatcaagcaaagcacgattgtgtgccacaatcgagtggaccctaatggctcaagatacctgctgggagacatggaaggccggctcttcatgctgcttttggagaaggaggaacagatggatggcaccgtcactctcaaggatctccgtgtagaactccttggagagacctctattgctgagtgcttgacataccttgataatggtgttgtgtttgtcgggtctcgcctgggtgactcccagcttgtgaagctcaacgttgacagtaatgaacaaggctcctatgtagtggccatggaaacctttaccaacttaggacccattgtcgatatgtgcgtggtggacctggagaggcaggggcaggggcagctggtcacttgctctggggctttcaaggaaggttctttgcggatcatccggaatggaattggaatccacgagcatgccagcattgacttaccaggcatcaaaggattatggccactgcggtctgaccctaatcgtgagactgatgacactttggtgctctcttttgtgggccagacaagagttctcatgttaaatggagaggaggtagaagaaaccgaactgatgggtttcgtggatgatcagcagactttcttctgtggcaacgtggctcatcagcagcttatccagatcacttcagcatcggtgaggttggtctctcaagaacccaaagctctggtcagtgaatggaaggagcctcaggccaagaacatcagtgtggcctcctgcaatagcagccaggtggtggtggctgtaggcagggccctctactatctgcagatccatcctcaggagctccggcagatcagccacacagagatggaacatgaagtggcttgcttggacatcaccccattaggagacagcaatggactgtcccctctttgtgccattggcctctggacggacatctcggctcgtatcttgaagttgccctcttttgaactactgcacaaggagatgctgggtggagagatcattcctcgctccatcctgatgaccacctttgagagtagccattacctcctttgtgccttgggagatggagcgcttttctactttgggctcaacattgagacaggtctgttgagcgaccgtaagaaggtgactttgggcacccagcccaccgtattgaggacttttcgttctctttctaccaccaacgtctttgcttgttctgaccgccccactgtcatctatagcagcaaccacaaattggtcttctcaaatgtcaacctcaaggaagtgaactacatgtgtcccctcaattcagatggctatcctgacagcctggcgctggccaacaatagcaccctcaccattggcaccatcgatgagatccagaagctgcacattcgcacagttcccctctatgagtctccaaggaagatctgctaccaggaagtgtcccagtgtttcggggtcctctccagccgcattgaagtccaagacacgagtgggggcacgacagccttgaggcccagcgctagcacccaggctctgtccagcagtgtaagctccagcaagctgttctccagcagcactgctcctcatgagacctcctttggagaagaggtggaggtgcacaacctacttatcattgaccaacacacctttgaagtgcttcatgcccaccagtttctgcagaatgaatatgccctcagtctggtttcctgcaagctgggcaaagaccccaacacttacttcattgtgggcacagcaatggtgtatcctgaagaggcagagcccaagcagggtcgcattgtggtctttcagtattcggatggaaaactacagactgtggctgaaaaggaagtgaaaggggccgtgtactctatggtggaatttaacgggaagctgttagccagcatcaatagcacggtgcggctctatgagtggacaacagagaaggagctgcgcactgagtgcaaccactacaacaacatcatggccctctacctgaagaccaagggcgacttcatcctggtgggcgaccttatgcgctcagtgctgctgcttgcctacaagcccatggaaggaaactttgaagagattgctcgagactttaatcccaactggatgagtgctgtggaaatcttggatgatgacaattttctgggggctgaaaatgcctttaacttgtttgtgtgtcaaaaggatagcgctgccaccactgacgaggagcggcagcacctccaggaggttggtcttttccacctgggcgagtttgtcaatgtcttttgccacggctctctggtaatgcagaatctgggtgagacttccacccccacacaaggctcggtgctcttcggcacggtcaacggcatgatagggctggtgacctcactgtcagagagctggtacaacctcctgctggacatgcagaatcgactcaataaagtcatcaaaagtgtggggaagatcgagcactccttctggagatcctttcacaccgagcggaagacagaaccagccacaggtttcatcgacggtgacttgattgagagtttcctggatattagccgccccaagatgcaggaggtggtggcaaacctacagtatgacgatggcagcggtatgaagcgagaggccactgcagacgacctcatcaaggttgtggaggagctaactcggatccattagccaagggcagggggcccctttgctgaccctccccaaaggctttgccctgctgccctccccctcctctccaccatcgtcttcttggccatgggaggcctttccctaagccagctgcccccagagccacagttcccctatgtggaagtggggcgggcttcatagagacttgggaatgagctgaaggtgaaacattttctccctggatttttaccagtctcacatgattccagccatcaccttagaccaccaagccttgattggtgttgccagttgtcctccttccggggaaggattttgcagttctttggctgaaaggaagctgtgcgtgtgtgtgtgtgtatgtgtgtgtgtgtatgtgtatctcacactcatgcattgtcctctttttatttagattggcagtgtagggagttgtgggtagtggggaagagggttaggagggtttcattgtctgtgaagtgagaccttccttttacttttcttctattgcctctgagagcatcaggcctagaggcctgactgccaagccatgggtagcctgggtgtaaaacctggagatggtggatgatccccacgccacagcccttttgtctctgcaaactgccttcttcggaaagaagaaggtgggaggatgtgaattgttagtttctgagttttaccaaataaagtagaatataagaagaaaggtaaaaaaaaaaaaaaaaaa

SEQ ID NO: 456 - DNA, 1556 bp, Homo sapiens
gggcatgagaccagccaggcactgggaaacaaggtttggtgccagagattttggtggcttccaagactgctttttcagagacaggctcatggacacagcacggattgcagttgtcggggcaggtgtggtggggctctccacggctgtgtgcatctccaaactggtgccccgatgctccgttaccatcatttcagacaagtttactccagataccaccagtgatgtggcagccggaatgcttattcctcacacttatccagatacacccattcacacgcagaagcagtggttcagagaaacctttaatcacctctttgcaattgccaattctgcagaagctggagatgctggtgttcatttggtatcagggataaagggaagtggaggctggacactcactcggcgaatagaagacctgtgggaacttcatccgtcctttgacatcgtggtcaactgttcaggccttggaagcagacagcttgcaggagactcaaagattttccctgtaaggggccaagtcctccaagttcaggctccctgggtggagcattttatccgagatggcagtgggctgacatatatttatcctggtacatcccatgtaaccctaggtggaactaggcaaaaaggggactggaatctgtccccggatgcagaaaatagcagagagattctttcccgatgctgtgctctggagccctccctccacggagcctgcaacatcagggagaaggtgggcttgaggccctacaggccaggcgtgcgactgcagacagagctccttgcgcgagatggacagaggctgcctgtagtccaccactatggccatgggagtgggggcatctcagtgcactggggcactgctctggaggccgccaggctggtgagcgagtgtgtccatgccctcaggacccccattcccaagtcaaacctgtagatgacataaaatgacagcaaagagactgagagactgttgatcaaagcacagaacaggttcaaataacttttccactgcatgaaagtttaattagacatttctttgttttcaacattagaagtggtgtaacatgtaagctgagcacggtggcatgcctatagtcccagctacttgagaggctgaggcaggaggattgttgagcccaggagtttgagtgcaatctgggtaacattttttagaggtgccagttcccacctctaaaaaaaacaccaacaacaaaagaaatgatgcaacatgtaggcttacttaggaagtccagcattaatggcatagggcataaagctctattttttgttaaaaatacttcttatagagtaaaatttatttagaactgatgtccaaggacctatgcagatttatatgaatgttggaagctatagagattttgatatcatttggcttataaatccacaggaggagataatgtatggaaaacatttaaatcactgtcaattgcagagctgcctgtgatcttcttaggttatagccaagtcagcaacataattcctctaaataaaattacattgtgctcacaaaaaaaaaaaaaaaaaaaaaaaaa

SEQ ID NO: 457 - DNA, 1733 bp, Homo sapiens
gggcatgagaccagccaggcactgggaaacaaggtttggtgccagagattttggtggcttccaagactgctttttcagagacaggctcatggacacagcacggattgcagttgtcggggcaggtgtggtggggctctccacggctgtgtgcatctccaaactggtgccccgatgctccgttaccatcatttcagacaagtttactccagataccaccagtgatgtggcagccggaatgcttattcctcacacttatccagatacacccattcacacgcagaagcagtggttcagagaaacctttaatcacctctttgcaattgccaattctgcagaagctggagatgctggtgttcatttggtatcaggttggcagatatttcagagcactccgactgaagaagtgccattctgggctgacgtggttctgggatttcgaaagatgactgaggctgagctgaagaaattcccccagtatgtgtttggtcaggcttttacaaccctgaaatgtgaatgccctgcctacctcccgtggttggagaaaaggataaagggaagtggaggctggacactcactcggcgaatagaagacctgtgggaacttcatccgtcctttgacatcgtggtcaactgttcaggccttggaagcagacagcttgcaggagactcaaagattttccctgtaaggggccaagtcctccaagttcaggctccctgggtggagcattttatccgagatggcagtgggctgacatatatttatcctggtacatcccatgtaaccctaggtggaactaggcaaaaaggggactggaatctgtccccggatgcagaaaatagcagagagattctttcccgatgctgtgctctggagccctccctccacggagcctgcaacatcagggagaaggtgggcttgaggccctacaggccaggcgtgcgactgcagacagagctccttgcgcgagatggacagaggctgcctgtagtccaccactatggccatgggagtgggggcatctcagtgcactggggcactgctctggaggccgccaggctggtgagcgagtgtgtccatgccctcaggacccccattcccaagtcaaacctgtagatgacataaaatgacagcaaagagactgagagactgttgatcaaagcacagaacaggttcaaataacttttccactgcatgaaagtttaattagacatttctttgttttcaacattagaagtggtgtaacatgtaagctgagcacggtggcatgcctatagtcccagctacttgagaggctgaggcaggaggattgttgagcccaggagtttgagtgcaatctgggtaacattttttagaggtgccagttcccacctctaaaaaaaacaccaacaacaaaagaaatgatgcaacatgtaggcttacttaggaagtccagcattaatggcatagggcataaagctctattttttgttaaaaatacttcttatagagtaaaatttatttagaactgatgtccaaggacctatgcagatttatatgaatgttggaagctatagagattttgatatcatttggcttataaatccacaggaggagataatgtatggaaaacatttaaatcactgtcaattgcagagctgcctgtgatcttcttaggttatagccaagtcagcaacataattcctctaaataaaattacattgtgctcacaaaaaaaaaaaaaaaaaaaaaaaaa

SEQ ID NO: 458 - DNA, 3877 bp, Homo sapiens
tgctctcgggagccgcctcccgacacccgagccccgccggcgcctcccgctcccggctcccggctcctggctccctccgcctcccccgcccctcgccccgccgccgaagaggccccgctcccgggtcggacgcctgggtctgccgggaagagcgatgagaggtgtctgaaggtggctattcactgagcgatggggttggacttgaaggaatgccaagagatgctgcccccacccccttaggcccgagggatcaggagctatgggaccagaggccctgtcatctttactgctgctgctcttggtggcaagtggagatgctgacatgaagggacattttgatcctgccaagtgccgctatgccctgggcatgcaggaccggaccatcccagacagtgacatctctgcttccagctcctggtcagattccactgccgcccgccacagcaggttggagagcagtgacggggatggggcctggtgccccgcagggtcggtgtttcccaaggaggaggagtacttgcaggtggatctacaacgactgcacctggtggctctggtgggcacccagggacggcatgccgggggcctgggcaaggagttctcccggagctaccggctgcgttactcccgggatggtcgccgctggatgggctggaaggaccgctggggtcaggaggtgatctcaggcaatgaggaccctgagggagtggtgctgaaggaccttgggccccccatggttgcccgactggttcgcttctacccccgggctgaccgggtcatgagcgtctgtctgcgggtagagctctatggctgcctctggagggatggactcctgtcttacaccgcccctgtggggcagacaatgtatttatctgaggccgtgtacctcaacgactccacctatgacggacataccgtgggcggactgcagtatgggggtctgggccagctggcagatggtgtggtggggctggatgactttaggaagagtcaggagctgcgggtctggccaggctatgactatgtgggatggagcaaccacagcttctccagtggctatgtggagatggagtttgagtttgaccggctgagggccttccaggctatgcaggtccactgtaacaacatgcacacgctgggagcccgtctgcctggcggggtggaatgtcgcttccggcgtggccctgccatggcctgggagggggagcccatgcgccacaacctagggggcaacctgggggaccccagagcccgggctgtctcagtgccccttggcggccgtgtggctcgctttctgcagtgccgcttcctctttgcggggccctggttactcttcagcgaaatctccttcatctctgatgtggtgaacaattcctctccggcactgggaggcaccttcccgccagccccctggtggccgcctggcccacctcccaccaacttcagcagcttggagctggagcccagaggccagcagcccgtggccaaggccgaggggagcccgaccgccatcctcatcggctgcctggtggccatcatcctgctcctgctgctcatcattgccctcatgctctggcggctgcactggcgcaggctcctcagcaaggctgaacggagggtgttggaagaggagctgacggttcacctctctgtccctggggacactatcctcatcaacaaccgcccaggtcctagagagccacccccgtaccaggagccccggcctcgtgggaatccgccccactccgctccctgtgtccccaatggctctgcgttgctgctctccaatccagcctaccgcctccttctggccacttacgcccgtccccctcgaggcccgggcccccccacacccgcctgggccaaacccaccaacacccaggcctacagtggggactatatggagcctgagaagccaggcgccccgcttctgcccccacctccccagaacagcgtcccccattatgccgaggctgacattgttaccctgcagggcgtcaccgggggcaacacctatgctgtgcctgcactgcccccaggggcagtcggggatgggccccccagagtggatttccctcgatctcgactccgcttcaaggagaagcttggcgagggccagtttggggaggtgcacctgtgtgaggtcgacagccctcaagatctggttagtcttgatttcccccttaatgtgcgtaagggacaccctttgctggtagctgtcaagatcttacggccagatgccaccaagaatgccaggaatgatttcctgaaagaggtgaagatcatgtcgaggctcaaggacccaaacatcattcggctgctgggcgtgtgtgtgcaggacgaccccctctgcatgattactgactacatggagaacggcgacctcaaccagttcctcagtgcccaccagctggaggacaaggcagccgagggggcccctggggacgggcaggctgcgcaggggcccaccatcagctacccaatgctgctgcatgtggcagcccagatcgcctccggcatgcgctatctggccacactcaactttgtacatcgggacctggccacgcggaactgcctagttggggaaaatttcaccatcaaaatcgcagactttggcatgagccggaacctctatgctggggactattaccgtgtgcagggccgggcagtgctgcccatccgctggatggcctgggagtgcatcctcatggggaagttcacgactgcgagtgacgtgtgggcctttggtgtgaccctgtgggaggtgctgatgctctgtagggcccagccctttgggcagctcaccgacgagcaggtcatcgagaacgcgggggagttcttccgggaccagggccggcaggtgtacctgtcccggccgcctgcctgcccgcagggcctatatgagctgatgcttcggtgctggagccgggagtctgagcagcgaccacccttttcccagctgcatcggttcctggcagaggatgcactcaacacggtgtgaatcacacatccagctgcccctccctcagggagcgatccaggggaagccagtgacactaaaacaagaggacacaatggcacctctgcccttcccctcccgacagcccatcacctctaatagaggcagtgagactgcaggtgggctgggcccacccagggagctgatgccccttctccccttcctggacacactctcatgtccccttcctgttcttccttcctagaagcccctgtcgcccacccagctggtcctgtggatgggatcctctccaccctcctctagccatcccttggggaagggtggggagaaatataggatagacactggacatggcccattggagcacctgggccccactggacaacactgattcctggagaggtggctgcgcccccagcttctctctccctgtcacacactggaccccactggctgagaatctgggggtgaggaggacaagaaggagaggaaaatgtttccttgtgcctgctcctgtacttgtcctcagcttgggcttcttcctcctccatcacctgaaacactggacctgggggtagccccgccccagccctcagtcacccccacttcccacttgcagtcttgtagctagaacttctctaagcctatacgtttctgtggagtaaatattgggattggggggaaagagggagcaacggcccatagccttggggttggacatctctagtgtagctgccacattgatttttctataatcacttggggtttgtacatttttggggggagagacacagatttttacactaatatatggacctagcttgaggcaattttaatcccctgcactaggcaggtaataataaaggttgagttttccacaaaaaaaaaaaaaaaaaa

SEQ ID NO: 459 - DNA, 658 bp, Homo sapiens
ggacctctccagaatccggattgctgaatcttccctgttgcctagaagggctccaaaccacctcttgacaatgggaaactgggtggttaaccactggttttcagttttgtttctggttgtttggttagggctgaatgttttcctgtttgtggatgccttcctgaaatatgagaaggccgacaaatactactacacaagaaaaatccttgggtcaacattggcctgtgcccgagcgtctgctctctgcttgaattttaacagcacgctgatcctgcttcctgtgtgtcgcaatctgctgtccttcctgaggggcacctgctcattttgcagccgcacactgagaaagcaattggatcacaacctcaccttccacaagctggtggcctatatgatctgcctacatacagctattcacatcattgcacacctgtttaactttgactgctatagcagaagccgacaggccacagatggctcccttgcctccattctctccagcctatctcatgatgagaaaaaggggggttcttggctaaatcccatccatccccatataacaccaacagtgtacatgtttactgtcacttttgatatggtcttatccagtgtgaacagcaatttattatttttgctcatcaaaaaataaaggattttcttc

SEQ ID NO: 460 - DNA, 3252 bp, Homo sapiens
gaatcctcagaatgtgaggtttctctcaaaggcatcttgcatcagcctgtggatgtatgcctaccaccgggctccttcaccagcaaagtggaaaaagaagcgtttcacaacaaattcttctttttgggttggggaaacgcagtggattatagctctgttttcttctttccaaaactgtgcacccctggatgaaacctccatcaagggagacctacaagttgcctggggttcagtgctctagaaagttccaaggtttgtggcttgaattattctaaagaagctgaaataattgaagagaagcagaggccagctgtttttgaggatcctgctccacagagaatgctctgcacccgttgatatgcctcccaggacccagagggagactgtagcctcatttctgtggagacctttggctggactctcctggctctcccagagactccagttccaacaccatcttctgagatgatcctgattcccagaatgctcttggtgctgttcctgctgctgcctatcttgagttctgcaaaagctcaggttaatccagctatatgccgctatcctctgggcatgtcaggaggccagattccagatgaggacatcacagcttccagtcagtggtcagagtccacagctgccaaatatggaaggctggactcagaagaaggggatggagcctggtgccctgagattccagtggaacctgatgacctgaaggagtttctgcagattgacttgcacaccctccattttatcactctggtggggacccaggggcgccatgcaggaggtcatggcatcgagtttgcccccatgtacaagatcaattacagtcgggatggcactcgctggatctcttggcggaaccgtcatgggaaacaggtgctggatggaaatagtaacccctatgacattttcctaaaggacttggagccgcccattgtagccagatttgtccggttcattccagtcaccgaccactccatgaatgtgtgtatgagagtggagctttacggctgtgtctggctagatggcttggtgtcttacaatgctccagctgggcagcagtttgtactccctggaggttccatcatttatctgaatgattctgtctatgatggagctgttggatacagcatgacagaagggctaggccaattgaccgatggtgtgtctggcctggacgatttcacccagacccatgaataccacgtgtggcccggctatgactatgtgggctggcggaacgagagtgccaccaatggctacattgagatcatgtttgaatttgaccgcatcaggaatttcactaccatgaaggtccactgcaacaacatgtttgctaaaggtgtgaagatctttaaggaggtacagtgctacttccgctctgaagccagtgagtgggaacctaatgccatttccttcccccttgtcctggatgacgtcaaccccagtgctcggtttgtcacggtgcctctccaccaccgaatggccagtgccatcaagtgtcaataccattttgcagatacctggatgatgttcagtgagatcaccttccaatcagatgctgcaatgtacaacaactctgaagccctgcccacctctcctatggcacccacaacctatgatccaatgcttaaagttgatgacagcaacactcggatcctgattggctgcttggtggccatcatctttatcctcctggccatcattgtcatcatcctctggaggcagttctggcagaaaatgctggagaaggcttctcggaggatgctggatgatgaaatgacagtcagcctttccctgccaagtgattctagcatgttcaacaataaccgctcctcatcacctagtgaacaagggtccaactcgacttacgatcgcatctttccccttcgccctgactaccaggagccatccaggctgatacgaaaactcccagaatttgctccaggggaggaggagtcaggctgcagcggtgttgtgaagccagtccagcccagtggccctgagggggtgccccactatgcagaggctgacatagtgaacctccaaggagtgacaggaggcaacacatactcagtgcctgccgtcaccatggacctgctctcaggaaaagatgtggctgtggaggagttccccaggaaactcctaactttcaaagagaagctgggagaaggacagtttggggaggttcatctctgtgaagtggagggaatggaaaaattcaaagacaaagattttgccctagatgtcagtgccaaccagcctgtcctggtggctgtgaaaatgctccgagcagatgccaacaagaatgccaggaatgattttcttaaggagataaagatcatgtctcggctcaaggacccaaacatcatccatctattagctgtgtgtatcactgatgaccctctctgtatgatcactgaatacatggagaatggagatctcaatcagtttctttcccgccacgagccccctaattcttcctccagcgatgtacgcactgtcagttacaccaatctgaagtttatggctacccaaattgcctctggcatgaagtacctttcctctcttaattttgttcaccgagatctggccacacgaaactgtttagtgggtaagaactacacaatcaagatagctgactttggaatgagcaggaacctgtacagtggtgactattaccggatccagggccgggcagtgctccctatccgctggatgtcttgggagagtatcttgctgggcaagttcactacagcaagtgatgtgtgggcctttggggttactttgtgggagactttcaccttttgtcaagaacagccctattcccagctgtcagatgaacaggttattgagaatactggagagttcttccgagaccaagggaggcagacttacctccctcaaccagccatttgtcctgactctgtgtataagctgatgctcagctgctggagaagagatacgaagaaccgtccctcattccaagaaatccaccttctgctccttcaacaaggcgacgagtgatgctgtcagtgcctggccatgttcctacggctcaggtcctccctacaagacctaccactcacccatgcctatgccactccatctggacatttaatgaaactgagagacagaggcttgtttgctttgccctcttttcctggtcacccccactccctacccctgactcatatatacttttttttttttttacattaaagaactaaaaaaggaaaaaaaaaa

SEQ ID NO: 461 - DNA, 3172 bp, Homo sapiens
gaatcctcagaatgtgaggtttctctcaaaggcatcttgcatcagcctgtggatgtatgcctaccaccgggctccttcaccagcaaagtggaaaaagaagcgtttcacaacaaattcttctttttgggttggggaaacgcagtggattatagctctgttttcttctttccaaaactgtgcacccctggatgaaacctccatcaagggagacctacaagttgcctggggttcagtgctctagaaagttccaaggtttgtggcttgaattattctaaagaagctgaaataattgaagagaagcagaggccagctgtttttgaggatcctgctccacagagaatgctctgcacccgttgatactccagttccaacaccatcttctgagatgatcctgattcccagaatgctcttggtgctgttcctgctgctgcctatcttgagttctgcaaaagctcaggttaatccagctatatgccgctatcctctgggcatgtcaggaggccagattccagatgaggacatcacagcttccagtcagtggtcagagtccacagctgccaaatatggaaggctggactcagaagaaggggatggagcctggtgccctgagattccagtggaacctgatgacctgaaggagtttctgcagattgacttgcacaccctccattttatcactctggtggggacccaggggcgccatgcaggaggtcatggcatcgagtttgcccccatgtacaagatcaattacagtcgggatggcactcgctggatctcttggcggaaccgtcatgggaaacaggtgctggatggaaatagtaacccctatgacattttcctaaaggacttggagccgcccattgtagccagatttgtccggttcattccagtcaccgaccactccatgaatgtgtgtatgagagtggagctttacggctgtgtctggctagatggcttggtgtcttacaatgctccagctgggcagcagtttgtactccctggaggttccatcatttatctgaatgattctgtctatgatggagctgttggatacagcatgacagaagggctaggccaattgaccgatggtgtgtctggcctggacgatttcacccagacccatgaataccacgtgtggcccggctatgactatgtgggctggcggaacgagagtgccaccaatggctacattgagatcatgtttgaatttgaccgcatcaggaatttcactaccatgaaggtccactgcaacaacatgtttgctaaaggtgtgaagatctttaaggaggtacagtgctacttccgctctgaagccagtgagtgggaacctaatgccatttccttcccccttgtcctggatgacgtcaaccccagtgctcggtttgtcacggtgcctctccaccaccgaatggccagtgccatcaagtgtcaataccattttgcagatacctggatgatgttcagtgagatcaccttccaatcagatgctgcaatgtacaacaactctgaagccctgcccacctctcctatggcacccacaacctatgatccaatgcttaaagttgatgacagcaacactcggatcctgattggctgcttggtggccatcatctttatcctcctggccatcattgtcatcatcctctggaggcagttctggcagaaaatgctggagaaggcttctcggaggatgctggatgatgaaatgacagtcagcctttccctgccaagtgattctagcatgttcaacaataaccgctcctcatcacctagtgaacaagggtccaactcgacttacgatcgcatctttccccttcgccctgactaccaggagccatccaggctgatacgaaaactcccagaatttgctccaggggaggaggagtcaggctgcagcggtgttgtgaagccagtccagcccagtggccctgagggggtgccccactatgcagaggctgacatagtgaacctccaaggagtgacaggaggcaacacatactcagtgcctgccgtcaccatggacctgctctcaggaaaagatgtggctgtggaggagttccccaggaaactcctaactttcaaagagaagctgggagaaggacagtttggggaggttcatctctgtgaagtggagggaatggaaaaattcaaagacaaagattttgccctagatgtcagtgccaaccagcctgtcctggtggctgtgaaaatgctccgagcagatgccaacaagaatgccaggaatgattttcttaaggagataaagatcatgtctcggctcaaggacccaaacatcatccatctattagctgtgtgtatcactgatgaccctctctgtatgatcactgaatacatggagaatggagatctcaatcagtttctttcccgccacgagccccctaattcttcctccagcgatgtacgcactgtcagttacaccaatctgaagtttatggctacccaaattgcctctggcatgaagtacctttcctctcttaattttgttcaccgagatctggccacacgaaactgtttagtgggtaagaactacacaatcaagatagctgactttggaatgagcaggaacctgtacagtggtgactattaccggatccagggccgggcagtgctccctatccgctggatgtcttgggagagtatcttgctgggcaagttcactacagcaagtgatgtgtgggcctttggggttactttgtgggagactttcaccttttgtcaagaacagccctattcccagctgtcagatgaacaggttattgagaatactggagagttcttccgagaccaagggaggcagacttacctccctcaaccagccatttgtcctgactctgtgtataagctgatgctcagctgctggagaagagatacgaagaaccgtccctcattccaagaaatccaccttctgctccttcaacaaggcgacgagtgatgctgtcagtgcctggccatgttcctacggctcaggtcctccctacaagacctaccactcacccatgcctatgccactccatctggacatttaatgaaactgagagacagaggcttgtttgctttgccctcttttcctggtcacccccactccctacccctgactcatatatacttttttttttttttacattaaagaactaaaaaaggaaaaaaaaaa

SEQ ID NO: 462 - DNA, 2706 bp, Homo sapiens
ctctgtagctgtgaccctgataccgcgtggtgtgctccgaacacatggtgcccagaacgaaggcggcgtccagaagccctaggtcccagaggtccgctcagcggcaggcgcataaggcggggccggcgcgggcctttccttccatcggaaccgttctcccggggctgagtccctgcccggactccgaacgccgaagaccaggggccggaagcgcgcgccgccactgccacgccgtgtcagtcgggagggagggagcgagcaggcgaagccgcggaggacggggtgaagatggcggccttctccgagatgggtgtaatgcctgagattgcacaagctgtggaagagatggattggctcctcccaactgatatccaggctgaatctatcccattgatcttaggaggaggtgatgtacttatggctgcagaaacaggaagtggcaaaactggtgcttttagtattccagttatccagatagtttatgaaactctgaaagaccaacaggaaggcaaaaaaggaaaaacaacaattaaaactggtgcttcagtgctgaacaaatggcagatgaacccatatgacagaggatctgcttttgcaattgggtcagatggtctttgttgtcaaagcagagaagtaaaggaatggcatgggtgtagagctactaaaggattaatgaaagggaaacactactatgaagtatcctgtcatgaccaagggttatgcagggtcgggtggtctaccatgcaggcctctttggacctaggtactgacaagtttggatttggctttggtggaacaggaaagaaatcccataacaaacaatttgataattatggagaggaattcactatgcatgataccattggatgttacctggatatagataagggacatgtcaagttctccaaaaatggaaaagatcttggtctggcatttgaaataccaccacatatgaaaaaccaagccctctttcctgcctgtgttttgaagaatgctgaactgaaatttaacttcggtgaagaggaatttaagtttccaccaaaagatggctttgttgctctttccaaggcaccggatggttacattgtcaaatcacagcactcaggtaatgcacaggtgacacaaacaaagtttctccccaatgctccgaaagctctcattgttgaaccttcccgggagttagctgaacaaactttgaacaacatcaagcagtttaagaaatacattgataatcctaaattaagggagcttctgataattggaggtgttgcagcccgggatcagctctctgttttggaaaatggagtagatatagttgtaggtactccgggaagactagatgacttggtgtcaactggaaagctgaacttatctcaagttagattcctggtcctggatgaagctgatgggcttctttctcaaggttattctgattttataaataggatgcacaatcagattcctcaggttacctctgatggaaaaagacttcaggtgattgtttgctctgccactttgcattctttcgatgtaaagaaactgtccgagaagataatgcattttcctacatgggttgacttaaaaggagaagactctgttccagatactgtacaccatgttgttgtcccagtaaatcccaaaactgacagactctgggaaaggcttggaaagagccacattagaactgatgatgtacatgcaaaagataacacaagacctggtgctaatagtccagagatgtggtctgaagctattaaaatcctgaaaggggagtatgctgtccgggcaatcaaggaacataagatggatcaagcaattatcttctgtagaaccaaaattgactgtgataacttggagcagtactttatacaacaaggaggaggacctgataaaaaaggacaccagttctcatgtgtttgtcttcatggtgacagaaagcctcatgagagaaagcaaaacttggaaagatttaagaaaggagatgtaagattcttgatttgcacagatgtagctgctagaggaattgatatccacggtgttccttatgttataaatgtcactctgcccgatgaaaagcaaaactacgtacatcgaattggcagagtaggaagagctgaaaggatgggtctggcaatttccctggtggcaacagaaaaagaaaaggtttggtaccatgtatgtagcagccgtggaaaagggtgttataacacaagactcaaggaagatggaggctgtaccatatggtacaacgagatgcagttactatctgagatagaagaacacctgaactgtaccatttctcaggttgagccggatataaaggtaccagtggatgaatttgatgggaaagttacctacggtcagaaaagggctgctggtggtggaagctataaaggccatgtggatattttggcacctactgttcaagagttggctgcccttgaaaaggaggcgcagacatctttcctgcatcttggctaccttcctaaccagctgttcagaaccttctgatttttacatttactgaataagatttgagtaatgaaagtctgtagtcttaaaactctaaaacagttgtactgcttccaagcagcagtatttatagtaacgtaagctattaatgctaactcttgcatgtcaagaaacattagtcttaggaattcttcaaaaaatggcatcccaatgaaaataaatttgatgactata

SEQ ID NO: 463 - DNA, 2918 bp, Homo sapiens
cgaggttagggcccgcgttgcgacgtggtgcagcgcatattttcacaagtgggtctcccttgtccgggactatggccaccgactcgtgggccctggcggtggacgagcaggaagcggctgtcaagtcgatgaccaatttgcagatcaaggaagagaaagtcaaagcagataccaatggtattatcaaaaccagtaccactgccgagaaaacagatgaagaggagaaagaggacagagctgcccagtccttactcaacaagctgatcagaagcaaccttgttgataacacaaaccaagtggaagtcctgcaacgggatccaaactcccctctgtactcggtgaagtcgtttgaagagcttcggctgaaaccacagcttctccagggagtctatgccatgggcttcaatcgaccctccaagatacaagagaacgcattacccatgatgcttgctgaacccccacagaatctgattgcccagtctcagtctggcactggtaaaacagctgcctttgtcttagccatgctcagccgagtggagccatcagacagatacccccagtgtctgtgcctctccccaacatatgagctggcgcttcaaacaggaaaagtgattgagcagatgggcaaattttacccagaactgaagcttgcctatgccgttcgaggcaataaattggaaagaggccagaagatcagtgagcagattgtcattggcacccctgggaccgtgctggactggtgctccaagctcaagttcattgatcccaagaaaatcaaggtgtttgttctggatgaggctgatgtcatgatagccactcagggccaccaagatcagagcatccgcatccagaggatgctgcccaggaactgccagatgctgcttttctccgccacctttgaagactctgtgtggaagtttgcccagaaagtggtcccagacccaaatgttatcaaactgaagcgtgaggaagagaccctggataccatcaagcagtactatgtcctgtgcagcagcagagacgagaagttccaggccttgtgtaacctctacggggccatcaccattgctcaagccatgatcttctgccatactcgcaaaacagctagttggctggcagcagagctctcaaaagaaggccaccaggtggctctgctgagtggggagatgatggtggagcagagggctgcggtgattgagcgcttccgagagggcaaagagaaggttttggtgaccaccaacgtgtgtgcccgcggcattgatgttgaacaagtgtctgtcgtcatcaactttgatcttcccgtggacaaggacgggaatcctgacaatgagacctacctgcaccggatcgggcgcacgggccgctttggcaagaggggcctggcagtgaacatggtggacagcaagcacagcatgaacatcctgaacagaatccaggagcattttaataagaagatagaaagattggacacagatgatttggacgagattgagaaaatagccaactgagaagctccaccagccactgatgccagccctggcactgcccctgcacaggagacaagtgcatttagggcacaggccccgacatcaccccaaggacaacggcagaagtagagagaaactacctacctcacttcaaattatgtttggacttgacaaaaataggtgcaaatgatggggggcaatagaagaaaaaatttgcattttggaaaattgggtcctttccccacttttttaaagccacattcccccatctttataataatctggtcacagtggtagtcgctggccccaggaccccctcctgattttggctaggcatcgtggaaccagctccagcccctgaagaaacgatagatgtgcaggttgtgcggaagaggctgagtggaaaatggtgtgagccccaccgctgtgcatcgaatgagggaagtggcagcagagaggccagagctgccccctctctgtctcttcaatggacccttcacaagtgtttctcctgcccttggggctgtcttccttctcctgaaatccagagactttcttgctcatcccttctccctttcacttctgttctctgctgcagaaagcagacttgcatatccctgatgagcagctcggctacttttgtaaacttcagatttggagagaaacacgaaagtctgaatcctgaccccttgagagagagtgatctggcgagggccgatgaaggggctgggcctggtcttgccttctcttctctcggttgctccctctgcctaggcccctggtactcagtcacggcagccaggagaccccaggtgagtttctgagcgcatacgtagttggttcttacccccaggtgtcacacggggccgagagctgagcaagaatttggaatggaagttatgaccaagggaattatgctgttcatttataatagtggacattatggagagctctgattcctacataatatgaataaggatggataggccgggcgtggtggctcatgcctataatcccagcacgttgggaggctgaggcgggcggatcggttgagctcaggcgttcgggaccagcctggccaacatgatgaaaccccgtctctaccaaaaatagaaaaaaatatagccgggcctggtggcgcacgcctgtagtcccagctactcgggaggctgaggtaggaggatcgcttgagcctgggtagaggctgctgtgagctgaaatggcgccactgcactccagcctgggtaacagagcgagaccccgactcaataaataaataaggatggataaattgtagcgtatgcaccattcattatgctaagacattttaaagtaattatgagaaacgctctactaatgatttgtttttatttgtatttttctgcttattagacaaatatatactcattttaaaaaaaaaaaaaaaaaaaa

SEQ ID NO: 464 - DNA, 3880 bp, Homo sapiens
gccgcggctcatgcgcggtgcacagaggcttgtttcacatctgtaacaacaggaggaggcccagcctcgtgatgaggaatagcaaggagagaattcagctccagttcaaaagcctacaaaatctgagactgtcattgcttttataaggattccagctttccctcctggccagaaatgttcagcctggactcattcagaaaagatcgggcccagcacaggcagcgtcagtgcaaacttcccccaccccgccttccacccatgtgtgtcaaccctaccccaggagggaccatctctcgaggctgaacgttaacatttccaacatggcagcttctagggacctattaaaagagttcccacagcccaaaaatcttctcaacagtgtgattggaagagccctcggcatctcacatgcaaaagacaaactagtctacgtgcacacaaatggaccgaagaaaaagaaagtcacactgcacataaaatggcccaagagcgtggaggtagaaggctatggcagcaagaagatcgatgctgagcggcaggctgcagctgcagcctgccagctgttcaagggttggggtctgctaggtccccggaatgagttgtttgacgcagccaaataccgagtgctagctgatcgctttggctcccctgccgacagctggtggcgtccggaacccaccatgccccctacttcctggcggcagctgaatccagagagtattcgaccagggggacctgggggcctatcccgctctttaggccgggaagaagaggaggacgaggaggaagagctagaagaagggaccatagatgttaccgacttcttgtccatgacccagcaggattcccacgctccactcagggactcaagggggagttcctttgagatgacagatgacgacagtgccattagggctctgacccagtttccacttcccaagaaccttctggccaaggtgattcagattgcaacgtcatcctccacagctaagaacctcatgcagttccatactgtgggcaccaagaccaagctgtctacactcaccctgctctggccctgccccatgacctttgttgccaaagggcgccgcaaagcagaggctgagaataaggcggcagccttggcctgcaagaaactgaagagcctgggcctggtggacaggaacaacgaaccgcttacacacgccatgtataacctggcctctttgcgtgagctgggtgagacccagcgccgaccatgcaccatccaggtgcccgagcccatcctccgcaagatagagaccttcctgaaccattaccctgtggagagttcatggatcgccccagaactccggctgcagagtgatgacatcttgcccttgggcaaggactcagggcctctgagtgaccctatcacaggcaagccctatgtgcccctgttggaagcagaggaggtacgtctcagccagagtctgctagaactgtggcggcggcgagggccggtctggcaggaggccccccagctacctgtggacccacatcgggacaccatcctcaacgccattgagcagcacccggtggtggtcatctctggggacacgggctgtgggaagaccacgcgcatcccccagctgttgctggagcgctatgtgaccgagggccgaggtgcccgctgcaatgttatcatcacccaacctcgccgcatctctgctgtgtctgtggcacagcgggtcagccacgaactgggcccctccctgcgccggaatgtgggcttccaggtgcggttggaaagtaagcccccatcccgaggcggggccctgctcttctgcactgtgggtatcctgctgcgtaagctgcagagcaaccccagcctggagggcgtgagccacgtcatcgtggatgaggtgcatgagcgggacgtgaacacagactttctgctgatcctgctcaagggcctgcagcggctcaacccggccctgcggctggtgctcatgagtgccacaggggacaatgagcgcttctcccgatactttggtggctgccccgtcatcaaggtgcctggcttcatgtacccagtcaaggagcactacctagaggacatcctggccaagttgggcaagcaccagtacctgcaccggcaccggcaccatgagtctgaggatgaatgcgcactcgatttggaccttgtgactgatctggttctgcacatcgatgctcgcggggaaccaggtgggatcctgtgcttcctgcctgggtggcaggagatcaaaggagtgcagcagcgcctccaggaggccctgggcatgcacgagagcaagtacctcatcctgccagtgcactccaacatccccatgatggatcagaaggccatattccagcagcctccagttggggtgcgcaagattgtcttggccaccaacattgctgagacttccatcacaatcaatgacatcgtgcatgtggtggacagtgggctgcacaaggaagaacgctatgacctgaagaccaaggtgtcctgcctggagacagtgtgggtatcaagagccaatgtgatccagcgccggggccgggcgggccgctgccagtccggctttgcctaccacttgttccctcgaagccggctggagaaaatggtccctttccaagtgccagagatcctgcgcacacctcttgagaacctggtgctgcaagcgaaaatccacatgcctgagaagacggcggtggagttcctgtccaaggctgtggacagtccaaacatcaaggcagtggacgaggctgtgatcttgctccaggagatcggggtgctggaccagcgggagtacctgactaccctggggcagcgcctggctcacatctccaccgacccccggttggccaaggccattgtgttggctgccatcttccgttgcctgcacccactactggtggtcgtttcctgcctcacccgggaccccttcagcagcagcctacagaaccgggcagaggtggacaaggtgaaagcactgttgagccatgacagcggcagtgaccacctggcctttgtgcgggctgtcgccggctgggaggaggtgctgcgttggcaggaccgcagctcccgggagaattacctggaggaaaacctgctgtacgcacccagcctgcgcttcatccacggactcatcaagcagttctcagagaacatttatgaggccttcctggtggggaagccctcggactgcaccctggcctccgcccagtgcaacgagtacagtgaggaggaggagctggtgaagggcgtgctgatggccggcctctaccccaacctcatccaggtgaggcagggcaaggtcacccggcaggggaagttcaagcccaacagcgtcacatataggaccaaatcaggcaacatcctgctgcacaagtcgaccattaacagggaggccacacggttacggagccgatggctgacgtatttcatggcagtcaagtccaatggcagcgtcttcgtccgggactcctctcaggtgcacccgctagctgtgctgctgctgaccgacggggacgtgcacatccgtgatgacgggcgccgggccaccatctcactgagcgacagtgacctgctgcggctggagggtgactcgcgtaccgtgcggctgctgaaggagctgcggcgggccctgggccgcatggtggagcggagcctgcgcagcgagctggctgcacttccccccagcgtacaggaggagcacgggcagctgcttgcgctactggcagagctgctgcgaggaccctgtggcagctttgatgtgcgcaagacagctgacgactgagccctgcttctgctggggctgtgtacagagtgcaaatgtttatttaaaataaagttctatttatcccttgtgaaaaaaaaaaaaaaaaaaaa

SEQ ID NO: 465 - DNA, 3851 bp, Homo sapiens
gccgcggctcatgcgcggtgcacagaggcttgtttcacatctgtaacaacaggaggaggcccagcctcgtgatgaggaatagcaaggagagaattcagctccagttcaaaagcctacaaaatctgagactgtcattgcttttataaggattccagctttccctcctggccagaaatgttcagcctggactcattcagaaaagatcgggcccagcacaggcagcgtcagtgcaaacttcccccaccccgccttccacccatgtgtgtcaaccctaccccaggagggaccatctctcgagcttctagggacctattaaaagagttcccacagcccaaaaatcttctcaacagtgtgattggaagagccctcggcatctcacatgcaaaagacaaactagtctacgtgcacacaaatggaccgaagaaaaagaaagtcacactgcacataaaatggcccaagagcgtggaggtagaaggctatggcagcaagaagatcgatgctgagcggcaggctgcagctgcagcctgccagctgttcaagggttggggtctgctaggtccccggaatgagttgtttgacgcagccaaataccgagtgctagctgatcgctttggctcccctgccgacagctggtggcgtccggaacccaccatgccccctacttcctggcggcagctgaatccagagagtattcgaccagggggacctgggggcctatcccgctctttaggccgggaagaagaggaggacgaggaggaagagctagaagaagggaccatagatgttaccgacttcttgtccatgacccagcaggattcccacgctccactcagggactcaagggggagttcctttgagatgacagatgacgacagtgccattagggctctgacccagtttccacttcccaagaaccttctggccaaggtgattcagattgcaacgtcatcctccacagctaagaacctcatgcagttccatactgtgggcaccaagaccaagctgtctacactcaccctgctctggccctgccccatgacctttgttgccaaagggcgccgcaaagcagaggctgagaataaggcggcagccttggcctgcaagaaactgaagagcctgggcctggtggacaggaacaacgaaccgcttacacacgccatgtataacctggcctctttgcgtgagctgggtgagacccagcgccgaccatgcaccatccaggtgcccgagcccatcctccgcaagatagagaccttcctgaaccattaccctgtggagagttcatggatcgccccagaactccggctgcagagtgatgacatcttgcccttgggcaaggactcagggcctctgagtgaccctatcacaggcaagccctatgtgcccctgttggaagcagaggaggtacgtctcagccagagtctgctagaactgtggcggcggcgagggccggtctggcaggaggccccccagctacctgtggacccacatcgggacaccatcctcaacgccattgagcagcacccggtggtggtcatctctggggacacgggctgtgggaagaccacgcgcatcccccagctgttgctggagcgctatgtgaccgagggccgaggtgcccgctgcaatgttatcatcacccaacctcgccgcatctctgctgtgtctgtggcacagcgggtcagccacgaactgggcccctccctgcgccggaatgtgggcttccaggtgcggttggaaagtaagcccccatcccgaggcggggccctgctcttctgcactgtgggtatcctgctgcgtaagctgcagagcaaccccagcctggagggcgtgagccacgtcatcgtggatgaggtgcatgagcgggacgtgaacacagactttctgctgatcctgctcaagggcctgcagcggctcaacccggccctgcggctggtgctcatgagtgccacaggggacaatgagcgcttctcccgatactttggtggctgccccgtcatcaaggtgcctggcttcatgtacccagtcaaggagcactacctagaggacatcctggccaagttgggcaagcaccagtacctgcaccggcaccggcaccatgagtctgaggatgaatgcgcactcgatttggaccttgtgactgatctggttctgcacatcgatgctcgcggggaaccaggtgggatcctgtgcttcctgcctgggtggcaggagatcaaaggagtgcagcagcgcctccaggaggccctgggcatgcacgagagcaagtacctcatcctgccagtgcactccaacatccccatgatggatcagaaggccatattccagcagcctccagttggggtgcgcaagattgtcttggccaccaacattgctgagacttccatcacaatcaatgacatcgtgcatgtggtggacagtgggctgcacaaggaagaacgctatgacctgaagaccaaggtgtcctgcctggagacagtgtgggtatcaagagccaatgtgatccagcgccggggccgggcgggccgctgccagtccggctttgcctaccacttgttccctcgaagccggctggagaaaatggtccctttccaagtgccagagatcctgcgcacacctcttgagaacctggtgctgcaagcgaaaatccacatgcctgagaagacggcggtggagttcctgtccaaggctgtggacagtccaaacatcaaggcagtggacgaggctgtgatcttgctccaggagatcggggtgctggaccagcgggagtacctgactaccctggggcagcgcctggctcacatctccaccgacccccggttggccaaggccattgtgttggctgccatcttccgttgcctgcacccactactggtggtcgtttcctgcctcacccgggaccccttcagcagcagcctacagaaccgggcagaggtggacaaggtgaaagcactgttgagccatgacagcggcagtgaccacctggcctttgtgcgggctgtcgccggctgggaggaggtgctgcgttggcaggaccgcagctcccgggagaattacctggaggaaaacctgctgtacgcacccagcctgcgcttcatccacggactcatcaagcagttctcagagaacatttatgaggccttcctggtggggaagccctcggactgcaccctggcctccgcccagtgcaacgagtacagtgaggaggaggagctggtgaagggcgtgctgatggccggcctctaccccaacctcatccaggtgaggcagggcaaggtcacccggcaggggaagttcaagcccaacagcgtcacatataggaccaaatcaggcaacatcctgctgcacaagtcgaccattaacagggaggccacacggttacggagccgatggctgacgtatttcatggcagtcaagtccaatggcagcgtcttcgtccgggactcctctcaggtgcacccgctagctgtgctgctgctgaccgacggggacgtgcacatccgtgatgacgggcgccgggccaccatctcactgagcgacagtgacctgctgcggctggagggtgactcgcgtaccgtgcggctgctgaaggagctgcggcgggccctgggccgcatggtggagcggagcctgcgcagcgagctggctgcacttccccccagcgtacaggaggagcacgggcagctgcttgcgctactggcagagctgctgcgaggaccctgtggcagctttgatgtgcgcaagacagctgacgactgagccctgcttctgctggggctgtgtacagagtgcaaatgtttatttaaaataaagttctatttatcccttgtgaaaaaaaaaaaaaaaaaaaa

SEQ ID NO: 466 - DNA, 3285 bp, Homo sapiens
aaaaaggacagcgagcggggagccccgaggacccccttttccctgcccagggattgagctccagagcctgttagggagctacccagacaggctttagttcctaaagtgctgaggaaacgcacggggcggtaaaggggaggctcgtcggtgagatggcgccggatctcgcttctcagaggcattcagagagcttccccagcgtgaactctcggccgaatgtaattttgccaggccgcgagggacgcagagaggggctgccaccaggcgggggcacgcgcggtagtcttgtccctacccgcccggtgccgccgtccccggctcccctcgggacgagtccgtacagctggagccgttccggacccggaaggggcggtggcgcagggtcctcgcgcgtcccacgtggggtcccgggcccagcagtctgcgcaccgggctcgctgctgcaccacgcgtcacccacgcagaccatggcagccgccgacggttcgctcttcgacaaccccaggacgttctccagacgtcccccagcccaggcgagtcggcaagcaaaggctacgaaaagaaaataccaagcgtccagtgaggctcccccagcgaaacggaggaacgaaacttcatttctcccagccaagaaaactagtgttaaagaaactcagaggacttttaaggggaacgcacaaaaaatgttttctccaaagaagcattcggttagcacaagtgatagaaaccaggaggagagacagtgcattaagacttcatcactgtttaaaaacaaccctgacattccagaactccacagacctgtggtaaagcaggtgcaagaaaaagtgtttacttcagctgcttttcatgagctgggcctccacccacatttaatttccacaataaatacggtcttaaaaatgtctagtatgaccagtgttcagaagcaaagtattcctgtgttgctggaaggcagagatgctctcgtgagatcccagacgggctcaggtaaaactcttgcctattgcatccctgtggtccagtcccttcaagcaatggagtcaaaaatacagcgcagtgatggcccctatgccctggtgctcgtgccaacgagagagctagctctacaaagctttgacactgtccagaaactgcttaagcctttcacctggattgtgcctggagtgttaatgggaggagagaagagaaaatcagaaaaggccagactccgcaaaggaataaatatccttatctcaactcctggacgcctggtggatcatataaaatccacaaagaacattcattttagtcggctgcggtggttggtgtttgatgaagcagacagaatcttggatttgggttttgaaaaggacatcacagtgatacttaatgctgtaaatgctgaatgccaaaaacgacagaatgtcttgctatcagcgacactcacagaaggtgtaacgcggctagctgatatcagtttgcatgatccagtcagtatttctgtcctggacaagagccatgaccagttgaacccaaaggacaaagcggtccaggaggtctgtcctccaccagctggcgacaagctggacagctttgcaataccagagagtctcaagcagcatgtgactgtggttcccagcaaactgaggcttgtctgcctagcggccttcatccttcagaaatgcaagtttgaggaagaccagaagatggttgtctttttctcaagttgcgagctggtggagttccactacagcctcttcctacagaccctgctgagcagctcaggggcgccggcatcagggcagttgccatctgcctccatgcgattaaaattcctacggctgcatggcggcatggagcaggaggaaagaacagcagtgtttcaggaattttcacattccagaagaggcgtccttctttgcacggatgttgcagctcggggcttagatctccctcaagtcacgtggattgttcagtacaacgctccatcttcacctgcagaatacatccaccggattggaagaaccgcccggattggctgccatgggagcagcctgctcattttggctccttcggaggcagaatatgtcaactcgttggcttctcacaaaatcaacgtttctgagattaagatggaagatattttgtgtgttctgacaagagatgattgttttaaagggaaacgatggggagcccagaaatcccatgctgttggcccccaggaaatccgagagcgagccacagtcttgcagacggtatttgaagattacgtgcactccagtgagaggagggtctcctgggcaaagaaagctctgcagtccttcatccaagcctacgccacctaccccagggagctgaagcacatcttccacgtccgatccctccaccttgggcatgtggcgaagagcttcggactaagagatgcccccaggaatcttagtgccttgactagaaagaagaggaaagcacacgtgaaaaggcctgaccttcataagaagacccagagtaaacacagcctcgctgaaatcctacgttcggaatactcaagcggcatggaggccgacatcgccaaggtcaaaaagcaaaacgcacctggagagcctggtggccggcccctgcagcacagtctgcagccgacaccctgctttggccgtgggaaaacattaaaatggagaaaaacccaaaaaggtgtacagcgggacagcaagacttcccagaaagtttaaaatctctctgggtcttcgagtggaacctggaagccccgggtggcagtggattgatgtccagttcttgtcagaggaggcttgtgaaaaataactgcgcctttgcctgaataccacgtccccaagaatcagaggggccacagcccttctcctccatgggaggccctggagcctgatagaaatcagtggtgtggggcactgtagagactagccagctcccgacggaaggggtctgtgtcttgtattgatcccatcagtgcccggcactcccttcacccaggtgctgacgtgccggggttgagctggcaccccgggatgtgatgtaagaacgccctgcgcgtcagcctggaacgggcttgattgctgcccttaactgtgttctgaagtttcacagcttggcttcagcctatcagcgcatacattggcatgaattttgtgaattagggtgttaaaaactggaattgaatttgtacaaaaagagaatatatttatcactaattattttcttaatgtaggaatgtaccgttaaaaaggaccaaaagtttttggtctgggtcaaaaaatacgaatgtgttctcag

SEQ ID NO: 467 - DNA, 2408 bp, Homo sapiens
aaaaaggacagcgagcggggagccccgaggacccccttttccctgcccagggattgagctccagagcctgttagggagctacccagacaggctttagttcctaaagtgctgaggaaacgcacggggcggtaaaggggaggctcgtcggtgagatggcgccggatctcgcttctcagaggcattcagagagcttccccagcgtgaactctcggccgaatgtaattttgccaggccgcgagggacgcagagaggggctgccaccaggcgggggcacgcgcggtagtcttgtccctacccgcccggtgccgccgtccccggctcccctcgggacgagtccgtacagctggagccgttccggacccggaaggggcggtggcgcagggtcctcgcgcgtcccacgtggggtcccgggcccagcagtctgcgcaccgggctcgctgctgcaccacgcgtcacccacgcagaccatggcagccgccgacggttcgctcttcgacaaccccaggacgttctccagacgtcccccagcccaggcgagtcggcaagcaaaggctacgaaaagaaaataccaagcgtccagtgaggctcccccagcgaaacggaggaacgaaacttcatttctcccagccaagaaaactagtgttaaagaaactcagaggacttttaaggggaacgcacaaaaaatgttttctccaaagaagcattcggttagcacaagtgatagaaaccaggaggagagacagtgcattaagacttcatcactgtttaaaaacaaccctgacattccagaactccacagacctgtggtaaagcaggtgcaagaaaaagtgtttacttcagctgcttttcatgagctgggcctccacccacatttaatttccacaataaatacggtcttaaaaatgtctagtatgaccagtgttcagaagcaaagtattcctgtgttgctggaaggcagagatgctctcgtgagatcccagacgggctcaggtaaaactcttgcctattgcatccctgtggtccagtcccttcaagcaatggagtcaaaaatacagcgcagtgatggcccctatgccctggtgctcgtgccaacgagagagctagctctacaaagctttgacactgtccagaaactgcttaagcctttcacctggattgtgcctggagtgttaatgggaggagagaagagaaaatcagaaaaggccagactccgcaaaggaataaatatccttatctcaactcctggacgcctggtggatcatataaaatccacaaagaacattcattttagtcggctgcggtggttggtgtttgatgaagcagacagaatcttggatttgggttttgaaaaggacatcacagtgatacttaatgctgtaaatgctgaatgccaaaaacgacagaatgtcttgctatcagcgacactcacagaaggtgtaacgcggctagctgatatcagtttgcatgatccagtcagtatttctgtcctggacaagagccatgaccagttgaacccaaaggacaaagcggtccaggaggtctgtcctccaccagctggcgacaagctggacagctttgcaataccagagagtctcaagcagcatgtgactgtggttcccagcaaactgaggcttgtctgcctagcggccttcatccttcagaaatgcaagtttgaggaagaccagaagatggttgtctttttctcaagttgcgagctggtggagttccactacagcctcttcctacagaccctgctgagcagctcaggggcgccggcatcagggcagttgccatctgcctccatgcgattaaaattcctacggctgcatggcggcatggagcaggaggaaagaacagcagtgtttcaggaattttcacattccagaagaggcgtccttctttgcacgtgaagaactcaccctaagccagaggaaaggaaccttgcttttaataccatcattatgttgacgagttgataagaagtaccaccgaatggccggaaaatggagtttctaagccacctgattttaaggctgacattaggttttctgttggtctccggtggctgtccttgattgtccctggatggagtgcagtcacctttttcccagaaaggaaagatacctgcagcccgccctgggcgccaactgtcccttggcatcctccttggctgtccggcgcgtgcatttctttttcagaagatgcacctaaatcacctgtgctgctttcctccaccttctccgtatttttttccgcttgaagcatactgttctgtctgtgcagttcttaatttcctctcctcctggggaatttccaccgtgccaggaggctaggagacaaaggagatacggctgtgaagagtcacaatgtcagttctgtgtcccaaataaatgtagactttcgtgctt

SEQ ID NO: 468 - DNA, 2118 bp, Homo sapiens
cgcgcatgcgtgcagcaaagaatggaggagtcggaacccgaacggaagcgggctcgcaccgacgaggtgcctgccggaggaagccgctccgaggcggaagatgaggacgacgaggactacgtgccctatgtgccgttacggcagcgccggcagctactgctccagaagctgctgcagcgaagacgcaagggagctgcggaggaagagcagcaggacagcggtagtgaaccccggggagatgaggacgacatcccgctaggccctcagtccaacgtcagcctcctggatcagcaccagcaccttaaagagaaggctgaagcgcgcaaagagtctgccaaggagaagcagctgaaggaagaagagaagatcctggagagtgttgccgagggccgagcattgatgtcagtgaaggagatggctaagggcattacgtatgatgaccccatcaaaaccagctggactccaccccgttatgttctgagcatgtctgaagagcgacatgagcgcgtgcggaagaaataccacatcctggtggagggagacggtatcccaccacccatcaagagcttcaaggaaatgaagtttcctgcagccatcctgagaggcctgaagaagaaaggcattcaccacccaacacccattcagatccagggcatccccaccattctatctggccgtgacatgataggcatcgctttcacgggttcaggcaagacactggtgttcacgttgcccgtcatcatgttctgcctggaacaagagaagaggttacccttctcaaagcgcgaggggccctatggactcatcatctgcccctcgcgggagctggcccggcagacccatggcatcctggagtactactgccgcctgctgcaggaggacagctcaccactcctgcgctgcgccctctgcattgggggcatgtccgtgaaagagcagatggagaccatccgacacggtgtacacatgatggtggccaccccggggcgcctcatggatttgctgcagaagaagatggtcagcctagacatctgtcgctacctggccctggacgaggctgaccgcatgatcgacatgggcttcgagggtgacatccgtaccatcttctcctacttcaagggccagcgacagaccctgctcttcagtgccaccatgccgaagaagattcagaactttgctaagagtgcccttgtaaagcctgtgaccatcaatgtggggcgcgctggggctgccagcctggatgtcatccaggaggtagaatatgtgaaggaggaggccaagatggtgtacctgctcgagtgcctgcagaagacacccccgcctgtactcatctttgcagagaagaaggcagacgtggacgccatccacgagtacctgctgctcaagggggttgaggccgtagccatccatgggggcaaagaccaggaggaacggactaaggccatcgaggcattccgggagggcaagaaggatgtcctagtagccacagacgttgcctccaagggcctggacttccctgccatccagcacgtcatcaattatgacatgccagaggagattgagaactatgtacaccggattggccgcaccgggcgctcgggaaacacaggcatcgccactaccttcatcaacaaagcgtgtgatgagtcagtgctgatggacctcaaagcgctgctgctagaagccaagcagaaggtgccgcccgtgctgcaggtgctgcattgcggggatgagtccatgctggacattggaggagagcgcggctgtgccttctgcgggggcctgggtcatcggatcactgactgccccaaactcgaggctatgcagaccaagcaggtcagcaacatcggtcgcaaggactacctggcccacagctccatggacttctgagccgacagtcttcccttctctccaagaggcctcagtccccaagactgccaccagtctacacatacagcagccccctggacagaatcagcatttcagctcagctggcctggaatgggccaggctggtcctggctgcctgttccctgtgctcttcagaattactgtttttgtttccttttaccccagctgccattaaagcccaaacctctagcccaaaaaaaaaaaaaaa

SEQ ID NO: 469 - DNA, 1702 bp, Homo sapiens
tcggcagcggcacagcgaggtcggcagcggcacagcgaggtcggcagcggcacagcgaggtcggcagcggcacagcgaggtcggcagcggcagcgaggtcggcagcggcacagcgaggtcggcagcggcagcgaggtcggcagcggcgcgcgctgtgctcttccgcggactctgaatcatggcgaccacggccacgatggcgacctcgggctcggcgcgaaagcggctgctcaaagaggaagacatgactaaagtggaattcgagaccagcgaggaggtggatgtgacccccacgttcgacaccatgggcctgcgggaggacctgctgcggggcatctacgcttacggttttgaaaaaccatcagcaatccagcaacgagcaatcaagcagatcatcaaagggagagatgtcatcgcacagtctcagtccggcacaggaaaaacagccaccttcagtatctcagtcctccagtgtttggatattcaggttcgtgaaactcaagctttgatcttggctcccacaagagagttggctgtgcagatccagaaggggctgcttgctctcggtgactacatgaatgtccagtgccatgcctgcattggaggcaccaatgttggcgaggacatcaggaagctggattacggacagcatgttgtcgcgggcactccagggcgtgtttttgatatgattcgtcgcagaagcctaaggacacgtgctatcaaaatgttggttttggatgaagctgatgaaatgttgaataaaggtttcaaagagcagatttacgatgtatacaggtacctgcctccagccacacaggtggttctcatcagtgccacgctgccacacgagattctggagatgaccaacaagttcatgaccgacccaatccgcatcttggtgaaacgtgatgaattgactctggaaggcatcaagcaatttttcgtggcagtggagagggaagagtggaaatttgacactctgtgtgacctctacgacacactgaccatcactcaggcggtcatcttctgcaacaccaaaagaaaggtggactggctgacggagaaaatgagggaagccaacttcactgtatcctcaatgcatggagacatgccccagaaagagcgggagtccatcatgaaggagttccggtcgggcgccagccgagtgcttatttctacagatgtctgggccagggggttggatgtccctcaggtgtccctcatcattaactatgatctccctaataacagagaattgtacatacacagaattgggagatcaggtcgatacggccggaagggtgtggccattaactttgtaaagaatgacgacatccgcatcctcagagatatcgagcagtactattccactcagattgatgagatgccgatgaacgttgctgatcttatctgaagcagcagatcagtgggatgagggagactgttcacctgctgtgtactcctgtttggaagtatttagatccagattctacttaatggggtttatatggactttcttctcataaatggcctgccgtctcccttcctttgaagaggatatggggattctgctctcttttcttatttacatgtaaataatacattgttctaagtctttttcattaaaaatttaaaacttttcccataaactctatacttctaaggtgccaccaccttctctagtaaaaaaaaaaaaaaaaaa

SEQ ID NO: 470 - DNA, 2325 bp, Homo sapiens
acctcattcatttctaccggtctctagtagtgcagcttcggctggtgtcatcggtgtccttcctccgctgccgcccccgcaaggcttcgccgtcatcgaggccatttccagcgacttgtcgcacgcttttctatatacttcgttccccgccaaccgcaaccattgacgccatgtcgggttattcgagtgaccgagaccgcggccgggaccgagggtttggtgcacctcgatttggaggaagtagggcagggcccttatctggaaagaagtttggaaaccctggggagaaattagttaaaaagaagtggaatcttgatgagctgcctaaatttgagaagaatttttatcaagagcaccctgatttggctaggcgcacagcacaagaggtggaaacatacagaagaagcaaggaaattacagttagaggtcacaactgcccgaagccagttctaaatttttatgaagccaatttccctgcaaatgtcatggatgttattgcaagacagaatttcactgaacccactgctattcaagctcagggatggccagttgctctaagtggattggatatggttggagtggcacagactggatctgggaaaacattgtcttatttgcttcctgccattgtccacatcaatcatcagccattcctagagagaggcgatgggcctatttgtttggtgctggcaccaactcgggaactggcccaacaggtgcagcaagtagctgctgaatattgtagagcatgtcgcttgaagtctacttgtatctacggtggtgctcctaagggaccacaaatacgtgatttggagagaggtgtggaaatctgtattgcaacacctggaagactgattgactttttagagtgtggaaaaaccaatctgagaagaacaacctaccttgtccttgatgaagcagatagaatgcttgatatgggctttgaaccccaaataaggaagattgtggatcaaataagacctgataggcaaactctaatgtggagtgcgacttggccaaaagaagtaagacagcttgctgaagatttcctgaaagactatattcatataaacattggtgcacttgaactgagtgcaaaccacaacattcttcagattgtggatgtgtgtcatgacgtagaaaaggatgaaaaacttattcgtctaatggaagagatcatgagtgagaaggagaataaaaccattgtttttgtggaaaccaaaagaagatgtgatgagcttaccagaaaaatgaggagagatgggtggcctgccatgggtatccatggtgacaagagtcaacaagagcgtgactgggttctaaatgaattcaaacatggaaaagctcctattctgattgctacagatgtggcctccagagggctagatgtggaagatgtgaaatttgtcatcaattatgactaccctaactcctcagaggattatattcatcgaattggaagaactgctcgcagtaccaaaacaggcacagcatacactttctttacacctaataacataaagcaagtgagcgaccttatctctgtgcttcgtgaagctaatcaagcaattaatcccaagttgcttcagttggtcgaagacagaggttcaggtcgttccaggggtagaggaggcatgaaggatgaccgtcgggacagatactctgcgggcaaaaggggtggatttaatacctttagagacagggaaaattatgacagaggttactctagcctgcttaaaagagattttggggcaaaaactcagaatggtgtttacagtgctgcaaattacaccaatgggagctttggaagtaattttgtgtctgctggtatacagaccagttttaggactggtaatccaacagggacttaccagaatggttatgatagcactcagcaatacggaagtaatgttccaaatatgcacaatggtatgaaccaacaggcatatgcatatcctgctactgcagctgcacctatgattggttatccaatgccaacaggatattcccaataagactttagaagtatatgtaaatgtctgtttttcataattgctctttatattgtgtgttatctgacaagatagttatttaagaaacatgggaattgcagaaatgactgcagtgcagcagtaattatggtgcactttttcgctatttaagttggatatttctctacattcctgaaacaatttttaggttttttttgtactagaaaatgcaggcagtgttttcacaaaagtaaatgtacagtgatttgaaatacaataatgaaggcaatgcatggccttccaataaaaaatatttgaagactgaaaaaaaaaa

SEQ ID NO: 471 - DNA, 2638 bp, Homo sapiens
accgacgcggcgaaggagcgcgccatggagcatgtgacagagggctcctgggagtcgctgcctgtgccgctgcacccgcaggtgctgggcgcgctgcgggagctgggcttcccgtacatgacgccggtgcagtccgcaaccatccctctgttcatgcgaaacaaagatgtcgctgcagaagcggtcacaggtagtggcaaaacactcgcttttgtcatccccatcctggaaattcttctgagaagagaagagaagttaaaaaagagtcaggttggagccataatcatcacccccactcgagagctggccattcaaatagacgaggtcctgtcgcatttcacgaagcacttccccgagttcagccagattctttggatcggaggcaggaatcctggagaagatgttgagaggtttaagcaacaaggtgggaacatcattgtggccactccaggccgcttggaggacatgttccggaggaaggccgaaggcttggatctggccagctgtgtgcgatccctggatgtcctggtgttggatgaggcagacagacttctggacatggggtttgaggcaagcatcaacaccattctggagtttttgccaaagcagaggagaacaggccttttctctgccactcagacgcaggaagtggagaacctggtgagagcgggcctccggaaccctgtccgggtctcagtgaaggagaagggcgtggcagccagcagtgcccagaagaccccctcccgcctggaaaactactacatggtatgcaaggcagatgagaaatttaatcagctggtccattttcttcgcaatcataagcaggagaaacacctggtcttcttcagcacctgtgcctgtgtggaatactatgggaaggctctggaagtgctggtgaagggcgtgaagattatgtgcattcacggaaagatgaaatataaacgcaataagatcttcatggagttccgcaaattgcaaagtgggattttagtgtgcactgatgtgatggcccggggaattgatattcctgaagtcaactgggttttgcagtatgaccctcccagcaatgcaagtgccttcgtgcatcgctgcggtcgcacagctcgcattggccacgggggcagcgctctggtgttcctcctgcccatggaagagtcatacatcaatttccttgcaattaaccaaaaatgccccctgcaggagatgaagccccagagaaacacagcggaccttctgccaaaactcaagtccatggccctggctgacagagctgtgtttgaaaagggcatgaaagcttttgtgtcatatgtccaagcttatgcaaagcatgaatgcaacctgattttcagattaaaggatcttgattttgccagccttgctcgaggttttgccctgctgaggatgcccaagatgccagaattgagaggaaagcagtttccagattttgtgcccgtggacgttaataccgacacgattccatttaaagataaaatcagagaaaagcagaggcagaaactcctggagcaacaaagaagagagaaaacagaaaatgaagggagaagaaaattcataaaaaataaagcttggtcaaagcagaaggccaaaaaagaaaagaagaaaaaaatgaatgagaaaaggaaaagggaagagggttctgatattgaagatgaggacatggaagaacttcttaatgacacaagactcttgaaaaaacttaagaaaggcaaaataactgaagaagaatttgagaagggcttgttgacaactggcaaaagaacaatcaagacagtggatttagggatctcagatttggaagatgactgctgattccagtgccacagatgaacccacaaggacatagctgttccctaacttggtggatggctccagtttgcttttaacgaaaatcacaacttcaggagacatctgaaaagaatgatgtctctgaaagctgtcctttcagatgagggagaaatgaaggatttcacacttcagaatattttactaaaaacattccagtcttggccgggtgcggtggctcctgcctataatcccagcactttgggaggctgaggcaggaggatcacttgagcccaggagttcaagaccagcctgggaacacagcgagaccctctcattaaaaacaacaaaacaaaacaattccagtcttggagtagtctaacagaagaaaatgtaaaattatttgagtgtaaataatagatgtcagtatttatcatgatgggtcacatatagacatatgtacatattatatatatatatatatatatatatatatatatatatatatatatataagctcttttttctgaggctattttatagttatttttaaacataaagatacagaagtcttcttgacttctgattttcaaaaccattcctcagtatcttcaggcatttgacctcctgaatgtgcttggccctgggcttcagttatcctttgatgtcctgcaggggtggctaatgtgctggggtttttctgtgttaatagtcacagtattgttttattggtgaatagctgaaaaacagagggattaagtcatattccgggaaagagaattatagtttttatgcctcctgttgaataaatggtgtcctgataaaaaaaaaaaaaaaa

SEQ ID NO: 472 - DNA, 2499 bp, Homo sapiens
taccacaaatttactggcttaaaacgacgcaagtctgtaggtcagaagtctgacacgggtcttaactggtgacccgagtcagatttgggacacaaagaacagaaaccaagctgtgcaggtttctgacaggcagtccggttagggagccctacagcaacccgccggtcctctctctcaggcagttgctgccatggctcattattccaaccggttctcctcagcccagtctatctcagtggctccattcatagggtgatgtgcccggcgggacactaaccctaaccaagcagagagacggtcatgcccgtcacgacctcggccctcgccccggccgaggcttctcctgcaggtcgcgagaatcaggtgcgtcagcggcgtccgggaacgccggaagagccagtggagcggctctgtagtccaaagtaccccgtcgaccccagcacggccgctccaccgcctcctactagacccagtcctagggactgcgcagtcgcagagctccgtccgagtaccggaagcctaggccgccagcacttccgggaagtgacttcgtctccgaagccgattggttgttgctttgctcccgctcgcgtcggtggcgtttttcctgcagcgcgtgcgtgctgcgctactgagcagcgccatggaggactctgaagcactgggcttcgaacacatgggcctcgatccccggctccttcaggctgtcaccgatctgggctggtcgcgacctacgctgatccaggagaaggccatcccactggccctagaagggaaggacctcctggctcgggcccgcacgggctccgggaagacggccgcttatgctattccgatgctgcagctgttgctccataggaaggcgacaggtccggtggtagaacaggcagtgagaggccttgttcttgttcctaccaaggagctggcacggcaagcacagtccatgattcagcagctggctacctactgtgctcgggatgtccgagtggccaatgtctcagctgctgaagactcagtctctcagagagctgtgctgatggagaagccagatgtggtagtagggaccccatctcgcatattaagccacttgcagcaagacagcctgaaacttcgtgactccctggagcttttggtggtggacgaagctgaccttcttttttcctttggctttgaagaagagctcaagagtctcctctgtcacttgccccggatttaccaggcttttctcatgtcagctacttttaacgaggacgtacaagcactcaaggagctgatattacataacccggttacccttaagttacaggagtcccagctgcctgggccagaccagttacagcagtttcaggtggtctgtgagactgaggaagacaaattcctcctgctgtatgccctgctcaagctgtcattgattcggggcaagtctctgctctttgtcaacactctagaacggagttaccggctacgcctgttcttggaacagttcagcatccccacctgtgtgctcaatggagagcttccactgcgctccaggtgccacatcatctcacagttcaaccaaggcttctacgactgtgtcatagcaactgatgctgaagtcctgggggccccagtcaagggcaagcgtcggggccgagggcccaaaggggacaaggcctctgatccggaagcaggtgtggcccggggcatagacttccaccatgtgtctgctgtgctcaactttgatcttcccccaacccctgaggcctacatccatcgagctggcaggacagcacgcgctaacaacccaggcatagtcttaacctttgtgcttcccacggagcagttccacttaggcaagattgaggagcttctcagtggagagaacaggggccccattctgctcccctaccagttccggatggaggagatcgagggcttccgctatcgctgcagggatgccatgcgctcagtgactaagcaggccattcgggaggcaagattgaaggagatcaaggaagagcttctgcattctgagaagcttaagacatactttgaagacaaccctagggacctccagctgctgcggcatgacctacctttgcaccccgcagtggtgaagccccacctgggccatgttcctgactacctggttcctcctgctctccgtggcctggtgcgccctcacaagaagcggaagaagctgtcttcctcttgtaggaaggccaagagagcaaagtcccagaacccactgcgcagcttcaagcacaaaggaaagaaattcagacccacagccaagccctcctgaggttgttgggcctctctggagctgagcacattgtggagcacaggcttacacccttcgtggacaggcgaggctctggtgcttactgcacagcctgaacagacagttctggggccggcagtgctgggccctttagctccttggcacttccaagctggcatcttgccccttgacaacagaataaaaattttagctgccccaaaaaaaaaaaaaaa

SEQ ID NO: 473 - DNA, 523 bp, Homo sapiens
caaatccatagggagctctgccttaccattgggttcctaattaactgagtgagtgggtgtgttctgcatggtgagaggcattggaatgatgcatcagaaaacatgtcataatgtcatcactgtaatatgacaagaattgcagctgtggctggaacctttataaagtgaccaagcacaccttttcatccagtctcagcgtggggtgaagcctagcagctatgaggatccattatcttctgtttgctttgctcttcctgtttttggtgcctgttccaggtcatggaggaatcataaacacattacagaaatattattgcagagtcagaggcggccggtgtgctgtgctcagctgccttccaaaggaggaacagatcggcaagtgctcgacgcgtggccgaaaatgctgccgaagaaagaaataaaaaccctgaaacatgacgagagtgttgtaaagtgtggaaatgccttcttaaagtttataaaagtaaaatcaaattacatttttttttcaaaaaaaaaaaaa

SEQ ID NO: 474 - DNA, 1681 bp, Homo sapiens
cacagccggccgacaccacaccagccggggagccgccgccgccgccgccacctctgagcagccggctgggagcgagagccgacagctagtctgcaagccaccgctgtcgccatggggagccgcgtctcgcgggaagacttcgagtgggtctacaccgaccagccgcacgccgaccggcgccgggagatcctggcaaagtatccagagataaagtccttgatgaaacctgatcccaatttgatatggattataattatgatggttctcacccagttgggtgcattttacatagtaaaagacttggactggaaatgggtcatatttggggcctatgcgtttggcagttgcattaaccactcaatgactctggctattcatgagattgcccacaatgctgcctttggcaactgcaaagcaatgtggaatcgctggtttggaatgtttgctaatcttcctattgggattccatattcaatttcctttaagaggtatcacatggatcatcatcggtaccttggagctgatggcgtcgatgtagatattcctaccgattttgagggctggttcttctgtaccgctttcagaaagtttatatgggttattcttcagcctctcttttatgcctttcgacctctgttcatcaaccccaaaccaattacgtatctggaagttatcaataccgtggcacaggtcacttttgacattttaatttattactttttgggaattaaatccttagtctacatgttggcagcatctttacttggcctgggtttgcacccaatttctggacattttatagctgagcattacatgttcttaaagggtcatgaaacttactcatattatgggcctctgaatttacttaccttcaatgtgggttatcataatgaacatcatgatttccccaacattcctggaaaaagtcttccactggtgaggaaaatagcagctgaatactatgacaacctccctcactacaattcctggataaaagtactgtatgattttgtgatggatgatacaataagtccctactcaagaatgaagaggcaccaaaaaggagagatggtgctggagtaaatatcattagtgccaaagggattcttctccaaaactttagatgataaaattagccgggcgtggcggcacatgcctgtaatcccagctacatgggaggctgaggtgggagaattgcttgaacccaggaggcggaggcagaggctgcagtgacccaagattgtgccactgcactccaccctgggcaacagagcaagaccccatctcaaaaataaataaatatatataaaaaataaaaagctatttctagtttatttcactataaagttttgctttattaaaaagctaataaacagctattaatcacagtgtattagtatttgttacatttttgtatttcactatctttatactatataatatggtaacttgggtaccgggggaactttaaaatttcatctcaaaaataatttttaaaaagcctgaggtatgatatagcataaaagattgagatgaaaatatatttccctgtaagctgaattactcatttaaaaattttaacttctatatgggacccgaattagacactgctgaatcctgtacagccttactcataaataaagtacttactgaatttccaccattcaaaaaaaaaaaaaaa

SEQ ID NO: 475 - DNA, 2484 bp, Homo sapiens
cgctggcgcggctgcggccgctgctgcctacgcgccatggagcatcgcatcgtggggcccgggccgtaccgagctaccaggctgtggaatgagaccgtggagctttttcgtgctaagatgccgttacggaaacatcgctgtcgtttcaagagctatgagcattgtttcacagcggccgaagctgtggattggctgcatgagctgctgaggtgcagtcaaaacttcggccctgaagtgacccgcaaacaaacggtccagctgctaaaaaaattcctgaagaatcacgttattgaagacatcaagggaaaatggggtgaggaagattttgaagacaatcgtcacttatacagatttcctccttcttcacccctgaaaccatatccaaagaagcccccaaaccaaaaggatgttattaaatttccagaatggaatgatctcccaccaggcacttcacaagagaacatcccagtgaggccagttgtgatgaattctgagatgtggtacaagcgtcacagtattgcaattggagaggtgccagcttgccgtcttgtccaccgcagacagctgacagaggccaatgtagaagagatatggaagtctatgacattatcatacttacagaaaattcttggcctggattccttagaagaagttttagacgtcaaacttgtcaattcgaagttcatcatccataatgtatatagtgttagcaagcagggagttgttattcttgatgacaagtcaaaagaacttcctcattgggtgctgtcagctatgaagtgtttggcaaattggcccaactgttctgatttgaagcagcctatgtacttgggatttgaaaaagatgtctttaaaaccatagctgattactatggtcacttgaaagagcctctacttacatttcatctttttgatgcttttgtcagtgtactgggtttgttacagaaggagaaagtggcagttgaagcatttcagatttgctgccttctcctacctcctgaaaataggagaaagttacagctattgatgatgatgatggcaaggatttgcttaaacaaagagatgccacccctgtgtgatggctttggtacccgaacactgatggttcagacattttcccgttgcatcttgtgttccaaggatgaagtggacttggatgagttattagctgctagattggtaacgtttctgatggacaattaccaggaaattctgaaactccctttggccttgcagacctctatagaggagcgtgtggctcatctacgaagagtccagataaaatacccaggagctgatatggatatcactttatctgctccatcattttgccgtcaaattagtccagaggaatttgaatatcaaagatcatatggctctcaggaacctctggcagccttgttggaggaagtcataacagatgccaaactctccaacaaagagaaaaagaagaaactgaagcagtttcagaaatcctatcctgaagtctatcaagaacgatttcctacaccagaaagtgcagcacttctgtttcctgaaaaacccaaaccgaaaccacagctgctaatgtgggcactaaagaagcctttccaaccatttcaaagaactagaagttttcgaatgtaataatacttccacagcaacaggtgctagagaccactgttgttgttttgagtgaatggtggttaggagaaagactttggtggtggaagaaagaaaagcataaaacaaagactactgaaatatagataaagattgccttagtttttaaaaatgtttggccattagtatttttataaaactcaatgctagttttaaagtgtataaattggttaaaatttatgagtcaaatatatagtgataatgttaacatgtttgtaattgctacagaatttaagggtatttttatctctgtgctttctttttcatggtgtttattaaataattgtgtatatacatcctagctactgatatctttattatagccttaagacttaattttaagtcttaaaaatagtgtgtatacttgaataagaaagacactgggtactgttactgtgatgctattgacttagtagccaattatcatttctcctgtataaattccagtttttattgctgcacataaattttttaatgtcttatattgtgatagctatgtcttttattgcagatttattggatgttatgacagattttactaaagctagtgtttttataacatatatattagttgatgtttacctataagtggagtagattttcatctgcctgcaatggtataatttcagtcttagctaaaaatggaaagttgaactggataaattctttgggtacccttagacctctgattctaagtcaaatgcaaatgggttaaataaaatgagactacttcctttataaatatattttcatccttttgaaagtaagtgaaatgtaaataaacttattttttttaaaaatgccaaaaaaaaaaaaaaaaaa

SEQ ID NO: 476 - DNA, 1381 bp, Homo sapiens
gcacaagccggccttgaaatcagagcctttccagcaactccgagagcgtgtgctcggcgaccgcgggcttggccagcggcgcgcgctcggcgccccggcgcccccagccccacgcgcgccgggcgggcgccatggaggagggctccagctcgcccgtgtcccccgtggacagcctgggcaccagcgaggaggagctcgagaggcagcccaagcgcttcggccggaagcggcgctacagcaagaagtcgagcgaagatggcagcccgaccccgggcaagcgcggcaagaagggcagccccagcgcgcagtccttcgaggagctgcagagccagcgcatcctggccaacgtgcgcgagcgccagcgcacccagtcgctcaacgaggccttcgcggcgctgcgcaagatcatccccacgctgccctctgacaagctgagcaagatccagacgctcaagctggccgccaggtacatagacttcctctaccaggtcctgcagagcgacgagatggacaataagatgaccagctgcagctacgtggcccacgagcgcctcagctacgccttctccgtgtggcgcatggagggcgcgtggtccatgtccgcctcccactagcgccgcgccacccacctccggaccggcgcgccagggctgtccgtcgcgtcggcggcgcaagtggaattgggatgcattcgagtctgtaacttctgaaacctgaacaacctcaggaggcccccacctctgccctccaccagcgtcgagagaagggacagcagtgacatcggacagaagacccgggctcccgtcctcccccaggacggtccccacataggaagggcactcccagccctcttgctggtgacattgtcatggtcatcttgtttctgtttggatttttcttctgggtcttatgtttggggggaggtttattctttctgaaaatgtctagattcaggaacacatttatgaggatttggattttgaatttgtatttccctctaagtgccttttttaatgtctatttttttaataaaacagaaatgcattcttgtacaattctgttgaaactggaccaaggctctcagaagaggacccccgagttccttcccctcccccgagcctctgcatgattgtttcaagtcagcctggaattcttactttcacgccgctattcttttcctttctccgtgattgcttggctagccattttaaaaaaaatattctctgttcagtgtatatgttgcttgtttgttttatttattgagatatttttacaagctaagtgactgcagtgtggctgtgtatcctgctccccacccaggaaaaataaagacgtccgcgcagccatggacaaaaaaaaaaaaaaaaaaaaaaaaaaaaaa

SEQ ID NO: 477 - DNA, 3926 bp, Homo sapiens
atgacaaaccaggaaaaatgggcccacctcagcccttcggaattttcccaacttcagaaatatgctgagtattctacaaagaaattaaaggatgttcttgaagaattccatggtaatggtgtgcttgcaaagtataatcctgaagggaaacaagacattcttaaccaaacaatagattttgaaggtttcaaactattcatgaagacattcctggaagccgagcttcctgatgatttcactgcacaccttttcatgtcatttagcaacaagtttcctcattctagtccaatggtaaaaagtaagcctgctctcctatcaggcggtctgagaatgaataaaggtgccatcacccctccccgaactacttctcctgcaaatacgtgttccccagaagtaatccatctgaaggacattgtctgttacctgtctctgcttgaaagaggaagacctgaggataagcttgagtttatgtttcgcctttatgacacggatgggaatggcttcctggacagctcggagctagaaaatatcatcagtcagatgatgcatgttgcagaataccttgagtgggatgtcactgaacttaatccaatcctccatgaaatgatggaagaaattgactatgatcatgatggaaccgtgtctctggaggaatggattcaaggaggaatgacaacgattccacttcttgtgctcctgggcttagaaaataacgtgaaggatgatggacagcacgtgtggcgactgaagcactttaacaaacctgcctattgcaacctttgcctgaacatgctgattggcgtggggaagcagggcctctgctgttccttctgcaagtacacagtccatgagcgctgtgtggctcgagcacctccctcttgcatcaagacctatgtgaagtccaaaaggaacactgatgtcatgcaccattactgggttgaaggtaactgcccaaccaagtgtgataagtgccacaaaactgttaaatgttaccagggcctgacaggactgcattgtgtttggtgtcagatcacactgcataataaatgtgcttctcatctaaaacctgaatgtgactgtggacctttgaaggaccatattttaccacccacaacaatctgtccagtggtactgcagactctgcccacttcaggagtttcagttcctgaggaaagacaatcaacagtgaaaaaggaaaagagtggttcccagcagccaaacaaagtgattgacaagaataaaatgcaaagagccaactctgttactgtagatggacaaggcctgcaggtcactcctgtgcctggtactcacccacttttagtttttgtgaaccccaaaagtggtggaaaacaaggagaacgaatttacagaaaattccagtatctattaaatcctcgtcaggtttacagtctttctggaaatggaccaatgccagggttaaactttttccgtgatgttcctgacttcagagtgttagcctgtggtggagatggaaccgtgggctgggttttggattgcatagaaaaggccaatgtaggcaagcatcctccagttgcgattctgcctcttgggactggcaatgatctagcaagatgcctgcgatggggaggaggttacgaaggtgagaatctgatgaaaattctaaaagacattgaaaacagcacagaaatcatgttggacaggtggaagtttgaagtcatacctaatgacaaagatgagaaaggagacccagtgccttacagtatcatcaataattacttttccattggcgtggatgcctccattgcacacagattccacatcatgagagaaaaacacccagagaaattcaacagtagaatgaagaacaaattttggtattttgagtttggcacatctgaaactttctcagccacctgcaagaagctacatgaatctgtagaaatagaatgtgatggagtacagatagatttaataaacatctctctggaaggaattgctattttgaatataccaagcatgcatggaggatccaatctttggggagagtctaagaaaagacgaagccatcgacgaatagagaaaaaagggtctgacaaaaggaccaccgtcacagatgccaaagagttgaagtttgcaagtcaagatctcagtgaccagctgctggaggtggtcggcttggaaggagccatggagatggggcaaatatacacaggcctgaaaagtgctggccggcggctggctcagtgctcctgcgtggtcatcaggacgagcaagtctctgccaatgcaaattgatggggagccatggatgcagaccccatgcacaataaaaattacacacaagaaccaagccccaatgctgatgggcccgcctccaaaaaccggtttattctgctccctcgtcaaaaggacaagaaaccgaagcaaggaataatcctgtgttgtttcactcttagaaattgaattagcataattgggccatggaacacatatgctggaaatctttgaaccatttcaagtctcctgctcatgcaaaatcatggaagtggtttaacagtttttgttactaagctaatgtaaaattcagctattagaaaatttattgtctcagtttttataggcatctttgcatgaagaaagcagaagtttacctgaagtgatactgcatatttttggtgcatgcattcccatagatttttacatctcccacccaactcttccccaatttccttttactaacctgtgagaaaaacccgtgaaacatgaaaaaggaaataccatgggaaacgtgattctcagtgtgattccaattattacgaagcactaatcagtaacgctacaatgatcataattgcagattgctatacgtttcccttttagaatcagtgtatcagtgacctatgacttgaggagaaacttttaattcgaagattttattaaatagttgactacaataccttgctatatatacatagtttttcttcaacatcttaactcttctgagtggaaataaaaatatcaggcataaggttttctcatgctgaaaaatagaacgcggtttttattttgcttagttttctttttaattccagaaataagtgaaaacatgttacttgacagtcaagtgtggtaatatggcaagccttgttcctttctgcatgagaatctaggagagaattcataaccacaccaataacgaaatagaagttttaaactatgtgcctaatcaatgtgtttcccaccaaagattcagaaaacaatgcttgagagaaatgggttaatgcataattaattaagcattgtggagcaaatttagggttcctgtgattaattttgtgatgactaaaatgctggaaagcaagtgagttgcccattaattatgattaaaattctcacctttcacagacagacaataagccagacaacacaatcaaagctcaatagatgatttcttgcttttttcagtcatttataaatataggtgtaatttttcatggatcagttaagtacacttgaaggaagtaaatgattgtatcagtttatttctagtataaatgggtacctgtaataatactgagctcttggaagcgaatcatgcatgcaattagctccctcctcctcacctactccactcccatctttatgacatttcaaatgtttatttggaaacaacagcctagatcactgttgaaggtgttcatggcatagttggagtctctgactgtttaaagaaatcacagaacagtacttttcttttagtgtttcattaagcctatgatgtaaaatgaaatgcttctgagcagtcttgtaatattgttcattcatattgacctgcatctcatcattgcatgttttatgttttcaaacatgccataaggaaaacgagtgcctgaactgcatgatttattagtttctctccactctgcattaaagtgctaatgattt

SEQ ID NO: 478 - DNA, 3172 bp, Homo sapiens
atgacaaaccaggaaaaatgggcccacctcagcccttcggaattttcccaacttcagaaatatgctgagtattctacaaagaaattaaaggatgttcttgaagaattccatggtaatggtgtgcttgcaaagtataatcctgaagggaaacaagacattcttaaccaaacaatagattttgaaggtttcaaactattcatgaagacattcctggaagccgagcttcctgatgatttcactgcacaccttttcatgtcatttagcaacaagtttcctcattctagtccaatggtaaaaagtaagcctgctctcctatcaggcggtctgagaatgaataaaggtgccatcacccctccccgaactacttctcctgcaaatacgtgttccccagaagtaatccatctgaaggacattgtctgttacctgtctctgcttgaaagaggaagacctgaggataagcttgagtttatgtttcgcctttatgacacggatgggaatggcttcctggacagctcggagctagaaaatatcatcagtcagatgatgcatgttgcagaataccttgagtgggatgtcactgaacttaatccaatcctccatgaaatgatggaagaaattgactatgatcatgatggaaccgtgtctctggaggaatggattcaaggaggaatgacaacgattccacttcttgtgctcctgggcttagaaaataacgtgaaggatgatggacagcacgtgtggcgactgaagcactttaacaaacctgcctattgcaacctttgcctgaacatgctgattggcgtggggaagcagggcctctgctgttccttctgcaagtacacagtccatgagcgctgtgtggctcgagcacctccctcttgcatcaagacctatgtgaagtccaaaaggaacactgatgtcatgcaccattactgggttgaaggtaactgcccaaccaagtgtgataagtgccacaaaactgttaaatgttaccagggcctgacaggactgcattgtgtttggtgtcagatcacactgcataataaatgtgcttctcatctaaaacctgaatgtgactgtggacctttgaaggaccatattttaccacccacaacaatctgtccagtggtactgcagactctgcccacttcaggagtttcagttcctgaggaaagacaatcaacagtgaaaaaggaaaagagtggttcccagcagccaaacaaagtgattgacaagaataaaatgcaaagagccaactctgttactgtagatggacaaggcctgcaggtcactcctgtgcctggtactcacccacttttagtttttgtgaaccccaaaagtggtggaaaacaaggagaacgaatttacagaaaattccagtatctattaaatcctcgtcaggtttacagtctttctggaaatggaccaatgccagggttaaactttttccgtgatgttcctgacttcagagtgttagcctgtggtggagatggaaccgtgggctgggttttggattgcatagaaaaggccaatgtaggcaagcatcctccagttgcgattctgcctcttgggactggcaatgatctagcaagatgcctgcgatggggaggaggttacgaaggtgagaatctgatgaaaattctaaaagacattgaaaacagcacagaaatcatgttggacaggtggaagtttgaagtcatacctaatgacaaagatgagaaaggagacccagtgccttacagtatcatcaataattacttttccattggcgtggatgcctccattgcacacagattccacatcatgagagaaaaacacccagagaaattcaacagtagaatgaagaacaaattttggtattttgagtttggcacatctgaaactttctcagccacctgcaagaagctacatgaatctgtagaaatagaatgtgatggagtacagatagatttaataaacatctctctggaaggaattgctattttgaatataccaagcatgcatggaggatccaatctttggggagagtctaagaaaagacgaagccatcgacgaatagagaaaaaagggtctgacaaaaggaccaccgtcacagatgccaaagagttgaagtttgcaagtcaagatctcagtgaccagctgctggaggtggtcggcttggaaggagccatggagatggggcaaatatacacaggcctgaaaagtgctggccggcggctggctcagtgctcctgcgtggtcatcaggacgagcaagtctctgccaatgcaaattgatggggagccatggatgcagaccccatgcacagtgagtacagagtagttgatatgctatgtcaatctcagttttgctttcctctttgactaaataaccacaataactgatttttttctttatttcttttcaacctatcagcaaatagtctttttgttgttgttgttatgtgtgtgtcagagccactacatttaggctgtagacattatatacccttggcaatgatttagctcttgaatgtttgtgctagcctaagtataaatagatcttttaaatagatcaattataaaccatagatcaattataaactatggagctaaacaaaatattaataaaagtttatctgaaacttttttgtttatttcagagcacattattagaatattatttgcgagaaatgcagacctaagcttatatgtgaacttatttctcagcttttctatgcctccatttggggatttgagggctttcttctccataagaaaaaaatttctctccagtttctaccataattaattgtgttttccagaatgaggtattatttaaggcagacactgcccctctcaaaaaaaatcagttttcatttgcatagtgaatattttattgcatttcaaaaacatgctaggaactgcttttggcactgggagtagacacatgaacaagaccaacagtgtaatttccttcaagttacttacattcctataatagaggaccgaataaataaacaactacatgataaatataacttcagactgtgagagttattaaaaaataaggtgaaatgatgataagaagctggattaggtgtggagaataaatactacttgagataagggagacctctttgaaaggacatagccaaaagcttagtataaaattaaaaaaaataaaaaaaaaa

SEQ ID NO: 479 - DNA, 5701 bp, Homo sapiens
gcagtgccgtagtagcgggccacggagatagacagctttggagctgctgaactccgagcacagggtgaagaccccggcgctaccaaccacagcctggcagcctggtctccgcggcacccactggggctgcatccccctcccccgagagggctgcgcaggcgggaagacgcccagaggccagcttcggtcccccttctgtctctcggttcctctttcctcccaagtaagggaataaaccgcgaagaaggagcgccccgggccaccgcgcaaccaagtgttgcctggtgaggaagagccaggacttctgaatttaccttgaatacagacaggaggatgttgcctaaggaatagcagagatcttgtctcatcttctgagaggtgcctgctgctgctgtatacacttgagtgctcccagaagtctcctgaaaggcttacatcgcaaacctgcaatgagccaggccctgggctgggcctccacttcagcctagtgaacaaaactccatcactgccctttagccactcacataaagtttaaaaatgggtgaagaacggtgggtctccctcactccagaagaatttgaccaactccagaaatattcagaatattcctccaagaagataaaagatgccttgactgaatttaatgagggtgggagcctcaaacaatatgacccacatgagccgattagctatgatgtcttcaagctgttcatgagggcgtacctggaggtggaccttccccagccactgagcactcacctcttcctggccttcagccagaagcccagacacgagacctctgaccacccgacggagggagccagcaacagtgaggccaacagcgcagatactaatatacagaatgcagataatgccaccaaagcagacgaggcctgtgcccctgatactgaatcaaatatggctgagaagcaagcaccagctgaagaccaagtggctgcgacccccctggaaccccccgtccctcggtcttcaagctcggaatccccagtggtatacctgaaggatgttgtgtgctacctgtccctgctggagacggggaggcctcaggataagctggagttcatgtttcgcctctatgattcagatgagaacggtctcctggaccaagcggagatggattgcattgtcaaccaaatgctgcatattgcccagtacctggagtgggatcccacagagctgaggcctatattgaaggagatgctgcaagggatggactacgaccgggacggctttgtgtctctacaggaatgggtccatggagggatgaccaccatcccattgctggtcctcctggggatggatgactctggctccaagggggatgggcggcacgcctggaccatgaagcacttcaagaaaccaacctactgcaacttctgccatatcatgctcatgggcgtccgcaagcaaggcctgtgctgcacttactgtaaatacactgtccacgaacgctgtgtgtccagaaacattcctggttgtgtcaaaacgtactcaaaagccaaaaggagtggtgagtttcaccgcaaatgtgaattatcaacgttgtgtgacggtggggaactcagagaccacatcttactgcccacctccatatgccccatcacccgggacaggccaggtgagaagtctgatggctgcgtgtccgccaagggcgaacttgtcatgcagtataagatcatccccaccccgggtacccaccccctgctggtcttggtgaaccccaagagtggagggagacaaggagaaagaattcttcggaaattccactatctgctcaaccccaaacaagttttcaacctggacaatggggggcctactccagggttgaactttttccgtgatactccagacttccgtgttttggcctgtggtggagatgggacagttggctggattttggattgcattgataaggccaactttgcaaagcatccaccagtggctgtcctgcctcttggaacaggaaatgaccttgcccgttgtctccgctggggaggaggttatgaagggggcagcttgacaaaaatcctgaaagacattgagcagagccccttggtgatgctggaccgctggcatctggaagtcatccccagagaggaagtggaaaacggggaccaggtcccatacagcatcatgaacaactatttctccattggtgtggacgcttccattgcacacagattccatgtgatgagagagaaacatcctgaaaaattcaacagcaggatgaagaacaagctgtggtactttgaatttggcacctcggagacttttgcagcgacctgcaagaaactccacgaccacattgagttggagtgtgatggggttggggtggacctgagcaacatcttcctggaaggcattgccattctcaacattcccagcatgtacggaggcaccaatctctggggagaaaacaagaagaaccgggctgtgatccgggaaagcaggaagggtgtcactgaccccaaagaactgaaattctgcgttcaagacctcagtgaccagctccttgaagtggtggggctagaaggagccatggagatggggcagatctacaccggcctgaagagtgcaggcaggaggctggcccagtgcgcctctgtcaccatcaggacaaacaagctgctgccaatgcaagtggatggagaaccctggatgcagccatgttgcacgattaaaattactcacaagaaccaagcgcccatgatgatggggcctccccagaagagcagcttcttctcgttgagaaggaagagccgttcaaaagactaaacagtgtgccaaacaccagctaaaccaagagagaaagcaagaaactataatgcacactcacacacaatttatgtgcacactcacacatgcacacacacacacacatacacactcttctctaaccagtggaagcaaagccacccttcgggaagaaaacgtcaccttgccatacattctgtttcaacagtgggtacacccctaacagagccagtgccaacaaaacattttgaatggacttagggcccatgaggttgtggctggcttaggcagcaacctccacattcccacaggccttgagcagaattttctgagactgaagggaaatccccctttctttctaccagccctgcaagtttcctcatggacgctcgcgaggagcaggctgcaggtttcctgcctatggtgagatcagatgtggccaagggaaggagctctggttccagagaatttgcacaaagttccctctgtacagagacaaaacggcctccggctctcagagcataatccttggcagggctcagcaggcgcacgttggtttcttggtcgtcctttgagtgacaacttctccgtgaacctgctgaagaggcagaaaggctgtggaaagctgtatttccattcttgggtttctgcgccgtcggtgggcacttgttattttccaggaaccttctcctggtgtctacatgtttgcttagaggcggctccaagagcccccagagctgcctgcatagcacaccttagatgtggtatttattttcttagttctgtgaacacctgggagggagagcggagaaactgggatttatttttcaaattggtgtcataatattgtgtaaaaagggaaggaaaaaaaaaaccacccccagcttctttctttttcaagccaaagcgtgtttcctgtttgagttccaagccctggtggcagactattcctgaaggcagaaaagatgggaaggaaggaactttgctggggaaaccaggagacggttccctcctgcttctttgcactcaccactcccagagtatgacctgaaggaccttctgatggtcttaacgtgtgtgcgcgcgtgtgtgtgtgtgtgtgcgtgtatatatatatatttagcctatatatttatatatatatatatataaatatttatttactgatggacttttcctcattggaaaaaaaaaacataggtagtatgagacagaaagtggtaaggaaaaagaaggttctcactcccccactccaccgtttcattgtcaggacgcatctccctgtggtgatcacaagggttaaggggaatgaaagtagctccctattatgaacgaagagaccgagaactcctattctggatcctcaaaacaagcatgaaagacctgctgggctggatttactctcccatttgtcagataagaaaattgagtctcagaaaagttcagagacttttccatggtgtcttggctaatgcagcttgagagtaggtgccgttacaaagatatttaatggagaaaagaacccacacatctcagagtagggtcatttctggtcactgaaaagtgagtccacttggatccaggttgccagggaggaacaaacgtacagcacatgcgtggatgggatatccccacacaagaaaacgagcgcctcatgctgcttcccagaggttctctctgacctgaatggaaaagaagttggtctgagatcgaaggtactaaacagatcatcagactgaactctccacatgtcacctcatcatggtcatcatagtctcttagtttggaaacaaccttggctgcagggatgacctcagtggagagtcacaagaaggactgaggcgtcttctgcaagatactgccagccaggacagaggggtctcagcagagctcagtgggcttcattcagcaagtgccagcattaccatcctttcccaagggcaaggccatgcagagcttcattgggcctccatccctctctgagatttatcagtggaaacttggacccacttgatatcgttccactgagctgcctctaatcttgcattggacaggagctttggacaaagaagggaatattaagattgtgtgtacaaatggcacttaactgtgaaggaccacctaggagcaagatcttggaccattctgctcaacctaacagtgcagaatgctaagtaaggggaaaaccaggccacctgaagaatatctttaatgatggtattcttggtgatgggaccaacaagctccagaattactacaggtactatcttggaagccacttgtttctgaaactgaggcaggttcaggtttggggtcactgattctaagacatttacagaagttcgtgcatgtgtttcagccatgatccccaagattgaggctattgagacatggcactatcaacaggtgaaattgattctcagagactcacaggtctcatgaaggggcagtgcagaaaatggcccttacctgctgcaccctagtgcacaggacttgcaatgttgcttgagagacatatcccaagtccttcttagaggcatggagtataacaacttcagtggaattgcacttccagtttggtaaccttagtaaatcttgtgttgttgtttaatcgtgccttgcaaatcatcctttaaacactatgactgtggtttcttgtggtggagtccctcatcatagtgaccctcatagcaacctctgaggttagcagagaaggtattattatctcgatctcaatgaggagaacaaggcttaatgaggtttagtgacttctcaaagccacatggttagtcaggggagaacctaatcccttatttcttatcttattctgattctggccatgctacaaacatgttctcacctgccccccatgcttctaccccaacagcaataaaaactgtaaagcaggaaaaaaaaaaaaaaaaaa

SEQ ID NO: 480 - DNA, 5818 bp, Homo sapiens
gcagtgccgtagtagcgggccacggagatagacagctttggagctgctgaactccgagcacagggtgaagaccccggcgctaccaaccacagcctggcagcctggtctccgcggcacccactggggctgcatccccctcccccgagagggctgcgcaggcgggaagacgcccagaggccagcttcggtcccccttctgtctctcggttcctctttcctcccaagtaagggaataaaccgcgaagaaggagcgccccgggccaccgcgcaaccaagtgttgcctggtgaggaagagccaggacttctgaatttaccttgaatacagacaggaggatgttgcctaaggaatagcagagatcttgtctcatcttctgagaggtgcctgctgctgctgtatacacttgagtgctcccagaagtctcctgaaaggcttacatcgcaaacctgcaatgagccaggccctgggctgggcctccacttcagcctagtgaacaaaactccatcactgccctttagccactcacataaagtttaaaaatgggtgaagaacggtgggtctccctcactccagaagaatttgaccaactccagaaatattcagaatattcctccaagaagataaaagatgccttgactgaatttaatgagggtgggagcctcaaacaatatgacccacatgagccgattagctatgatgtcttcaagctgttcatgagggcgtacctggaggtggaccttccccagccactgagcactcacctcttcctggccttcagccagaagcccagacacgagacctctgaccacccgacggagggagccagcaacagtgaggccaacagcgcagatactaatatacagaatgcagataatgccaccaaagcagacgaggcctgtgcccctgatactgaatcaaatatggctgagaagcaagcaccagctgaagaccaagtggctgcgacccccctggaaccccccgtccctcggtcttcaagctcggaatccccagtggtatacctgaaggatgttgtgtgctacctgtccctgctggagacggggaggcctcaggataagctggagttcatgtttcgcctctatgattcagatgagaacggtctcctggaccaagcggagatggattgcattgtcaaccaaatgctgcatattgcccagtacctggagtgggatcccacagagctgaggcctatattgaaggagatgctgcaagggatggactacgaccgggacggctttgtgtctctacaggaatgggtccatggagggatgaccaccatcccattgctggtcctcctggggatggatgactctggctccaagggggatgggcggcacgcctggaccatgaagcacttcaagaaaccaacctactgcaacttctgccatatcatgctcatgggcgtccgcaagcaaggcctgtgctgcacttactgtaaatacactgtccacgaacgctgtgtgtccagaaacattcctggttgtgtcaaaacgtactcaaaagccaaaaggagtggtgaggtgatgcagcacgcatgggtggaagggaactcctccgtcaagtgtgaccggtgccacaaaagtatcaagtgctaccagagtgtcaccgcgcggcactgcgtgtggtgccggatgacgtttcaccgcaaatgtgaattatcaacgttgtgtgacggtggggaactcagagaccacatcttactgcccacctccatatgccccatcacccgggacaggccaggtgagaagtctgatggctgcgtgtccgccaagggcgaacttgtcatgcagtataagatcatccccaccccgggtacccaccccctgctggtcttggtgaaccccaagagtggagggagacaaggagaaagaattcttcggaaattccactatctgctcaaccccaaacaagttttcaacctggacaatggggggcctactccagggttgaactttttccgtgatactccagacttccgtgttttggcctgtggtggagatgggacagttggctggattttggattgcattgataaggccaactttgcaaagcatccaccagtggctgtcctgcctcttggaacaggaaatgaccttgcccgttgtctccgctggggaggaggttatgaagggggcagcttgacaaaaatcctgaaagacattgagcagagccccttggtgatgctggaccgctggcatctggaagtcatccccagagaggaagtggaaaacggggaccaggtcccatacagcatcatgaacaactatttctccattggtgtggacgcttccattgcacacagattccatgtgatgagagagaaacatcctgaaaaattcaacagcaggatgaagaacaagctgtggtactttgaatttggcacctcggagacttttgcagcgacctgcaagaaactccacgaccacattgagttggagtgtgatggggttggggtggacctgagcaacatcttcctggaaggcattgccattctcaacattcccagcatgtacggaggcaccaatctctggggagaaaacaagaagaaccgggctgtgatccgggaaagcaggaagggtgtcactgaccccaaagaactgaaattctgcgttcaagacctcagtgaccagctccttgaagtggtggggctagaaggagccatggagatggggcagatctacaccggcctgaagagtgcaggcaggaggctggcccagtgcgcctctgtcaccatcaggacaaacaagctgctgccaatgcaagtggatggagaaccctggatgcagccatgttgcacgattaaaattactcacaagaaccaagcgcccatgatgatggggcctccccagaagagcagcttcttctcgttgagaaggaagagccgttcaaaagactaaacagtgtgccaaacaccagctaaaccaagagagaaagcaagaaactataatgcacactcacacacaatttatgtgcacactcacacatgcacacacacacacacatacacactcttctctaaccagtggaagcaaagccacccttcgggaagaaaacgtcaccttgccatacattctgtttcaacagtgggtacacccctaacagagccagtgccaacaaaacattttgaatggacttagggcccatgaggttgtggctggcttaggcagcaacctccacattcccacaggccttgagcagaattttctgagactgaagggaaatccccctttctttctaccagccctgcaagtttcctcatggacgctcgcgaggagcaggctgcaggtttcctgcctatggtgagatcagatgtggccaagggaaggagctctggttccagagaatttgcacaaagttccctctgtacagagacaaaacggcctccggctctcagagcataatccttggcagggctcagcaggcgcacgttggtttcttggtcgtcctttgagtgacaacttctccgtgaacctgctgaagaggcagaaaggctgtggaaagctgtatttccattcttgggtttctgcgccgtcggtgggcacttgttattttccaggaaccttctcctggtgtctacatgtttgcttagaggcggctccaagagcccccagagctgcctgcatagcacaccttagatgtggtatttattttcttagttctgtgaacacctgggagggagagcggagaaactgggatttatttttcaaattggtgtcataatattgtgtaaaaagggaaggaaaaaaaaaaccacccccagcttctttctttttcaagccaaagcgtgtttcctgtttgagttccaagccctggtggcagactattcctgaaggcagaaaagatgggaaggaaggaactttgctggggaaaccaggagacggttccctcctgcttctttgcactcaccactcccagagtatgacctgaaggaccttctgatggtcttaacgtgtgtgcgcgcgtgtgtgtgtgtgtgtgcgtgtatatatatatatttagcctatatatttatatatatatatatataaatatttatttactgatggacttttcctcattggaaaaaaaaaacataggtagtatgagacagaaagtggtaaggaaaaagaaggttctcactcccccactccaccgtttcattgtcaggacgcatctccctgtggtgatcacaagggttaaggggaatgaaagtagctccctattatgaacgaagagaccgagaactcctattctggatcctcaaaacaagcatgaaagacctgctgggctggatttactctcccatttgtcagataagaaaattgagtctcagaaaagttcagagacttttccatggtgtcttggctaatgcagcttgagagtaggtgccgttacaaagatatttaatggagaaaagaacccacacatctcagagtagggtcatttctggtcactgaaaagtgagtccacttggatccaggttgccagggaggaacaaacgtacagcacatgcgtggatgggatatccccacacaagaaaacgagcgcctcatgctgcttcccagaggttctctctgacctgaatggaaaagaagttggtctgagatcgaaggtactaaacagatcatcagactgaactctccacatgtcacctcatcatggtcatcatagtctcttagtttggaaacaaccttggctgcagggatgacctcagtggagagtcacaagaaggactgaggcgtcttctgcaagatactgccagccaggacagaggggtctcagcagagctcagtgggcttcattcagcaagtgccagcattaccatcctttcccaagggcaaggccatgcagagcttcattgggcctccatccctctctgagatttatcagtggaaacttggacccacttgatatcgttccactgagctgcctctaatcttgcattggacaggagctttggacaaagaagggaatattaagattgtgtgtacaaatggcacttaactgtgaaggaccacctaggagcaagatcttggaccattctgctcaacctaacagtgcagaatgctaagtaaggggaaaaccaggccacctgaagaatatctttaatgatggtattcttggtgatgggaccaacaagctccagaattactacaggtactatcttggaagccacttgtttctgaaactgaggcaggttcaggtttggggtcactgattctaagacatttacagaagttcgtgcatgtgtttcagccatgatccccaagattgaggctattgagacatggcactatcaacaggtgaaattgattctcagagactcacaggtctcatgaaggggcagtgcagaaaatggcccttacctgctgcaccctagtgcacaggacttgcaatgttgcttgagagacatatcccaagtccttcttagaggcatggagtataacaacttcagtggaattgcacttccagtttggtaaccttagtaaatcttgtgttgttgtttaatcgtgccttgcaaatcatcctttaaacactatgactgtggtttcttgtggtggagtccctcatcatagtgaccctcatagcaacctctgaggttagcagagaaggtattattatctcgatctcaatgaggagaacaaggcttaatgaggtttagtgacttctcaaagccacatggttagtcaggggagaacctaatcccttatttcttatcttattctgattctggccatgctacaaacatgttctcacctgccccccatgcttctaccccaacagcaataaaaactgtaaagcaggaaaaaaaaaaaaaaaaaa

SEQ ID NO: 481 - DNA, 5743 bp, Homo sapiens
gcagtgccgtagtagcgggccacggagatagacagctttggagctgctgaactccgagcacagggtgaagaccccggcgctaccaaccacagcctggcagcctggtctccgcggcacccactggggctgcatccccctcccccgagagggctgcgcaggcgggaagacgcccagaggccagcttcggtcccccttctgtctctcggttcctctttcctcccaagtaagggaataaaccgcgaagaaggagcgccccgggccaccgcgcaaccaagtgttgcctggtgaggaagagccaggacttctgaatttaccttgaatacagacaggaggatgttgcctaaggaatagcagagatcttgtctcatcttctgagaggtgcctgctgctgctgtatacacttgagtgctcccagaagtctcctgaaaggcttacatcgcaaacctgcaatgagccaggccctgggctgggcctccacttcagcctagtgaacaaaactccatcactgccctttagccactcacataaagtttaaaaatgggtgaagaacggtgggtctccctcactccagaagaatttgaccaactccagaaatattcagaatattcctccaagaagataaaagatgccttgactgaatttaatgagggtgggagcctcaaacaatatgacccacatgagccgattagctatgatgtcttcaagctgttcatgagggcgtacctggaggtggaccttccccagccactgagcactcacctcttcctggccttcagccagaagcccagacacgagacctctgaccacccgacggagggagccagcaacagtgaggccaacagcgcagatactaatatacagaatgcagataatgccaccaaagcagacgaggcctgtgcccctgatactgaatcaaatatggctgagaagcaagcaccagctgaagaccaagtggctgcgacccccctggaaccccccgtccctcggtcttcaagctcggaatccccagtggtatacctgaaggatgttgtgtgctacctgtccctgctggagacggggaggcctcaggataagctggagttcatgtttcgcctctatgattcagatgagaacggtctcctggaccaagcggagatggattgcattgtcaaccaaatgctgcatattgcccagtacctggagtgggatcccacagagctgaggcctatattgaaggagatgctgcaagggatggactacgaccgggacggctttgtgtctctacaggaatgggtccatggagggatgaccaccatcccattgctggtcctcctggggatggatgactctggctccaagggggatgggcggcacgcctggaccatgaagcacttcaagaaaccaacctactgcaacttctgccatatcatgctcatgggcgtccgcaagcaaggcctgtgctgcacttactgtaaatacactgtccacgaacgctgtgtgtccagaaacattcctggttgtgtcaaaacgtactcaaaagccaaaaggagtggtgaggtgatgcagcacgcatgggtggaagggaactcctccgtcaagtgtgaccggtgccacaaaagtatcaagtgctaccagagtgtcaccgcgcggcactgcgtgtggtgccggatgacgtttcaccgcaaatgtgaattatcaacgttgtgtgacggtggggaactcagagaccacatcttactgcccacctccatatgccccatcacccgggacaggccaggtgagaagtctgatggctgcgtgtccgccaagggcgaacttgtcatgcagtataagatcatccccaccccgggtacccaccccctgctggtcttggtgaaccccaagagtggagggagacaaggagaaaggttgaactttttccgtgatactccagacttccgtgttttggcctgtggtggagatgggacagttggctggattttggattgcattgataaggccaactttgcaaagcatccaccagtggctgtcctgcctcttggaacaggaaatgaccttgcccgttgtctccgctggggaggaggttatgaagggggcagcttgacaaaaatcctgaaagacattgagcagagccccttggtgatgctggaccgctggcatctggaagtcatccccagagaggaagtggaaaacggggaccaggtcccatacagcatcatgaacaactatttctccattggtgtggacgcttccattgcacacagattccatgtgatgagagagaaacatcctgaaaaattcaacagcaggatgaagaacaagctgtggtactttgaatttggcacctcggagacttttgcagcgacctgcaagaaactccacgaccacattgagttggagtgtgatggggttggggtggacctgagcaacatcttcctggaaggcattgccattctcaacattcccagcatgtacggaggcaccaatctctggggagaaaacaagaagaaccgggctgtgatccgggaaagcaggaagggtgtcactgaccccaaagaactgaaattctgcgttcaagacctcagtgaccagctccttgaagtggtggggctagaaggagccatggagatggggcagatctacaccggcctgaagagtgcaggcaggaggctggcccagtgcgcctctgtcaccatcaggacaaacaagctgctgccaatgcaagtggatggagaaccctggatgcagccatgttgcacgattaaaattactcacaagaaccaagcgcccatgatgatggggcctccccagaagagcagcttcttctcgttgagaaggaagagccgttcaaaagactaaacagtgtgccaaacaccagctaaaccaagagagaaagcaagaaactataatgcacactcacacacaatttatgtgcacactcacacatgcacacacacacacacatacacactcttctctaaccagtggaagcaaagccacccttcgggaagaaaacgtcaccttgccatacattctgtttcaacagtgggtacacccctaacagagccagtgccaacaaaacattttgaatggacttagggcccatgaggttgtggctggcttaggcagcaacctccacattcccacaggccttgagcagaattttctgagactgaagggaaatccccctttctttctaccagccctgcaagtttcctcatggacgctcgcgaggagcaggctgcaggtttcctgcctatggtgagatcagatgtggccaagggaaggagctctggttccagagaatttgcacaaagttccctctgtacagagacaaaacggcctccggctctcagagcataatccttggcagggctcagcaggcgcacgttggtttcttggtcgtcctttgagtgacaacttctccgtgaacctgctgaagaggcagaaaggctgtggaaagctgtatttccattcttgggtttctgcgccgtcggtgggcacttgttattttccaggaaccttctcctggtgtctacatgtttgcttagaggcggctccaagagcccccagagctgcctgcatagcacaccttagatgtggtatttattttcttagttctgtgaacacctgggagggagagcggagaaactgggatttatttttcaaattggtgtcataatattgtgtaaaaagggaaggaaaaaaaaaaccacccccagcttctttctttttcaagccaaagcgtgtttcctgtttgagttccaagccctggtggcagactattcctgaaggcagaaaagatgggaaggaaggaactttgctggggaaaccaggagacggttccctcctgcttctttgcactcaccactcccagagtatgacctgaaggaccttctgatggtcttaacgtgtgtgcgcgcgtgtgtgtgtgtgtgtgcgtgtatatatatatatttagcctatatatttatatatatatatatataaatatttatttactgatggacttttcctcattggaaaaaaaaaacataggtagtatgagacagaaagtggtaaggaaaaagaaggttctcactcccccactccaccgtttcattgtcaggacgcatctccctgtggtgatcacaagggttaaggggaatgaaagtagctccctattatgaacgaagagaccgagaactcctattctggatcctcaaaacaagcatgaaagacctgctgggctggatttactctcccatttgtcagataagaaaattgagtctcagaaaagttcagagacttttccatggtgtcttggctaatgcagcttgagagtaggtgccgttacaaagatatttaatggagaaaagaacccacacatctcagagtagggtcatttctggtcactgaaaagtgagtccacttggatccaggttgccagggaggaacaaacgtacagcacatgcgtggatgggatatccccacacaagaaaacgagcgcctcatgctgcttcccagaggttctctctgacctgaatggaaaagaagttggtctgagatcgaaggtactaaacagatcatcagactgaactctccacatgtcacctcatcatggtcatcatagtctcttagtttggaaacaaccttggctgcagggatgacctcagtggagagtcacaagaaggactgaggcgtcttctgcaagatactgccagccaggacagaggggtctcagcagagctcagtgggcttcattcagcaagtgccagcattaccatcctttcccaagggcaaggccatgcagagcttcattgggcctccatccctctctgagatttatcagtggaaacttggacccacttgatatcgttccactgagctgcctctaatcttgcattggacaggagctttggacaaagaagggaatattaagattgtgtgtacaaatggcacttaactgtgaaggaccacctaggagcaagatcttggaccattctgctcaacctaacagtgcagaatgctaagtaaggggaaaaccaggccacctgaagaatatctttaatgatggtattcttggtgatgggaccaacaagctccagaattactacaggtactatcttggaagccacttgtttctgaaactgaggcaggttcaggtttggggtcactgattctaagacatttacagaagttcgtgcatgtgtttcagccatgatccccaagattgaggctattgagacatggcactatcaacaggtgaaattgattctcagagactcacaggtctcatgaaggggcagtgcagaaaatggcccttacctgctgcaccctagtgcacaggacttgcaatgttgcttgagagacatatcccaagtccttcttagaggcatggagtataacaacttcagtggaattgcacttccagtttggtaaccttagtaaatcttgtgttgttgtttaatcgtgccttgcaaatcatcctttaaacactatgactgtggtttcttgtggtggagtccctcatcatagtgaccctcatagcaacctctgaggttagcagagaaggtattattatctcgatctcaatgaggagaacaaggcttaatgaggtttagtgacttctcaaagccacatggttagtcaggggagaacctaatcccttatttcttatcttattctgattctggccatgctacaaacatgttctcacctgccccccatgcttctaccccaacagcaataaaaactgtaaagcaggaaaaaaaaaaaaaaaaaa

SEQ ID NO: 482 - DNA, 1825 bp, Homo sapiens
ttttttttttttttttttttttttttaatcttgcactttgaaaccgcgggaccgaggcagggtgcgcgcgtgtggttggtgcctttttttttttttcttcccctccctaaactcctctgtcagtctgtaaacattacctgagaattccccagccgaaacggctgctggggcaagaaacttcttgttagaactttccacctccggcttccccctccacctcttttaccgtcccaaccttaggagacgctttttctcccccagaggagaatttatctttttttttttttttttttttctttttctcacccggtgctttgcatttgggaagaggtgatttcaagagtggccaggtgggacgcctctctcctccttattcggtttactatttattgttcggggtgttttttaattcctgtattgctcggcccggggagtttcgccccctgcccggctccgcggcgcggaggatggtgtggaaacggctgggcgcgctggtgatgttccctctacagatgatctatctggtggtgaaagcagccgtcggactggtgctgcccgccaagctgcgggacctgtcgcgggagaacgtcctcatcaccggcggcgggagaggcatcgggcgtcagctcgcccgcgagttcgcggagcgcggcgccagaaagattgttctctggggccggactgagaaatgcctgaaggagacgacggaggagatccggcagatgggcactgagtgccattacttcatctgtgatgtgggcaaccgggaggaggtgtaccagacggccaaggccgtccgggagaaggtgggtgacatcaccatcctggtgaacaatgccgccgtggtccatgggaagagcctaatggacagtgatgatgatgccctcctcaagtcccaacacatcaacaccctgggccagttctggaccaccaaggccttcctgccacgtatgctggagctgcagaatggccacatcgtgtgcctcaactccgtgctggcactgtctgccatccccggtgccatcgactactgcacatccaaagcgtcagccttcgccttcatggagagcctgaccctggggctgctggactgtccgggagtcagcgccaccacagtgctgcccttccacaccagcaccgagatgttccagggcatgagagtcaggtttcccaacctctttcccccactgaagccggagacggtggcccggaggacagtggaagctgtgcagctcaaccaggccctcctcctcctcccatggacaatgcatgccctcgttatcttgaaaagcatacttccacaggctgcactcgaggagatccacaaattctcaggaacctacacctgcatgaacactttcaaagggcggacatagagacaggatgaagacatgcttgaggagccacggagtttgggggccacagcacctgggcacacacccgagcacctgtccattggcatgcttctgctgggtgagcaggacagctcctgtccccagcgaagaatccggctgcccctgggccagtcccaggacctttgcacaggactgatgggtataactgacccccacagggaggcaggaaaacagccagaagccaccttgacacttttgaacatttccagttctgtagagtttattgtcaattgcttctcaagtctaaccagcctcagcagtgtgcatagaccatttccaggagggtctgtccccagatgctctgcctcccgttccaaaacccactcatcctcagcttgcacaaactggttgaacggcaggaatgaaaaataaagagagatggcttttgtgaaaaaaaaaaaaaaaaaaaa

SEQ ID NO: 483 - DNA, 1289 bp, Homo sapiens
gaagagtggaacccatacttgctggtctgatccatgcacaaggcggggctgctaggcctctgtgcccgggcttggaattcggtgcggatggccagctccgggatgacccgccgggacccgctcgcaaataaggtggccctggtaacggcctccaccgacgggatcggcttcgccatcgcccggcgtttggcccaggacggggcccatgtggtcgtcagcagccggaagcagcagaatgtggaccaggcggtggccacgctgcagggggaggggctgagcgtgacgggcaccgtgtgccatgtggggaaggcggaggaccgggagcggctggtggccacggctgtgaagcttcatggaggtatcgatatcctagtctccaatgctgctgtcaaccctttctttggaagcataatggatgtcactgaggaggtgtgggacaagactctggacattaatgtgaaggccccagccctgatgacaaaggcagtggtgccagaaatggagaaacgaggaggcggctcagtggtgatcgtgtcttccatagcagccttcagtccatctcctggcttcagtccttacaatgtcagtaaaacagccttgctgggcctgaccaagaccctggccatagagctggccccaaggaacattagggtgaactgcctagcacctggacttatcaagactagcttcagcaggatgctctggatggacaaggaaaaagaggaaagcatgaaagaaaccctgcggataagaaggttaggcgagccagaggattgtgctggcatcgtgtctttcctgtgctctgaagatgccagctacatcactggggaaacagtggtggtgggtggaggaaccccgtcccgcctctgaggaccgggagacagcccacaggccagagttgggctctagctcctggtgctgttcccgcattcacccactggcctttcccacctctgctcaccttactgttcacctcatcaaatcagttctgccctgtgaaaagatccagccttccctgccgtcaaggtggcgtcttactcgggatttctgctgttgttgtggccttgggtaaaggcctcccctgagaacacaggacaggcctgctgacaaggctgagtctaccttggcaaagaccaagatattttttcccgggccactggggaatctgaggggtgatgggagagaaggaacctggagtggaaggagcagagttgcaaattaacaacttgcaaatgaggtgcaaataaaatgcagatgattgcgcggctttgaatccaaaaaaaaaaaaa

SEQ ID NO: 484 - DNA, 1282 bp, Homo sapiens
ctgcgatcccgcagggcagcgacgcgactctggtgcgggccgtcttcttccccccgagctgggcgtgcgcggccgcaatgaactgggagctgctgctgtggctgctggtgctgtgcgcgctgctcctgctcttggtgcagctgctgcgcttcctgagggctgacggcgacctgacgctactatgggccgagtggcagggacgacgcccagaatgggagctgactgatatggtggtgtgggtgactggagcctcgagtggaattggtgaggagctggcttaccagttgtctaaactaggagtttctcttgtgctgtcagccagaagagtgcatgagctggaaagggtgaaaagaagatgcctagagaatggcaatttaaaagaaaaagatatacttgttttgccccttgacctgaccgacactggttcccatgaagcggctaccaaagctgttctccaggagtttggtagaatcgacattctggtcaacaatggtggaatgtcccagcgttctctgtgcatggataccagcttggatgtctacagaaagctaatagagcttaactacttagggacggtgtccttgacaaaatgtgttctgcctcacatgatcgagaggaagcaaggaaagattgttactgtgaatagcatcctgggtatcatatctgtacctctttccattggatactgtgctagcaagcatgctctccggggtttttttaatggccttcgaacagaacttgccacatacccaggtataatagtttctaacatttgcccaggacctgtgcaatcaaatattgtggagaattccctagctggagaagtcacaaagactataggcaataatggagaccagtcccacaagatgacaaccagtcgttgtgtgcggctgatgttaatcagcatggccaatgatttgaaagaagtttggatctcagaacaacctttcttgttagtaacatatttgtggcaatacatgccaacctgggcctggtggataaccaacaagatggggaagaaaaggattgagaactttaagagtggtgtggatgcagactcttcttattttaaaatctttaagacaaaacatgactgaaaagagcacctgtacttttcaagccactggagggagaaatggaaaacatgaaaacagcaatcttcttatgcttctgaataatcaaagactaatttgtgattttactttttaatagatatgactttgcttccaacatggaatgaaataaaaaataaataataaaagattgccatgaatcttgcaaa

SEQ ID NO: 485 - DNA, 3625 bp, Homo sapiens
aagtgggcgcacagtggcttccgggcccggacgccatttccagcggttgctggttctgacgggttgtagtctgccaggacaatgagttatgactaccatcagaactggggccgtgatgggggtccccgcagctccggtgggggctatggaggggggccagcagggggtcatggaggtaaccgaggctccggaggaggcggcggcggcggagggggtggtcgaggcggcaggggccggcatcccgggcacctgaaaggccgcgaaatcggcatgtggtacgcgaaaaaacaggggcagaagaacaaggaagcggagaggcaagagagagctgtagtacacatggatgaacgacgagaagaacaaattgtacagttactgaattctgttcaagcgaagaatgataaagagtcagaagcacagatatcctggtttgctcctgaggatcatggatacggtactgaagtttctactaagaacacaccatgctcagagaacaaacttgacatccaggaaaagaagttgataaatcaagaaaaaaaaatgtttagaatcaggaacagatcatatattgaccgagattctgagtatctcttgcaagaaaatgaaccagatggaactttagaccaaaaattattggaagatttacaaaagaaaaaaaatgaccttcggtatattgaaatgcagcatttcagagaaaagctgccttcgtatggaatgcaaaaggaattggtaaatttaattgataaccatcaggtaacagtaataagtggtgaaactggttgtggcaaaaccactcaagttactcagttcattttggataactacattgaaagaggaaaaggatctgcttgcagaatagtttgtactcagccaagaagaattagtgccatttcagttgcggaaagagtagctgcagaaagggcagaatcttgtggcagtggtaatagtactggatatcaaattcgtctccagagtcggttgccaaggaaacagggttctatcttatactgtacaacaggaatcatccttcagtggctccagtcagacccgtatttgtccagtgttagtcatatcgtacttgatgaaatccatgaaagaaatctgcagtcagatgttttaatgactgttgttaaagaccttctcaattttcgatctgacttgaaagtaatattgatgagtgcaacattgaatgcagaaaagttttcagaatattttggtaactgtccaatgatacatatacctggttttacctttccggttgtggaatatcttttggaagatgtaattgaaaaaataaggtatgttccagaacaaaaagaacacagatcccagtttaagaggggtttcatgcaagggcatgtaaatagacaagaaaaagaagaaaaagaagcaatatataaagaacgttggccagattatgtaagggaactgcgaagaaggtattctgcaagtactgtagatgttatagaaatgatggaggatgataaagttgatctgaatttgattgttgccctcatccgatacattgttttggaagaagaggatggtgcgatactggtctttctgccaggctgggacaatatcagcactttacatgatctcttgatgtcacaagtaatgtttaaatcagataaatttttaattatacctttacattcactgatgcctacagttaaccagacacaggtgtttaaaagaacccctcctggtgttcggaaaatagtaattgctaccaacattgcggagactagcattaccatagatgatgtcgtttatgtgatagatggaggaaaaataaaagagacgcattttgatactcagaacaatatcagtacaatgtccgctgagtgggttagtaaagctaatgccaaacagagaaaaggtcgagctggaagagttcaacctggtcattgctatcatctgtataatggtcttagagcaagtcttctagatgactatcaactgccagaaattttgagaactcctttggaagaactttgtttacaaataaagattttaaggctaggtggaattgcttattttctgagtagattaatggacccaccatcaaatgaggcagtgttactctccataagacacctgatggagctgaacgctttggataaacaagaagaattgacacctcttggagtccacttggcacgattacccgttgagccacatattggaaaaatgattctttttggagcactgttctgctgcttagacccagtactcactattgctgctagtctcagtttcaaagatccatttgtcattccactgggaaaagaaaagattgcagatgcaagaagaaaggaattggcaaaggatactagaagtgatcacttaacagttgtgaatgcgtttgagggctgggaagaggctaggcgacgtggtttcagatacgaaaaggactattgctgggaatattttctgtcttcaaacacactgcagatgctgcataacatgaaaggacagtttgctgagcatcttcttggagctggatttgtaagcagtagaaatcctaaagatccagaatctaatataaattcagataatgagaagataattaaagctgtcatctgtgctggtttatatcccaaagttgctaaaattcgactaaatttgggtaaaaaaagaaaaatggtaaaagtttacacaaaaaccgatggcctggttgctgttcatcctaaatctgttaatgtggagcaaacagactttcactacaactggcttatctatcacctaaagatgagaacaagcagtatatacttgtatgactgcacagaggtttccccatactgtctcttgttttttggaggtgacatttccatccagaaggataacgatcaggaaactattgctgtagatgagtggattgtatttcagtctccagcaagaattgcccatcttgttaaggaattaagaaaggaactagatattcttctgcaagagaagattgaaagtcctcatcctgtagactggaatgacactaaatccagagactgtgcagtactgtcagctattatagacttgatcaaaacacaggaaaaggcaactcccaggaactttccgccacgattccaggatggatattacagctgacagcttttcaggggtggtctgaaaagccagtttgacagccattcttcatcattgtttaaattttggctggatgccaaaccctgggacatgaacaattttcatgtgtaaggtagaagccttcagtaggtagtaaagacttaatgtgcatgacttgatgttatatgtagagatatatatatatatatatatataccataaaagcaatatgttctctgatcatatactctgctgtggtcatgcccactctttgggagtatattccctttatatatattgagtattgtaccacttgagaaattcctttgttctgttatacaaaattaatctttctgctcataatgattgatgataccaccagtaaaaataggatgtttaccccaaaacaagtgtcaattaagaatttgaacacaaccacattttttaaaatgaaacttctatcggaagtaaattaatttgttgtaataaagtccagtatttaataaaatgtacaatgttaaatctcaaaaaaaaaaaaaaa

SEQ ID NO: 486 - DNA, 4201 bp, Homo sapiens
agaaagctggaacccggccggagtagctctgagcgccggctgtgaggaaggaggttctgggcaagctatagccatggctgtggctgtagccatggcgggagccttaatcgggtcggagccaggccccgcggaagaacttgccaaactcgagtacctgtctttggtgtcaaaggtttgcactgagctggacaatcacttggggatcaacgacaaggaccttgctgaatttgtgatcagtcttgctgagaaaaataccacctttgatacttttaaggcttctctcgtcaaaaatggtgcagaatttacggattctcttattagtaacttgctgcgtctcatacaaaccatgcggcctccagcgaagccttccactagcaaagatccagttgttaaacctaaaacagaaaaagaaaagctgaaggaactcttcccagtcctttgccaaccggacaacccttctgttcggaccatgttggatgaagatgatgtgaaagttgctgtggatgtcctgaaagaactggaagctttaatgcccagcgcagcaggccaggagaagcaaagagatgctgaacaccgggacaggacaaagaagaagaagcggagtcgaagccgagatcgaaaccgagatcgagacagagatagggaacgaaaccgagatagagaccacaagcggagacaccgatcccgctctcgatcacgttccaggacccgggagaggaataaagtgaagtctagatatcggtccaggagcaggagtcagagtccccccaaagaccggaaggaccgggacaaatatggagagcggaatctggatagatggcgggataagcatgtggaccgccctcctccagaagagcccaccattggtgacatttataatggcaaagttaccagcatcatgcagtttggttgctttgtgcagctggaaggactaaggaagcggtgggaaggcctggtgcacatctctgagctccggcgggagggtcgtgtggccaatgtagctgatgtcgtgagcaaaggccagagggtcaaagtcaaagtgctgtccttcactgggaccaagaccagcctgagcatgaaggatgtggatcaagagactggagaagatctaaacccaaatagacggcgaaatcttgtcggggagaccaatgaggagacctcaatgcggaatcctgatagacccactcacttgtcccttgtcagtgctcctgaagtagaggacgactcactggaacgcaagcgcctcacccgaatctctgacccagagaagtgggagatcaaacagatgattgctgccaatgtcctttccaaagaagaatttccagactttgatgaagagactggcattctccctaaggtggatgatgaagaagatgaggaccttgagattgaattggttgaggaagagcctccattcctgagagggcacactaagcaaagcatggacatgagccccattaaaattgtcaagaacccagacggctccctctcccaagcagcaatgatgcagagtgccttggccaaagaaaggcgggaactcaaacaggcccagcgggaagctgagatggattctattcccatgggactcaacaaacactgggttgaccctctgcctgatgcggaaggcagacagattgctgccaacatgaggggtattgggatgatgcccaatgatattcctgagtggaagaagcatgcctttgggggcaacaaagcctcttacggaaaaaagacccagatgtcaatccttgagcagagggagagcctgcccatctacaaactgaaggagcaattggtccaggccgtccatgacaatcagatcctgattgtcattggtgagacaggatctggaaagacaacacagatcacccagtacctggcggaggcaggctacacttccaggggcaagattgggtgtacccagcccagaagagtggcagctatgtcggtggccaaaagagtgtcagaggagtttggttgttgcttaggccaagaggtgggctacaccattcgatttgaggactgcactagccctgaaacagtcatcaagtacatgacagatgggatgttgcttagagagtgcttgattgaccctgacctcactcagtacgcgatcatcatgttggacgaggcacatgagaggacaattcacactgatgtgctctttggattgttgaaaaagacagttcagaaacggcaggacatgaagctgattgtcacctcagccaccttggatgcagtgaagttttctcaatacttctatgaagctcccattttcaccatcccaggtcgaacatatccagtggaaatactgtacacaaaggaacctgagacagattatctggatgccagcctgattactgttatgcagattcatttaacagaaccaccaggtgatatcctggtcttcctgactggtcaggaagaaattgatactgcttgtgagatcctgtatgaaagaatgaaatccctgggacctgatgttccagagttaattatcctcccagtgtactctgctcttcccagtgagatgcagacccgaatctttgacccagctccaccaggcagcagaaaggttgtgattgccaccaatatcgcagagacatcgctgactattgatggtatctactatgtggtggacccaggattcgtgaaacagaaagtttacaattccaagacagggattgaccagctcgtggtgacgcctatttctcaggctcaggcaaagcaacgagctggcagagctgggagaacaggcccagggaagtgttacaggttgtacacagaacgtgcctaccgagatgaaatgctgaccaccaacgtgccggaaatccagagaaccaacttagcaagcacagtgctgtcactcaaggccatgggtatcaatgatctgctgtcctttgatttcatggatgccccacctatggaaactttgatcacagccatggagcagctgtacacactgggggccctggatgacgagggcctgctcactcgcttgggccgccggatggcagagttccctctggagccaatgctatgcaaaatgctcatcatgtctgtgcatctgggctgcagtgaggaaatgctgaccattgtatccatgctgtctgtgcagaacgtcttctataggcccaaggataaacaagcccttgcagatcagaagaaggccaaattccaccagactgaaggggaccacctcaccctgctagctgtgtacaactcctggaagaacaacaagttctccaacccatggtgctatgagaactttatccaggctcgttccctgcgccgggcccaggacattcgcaagcagatgttaggcataatggacagacacaagctggatgttgtttcctgtggcaagtccacagtccgagtgcagaaggccatctgcagtgggttcttccgtaatgctgccaagaaagacccgcaggagggttaccggacactgatcgaccagcaggtggtctatatccatccttccagtgccctcttcaacagacagccagaatgggtggtgtaccatgagctggtgctcaccaccaaggaatacatgcgtgaagttaccaccatcgaccctcggtggcttgtggagtttgccccagccttcttcaaggtctcagacccaactaagctaagcaaacagaagaagcaacagcgtcttgaacccttgtacaaccgctatgaggaacccaatgcctggagaatatctcgagctttccgacggcgctgaaaggcaagattgttcctttgcctctccagcagcagtagccagggcttggacttatcgatgacaggctggtcctgaggatacagctgtcccgtgactgactgtcttaactgagcattttctcaactcgactctcatttcttccctgctggtaaaatagaaacagggatttaaacctggctttggcaagagcctgcagcctccatcaccccaagtccttgggcccagttgggagctcatatctaacacagagacacattgcatcaacttcaagaaagggacaatttgtgcagctccaggatgggaaggtggagtgggtgagcatcttgtgcagggacatggtgagtgccctgatgccccagctagcaggagctactgtgctcatctaaagtgtttgccccacttcccaccccgtctccagcccctgtactttggcttgacctcgtggaaatatttattttcttaagg

SEQ ID NO: 487 - DNA, 4535 bp, Homo sapiens
tacttttgtattgtttaattttttttaacagttgtcttgttttttcttctgcagtgaaaataatggtgacaagaagcccactgcctgattcacataagcaaggcatgctgcagggaagacagggttcttattaatatttcctttcatgtgcttacatatgagttacagttgctaatcctttcccacagtttagcacctagttaaaagaaagggcttcggaatcaggtaagtgtagattaaagttataacggcaaattgctgaacctttggaagcctcggtttttccacctggaaaatggatttttatcttacaggactgtcgtgaggattgatgagctaacattcctaaatcagggagtttgaagtctggcccagggtattttcctcctttcctgaaataatgtgtagttctgaccaagtgagaagaatcataagaatatgggattttgaaaaacatgaaaacatcctaagaaataccaggaaggagtcccacagtgaagcacaaatgaaactcaagatgactgcctaaaataagaaatcatggatcttaggagaaagggggcaaggaagtaaatcaaaggacaaagctgaagaccaagtggaccgaaaagaagatggaatacattttcccaaacactggtgttctctggagttggcttatcaacatcttgtgcaatcggaggatcgtgtggtttacttccagccagctgccccgtggtcctccagccagctccgggggccacagttttcacacgctccgggagcgatccgagagccgccttttcgtggaaagttacgctgccgcctggcaacccccgggaacgtcgggaggggcaagttgctgctcatccctcagtgctcaagtcatgagtagcgaattcctggctgagctgcactgggaggatgggttcgccatcccggtggcgaacgaggagaacaagctactggaagatcagttgtcaaagctgaaggatgaaagagcaagcttgcaagatgagttacgtgagtatgaagagcgaattaattctatgacttctcacttcaaaaatgttaagcaagagctctcaattacacagtctctttgcaaagcaagggagcgtgagactgaaagtgaagaacattttaaggccattgctcaaagagaattgggacgagtgaaagatgaaattcaacggctggaaaatgagatggcttcaatactggaaaagaaaagtgataaagaaaatggcatatttaaagccactcaaaaattggatggtttgaaatgtcaaatgaactgggaccagcaagcattggaggcctggttagaagaatcagctcataaagatagtgatgctctcactctccagaagtatgcacaacaagatgataataaaatcagggcactgactctgcaattagaaagactaactttggaatgtaatcagaaaagaaagatacttgacaacgaacttacagagactataagcgcacagttagaattggataaagcagcacaagattttcgtaagattcataatgaaagacaagaactcattaaacaatgggagaacacaatagaacagatgcagaagagggatggagacatagataactgtgctttggaattagcaaggataaagcaggaaacgagagaaaaagaaaatttggttaaagaaaagatcaagtttttggaaagtgagattgggaataacacagagtttgagaaaagaatttctgtggctgatcgtaaacttttaaaatgtagaacggcatatcaggaccatgaaactagtagaattcagctgaagggtgagctggattctttaaaagccactgtgaatagaacttccagtgatttagaagctctgaggaaaaatatttccaagataaagaaggacattcatgaagaaacagcaaggttacaaaaaactaaaaatcataatgagataatacaaacaaaattaaaggagataactgagaaaaccatgtctgtagaagagaaagctactaatttggaagatatgctaaaggaggaggaaaaagatgtgaaggaagtagatgttcaactgaacctcataaaaggtgtgctgtttaagaaagctcaggagttacagactgagacaatgaaagaaaaagctgttttatcagaaattgaaggaactcgttcctctctgaaacatctcaaccatcagttacaaaaactggattttgaaaccttgaagcagcaagaaattatgtacagccaggattttcacattcaacaagtggaacggagaatgtcacggttaaagggagaaattaattcagaagaaaaacaagcgcttgaagcaaaaattgttgaacttaggaagtctttggaagagaaaaaatctacatgtggccttttggaaacacagatcaagaagcttcataatgatctttattttatcaagaaggcacatagtaaaaacagtgatgaaaaacagtcccttatgaccaaaataaatgaactaaaccttttcatcgacagatcagagaaagaacttgataaagccaaaggttttaagcaggatttgatgatagaggacaatcttttaaaacttgaagttaagcgtactcgagaaatgcttcacagtaaggcagaagaagttctttccctagaaaaaagaaaacagcaattatacacagcaatggaagagcgaactgaagaaatcaaggttcataaaacaatgcttgcgtcacaaataagatatgttgatcaagaacgggaaaacataagcactgagtttcgcgagcggctaagtaaaattgagaagctgaagaatagatatgaaattctgactgttgttatgctgcctcctgaaggagaagaggagaaaacacaggcctattatgtaataaaggtgatgagtatgagctaaaaattcaactagaagaacaaaaaagagctgttgatgaaaaatacagatacaaacaaagacaaatcagagaacttcaagaagacatccagagcatggaaaatacattagatgttatagaacatttggcaaataatgttaaagaaaagttatcagagaagcaggcttattcatttcaactaagtaaagaaacggaggagcagaagccaaaattagaaagagtgaccaaacagtgtgcaaaactcacaaaggaaatccgtcttttgaaagacacaaaagatgaaacaatggaagaacaagacatcaaacttcgtgaaatgaaacagtttcacaaagttattgatgaaatgttagttgatatcatagaagaaaatactgagatccgtattatccttcaaacatactttcaacagagtgggttagaactacctacagctagcacaaaaggcagtcgtcagagctctagatctccttcacatacttcactatcagcaaggtcatctaggagtacaagtacatctacttctcagtcttcaattaaagtactggagcttaaattcccggcctcctcttcactagtaggcagcccttctaggccatctagtgctagtagtagctctagtaatgttaagagcaaaaagagcagcaaataaacattttaatctcttctgaaaaagttgtaaacacaaaaacaaaaatatactttaaaatacaaaacgacccaacacattttatctagtggaaagtgtaaaaacttagtggtaagtgtaaaaactgatagttttaaaaaaaaaggaacgttctcattttctctactgttttcttcatactgaagaaattaatagcagattcttgacaaggctacatgttatacaagcataggaaaaatgctgtatttcactgtaattctgatgttcgtagtgttagaaaatagtttgcttcattatttcacgaaactacactcacttctaatgtaacaatctttcaagaagaaatttctaaagatttactgtactattatgagcgtattgcaatgtgaaaatctcatttaccctacaagacaccaaaattaggttttctttattcaaagtaactatttctcagacttttggggagaaaaattgttaaaggcagtttcttcttttgctataatttttaaccaaaaaatagcatcaacccctacccaccccacccccccaaaaaaaaaccggtaagagaaacactgtatatcaattttaaaatgcagcataaatttagaaaaatcacttctgaccttgaaataaatcacttctgaccttgaaataaacgcattaaagatttgctttcagatacagccaaccaagtataaacaattttgaaattttcttgatttaataaacgatttaatgaaagctaggtatgacttgatttgcaatagaaatttcatttacagttggaggtagactgccaaatgtagtagtttttccagttaacacttcattataacatgtgcccaacactttgtactcttggaatagagtgtggaatattataaaactggattttaaataaatgtattagaattcacgaatgtacatgtgtctccttcaaaccttgggaaaaaatgctcattacaactgtcattattttagaactgttgtttgtacttctttctga

SEQ ID NO: 488 - DNA, 2532 bp, Homo sapiens
acagctctggtcctcacagccagtgcaccggaggggcgcgctcccgagctggcgcagtttcccagcgcggtgcccgcccctcatcctcctccagtctccctcccctcgccgactgccgccccaggctccgccatggggaatgtgccatccgcggtgaagcactgcctcagctaccagcagcttctccgggagcatctctggatcggggattcagtggcaggggcgctcgaccccgcgcagacttctcttctaacaaaccttcactgctttcagcccgatgtctctggcttctcagtctccttggcaggcacggtggcttgtatccactgggaaacatcccagttatctggactccctgagtttgttaaaatagtagaagttgggcctagggatggattgcagaatgaaaaggttatagttcctacagatataaaaattgaatttatcaatcgactttcccaaactggcttgtctgtaatagaagtgactagctttgtgtcttccagatgggtaccacagatggctgatcacactgaagtaatgaaaggcattcatcaatatccaggagttcgctatcctgtccttactcctaatcttcagggttttcaccatgctgttgctgctggagctactgagatatcagtttttggagctgcatctgaatcctttagcaagaagaatattaactgttccattgaagaaagtatgggaaaatttgaggaggttgttaagtctgcaagacacatgaatattccagcacgagggtatgtgtcttgtgctctgggctgtccatatgaaggaagtattacaccgcaaaaagtgacagaagtgtctaagagattgtacggcatgggttgttatgagatctctctaggagacacaattggagtgggaactccaggaagtatgaaaagaatgttggaaagtgtgatgaaagaaatcccaccaggtgctcttgctgttcactgtcatgacacatacggacaagccttagcaaatatccttacggcccttcagatgggaattaatgtggtggactccgcagtatccggattaggtggctgcccttatgcaaaaggtgcttctgggaatgtagccactgaggatttgatatatatgcttaatggcctggggctcaatacaggtgtgaatctatacaaagtgatggaagctggtgactttatttgcaaagctgtgaataaaaccacaaactctaaagtagcacaagcctccttcaatgcttgacttgaatggatttatgacgtaccgttgagaagatcaatttcagctacaatactcatctgaaaatcattaatgccaacttgctctgatatgtgaagtaatggacaagagtgggaaaaaagagatccttttcaaaaagattataactggatagattaagtcaacaaaatgcaatatcagtcatcaggtaaattgcaagctgaggataaataataaaacttgtcataattttgaacttggaaaaaagtttcttttgctctcatagaaataactttttaatttagtagatgggaaaattgacttcgtatttccccaagtatcaaatactgtgttaatacttaatcaagcaggcttaacactgtgtacatattgtcagtagtttatgagctcctgcatagtatgcagagtgtgtggcctcaatattatacattatgcctctggatctcaactactcatttgccaagtcagttatgttatggaccaaaagccaaatctccatctgaccctacataattttagcaatagaacttttatatttcaagtatggctaacatctgttaactatttcagtgactttatctggttccaagaggctgtggccaatggcaagatgccatatcctggaaacatattacgacctcccatgtttgttacatgcatccagtttaccacactttacctgtcatcagttatagtaaaaaccagcatggtgttactcaactattgagaaattgtaagctatttttttttgtcctgatgtctaaattgcagtgataagaataggttgatacatgtatcataatctacctttataattttcagatcactttcaaattgcccaaggaaatattgtgatcctaagaatattaagataattttaggttaatgaaatacccattttccttttattcatggtgctttgcttacccacattattttttggtgtattttttagtggttattttagaagttgaagtggctgaaattttgtctattgtcttagaattgattgccagaaattgcaagatgtaatatatcaaagtcagggatgaggagcaggaggactattcaagataaacttctgtaacctatgcatattttatgggggcagtattattacaaatggatctgaaatgtcagttctagtatttagagagacttctctaataataccgggtgatattatctttgagtaaatttgaatataaattgaaacataaaaatgagtattgtgaactttctaggaaatattcattaaaaccattgaaataaaaataaattcaagaaagt

SEQ ID NO: 489 - DNA, 3146 bp, Homo sapiens
caagtatgcaatctctgtaaacccgctagaaccagtcatggtcggtgggctccttaccaggagaaaattaccgaaatcactcttgtccaatcaaagctgtagttatggctggtggagttcagttagtcagcatctggtggagctgcaagtgttttagtattgtttatttagaggccagtgcttatttagctgctagagaaaaggaaaacttgtggcagttagaacatagtttattcttttaagtgtagggctgcatgacttaacccttgtttggcatggccttaggtcctgtttgtaatttggtatcttgttgccacagagagtgtgtttggtcagtcttatgacctctattttgacattaatgctggttggttgtgtctaaaccataaaagggaggggagtataatgaggtgtgtctgacctcttgtcctgtcatggctgggaactcagtttctaaggtttttctggggtcctctttgccaagagcgtttctattcagttggtggaggggacttaggattttatttttagtttgcagccagggtcagtacatttcagtcacccccgcccagccctcctgatcctcctgtcattcctcacatcctgtcattgtcagagattttacagatatagagctgaatcatttcctgccatctcttttaacacacaggcctcccagatctttctaacccaggacctacttggaaaggcatgctgggtctcttccacagactttaagctctccctacaccagaatttaggtgagtgctttgaggacatgaagctattcctcccaccaccagtagccttgggctggcccacgccaactgtggagctggagcgggagggaggagtacagacatggagttttaattctgtaatccagggcttcagttatgtacaacatccatgccatttgatgattccaccactccttttccatctcccagaagcctgctttttaatgcccgcttaatattatcagagccgagcctggaatcaaactgcctctttcaaaacctgccactatatcctggctttgtgacctcagccaagttgcttgactattctcagtctcagtttctgcacctgacaaatagggtttatgttaacctaactttcagggctgtcaggattaaatgagcatgaaccacataaaatgtttggtgtatagtaagtgtacagtaaatacttccattatcagtccctgcaattctatttttcttccttctctacacagcccctgtctggctttaaaatgtcctgccctgctttttatgagtggatacccccagccctatgtggattagcaagttaagtaatgacactcagagacagttccatctttgtccataacttgctctgtgatccagtgtgcatcactcaaacagactatctcttttctcctacaaaacagacagctgcctctcagataatgttgggggcataggaggaatgggaagcccgctaagagaacagaagtcaaaaacagttgggttctagatgggaggaggtgtgcgtgcacatgtatgtttgtgtttcaggtcttggaatctcagcaggtcagtcacattgcagtgtgtcgcttcacctggctccctcttttaaagattttccttccctctttccaactccctgggtcctggatcctccaacagtgtcagggttagatgccttttatgggccacttgcattagtgtcctgatagaggcttaatcactgctcagaaactgccttctgcccactggcaaagggaggcaggggaaatacatgattctaattaatggtccaggcagagaggacactcagaatttcaggactgaagagtatacatgtgtgtgatggtaaatgggcaaaaatcatcccttggcttctcatgcataatgcatgggcacacagactcaaaccctctctcacacacatacacatatacattgttattccacacacaaggcataatcccagtgtccagtgcacatgcatacacgcacacattcccttcctaggccactgtattgctttcctagggcatcttcttataagacaccagtcgtataaggagcccaccccactcatctgagcttatcaaccaattacattaggaaagactgtatttcctagtaaggtcacattcagtagtactgagggttgggacttcaacacagctttttgggggatcataattcaacccatgacagccactgagattattatatctccagagaataaatgtgtggagttaaaaggaagatacatgtggtacaaggggtggtaaggcaagggtaaaaggggagggaggggattgaactagacacagacacatgagcaggactttggggagtgtgttttatatctgtcagatgcctagaacagcacctgaaatatgggactcaatcattttagtccccttctttctataagtgtgtgtgtgcggatatgtgtgctagatgttcttgctgtgttaggaggtgataaacatttgtccatgttatataggtggaaagggtcagactactaaattgtgaagacatcatctgtctgcatttattgagaatgtgaatatgaaacaagctgcaagtattctataaatgttcactgttattagatattgtatgtctttgtgtccttttatccatgaattcttgcacattatgaagaaagagtccatgtggtcagtgtcttacccggtgtagggtaaatgcacctgatagcaataacttaagcacacctttataatgaccctatatggcagatgctcctgaatgtgtgtttcgagctagaaaatccgggagtggccaatcggagattcgtttcttatctataatagacatctgagcccctggcccatcccatgaaacccaggctgtagagaggattgaggccttaagttttgggttaaatgacagttgccaggtgtcgctcattagggaaaggggttaagtgaaaatgctgtataaactgcatgatgtttgcaggcagttgtggttttcctgcccagcctgccaccaccgggccatgcggatatgttgtccagcccaacaccacaggaccatttctgtatgtaagacaattctatccagcccgccacctctggactccctcccctgtatgtaagccctcaataaaaccccacgtctcttttgctg

SEQ ID NO: 490 - DNA, 2875 bp, Homo sapiens
cggaaatggagggggtcgctttcctcaccttcctcgctgcgcgggcggcggttggtaaccggtcagaccagcccgagagggacctggtgcctgtacccaggcttctgtcgctctgtcgcctgcgctatgccctgctgtagtcacaggagctgtagagaggaccccggtacatctgaaagccgggaaatggacccagtggcctttgaggatgtggctgtgaacttcacccaggaagagtggacattgctggatatttcccagaagaatctcttcagggaagtgatgctggaaactttcaggaacctgacctctataggaaaaaaatggagtgaccagaacattgaatatgagtaccaaaaccccagaagaagcttcaggagtctcatagaagagaaagtcaatgaaattaaagaagacagtcattgtggagaaacttttacccaggttccagatgacagactgaacttccaggagaagaaagcttctcctgaagtaaaatcatgtgacagctttgtgtgtgcagaagttggcataggtaactcatcttttaatatgagcatcagaggtgacactggacacaaggcatatgagtatcaggaatatggaccaaagccatataagtgtcaacaacctaaaaataagaaagccttcaggtatcgcccatccattagaacacaagaaagggatcacactggagagaaaccctatgcttgtaaagtctgtggaaaaacctttattttccattcaagcattcgaagacacatggtaatgcacagtggggatggaacttataaatgtaaattttgtgggaaagccttccattctttcagtttatatcttatccatgaaagaactcacactggagagaaaccatatgaatgtaaacaatgtggtaaatcctttacttattctgctacccttcaaatacatgaaagaactcacactggggagaagccctatgaatgtagcaaatgtgataaagcatttcatagttctagttcctatcatagacatgaaagaagtcacatgggagagaagccttatcaatgcaaagaatgtggaaaagcatttgcatataccagttctcttcgtagacatgaaaggacccactctgggaaaaaaccgtatgaatgtaagcaatatggggaaggcttatcctatcttataagttttcaaacacacataagaatgaactctggagaaagaccttataaatgtaagatatgtgggaaaggcttttattctgccaagtcatttcaaacacatgaaaaaactcacactggagagaaacgctataaatgcaagcaatgtggtaaagccttcaatctttccagttcctttcgatatcatgaaaggattcacactggagagaaaccctatgagtgtaagcagtgtgggaaagccttcagatctgcctcacagcttcgagtgcacggtgggactcacactggagagaaaccctatgaatgtaaggaatgtgggaaagccttcagatctacctcacaccttcgagtgcatggtaggactcatactggagagaaaccctatgaatgtaaggaatgtgggaaagccttcagatatgtgaagcaccttcaaattcatgaaaggacagaaaaacacataagaatgccctctggagaaagaccttataaatgtagtatatgtgagaaaggcttttattctgccaagtcatttcaaacacatgaaaaaactcacactggagagaaaccctatgaatgcaaccaatgtggtaaagccttcagatgttgcaattcccttcgatatcatgaaaggactcacactggagagaaaccctatgagtgtaagcaatgtgggaaagccttcagatctgcctcacaccttcgaatgcatgaaaggactcacactggagagaaaccctatgagtgtaagcaatgtgggaaagccttcagttgtgcctcaaaccttcgaaagcatggtaggactcacactggagagaaaccctatgagtgtaagcaatgtgggaaagccttcagatctgcctcaaaccttcagatgcatgaaaggactcacactggagagaaaccctatgaatgtaaggaatgcgaaaaagcattctgtaaattctcttcttttcaaatacatgaaaggaagcacagaggagagaagccctatgaatgtaagcattgtgggaatggattcacatctgccaagattcttcaaatacatgcaagaacacacattggagagaaacactatgaatgtaaggaatgcggaaaagcattcaattatttttcttccttgcatatacacgcaaggactcatatgggagagaagccatatgaatgtaaggattgtgggaaagcattcagctagcctggttccttttatggacatgaatagactcacactggaaggaagcactatgaatgcaagcaatgtggcaaaactttcacattttccagttcttttcgatatcatgaaaggactcacactggggagaaaccctatcaatgtaagcagtgtgggaaagccttcattccttttacttcttttcaatgtcatgaaaggactcacacgggagagaaaccctatgagtgtattctagttccgtttgatatcatgaaaggacttacactggagtgaaaccctatgaatgtaagcaatgtgggaaagccttcagatgtgcctcgcaccttcaacggcatggaagggttcacacttgggagaaactctatgaatgtaagcagtatgggaaagccttcagatctgccaagattctttgaatacagataattaatgtaaacaattatcataagtatactaacatgttattctttttaaataagaaggtataataaaatatcccattggttttatgtattagatcaagctt

SEQ ID NO: 491 - DNA, 6826 bp, Homo sapiens
tggtcagccacccctggctggctccaggcccagctccccaatattccccactaggcctcagtgtgtcctcatttctatctgtacctttgccatcctgggccatgcaacctgtagctctcggcctcttctgtctcctttcaggctgagtctctgaatctgtctccatttgtgactctggtttccatgggatacatagatgtggagcctcaggagggcaggggtagtgtgatcagtgtcaggcgccccaaagcatttattctgtgccaggccctgtgctggatgctgaaagtacggaagtggataacatacagtctctgtttccatgaagcctacaatgcacattctctgtggagtggagaaaccagggcccagccctgcctctatctcagtatggctgtacctcccctgaatctgcctgctgtgcccagggtgccaggtcagctatagcctgtggcttgaggctcttctttgcctctggcattcacaggggtatgtgtgcccgccagcaggtcccccccggctcttagggctcctgggggacttggctggtgggtgctggtgggcagcagaaggggagggagggagcagaaggcagtgactcagtgggggtggccctgggacagaactggggaggaagccaaggttggatgatgcttcctgaagccaggagggtgggaagagaggtctggctgggagttagggatggagcaggacaactccaaggctcccctctggcagccagacctgctcatgaagaaggctcctcggtagctgcctgaaagtctggactctgggggctgggctgggctgggtggggagattgctgttggtcccactgtgcctgttgtaatccccaggttcatgaaagaggtgcctgccttagagccagggaagccgttgcacccggtgccccctctccccagggaccatgggcctgggcacactgtggggctcagggtcttctcctggtcgcagagctgaccttcccacaatcttcccacaaattctggggagtgtcgggccaggcccacatgccctaaagggacctcaaatcgcacagctacccacttgggtagctttcatcagttcaggattccctgactgcgggtgaaatgagggggcagggcaccaacacagcccgagtgctggcagcgggtgaacgtataacacagggagtcttccccagtcctcacggcaaccccaggagaaaaatgactttccatttttacaggtgaggagggtgaggctcaaagagcagagttcctggagcgcccccagcaggtaagtggagaagccaggcctgggctgggggctctggctccagaaccccacctcagcaccagcctcctgcaccggactttgtggagaagggggtaagggggtgccagggatggcaaaggggtagaggatctggtggactctggcaggcctgggtcagctccacccattggtctcactcccacccggatggcagccccatcccacgtgggatcatgcgacctgtctctgggtgcccgcggcgaggcagcaccccgcttccctacacagaaggccttcccctcccgtcggctcattcagccgcggaagcccctgggagaccccgccccgccccgtcccgcggtgccccccgcgcactcaccctcgctcacccacgcggccttcctggcgggagagcgcttccggcgtcctcgccaggcccggggagtgggcacggtggagctgccgaccgttggtcgctgccccaacccacgcactgcgacgccgcgggtgaggcgcgcggtctgcggggcccgggggtgcggcggggcggggctggcgggctgtccgggcccacggagaggacggcggcgggcgggggttgctgcagggcccgcaccttgtcttccgcgccggcagggctgtgccccgtcgagacctgctcgggctgtggctccgtcctccggcctccagggggcggcgcggcgctgcgcggcgccccggcggcactgccctcccttcccagcggccaggaggcggtgtcccgtgacgccgcgcggccgcgctgtagtggccgtcgaggccgccgtctgttcgaaggctgtccgacttcacggttccccgcggctcggcccgggggcgtgagtgtcgccagcgggcgacgggggggcgcgcggtaggccctgcaacaaggccagggcctgggggggccggcaggagagcgaacccgaggcatcgtggtgccatggcggggccgcccccacgggcatgggcctgcagagcgtggccgtgaggacgctgagggtgggcgcgcacggagcagaggcccacgggcgtccgacgggggacctggacagagggacacccttaacgttattccctcttcccaggcctgaattgcagttcctgtgccctggcactaagactggcacctcctgcggcccatgcccttcgcctgcattgcccactgagtcccactcgactgtcttcagcgcggttcacactgagacccagccctctcccgctggccccgagcaggcccacctttaggagggcgtgatggaaaggcccctggagaatggggatgagtccccagactctcagggccatgccaccgactggagatttgctgtgtgcagtttcagggatgcctgggaagaggaggaacctgcttcccagatgcacgttaaggacccaggtcctccaagaccaccagccggggccacccaggatgaggagctacagggcagccccttgtccaggaaattccagttacccccagctgcagatgagtcgggggatgcccagaggggcacagtagaaagctcctcagtcctgtcagaagggccaggcccctctggagtggagagtctcctatgccccatgtcctcccacctcagcttggcacagggtgagagtgacaccccaggggtagggttggtaggggacccaggtccaagcagggcgatgccatctggcttgagccctggggcattggacagcgaccctgtgggccttggagaccctttatcagaaatatcaaagctgctggaggcagcccccagtggatccggcctccctaagcctgctgactgcctcctggcccaagacctctgttgggagctgctggccagtggtatggccaccttgccagggactcgggatgtccaaggccgggcagtgctgcttctgtgtgcccacagcccagcctggcttcagtctgagtgcagcagccaggaactcatccgcctcctgctgtacctgcgaagcatccccaggcccgaagtacaggcactgggactgacagtgctagttgatgcccgaatttgtgctccaagttcttccctcttctctgggctcagccaactacaagaagcagccccaggggccgtgtaccaggtgctgctagtgggaagcacgctgctgaaggaagtgccttccgggctgcagctggagcagttgccttctcagagcctgctgacccacatcccaacggcggggctgcccacttcgctaggaggaggcctgccttactgccaccaggcctggctggatttccgaaggcggctggaagctctactacagaactgccaggcagcttgtgccctgctccagggggccatcgaaagtgtgaaggctgtgccccagcccatggagcctggggaggtcggtcagctgctacagcagacagaggtcctgatgcagcaggtgctagactcgccatggctggcatggctacaatgccaggggggccgggagctgacatggctgaagcaagaggtcccagaggtgaccctgagcccagactacaggacggcaatggacaaggctgacgagctatatgaccgggtggatggattgctgcaccaactgaccctgcagagcaaccagcgaatacaggccctagagttggtccaaacactggaggcccgggaaagcggactgcaccagattgaagtgtggctgcagcaggtgggctggccagcactggaggaggctggggagccctcgctggacatgctgctccaggcccaaggctcttttcaggagctgtaccaggttgcccaggagcaggtcaggcaaggggagaagtttctgcagccgctgactggctgggaggcggctgaactggacccccctggggcacgctttctggccctgcgagcccagctgactgaattctctagggctttggcccagcggtgccagcggctggcggatgctgagaggctgtttcagctcttcagggaggccttgacgtgggctgaggaggggcagcgagtgttggcagagctggagcaggaacgcccgggggttgtgttgcagcagctgcagctgcactggaccaggcaccctgacttgcctcctgcccacttccgaaagatgtgggctctggccacggggctgggctcagaggccatccgccaggagtgccgctgggcctgggcgcggtgccaggacacctggctggccctggaccaaaagcttgaggcttcactgaagctaccaccggtgggcagcacagctagcctgtgtgtcagccaggtccccgctgcacctgcccaccctcccctgaggaaggcctacagcttcgatcggaatctggggcagagtctcagtgaacctgcctgccactgccaccatgcggccactattgctgcctgccgcagaccagaggctggaggaggtgccctgccccaggcatcccctactgtgcctccaccaggcagctctgaccccaggagcctcaacaggctacagctggtgctggcagagatggtggccacggagcgggagtatgtccgggctctagagtacactatggagaactatttccccgagctggatcgccccgatgtgccccagggcctccgcggtcagcgtgcccacctctttggcaacctggagaagctgcgggacttccactgccacttcttcctgcgtgagctggaggcttgcacccggcacccaccacgagtggcctatgccttcctgcgccatagggtgcagtttgggatgtacgcgctctacagcaagaataagcctcgctccgatgccctgatgtcaagctatgggcacaccttcttcaaggacaagcagcaagcactgggggaccacctggacctggcctcctacctgctaaagcccatccagcgcatgggcaagtacgcactgctgctgcaggagctggcacgggcctgcgggggccccacgcaggagctcagtgcgctgcgggaggcccagagccttgtgcacttccagctgcggcacggaaacgacctgctggccatggacgccatccagggctgtgatgttaacctcaaggaacaggggcagctggtgcgacaggatgagtttgtggtgcgcactgggcgccacaagtccgtgcgccgcatcttcctttttgaggagctgctgctcttcagcaagcctcgccatgggcccacaggggttgacacatttgcctacaagcgctccttcaagatggcagaccttggtctcactgagtgctgtgggaacagcaacctgcgcttcgagatctggttccgccgccgcaaggccagggacacctttgtgctgcaggcctccagcctggctatcaagcaggcctggacagctgacatctcccacctgctttggaggcaggccgtccacaacaaggaggtgcgcatggctgagatggtgtccatgggtgtggggaacaaggccttccgagacattgctcccagcgaggaagccatcaacgaccgcaccgtcaactatgtcctgaagtgccgagaagttcgctctcgggcgtccattgccgtagccccgtttgaccatgacagcctctacctgggggcctcgaactcccttcctggagaccctgcctcttgctctgttctggggtccctcaacctgcacctgtacagagacccagctcttctgggtctccgctgtcccctgtatcccagcttcccagaggaagcagcactggaggctgaggcagagctgggcggccagccctctttgactgctgaggactcagagatctcgtcccaatgcccatcagccagtggctccagtggctctgacagcagctgtgtgtcagggcaggccctgggtaggggcctggaggacttaccctgtgtctgagcccgggactggacgagcagtagatccagcagcctgcagctccaaggaacattgcctctctggatctgctgtgaccagggtgtggctgacacctgggctacctccaacctacatgtgcaacgctgttgactaccctttctgatgtgtgtggccattggactaactggcacggggcctctctagggaagtctggttgtagagcctgaataggctcctggccccatgaccccttctcctgtccccagctcccatcccagttgtgggttaagaataggctagagcagacattgggtgtttccatgctgtaggctggtgggggaccatgtgcctctaggcagtgactagggtgcccccacccctcaggaagaacacaggtgggctcctagcagctgatccccaatgcctggccttaaagccgagctcagttaccatagggacaggtccacctctactgggccctcatgcttgcctttcctggcccccaggcccagcccctttttactggggcagtttcgttattttgacttgatgccttttgaataactttcaatagaattgtctaaaattatcttactggttgttaggcctttggtgtctcagagaaggagtctaggtctttgatgtgtgatttaatcttttatttgtttataataaaaaatagactgatatgtaaaaaaaaaaaaaaaaaaaaaaaaaaaaaaaaaaaaaaaaaaaa

SEQ ID NO: 492 - DNA, 3961 bp, Homo sapiens
gcaacggccgttagaggagctgagggagggaaccaccgctcaccgcagacgtggtggctgcagtcagtcttcccgagtgagggatttcgccgcccgctttcaggcccgtttggcttaaataactgtgattgatggccatgcaggagaaatatccaactgaggggatctctcacgtcacttcaccgagttccgatgtgattcagaagggcagttccctggggactgaatggcagaccccagttatctcggagccctttcggagccgcttcagccgctgttcaagtgtagccgacagtggggacacagccattggtacatcatgctcagatattgcggaggatttttgcagctcaagtggcagtcctcctttccagcccatcaaaagccacgtaaccattccaacagcccatgtgatgccttctactttagggacctctcctgccaagccaaattctacacctgttggaccctcttcctctaaactccctttgtcagggttggctgaaagtgtgggaatgacaagaaatggagacctcggtgcaatgaaacattctccaggcctatctagagatctcatgtatttctctggtgctactggagaaaatggaattgagcagtcctggtttccagcagtgggccatgaaagacaagaagaggcgaggaagtttgatattcctagcatggaatctaccctcaatcagtcggcaatgatggagacactttattcagatcctcaccaccgagtccgcttccacaacccaagaaccagcacaagtaaggagttgtacagagtgttgcctgaggccaagaaggcaccgggcagcggggcagtgtttgagcggaatggaccacattctaatagcagtggggtcctccctttgggactccagcctgctcccgggctctccaagcctctgccctctcaggtgtggcagccgagtcctgacacttggcatccccgagagcaatcttgtgaactcagcacttgtcggcagcagctggaattgattcgtttacagatggagcaaatgcagcttcagaatggagccatctgccaccatcctgctgcttttggtccttcactgcccatcttagagccagcacagtggatcagcatcttgaacagtaatgaacaccttctgaaggaaaaagagcttctcattgacaagcagaggaaacacatctctcagctggagcagaaagtgcgagagagcgaactgcaagtccacagtgccctcttgggccgccctgccccctttggtgatgtctgcttgctgaggctacaggaattgcagcgagaaaacactttcttacgtgcacagtttgcacagaagacagaagccttgagcagagaaaagattgaccttgaaaagaaactctctgcttctgaagttgaagtccagctcatcagagagtcgctcaaagtggcgttgcagaagcattctgaggaagtgaagaaacaggaagaaagggtcaaaggtcgtgataaacatatcaataatttgaaaaagaaatgccagaaggaatcagagcagaaccgggagaagcagcagcgtattgagaccttggagcgctacctggctgacctgcccacactggaagaccatcagaagcagagccagcagcttaaggattctgagttgaagagcacagagctgcaggagaaagtgactgagctggagagtttgctggaggagacccaggcaatctgcagagagaaggagattcaactggaaagcctgaggcagagagaagcagaattctcctccgctggacatagcctgcaagataaacagtctgtggaggagaccagtggagaaggtccagaagtggaaatggagtcctggcagaagcgatacgattcgctccaaaagattgtggagaagcagcagcagaagatggatcagttgcgctcacaagtacagagcctagagcaggaagtggctcaagaagaaggaacaagccaggccctgagagaggaggcccagcgaagggattcagccctgcagcagctgcgcacagccgtgaaggagctttcagtgcaaaaccaggacttgattgagaagaatctgacactccaggaacacctgcgccaggcccaaccagggtctccaccttcaccagacacggcccagctggcacttgagctgcaccaggagttggccagttgccttcaagatctgcaggctgtctgtagcattgtgacccagagggcccagggccatgaccccaatctctccctgctcctgggcattcactcagcacagcacccagagactcagctagatttgcagaagccagatgtgatcaagaggaaactagaagaggttcaacagctgcgtcgtgacattgaggacttaaggaccaccatgtcagacagatatgcccaggacatgggagaaaactgtgtcacacagtgaggaattctgggggattcccccagggaggagctgggctgctgagagcctagtccagcaggtttctgccctgacattctcttgtctgctattcccagagaggtctcagaggggaggggagagcctgcatctgggggccaagggctgattagggaactgtgtcctacccacactggcatgttggattacgtttgtcctgttaattcactctcgacggtgagttactaattaacttttggcaggtacaacagataagtcctcacaaactgttcccagccctaggctgacatgagagacgaacaggctgtccacctttcttctccatccaatgggatggatccatgttcattcccacttcacaccttggtcctgctgattagagagctcatcagaggggcctggaaaggctgagcaagtaccagtgacaatggccatttaagaattctcaggccccatgtgccagccttcttgggaactgagctggctttctgggttttctcatgcctggtcttactgcttcttcctcagggctcttgttctcccagaagcctcagggtaatgtgttggttagcacgtaactactaggattggggccctagggattatagccaggactctaatctgcctaccatgccatttaacaagagatcccactctccagctgccttgtgtccctagggtcctggccatgtgtttagtgtgctaaactttctcctttgttctcaggccttccaggtagtccccttcctggacttaagagtgcaaactcttctctgtggttctagccttgggcagaattatatcccagagaccacagagcaactgtcaagctgcttaccccctcacccagggctacagcctgtgcccagccctctaatttgtgcctctcttgtgttgggggtggtgggggttattcctttccctttcctgctctggcctccttgaaagttcagagtacccagtacaagtcagctttaaagtacagcttttagtgtttcctgggttgtttctctggggctttagtgagggacctttgccctctggtttttcttgcctcctggtttagggagcatctcacacttgttagtatctggttgttgggccagccgtgcctcctctagatctggagccaggccaggcaggggccacgtgtgggccagtcagccactacaagatttttgctaagctttgggctgttggcagcatcttggacctcatgcctgggcctgaatgaggctctttcttaagtgtttttacaagtttgtgttttatttatggagtgacttatcccttccattcagagcagccccacccagccagcccttcagcctctgggctcctgctgcttaaaggcagagccgcctggttggtctccaccctgtgcattgggagcccagccaccatgctgacgggtatttttcctcataaagtttataaccagttatttatatgaatctttgttatgtccatttgtttgtattgcgtattttgattataaaataaagtatcttaacagacaaaaaaaaaaaaaaaaaaaaaaaaaa

SEQ ID NO: 493 - DNA, 2837 bp, Homo sapiens
agtctcgcgggaagctccgttgtgggcgccccggctggtggctgagctcaggccttcaggcagaggggaggcgagggcggggcggtcacgtgagagcactgccgcggtgggttgtgggggtgctgcggcgccgtttgctttgccaaaccgacaaaagagagatgatggccaacgacgccaagcccgacgtgaagaccgtgcaggtgctgcgggacacagccaaccgcctgcggatccattccatcagggccacgtgtgcctctggttctggccagctcacgtcgtgctgcagtgcagcggaggtcgtgtctgtcctcttcttccacacgatgaagtataaacagacagacccagaacacccggacaacgaccggttcatcctctccaggggacatgctgctcctatcctctatgctgcttgggtggaggtgggtgacatcagtgaatctgacttgctgaacctgaggaaacttcacagcgacttggagagacaccctaccccccgattgccgtttgttgacgtggcaacagggtccctaggtcagggattaggtactgcatgtggaatggcttatactggcaagtaccttgacaaggccagctaccgggtgttctgccttatgggagatggcgaatcctcagaaggctctgtgtgggaggcttttgcttttgcctcccactacaacttggacaatctcgtggcggtcttcgacgtgaaccgcttgggacaaagtggccctgcaccccttgagcatggcgcagacatctaccagaattgctgtgaagcctttggatggaatacttacttagtggatggccatgatgtggaggccttgtgccaagcattttggcaagcaagtcaagtgaagaacaagcctactgctatagttgccaagaccttcaaaggtcggggtattccaaatattgaggatgcagaaaattggcatggaaagccagtgccaaaagaaagagcagatgcaattgtcaaattaattgagagtcagatacagaccaatgagaatctcataccaaaatcgcctgtggaagactcacctcaaataagcatcacagatataaaaatgacctccccacctgcttacaaagttggtgacaagatagctactcagaaaacatatggtttggctctggctaaactgggccgtgcaaatgaaagagttattgttctgagtggtgacacgatgaactccaccttttctgagatattcaggaaagaacaccctgagcgtttcatagagtgtattattgctgaacaaaacatggtaagtgtggcactaggctgtgctacacgtggtcgaaccattgcttttgctggtgcttttgctgccttttttactagagcattcgatcagctccgaatgggagccatttctcaagccaatatcaaccttattggttcccactgtggggtatccactggagaagatggagtctcccagatggccctggaggatctagccatgttccgaagcattcccaattgtactgttttctatccaagtgatgccatctcgacagagcatgctatttatctagccgccaataccaagggaatgtgcttcattcgaaccagccaaccagaaactgcagttatttataccccacaagaaaattttgagattggccaggccaaggtggtccgccacggtgtcaatgataaagtcacagtaattggagctggagttactctccatgaagccttagaagctgctgaccatctttctcaacaaggtatttctgtccgtgtcatcgacccatttaccattaaacccctggatgccgccaccatcatctccagtgcaaaagccacaggcggccgagttatcacagtggaggatcactacagggaaggtggcattggagaagctgtttgtgcagctgtctccagggagcctgatatccttgttcatcaactggcagtgtcaggagtgcctcaacgtgggaaaactagtgaattgctggatatgtttggaatcagtaccagacacattatagcagccgtaacacttactttaatgaagtaaactaggcttatttctaaaaagtcaagtctattggctttggcccaaaagcactggtatctttgtattaaattcatgtttattgtcacaaaaccattatttatacctatacagttgtactgtttcttttaaagcaaagccatttaacatctttcttcattcctaatttggaaattaaagtttacctttctgttaatctatgtataaatgttactctgagttattaatgtggattttaaaattgtaagcaatagaataggaaataaaacaactacctaatacaaatatttctgataagactacaaatatctgactgagctggggattaaagtagaggtaactgtatcttaaatgagtatgatttccttgtaagttaaaaaaattgaaatttaattgtagacttcaatagtccaagttttgaaggatgtttgagcttttgtataatgccatttatacctgcagttttacagataatgtttgactgcagttgccttggaaattcctccaaagtttgccttcatctctcctctacagtttggaggtgatggtgcagcagtggaacatctcttgatgcaccacactacttgtgttctgtgaagtgatgaaagtataactggttctagtttgcacactacacacatagttttgtgaagcttcagaaatgttttttcttttccttgtggccaaaccagtttgttaatctgattatattcatctgctaatgatactaaagttaatgtaataaagcatttaaaaatcagaaaaaaaaaaaaaaaaaaaaaaaaaaaaaaaaaaaaa

SEQ ID NO: 494 - DNA, 4318 bp, Homo sapiens
cggctccccttccacgcccttcccgccggagatgaggggaagatgtctgtgtcaagattcaaggccaaactgaagttgctggcgtctatcttccacgagaaccaggaggctcagctgcggctcacgctccactgcaacatgagaatgggacaacagaagaagtgacttcagaggaagaggaagaagaggagatggctgaaacatataggaggtccaggcagcatgaacagctccctggtcagagacacatggatttgctcactggttactcaaagctgattcaaagccgattaaagctgctgcttcatctggggtcccaacctccagtgggaaaaacattcttcttttcctgctggtgtcacccactgttccacggatccaaaacaacacccaatgtttggtacaaatttagtgaaacagctctttccattcttaactcatgccaagcatctcagcttggggtcaggaaaatgccaggggacatgagctcttctcctagagttagagaattctctgccttagttgcaataaaggaaaagatacacattcttcctacaaatgccaaagtaggctcaaaatttggttcctagagtagagtattgaagtcgtggcaaagatctttccagtgatcaaagcagtggctcgttatgttccctcagactgaagctacagtctcatcttcactttctgttagctccctccatcctctgcgtaggcccacacctgcttcttacagttgtgtggattatagcacctcctctccagcctcaggacctttgtgagtgctgctccttcttccttgactgctcttcaccagggatcctcagggcacagcccttacctcctgcaagtcttgacttaaatgtcactttctcagggaggcccacactcatcaccatttcacacccacctcccacatgaccttattttacctgttctctcttctcctcttttttttagagtacttatgatctcatgtggtacattttggggtttttggttcttctgtatccgccactgccatgatcagttagaatgttggaaaccaaggaaacttggttttttggcctgtgatgaaaactatggggtctaatagtatctgataaagtggcagaccctcaattattatttgctgagtaaatgaatgaaggtgtgtagacaactagctctagaagcttaaatgagtgataccatgttttataacattggaagaggccgggaatggtggctcacgcctgtaatctcagcattttgggaggccaaggtggatggatctcttgaggtcaggagtttgagaccagcctggccaacatggtgaaaccttgtctctactaaaaatgcaaaaattagctggacgtggtggcacacgcctgtaatcccagctactctggaggctgaggcacagcatcacttgaacccaggaggcagaggttgcagtgagctgagatggtgccactgcactccagcctgggcaacagagtgagactctgtctccaaaaacagaaaaaagaaagggggggaagaaaagaagaaggaagaggaaagggaggaggaggatttatcattcacttacactagaaacagtgaaaatagataatagctataatttactcacatcttatctaaaacacaaattcagggtaatttatgagcaagtcattttccggtgggctttcgatagtgtgtgaatttggaatgaatgctggtacttccagctcccttccacctgcagcaccaggaagccattgttgtggggaggccaccaacttggctggcatgttgcttctgcctcagttagtgatgatggtgatttggagagaaaggacactctgctaggctccaaatccaaaggatcaagtggataaatgaaatgaatatctaaataaatatcaattaggtcaaaagtttgttttcatctaaatgaaatctgaacactacttagggctatgaaacatagccagaggacatggccagctctggagtggggcctggacttgctctcccctgctggaagtgcttttcctcccagagctcagagcaccatgtgcgtgtgacccctgccttttcacaggccattgccacagggcatctccctggtccacccgccccaagatgagccagcctcccactcaggaagtgggtggggaagggaaagaaagacagaggagagagagacagtcacacacaggcagtggagctcccctgcacccaccagggagcttgagcagctcatctgcagagcagggaaacatttttactaccattgggaagacgctgagcagagaggtgaggggacagcatttcttgtctccctgtggcttgttccactcacagttcagtttctcctgttcttggggaaaaggagggaaactgtattagtcagggttctacagagaaacagacccaataagatgtgtgcatgtgtgtgtgtgtttatatatgttcacagaatgtatatatgtgtatatatatgtatatggataactgcatatatatattatttatagagagagagaagagcaggagacagagataaagagagattcatataaagaattatattcataatttatataataatttgttcctttaatcataaagtctggcaagtccaaaatctgcagggcaggccagaagcctgggcaccccggaaagagttgcatctagactctgaagacggtctggaggcagaattccctctttcccagggaattccagtctgttttctctgaaggcctttactgactagatgaggcccccacacacatggaaagcaatctgccctactgaaagtctactgacttagaggtttagctcatctaaaaaataccttcgtagcaatttcgagactggtatttgaccaaatagctgagtaggttggcctagccaatctgacacataaaattaactatcacagaaacaaaataatcaatataggtaataactgtgccagaatgctgtgatgtttcaggatgaccttgtttacatttacatttattgtcaaaacttaccttctctttttatatgggcaattaaatctgctactgagggtatcaagtactgatttaatttacaatcttaatagataagataggttcctattttctcctctccataaaagtaataagtttggagaaaccaggtcggaaatacctctccagattttaaagcataacctcttgtttggaataataagtatgtaaataagcaccataaaatatgaaaccaaacatttcatcattcttttatatacattatcccttgcatttttaaaaaataaggaacaccttattagccatattttcaaatggtgaaaccaacacccccagctcagactctgccgtggtaggctccagggtcactgataccagatcccatggtattttcactatatcccactctttctttgcatgtggctcttttttagctgcattgcgggtaaacaggtgtggctcttttcaaaccaattccatgcatatgtgaagaaaattgatcctgaagttccttttgccaaagatgcttatggagaagtgtctgtgtctggacagacaaaagtgtccatttttgcctcgaagcttggcaaaattgaaattgatgatggggaagctagaaatacttcagtctacatttcgaatcccagctgcggggaggctggttgaggattgcccatccctcagtctgggctggattctccctccagtctctggggttctcttttctattcacaagagggtgctaatgagatggtttaatctctataccctgtggtccacaaatacaagatgccagcgtggccaatggggcttccataagagtggcaatcaggggtctcaagcttaccatgacgttttgggccctggaatcagatcatagttctacagttgtcctggcactagaactcatgacaaggttgtgactagacagaaggagagaaggctggaggctgacaggaagcaatgtgaacaaatgccttcgcaggatgcatgggtttgggcaacagatggtcaggggaggtgctggtgcagacgggctcagtagcaaagcaataactgtggatggccattttatggctgcagatcacagcacatttataaaagatgtgtgtttcatgaaaatgtgcatttcatcgtggaaatactgtggttggaggagatttctcaaagctgataaataagtgtaggtgacttaacttgcaaaagatgatcatatgtgagaacggatgtctcaaattaggaaataacttgttaagtaaaaaagcctcatgtattgatttgaagaaaaagatattttggtgctcatcaaaataaaagtataataa

SEQ ID NO: 495 - DNA, 4614 bp, Homo sapiens
ccttttcccaggcggtagcgggggcggtggttctgttgtcctgttgcccttttaagctgcggcttgacaggggccgcgcctcctgtcggtggagtcggctacaaagggagcagccccccaggccgccacacagctcccgccaagacctggtgccccttgccattttccagccgcgctcccaggagagtggaggctgcaggaagaggcgggtctttaggctcacaagagctcggccaggcggccccgcggggtggtcgtggccatgacagcggctccagacggctccccttccacgcccttcccgccggagatgaggggaagatgtctgtgtcaagattcaaggccaaactgaagttgctggcgtctatcttccacgagaaccaggaggctcagctgcggctcacgctccactgcaacatgagaatgggacaacagaagaagtgacttcagaggaagaggaagaagaggagatggctgaaacatataggaggtccaggcagcatgaacagctccctggtcagagacacatggatttgctcactggttactcaaagctgattcaaagccgattaaagctgctgcttcatctggggtcctaacctccagtgggaaaaacattcttcttttcctgctggtgtcacccactgttccacggatccaaaacaacacccaatgtttggtacaaatttagtgaaacagctctttccattcttaactcatgccaagcatctcagcttggggtcaggaaaatgccaggggacatgagctcttctcctagagttagagaattctctgccttagttgcaataaaggaaaagatacacattcttcctacaaatgccaaagtaggctcaaaacttggttcctagagtagagtattgaagtcgtggcaaagatctttccagtgatcaaagcagtggctcgttatgttccctcagactgaagctacagtctcatcttcactttctgttagctccctccatcctctgcgtaggcccacacctgcttcttacagttgtgtggattatagcacctcctctccagcctcaggacctttgtgagtgctgctccttcttccttgactgctcttcaccagggatcctcagggcacagcccttacctcctgcaagtcttgacttaaatgtcactttctcagggaggcccacactcatcaccatttcacacccacctcccacatgaccttattttacctgttctctcttctcctcttttttttagagtacttatgatctcatgtggtacattttggggtttttggttcttctgtatccgccactgccatgatcagttagaatgttggaaatcaaggaaacttggttttttggcctgtgatgaaaactatggggtctaatagtatctgataaagtggcagaccctcaattattatttgctgagtaaatgaatgaaggtgtgtagacaactagctctagaagcttaaatgagtgataccatgttttataatattggaagaggccgggaatggtggctcacgcctgtaatctcagcattttgggaggccaaggtggatggatctcttgaggtcaggagtttgagaccagcctggccaacatggtgaaaccttgtctctactaaaaatgcaaaaattagctggacgtggtggcacacgcctgtaatcccagctactctggaggctgaggcacagcatcacttgaacccaggaggcagaggttgcagtgagctgagatggtgccactgcactccagcctgggcaacagagtgagactctgtctccaaaaacagaaaaaagaaagggggggaagaaaagaagaagaaggaagaggaaagggaggaggaggatttatcattcacttacactagaaacagtgaaaatagataatagctataatttactcacatcttatctaaaacacaaattcagggtaatttatgagcaagtcattttccagtgggctttcgatagtgtgtgaatttggaatgaatgctggtacttccagctcccttccacctgcagcaccaggaagccattgttgtggggaggccaccaacttggctggcatgttgcttctgcctcagttagtgatgatggtgatttggagagaaaggacactctgctaggctccaaatccaaaggatcaagtggataaatgaaatgaatatctaaataaatatcaattaggtcaaaagtttgttttcatctaaatgaaatctgaacactacttagggctatgaaacatagccagaggacatggccagctctggagtggggcctggacttgctctcccctgctggaagtgcttttcctcccagagctcagagcaccatgtgcgtgtgacccctgccttttcacaggccattgccacagggcatctccctggtccacccgccccaagatgagccagcctcccactcaggaattgggtggggaagggaaagaaagacagaggagagagagacagtcacacacaggcagtggagctcccctgcacccaccagggagcttgagcagctcatctgcagagcagggaaacatttttactaccattgggaagacgctgagcagagaggtgaggggacagcatttcttgatttcttgtctccctgtggcttgttccactcacagttcagtttctcctgttcttggggaaaaggagggaaactgtattagtcagggttctacagagaaacagacccaataagatgtgtgcatgtgtgtgtgtgtttatatatgttcacagaatgtatatatgtgtatatatatgtatatggataactgcatatatatattatttatagagagagagaagagcaggagacagagataaagagagattcatataaagaattatattcataatttatataataatttgttcctttaatcataaagtctggcaagtccaaaatctgcagggcaggccagaagcctgggcaccccggaaagagttgcatctagactctgaagacggtctggaggcagaattccctctttcccagggaattccagtctgttttctctgaaggcctttactgactagatgaggcccccacacacatggaaagcaatctgccctactgaaagtctactgacttagaggtttagctcatctaaaaaataccttcatagcaatttcgagactggtatttgaccaaatagctgagtaggttggcctagccaatctgacacataaaattaactatcacagaaacaaaataatcaatataggtaataactgtgccagaatgctgtgatgtttcaggatgaccttgtttacatttacatttattgtcaaaacttaccttctctttttatatgggcaattaaatctgctactgagggtatcaagtactgatttaatttacgatcttaatagataagataggttcctattttctcctctccataaaagtaataagtttggagaaaccaggtcggaaatacctctccagattttaaagcataacctcttgtttggaataataagtatgtaaataagcaccataaaatatgaaaccaaacatttcatcattcttttatatacattatcccttgcatttttaaaaaataaggaacaccttattagccatattttcaaatggtgaaaccaacacccccagctcagactctgccgtggtaggctccagggtcactgataccagatcccatggtattttcactatatcccactctttctttgcatgtggctcttttttagctgcattgcgggtaaacaggtgtggctcttttcaaaccaattccatgcatatgtgaagaaaattgatcctgaagttccttttgccaaagatgcttatggagaagtgtctgtgtctggacagacaaaagtgtccatttttgcctcgaagcttggcaaaattgaaattgatgatggggaagctagaaatacttcagtctacatttcgaatcccagctgcggggaggctggttgaggattgcccatccctcagtctgggctggattctccctccagtctctggggttctcttttctattcacaagagggtgctaatgagatggtttaatctctataccctgtggtccacaaatacaagatgccagcgtggccaatggggcttccataagagtggcaatcaggggtctcaagcttaccatgacgttttgggccctggaatcagatcatagttctacagttgtcctggcactagaactcatgacaaggttgtgactagacagaaggagagaaggctggaggctgacaggaagcaatgtgaacaaatgccttcgcaggatgcatgggtttgggcaacagatggtcaggggaggtgctggtgcagacgggctcagtagcaaagcaataactgtggatggccattttatggctgcagatcacagcacatttataaaagatgtgtgtttcatgaaaatgtgcatttcatcgtggaaatactgtggttggaggagatttctcaaagctgataaataagtgtaggtgacttaacttgcaaaagatgatcatatgtgagaaaggatgtctcaaattaggaaataacttgttaagtaaaaaagcctcatgtgttgatttgaagaaaaagatattttggtgctcatcaaaataaaagtataataagctgaa

SEQ ID NO: 496 - DNA, 5411 bp, Homo sapiens
ggcggccaggtggaggacctgagcaagcagctcaagcgtgtggacggccaggtgcagggcatcgccacgcacgtgcagcacttctcccaggccagcgggcttgacctggccgcgctagagtggccggaggagcaggaggtgggcgtgcgggcgttcgatagggtgcggactgggagtatcatgaaggacgccgccgaggagctcagctttgccagggtacttttacagcgggttgatgaactagagaagctattcaaagatcgggagcaattcctggaactagtcagccggaagctgagtttggttcctggtgcagaagaagtcaccatggtcacctgggaagagctggagcaggcgattacggacggctggagagcctcacaagcgggctcagaaacacttatgggattttctaagcacggagggttcacttccttaacatcacctgaagggactctaagcggagactctaccaagcaaccaagtattgagcaggctctggattctgccagtggtcttggcccggatcggactgcatcaggatctggtggcacagcacacccctctgatggggtttccagtagggaacaaagcaaggtcccctctggtactgggagacagcagcagccgagggcccgtgatgaagctggcgtgccacgactccatcagtcttctacattccaattcaaatcagactcagatcgtcacaggagtagagagaagcttacctcgacacaaccaagaagaaatgcacgtcctggtccagttcaacaggacttacccttggccagagaccagcccagtagtgtgcccgctagccagagtcaggtccatctaaggccagatcgtcgtgggttagaaccaactggcatgaatcagcctggattagtgcctgctagcacttacccacatggtgtggtacccctcagcatgggtcagcttggtgtgccaccacctgaaatggatgatcgggaattgataccatttgtcgtggatgagcaacgtatgttgccaccatcagtacctggcagagaccagcaaggattggaactacctagcacagaccaacatggtctggtttcagtcagtgcatatcagcatggtatgacatttcctggcacagaccaacgcagtatggaaccacttggcatggatcagcgtggatgtgtaatatcaggcatgggtcagcaaggactagtaccccctggtatagaccagcaaggattgacattgcctgtcgtcgatcaacatggcctggttctaccttttacagaccagcatggtttggtatcacctggtttgatgccaattagtgcagatcagcaaggttttgtgcagcccagtttggaagcaactggcttcatacaacctggcacagagcagcatgatttgatccagtctggcagatttcagcgtgctttggtgcagcgtggtgcatatcagcctggcttggtccaacctggtgcagatcagcgtggtttggtccggcctggaatggatcagtctggtttggcccaacctggtgcagatcagcgtggtttggtctggcctggaatggatcagtctggtttggcccaacctggtagagatcagcatggtttgatccagcctggcacaggtcagcatgatttggtccaatctggcacaggtcagggtgtcttggtacagcctggtgtagatcagcctggcatggtccaacctggcagatttcagcgtgctttggtgcagcctggtgcatatcagcctggcttggtccaacctggtgcagatcagattgatgtggtgcaacctggtgcagatcagcatggtttggtacaatctggtgcagatcagagtgatttggctcaacctggtgcagttcagcatggtttggtccaacctggagtagatcagcgtggtttggcacaacctcgtgcagatcatcagcgtggtttggtcccacctggtgcagatcagcgtggtttggtccaacctggtgcagatcagcatggtttggtccaacctggagtggatcagcatggtttggcacaacctggtgaagttcagcgtagtttggtgcaacctggtatagttcagcgtggtttggtgcaacctggtgcagttcagcgtggtttggtgcaacctggtgcagttcagcgtggtttggtccaacctggagtggatcagcgtggtttggttcaacctggtgcagttcagcgtggtttggtccaacctggtgcagttcagcatggtttggtccaacctggtgcagatcagcgtggtttggtccaacctggagtggatcagcgtggtttggtgcaacctggagtggatcagcgtggtttggtccaacctggaatggaccagcgtggtttgatccaacctggtgcagatcagcctggtttggtccagcctggtgcaggtcagctgggtatggtgcagcctggaataggtcagcaaggtatggtgcaacctcaggcagatccacatggcctggtacaacctggtgcctatcctcttggtttggtacaacctggtgcatatttgcatgatttatctcaatctgggacatatccacgtggtctggtgcagccaggaatggatcagtatggtttgagacaacctggtgcatatcagccaggcttgatagcaccaggcacaaagcttcgtggctcttcaacattccaggcagattctacaggttttatatcagtacgtccatatcaacatggtatggtacctcctggcagagaacaatacggccaggtgtcaccactcctagccagtcaaggtttggcatcacctggtatagatcgaaggagtttggtaccaccagaaacttatcagcaaggtttgatgcatcctggcacagaccagcacagcccaataccactgagtacaggtttgggatctacacacccagatcaacagcatgtggcatcacctggcccaggtgagcatgaccaggtatacccagatgcagctcagcatggccatgctttctctctctttgacagtcatgattcaatgtatcctggttatcgtggcccagggtatctaagtgctgatcagcatggccaggaaggtttggatccaaatagaacacgagcctcggaccgacatggaattcctgcccagaaggccccaggccaagatgtcactcttttcaggagtccagactccgtcgaccgagtcttatcagaagggagcgaagtctcgagtgaagtcctgagtgagcgacgcaattcactgcgtagaatgagttctagtttccccacggcagtggagacatttcatctgatgggagagctcagtagcctctatgtggggctaaaggagagtatgaaggatctggatgaggagcaggccggccaaaccgacttggagaagatccagttcctgctggcacagatggtcaaaaggaccatacctcctgaactgcaggagcagctgaagaccgtaaagacgctagccaaagaagtttggcaggagaaagcaaaagtggaaaggctgcagaggatcctggaaggggaagggaatcaagaagcagggaaggaactgaaagctggagagctgagattgcagctgggtgtcctcagagtcaccgtggctgacatagaaaaggagctggccgagttgagggagagccaagacaggggcaaggctgccatggaaaattctgtctctgaagcctccctttacctgcaggaccagttggacaagctcaggatgatcattgagagcatgctgacctcctcctccacgctcctgtccatgagcatggccccgcacaaggcccacaccttggctcctggccagatcgaccctgaggccacctgtccagcctgcagcctggatgtgagccatcaggtcagcacgctggtgcggcgctatgagcaactccaagacatggtcaacagcctggccgtctcccgaccctccaagaaggccaagctccagagacaggacgaggagctgctgggccgtgtgcagagtgccatcctgcaggtgcagggtgactgcgagaagctcaacatcaccaccagcaacctcatcgaggaccatcggcagaaacagaaggacattgctatgctgtaccagggtctggagaagctcgaaaaggaaaaggccaacagggagcacctggagatggagatcgatgtgaaagccgacaagagtgctctggccaccaaagtgagccgtgtccagtttgatgccaccacggagcagctgaaccacatgatgcaggagctggtggccaagatgagcgggcaggagcaggactggcagaagatgctggacaggctgctcacagagatggacaacaagctggaccgcctggagctggacccagtgaagcagttgctggaggatcggtggaaatcgctgcgacagcagctcagggagcgccccccactctaccaggcagacgaggcggctgccatgcggaggcagctcctggcacatttccactgcctctcatgtgaccggcccttggagacacctgtgactggacatgccatccccgtgacccccgcgggtccaggcctacctgggcaccattccatccgcccctacacggtgtttgaactggagcaggtccggcagcatagccgcaacctcaagctgggcagcgccttccctcggggtgacctggcgcagatggagcagagcgtggggcgcctgcgctccatgcactccaagatgctgatgaacattgagaaggtgcagatccacttcgggggctccaccaaggccagcagccagataatccgcgagctgctgcacgcccagtgcctgggctccccctgctacaaacgggtgacagatatggctgattacacctactcaactgtgccccggcgctgcgggggcagccacaccctcacctacccctaccaccgcagccgcccgcagcaccttccccggggcctgtatcctactgaagagatccagattgccatgaagcatgatgaggtggacatcttgggcctggatggccacatttacaagggacggatggacacaaggctgccaggcatcctccgaaaagacagctcagggacctcaaagcgcaagtcccagcagcccaggccccacgtgcacaggccgccatccctcagcagcaatggccagctgccctctcggccacagagcgcccagatttcggctggcaacacctcagaaagatagaccttcctccgagggccgtctctcccagccgaacacagcccacccgcccagctccgcctcggtggcaaacagggggctggagaggcacgtggacatgcctcctggggaggggctcgaggagcccacgcgggggccgcggtccagcaccgctcagtgagcggaggtgtaaataaacattcaggaggaaaaaaaaaaaaaaaaaaaaaaaaaaaaaaaaaaaaaaaaaaaaaaaaaaaaaa

SEQ ID NO: 497 - DNA, 2355 bp, Homo sapiens
gcagaggaggcggcggaacaccccgggttggtcgggtttccaagggctgacccgagctccagcactttttccgcgcctgatttttcagagctcttcagaaaccaggctgctttcaggaacattgctgtggattcccagggcctattccactagaagcaagatggctgaactcaatactcatgtgaatgtcaaggaaaagatctatgcagttagatcagttgttcccaacaaaagcaataatgaaatagtcctggtgctccaacagtttgattttaatgtggataaagccgtgcaagcctttgtggatggcagtgcaattcaagttctaaaagaatggaatatgacaggaaaaaagaagaacaataaaagaaaaagaagcaagtccaagcagcatcaaggcaacaaagatgctaaagacaaggtggagaggcctgaggcagggcccctgcagccgcagccaccacagattcaaaacggccccatgaatggctgcgagaaggacagctcgtccacagattctgctaacgaaaaaccagcccttatccctcgtgagaaaaagatctcgatacttgaggaaccttcaaaggcacttcgtggggtcacagaaggcaacagactactgcaacagaaactatccttagatgggaaccccaaacctatacatggaacaacagagaggtcagatggcctacagtggtcagctgagcagccttgtaacccaagcaagcctaaggcaaaaacatctcctgttaagtccaatacccctgcagctcatcttgaaataaagccagatgagttggcaaagaaaagaggcccaaatattgagaaatcagtgaaggatttgcaacgctgcaccgtttctctaactagatatcgcgtcatgattaaggaagaagtggatagttccgtgaagaagatcaaagctgcctttgctgaattacacaactgcatcattgacaaagaagtttcattaatggcagaaatggataaagttaaagaagaagccatggaaatcctgactgctcgtcagaagaaagcagaagaactaaagagactcactaaccttgccagtcagatggcagagatgcagctggccgaactcagggcagaaattaagcactttgtcagcgagcgtaaatatgacgaggagctcgggaaagctgcccggttttcctgtgacatcgaacagctgaaggcccaaatcatgctctgcggagaaattacacatccaaagaacaactattcctcaagaactccctgcagctccctgctgcctctgctgaatgcgcacgcagcaacctctgggaaacagagtaacttttcccgaaaatcatccactcacaataagccctctgaaggcaaagcggcaaaccccaaaatggtgagcagtctccccagcaccgccgacccctctcaccagaccatgccggccaacaagcagaatggatcttctaaccaaagacggagatttaatccacagtatcataacaacaggctaaatgggcctgccaagtcgcagggcagtgggaatgaagccgagccactgggaaagggcaacagccgccacgaacacagaagacagccgcacaacggcttccggcccaaaaacaaaggcggtgccaaaaatcaagaggcttccttggggatgaagacccccgaggccccggcccattctgaaaagccccggcgaaggcagcacgctgcagacacctcggaggccaggcccttccggggtagtgtcggtagggtttcacagtgcaatctctgccccacgagaatagaagtttccacagatgcagcagttctctcagtcccggctgtgacgttggtggcctgagctaggaggaaaaagagcagttttcactcagttttggttccctgcccgaggtgctgacccaattcgctgccaaaagagtgtcaatcagaatatacaaatcccgtatggttgtgtcatcctctcttaatcatttttactaattctaataatcagctctagcttgcttcataattttcatggctttgcttgatctgttgatgctttctctcatcaagactttgcagcattttagccaggcagtatttactcattattaggaaaatcaagatgtggctgaagatcagaggctcagttagcaacctgtgttgtagcagtgatgtcagtccatagattgtctttagagagttaatgttacaaaaaagaattcttaataatcagacaaacatgatctgctgaggacacatgcgcttttgtagaatttaacatctggtgtttttctgaaaaaatatatatacatatattgctttatttgaaacaaattaaaatatgctgcatttgaaaaaaaaaaaaaaaaaaaa

SEQ ID NO: 498 - DNA, 2817 bp, Homo sapiens
gtgcgcagccgcgcggcattctggggccggaagtggggtgcacgcttcgggttggtgtcatggcagctgcggggagccgcaagaggcgcctggcggagctgacggtggacgagttcctagcttcgggctttgactccgagtccgaatccgagtccgaaaattctccacaagcggagacacgggaagcacgcgaggctgcccggagtccggataagccgggcgggagcccctcggccagccggcgtaaaggccgtgcctctgagcacaaagaccagctctctcggctgaaggacagagaccccgagttctacaagttcctgcaggagaatgaccagagcctgctaaacttcagcgactcggacagctctgaggaggaagaggggccgttccactccctgccagatgtgctggaggaagccagtgaggaggaggatggagcggaggaaggagaagatggggacagagtccccagagggctgaaggggaagaagaattctgttcctgtgaccgtcgccatggttgagagatggaagcaggcagcaaagcaacgcctcactccaaagctgttccatgaagtggtacaggcgttccgagcagctgtggccaccacccgaggggaccaggaaagtgctgaggccaacaaattccaggtcacggacagtgctgcattcaatgctctggttaccttctgcatcagagacctcattggctgtctccagaagctgctgtttggaaaggtggcaaaggatagcagcaggatgctgcagccgtccagcagcccgctctgggggaagcttcgtgtggacatcaaggcttacctgggctcggccatacagctggtgtcctgtctgtcggagacgacggtgttggcggccgtgctgcggcacatcagcgtgctggtgccctgcttcctgaccttccccaagcagtgccgcatgctgctcaagagaatggtggtcgtatggagcactggggaagagtctctgcgggtgctggctttcctggtcctcagcagagtctgccggcacaagaaggacactttccttggccccgtcctcaagcaaatgtacatcacgtatgtgaggaactgcaagttcacctcgcctggtgccctccccttcatcagtttcatgcagtggaccttgacggagctgctggccctggagccgggtgtggcctaccagcacgccttcctctacatccgccagctcgccatacacctgcgcaacgccatgaccacccgcaagaaggaaacataccagtctgtgtacaactggcagtatgtgcactgcctcttcctgtggtgccgggtcctgagcactgcgggccccagcgaagccctccagcccttggtctacccccttgcccaagtcatcattggctgtatcaagctcatccccactgcccgcttctacccgctgcgaatgcactgcatccgtgccctgacgctgctctcggggagctcgggggccttcatcccggtgctgcctttcatcctggagatgttccagcaggtcgacttcaacaggaagccagggcgcatgagctccaagcccatcaacttctccgtgatcctgaagctgtccaatgtcaacctgcaggagaaggcgtaccgggacggcctggtggagcagctgtacgacctcaccctggagtacctgcacagccaggcacactgcatcggcttcccggagctggtgctgcctgtggtcctgcagctgaagtcgttcctccgggagtgcaaggtggccaactactgccggcaggtgcagcagctgcttgggaaggttcaggagaactcggcatacatctgcagccgccgccagagggtttccttcggcgtctctgagcagcaggcagtggaagcctgggagaagctgacccgggaagaggggacacccctgaccttgtactacagccactggcgcaagctgcgtgaccgggagatccagctggagatcagtggcaaagagcggctggaagacctgaacttccctgagatcaaacgaaggaagatggctgacaggaaggatgaggacaggaagcaatttaaagacctctttgacctgaacagctctgaagaggacgacaccgagggattctcggagagagggatactgaggcccctgagcactcggcatggggtggaagacgatgaagaggacgaggaggagggcgaggaggacagcagcaactcggaggatggagacccagacgcagaggcggggctggcccctggggagctgcagcagctggcccaggggccggaggacgagctggaggatctgcagctctcagaggacgactgaggcagcccatctggggggcctgtaggggctgccgggctggtggccagtgtttccacctccctggcagtcaggcctagaggctggcgtctgtgcagttgggggaggcagtagacacgggacaggctttattatttatttttcagcatgaaagaccaaacgtatcgagagctgggctgggctgggctggtgtggctgctgaagccccacagctgtgggctgctgaagtcagctccgcgggggagctgaccctgacgtcagcagaccgagaccagtcccagttccagggggaggcctgcaggcccctggccccttccaccacctctgccctccgtctgcagacctcgtccatctgcaccaggctctgccttcactcccccaagtctttgaaaatttgttcctttcctttgaagtcacattttcttttaaaattttttgttttgcatccgaaaccgaaagaaataaagcggtgggaggcagggccattgtgttgaaaaaaaaaaaaaaaaaa

SEQ ID NO: 499 - DNA, 2745 bp, Homo sapiens
gcgcatgcgcgagtgtacgcgttgccggcgaagaggggagcctgacgactcggaaatttgaataccacagtagcatggagtgtgacctcatggagactgacatcttggagtcgttggaagatctaggttacaagggcccattgttggaagatggagcgctctctcaggcagtctctgctggagccagttcccccgagtttaccaaactctgtgcttggctggtgtctgaattaagagtgctctgtaaactagaggaaaacgtgcaagcaactaacagtccgagtgaagctgaagaattccagcttgaggtgagtgggctactaggggagatgaactgcccgtatctttcactgacatctggggatgtgaccaagcgccttctcattcagaagaactgcctcctcttgctcacatacctcatctcagaactagaagctgccagaatgctctgtgtgaatgctcctccaaaaaaagctcaagaaggaggcggtagtgaggtctttcaagagttgaaaggcatatgtattgctctaggaatgtccaaacctccagccaatataactatgttccaattcttcagcgggattgaaaaaaaattaaaggaaacattagcaaaagttccacctaatcatgtgggaaagcctttactgaagaagccaatgggaccagcccactgggaaaagatagaagcaattaaccaagccatagccaatgaatatgaagtccggagaaagctgctaataaaacgtttggatgtcactgtacaatcctttggctggtctgacagagctaagagccagacagaaaaattagccaaggtttaccagccgaaacgttcagtcttatcccctaaaactactatttctgttgcccatcttttggctgcaaggcaggacttgtcaaagattttaaggacaagcagcggctctataagagaaaagactgcctgtgccatcaataaggtgttgatgggcagggtgcctgacagaggtggtagacccaatgaaatcgaacctccacccccagagatgccaccgtggcagaagaggcaagatggcccccagcagcaaacaggaggccgaggaggagggagaggtggctatgaacattcctcatacggaggacgaggaggtcatgaacaaggaggcgggagaggtggacgtggtggctatgaccatggtggccgagggggaggaagaggaaataagcatcaaggaggctggacagatggagggagtggtggaggaggtggctaccaagatggtggttatcgagattcaggtttccagccaggtggctatcatggtggccacagcagtggtggctatcaaggcggaggttatggtggcttccaaacatcttcttcatatacaggaagtggataccagggtggtggctaccagcaggacaatagataccaagatggcgggcaccatggtgatcgtggtggtggtcgtggtgggcgaggtggtcgtggaggccgaggtggtcgtgcaggccagggaggaggctggggaggaagagggagccagaattatcaccaagggggtcaatttgaacagcatttccagcatggaggttatcagtataatcattctggatttggacagggaagacattacactagttgaggctaccgaaccttacattttgctagagctcaagtaatagaaacttagtttcagaatcctgaattcagcacctattttgaattaatgtgagaccacaggtggcaggcagattcctgcttggcataagcatttgtaggtcttcattcaattctgttagatttttttattggacttacataatgccgtttatttgagaaacacataacatctctcctttctatgaaaaattttttaaaaggtggttaaaattgcctttaattgcccagtagactaattccacagtcagaacatgcaaacttttttgaagaaattacttgaataagtagttttcatgttttcaatatgcagttttgaaaatgaggattcacctagacttttttagatttactactaggaaaccttcctcatatgaataaccatttatatgtgttttgcttaaagtattccaatgcctattttccaagcacagttctgccccccggttgacttttatgccacgtgtgcttcatgatggaacttttaggtcagttcctattaaatgagctcttctgcagatagcacattcagtagccttattttgttgatggaatactgtatcatatgctcaactctgaaaaccttgaacacggccaaaatccataaagattataaaagcaaactaagttgtgaagctatagtacatgtaggcatttagttaagtatagcaattcaaactgacctgcatccatccaaaacaaattcctccttcaaccttatttttacttgaaatttgctagaagaaatagcaaaccgaaatttgttttatgcatgagttaataccactggctcagcaaatacaagttagtttgctttaagcaggtaactttttttgtaatggaagaaatgcactacaaagttaagacagatttttgctaagtgcaggaggccctttattattgctgcagaaaacaaaagcctggctgagttgatgttttacattctcccttactgaaatctacatgacatgatgcttcttgctgggtttttgtacatgtaaacattgtcaagctgtgaaagaaaatggctggaggtgtgctttgtgtgaaaggtgagcaataaagtatctgttaagttc

SEQ ID NO: 500 - DNA, 2962 bp, Homo sapiens
ggggcggagcgcagccagggctgcgcggcgcgccccggctcccgcccgctcccagccgggccccccagcggtcggcgggacggctcccggctgcagtctgcccgcccgccccgcgcgggggccgagtcgcgaagcgcgcctgcgacccggcgtccgggcgcgctggagaggacgcgaggagccatgaggcgccagcctgcgaaggtggcggcgctgctgctcgggctgctcttggagtgcacagaagccaaaaagcattgctggtatttcgaaggactctatccaacctattatatatgccgctcctacgaggactgctgtggctccaggtgctgtgtgcgggccctctccatacagaggctgtggtacttctggttccttctgatgatgggcgtgcttttctgctgcggagccggcttcttcatccggaggcgcatgtaccccccgccgctgatcgaggagccagccttcaatgtgtcctacaccaggcagcccccaaatcccggcccaggagcccagcagccggggccgccctattacaccgacccaggaggaccggggatgaaccctgtcgggaattccatggcaatggctttccaggtcccacccaactcaccccaggggagtgtggcctgcccgccccctccagcctactgcaacacgcctccgcccccgtacgaacaggtagtgaaggccaagtagtggggtgcccacgtgcaagaggagagacaggagagggcctttccctggcctttctgtcttcgttgatgttcacttccaggaacggtctcgtgggctgctaagggcagttcctctgatatcctcacagcaagcacagctctctttcaggctttccatggagtacaatatatgaactcacactttgtctcctctgttgcttctgtttctgacgcagtctgtgctctcacatggtagtgtggtgacagtccccgagggctgacgtccttacggtggcgtgaccagatctacaggagagagactgagaggaagaaggcagtgctggaggtgcaggtggcatgtagaggggccaggccgagcatcccaggcaagcatccttctgcccgggtattaataggaagccccatgccgggcggctcagccgatgaagcagcagccgactgagctgagcccagcaggtcatctgctccagcctgtcctctcgtcagccttcctcttccagaagctgttggagagacattcaggagagagcaagccccttgtcatgtttctgtctctgttcatatcctaaagatagacttctcctgcaccgccagggaagggtagcacgtgcagctctcaccgcaggatggggcctagaatcaggcttgccttggaggcctgacagtgatctgacatccactaagcaaatttatttaaattcatgggaaatcacttcctgccccaaactgagacattgcattttgtgagctcttggtctgatttggagaaaggactgttacccatttttttggtgtgtttatggaagtgcatgtagagcgtcctgccctttgaaatcagactgggtgtgtgtcttccctggacatcactgcctctccagggcattctcaggcccgggggtctccttccctcaggcagctccagtggtgggttctgaagggtgctttcaaaacggggcacatctggctgggaagtcacatggactcttccagggagagagaccagctgaggcgtctctctctgaggttgtgttgggtctaagcgggtgtgtgctgggctccaaggaggaggagcttgctgggaaaagacaggagaagtactgactcaactgcactgaccatgttgtcataattagaataaagaagaagtggtcggaaatgcacattcctggataggaatcacagctcaccccaggatctcacaggtagtctcctgagtagttgacggctagcggggagctagttccgccgcatagttatagtgttgatgtgtgaacgctgacctgtcctgtgtgctaagagctatgcagcttagctgaggcgcctagattactagatgtgctgtatcacggggaatgaggtgggggtgcttattttttaatgaactaatcagagcctcttgagaaattgttactcattgaactggagcatcaagacatctcatggaagtggatacggagtgatttggtgtccatgcttttcactctgaggacatttaatcggagaacctcctggggaattttgtgggagacacttgggaacaaaacagacaccctgggaatgcagttgcaagcacagatgctgccaccagtgtctctgaccaccctggtgtgactgctgactgccagcgtggtacctcccatgctgcaggcctccatctaaatgagacaacaaagcacaatgttcactgtttacaaccaagacaactgcgtgggtccaaacactcctcttcctccaggtcatttgttttgcatttttaatgtctttattttttgtaatgaaaaagcacactaagctgcccctggaatcgggtgcagctgaataggcacccaaaagtccgtgactaaatttcgtttgtctttttgatagcaaattatgttaagagacagtgatggctagggctcaacaattttgtattcccatgtttgtgtgagacagagtttgttttcccttgaacttggttagaattgtgctactgtgaacgctgatcctgcatatggaagtcccacttcggtgacatttcctggccattcttgtttccattgtgtggatggtgggttgtgcccacttcctggagtgagacagctcctggtgtgtagaattcccggagcgtccgtggttcagagtaaacttgaagcagatctgtgcatgcttttcctctgcaacaattggctcgtttctcttttttgttctcttttgataggatcctgtttcctatgtgtgcaaaataaaaataaatttgggcaaaaaaaaaaaaaaaaaaa

SEQ ID NO: 501 - DNA, 882 bp, Homo sapiens
gggagcggggaaaacaaaaggagacgaaggacgcatgcgtttggtgagtcccggattctggtgggttcttccgctcaggctgggtgaagcgcttccgggtcgccgccggcagcagcctcccggcgcgatgaagacactgaggctcagagaggttaagtgactcagccaaggtcaaacagctagtaagtggtggagccaggactcaaagccagtctaggagccatgtccactttgttcccctcactcttccctcgtgtgactgagactctgtggtttaatctggatcgaccctgtgtggaagagacagagctgcagcagcaggaacagcagcatcaggcctggctccaaagcatcgcggagaaagacaacaacctggttcctattggcaagccagcctcagagcactatgatgacgaggaagaagaggatgatgaagatgatgaggatagtgaagaggactcagaggatgatgaggatatgcaggacatggacgagatgaatgactacaatgagtcaccggatgatggagaggtcaatgaggtggacatggaaggcaacgaacaggatcaggaccagtggatgatctaggtagacaaggcagggtggcctcagggagattccaggccagcccaaactaccctgcatcccaacccccaacccctgcccacagaaccagctgatggccccagtgcctgaaagtgcccttgggcacctcctcagctgctgccaggatctggtctctttggcccctcccaggccatcagtctgcacttgaaatccccagggcctgaaacctactccaccttcctggccagtacctcaccccttgattgccaggtctggtctaagtttctttaataaagacaaaggagtgattttcca

SEQ ID NO: 502 - DNA, 1093 bp, Homo sapiens
gcgcgccgagatggccgcgctcctggccgcctagagccggagcggcccgcggagctgcggaggcagccatggtcggggcgctgtgcggctgctggttccgcctgggcggggcccgcccgctcatcccgttgggcccgactgtggtacagacctccatgagccagtcccaggtagccctgctgggcctgagtctgctgctcatgctcctactgtatgtggggctgccaggcccccctgagcagacttcctgcctctggggagaccccaatgtcacagtcctggctggtctcacccctggcaactcgcccatcttttaccgcgaggtgctcccactcaaccaggcacacagggtggaggtggtgctgcttcatggaaaggcctttaactctcacacgtgggagcagctgggcacactgcagctactgtcacagaggggctaccgggccgtggcccttgaccttccaggttttgggaactcggcaccttcaaaggaggcaagcacagaggcagggcgggcagcgctgctggagcgggcgctgcgggacctggaggtacagaatgccgtgttggtgagcccctcgctgagtggccactatgccctgcccttcctgatgcgaggccaccaccagctacatggatttgtgcccatcgcacccacctccacccagaactacacccaggagcaattctgggctgtgaagactccaacccttatcctgtatggagagctggaccacatcctggctcgagagtcactgcggcagctccgccacctgcccaaccactctgtggtgaagctacgcaatgcaggccatgcctgttacctccacaagccgcaagacttccaccttgtcctgcttgccttccttgaccatctaccttgaactaacccactcccagctcccagcctggcatgagcttggacagtctggaccgccaccctccctgaaccagggagacagcctctgggattggaggccagaggccagggtcagacccagccaggactcctcatttcatctcacagacacaataaaaaagcatatttgtcctgcctgggaaaaaaaaaaaaaaaaaaaaaaaaaaaaaaaaa

SEQ ID NO: 503 - DNA, 3601 bp, Homo sapiens
aagatggctgccctaatgtacacttgggaccttgcctggcgcctcttccgggcttggcagcgggcggggtccattgagtaaagccttgcgtgcctgcgcccgcgacggaggcgcgcttcaaagcgcaggcgcggggagggggtgggggaggagggaaagcggcgagtaagatggaagatgaggaggtcgctgagagctgggaagaggcggcagacagcgggcaggaaatccaaatctcctcccaaagtgcccattgtgattcaggacgatagccttcccgcggggccccctccacagatccgcatcctcaagaggcccaccagcaacggtgtggtcagcagccccaactccaccagcaggcccacccttccagtcaagtccctagcacagcgagaggccgagtacgccgaggcccggaagcggatcctgggcagcgccagccccgaggaggagcaggagaaacccatcctcgacaggccaaccaggatctcccaacccgaagacagcaggcagcccaataatgtgatcagacagcctttgggtcctgatgggtctcaaggcttcaaacagcgcagataaatgcaggcaagaaaagatgccgccgttgctgccgtcaccgcctcctgggtcgtccgccacgggttgcactgccgtggcagacagctggacttgagcagagggaacgacctgacttacttgcactgtgatcccccttgctccgcccactgtgaccttgaaccccatgcactgtgacctccccccttctcccccttcccactgtgattggcacatcgacaagggctgtcccaagtcaatggaaagggaaagggtgggggttaggggaaggttggggggacccagcaaggactcagagagtcagacagtgccacttggccacttggggtaaagccagtgccagcaataacagtttatcatgctcattaatttgggatttcaaaacacaaatgaaaactcacacccacccacccccaagtgcatgtctccatcacttaaaaagtaagttccatttgaaaatatcctttcttttttttttcttcctatttttgtttgtttatacaaatatctgatttgcaagaaaaagtgcatgggaggggttttagtggtttaatgaatttttaattaagaaagggtagtttggtagtctacttaaaaatgtttctgggaaattcactagaaacattaaccaataggattttggtgagcttagcttctgtattcctactgccgcccagaaaaggggcagggctctgcagccgccaggacagacgagcaccccatgcctatacctccctccccgagctaagtcccagggcatctgggccttgcctggagactgggctagctctgtaggctcggagagcctggggagggtgccaaccccacctctagtattttgggagatagggaaagtgaaccgacttccccttcccatacccctcagggtggttccctaccagccaggcttactacttctagaagaaagcagagtgccagggagtgagattgcatccctgggcttagaagtgacggagagaagacttgtttagtattttgccatcagcacaaggaaaaccaggagagagtctgcctccaggactctgagccttctgcctcgtatgttcagaaggtggataggtcttcccactccagcatggcttgaactcttaggggtctgcagtgctccatctccattggtggccccagctcagtaactatacctggtacatttcctgtgtgcaatcagtaccttgaaggcagaacattctgaataaagttggaaaaagaacagctttgctttgcaaagattgatgacagactggttcctcagaggcctaggctacccgtcacccctttttccagagcgagggcctggaatgaaggcagtttatcctctgtccctggagcctggggtttgctttggctccttgaggtggaagagactaagagggcagctgcccagagcagctgtgtgtacctggctcctctcaggcttcctgatcccttccgttgcactgcgccttatccctcagccagccagacagcctccctgctcctgaccagcagatacgtttcggagtggttggtgtggtttttgtgatgagggcagcacgtggtggccaaggtggcaagctgagtctcacaggctcactccctcgttggttccctgtgggaatggtaggccaggcccagtaagccatgccccaacacgtcctctcctccggaggaagggccagctgccagctgagtcagcagctagtccatagcacagccttataactgtaaagccaggcattgcccatgagcagagctggaaccagagcttcagtcagtaagagggaggattaccttcaggagaaggcaaggaagaaaactggctgctatctttatagttccactgccctaaccaagtgtccacattctaaatgtgtagtgtccatcccttatgtaatagtggtttcccgcccaaagtgagactttccttttaattggagaagggtatagaggtagtccaggtgggaacgccagaagtgctgattgcccagccattgggaccacctgttcttgccccactaccctctagtgggaggccaaagtaaaggctggctggtgggtgtctgtggattgaggatgtggcagggactggtcctcccacctccctctggccaaagatgggctttgcccgctgtgtgcctgtcaccacccaccagcagtcatgccctgggcttcccaaatggagaggtagcaggcaacgtttttaaaaagaaagaaaacaggaaactgtattgtgtcgggggaggcgggagggagatgaggaaacggtttggattttgtgtgtgggagggtattttttgggggtagttgtctgtaactttcctaagtgctttttttccttttcttttttaaagtaagttgcaggctttggcttggaaaaccccagggggatggggggcagaaacctgaggctgctgcccctttatctgccttcacggtactgtccccttcccccagctcctccctgaccccatgggccaggcctcagaccttccagctaaccgcttcccatgagccactactctgatgtcagcctataaccaaaggagctggggggtccaggcctggtgaccaacctttctcagcccactcaatcagggtgctccccacctgcaggcaggaggcaacaccctatctgctaccatcagccccttccagagcccatctgccccgcccagccctgccctgcccagccataccctgctctgccccatctgggggtgccctgctcagggatgggctggcagggctgtacccagcctccctggtaagcagagactcaagaaacctctggggtcctgttttctggtcgtgtgatcccaggggtgcacatgggccccttgggtgtctgaacagaagggcatgggagggagggctgcacccctgcagtcttactctgctggtgtagcgggcagctgcccactcccaccccaccctgcaccgcgggctcctgagtcggcagattaagcattttataaattgtattttaaatacatgttttaaacttgtcaaaaaaaaaaaaaaaaaa

SEQ ID NO: 504 - DNA, 3346 bp, Homo sapiens
ctctcgcgagaggagcaagaggaagatggccgtgccctgtttttcggtgtaaggcagcagacggcggctgcgacggcgagactgagatcctggtgtcgtgggcacctgagttctagcttcccccagcgagcgcgcgtcccttcgtgcctaggcgagagccggctcttccccgggagatgcgtttgtcccaggctcgggggctcagtgggagttcatgctgcgctggaggctcttggccaccgctctaatcgccttgtgccgccgcagcgccagctccgtcgccagcggtgagcctcccgattcccccccttgcccctggcggcggcgatgaccggggagaagatccgctcactgcggagggaccacaagcccagcaaagaagaaggggacctgctggagcccggggatgaagaagcggcggctgccctcggcggtacctttaccagaagcaggattggcaagggcggcaaagcttgtcataagatcttcagtaaccatcaccaccggctacagctgaaggcagctccggcctcctccaatccccccggcgccccggctctgccgctgcacaattcctccgtgactgccaactcccagtccccggcccttctggccggcaccaaccccgttgctgtcgtcgcggatggaggcagttgccccgcacactacccggtgcacgagtgcgtcttcaagggggatgtgaggagactctcctctctcatccgcacgcacaatatcgggcagaaagataatcacggaaatactcctttacaccttgctgtgatgttaggaaataaagttacagctcttttgaggaagcttaagcagcaatccagggaaagtgttgaagaaaaacgacctcgattattaaaagccctgaaagagctaggtgacttttatctagaacttcactgggattttcaaagctgggtgcctttactttcccgaattctgccttccgatgcatgtaaaatatacaaacaaggtatcaatatcaggcttgacacaactctcatagactttactgacatgaagtgccaacgaggggatctaagcttcattttcaatggggatgcggcgccctctgaatcttttgtagtattagacaatgaacaaaaagtttatcagcgaatacatcatgaggaatcagagatggaaacagaagaagaggtggatattttaatgagcagtgatatttactctgcaactttatcaacaaaatcaatttctttcacgcgtgcccagacaggatggctttttcgggaagataaaacagaaagagtaggaaactttttggcagacttttacctggtgaatggacttgttatagaatcaaggaaaagaagagaacatctcagtgaagaggatattcttcgaaataaggccatcatggagagtttgagtaaaggtggaaacataatggaacagaattttgagccgattcgaagacagtctcttacaccgcctcctcagaacactattacatgggaagaatatatatctgctgaaaatggaaaagctcctcatctgggtagagaattggtgtgcaaagagagtaagaaaacgtttaaagctacgatagccatgagccaggaatttcccttagggatagagttattattgaatgttttagaagtagtagctcccttcaagcactttaacaagcttagagaatttgttcagatgaagcttcctccaggctttcctgtaaaattagatatacctgtgtttcccacaatcacagccactgtgacttttcaggagtttcgatacgatgaatttgatggctccatctttactatacctgatgactacaaggaagacccaagccgttttcctgatctttaactgacgtggaaaaggatgccgtctaaccaaggaaagaaaatacagagaccctagaagtggatccaaatagaagggacaaatgctttcagtgaagaaaagggaattacacattgaatcgacacatcagtaatacgatacagtgaaatgggcctctaataagaatttcagcgagttttctgatgtgccattttttgtctttttaaaaatatacatattataaatgtaatagtttgacacattaatgaccctaagacctgcgtatgtgaagcagctatgagtgctgtgatttgtttttaaaaatttttacacttcttgttgaaatatatatgcatataaatatatctatatctatatctatatctaaaacactcctggaccattaacgtaaattaaatgtcttaagagatatggagcccttttaaacttgtcatctttatgcaaggtgacatttataaatattccttcgagctttgttttcataaaatgtaaactatgtaacattatgtatagttcagtaatttgaatgtttgttcaatataatgaactagaaggaatgcaattttctgtagatgaatgaaccaaatggtaaccattaaacaattgcatttatatgttgcaatacatttcagaaggagcgttcactctgcagggaataaggtacctcctttagcaccttagtgcaattcattgtggtgctatttgtttttacctgaatgtttgttactaatcttcctttcatagaacctctattttttttttttctaaacttgagtttgagtccttgttatggtcatcataaggtaatggttagcatgtttaaagatattcctcttccaaatctcagcactttaaaaaaaaatccaaatttttaaacttgcttcctaataagtacacatcggtctgattattttgtttgtttttagtagaatatggatgcattggtgtcagttttaaaaaacaatacacatattttggacaaccctacatatttaatcctttcaaaataagataaaaacattttatatgctaacagaatatatttgttacaagttaaagtccagaagtatacacaagattgattactcctattattttttttaaatcacaggaaaatattgatttcattgtctccaaagtgataaaatcttgtattactcatttttgcacttaaaatttttcttatttattccaaggtggtttgaaggtccaagtatgaaaataaattagggggattaatgtataacagttataaagtatcatgttgtattaaagagcttacttagattgatgtttttaaaatgtatcctgatgaatgtctcaagaatgcatctgtcaagttttttagactgaccagtagcttaaacttttttcaggattttaggtaatttgaaaggagtttagagacccttattgaaaatatgatttaaaaatccaaagcataaaccgtaagaaaaattttaaataaacatctttaaagctgaaaaaaaaaaaaaaaaaa

SEQ ID NO: 505 - DNA, 2421 bp, Homo sapiens
gtgtacactatgtgcactgagggtgacacttctgagtgtgggggccctggctagggagtgggactggcaggcttgggtggggttcccaagctttaatcttcctaccccacagaatgttttctctgcccttcaggcagcctgagccgggcagggcccctgcctctgctacggcagcccccgatcatgcagcccccactggacctcaagcagatcctgcccttcccactcgagccagcccctacccttggcctcttcagcaactacagcaccatggaccctgtgcagaaggctgtgctctcccacacttttgggggacccttgctcaagaccaagcggcccgtcatttcctgtaatatctgtcaaatccgcttcaattctcagagccaggctgaggcgcactacaaaggtaatcgccacgcccgacgagtcaaaggcattgaggctgccaagaccagaggcagggagcctggcgtccgagaacctggagacccagctcccccaggcagcaccccaacaaatggggatggtgtagcaccccgtccagtttccatggagaatggactggggccagccccaggatccccagagaaacagcctggctccccatcccctcccagcattccggagactggtcagggtgtaaccaagggtgaaggggggactccagccccggcttccttgcctgggggtagcaaggaagaggaggagaaagccaagcggctgctctactgtgctctgtgcaaggtggctgtgaactccctgtcccagcttgaggcacataacaaaggtactaagcacaagacaattctggaggcccgaagtgggctcgggcccatcaaagcttaccctcggctggggcctcccaccccgggggaaccagaggctcctgcccaggaccgaactttccactgtgagatctgcaatgtcaaggtcaactcggaggtccaactgaaacagcacatctccagccggcggcaccgagacggcgtggccgggaagcccaacccactactgagccgtcacaagaagtctaggggcgccggggagctggcgggcacgctgactttctccaaggagctgcccaagtccctggcgggcggcctgctccccagccccctggcggtggctgcagtgatggcagcggcagcaggctcgccgctgtccctgcgcccggctccagccgcacctcttctccagggaccgccgatcactcaccctctgcttcacccggcccccggacccatccgaactgcgcacggacccatcctcttctccccgtactgacctcaaccctgaacccctcccattcaactccccacctccagccgggacccaggcgtccgggctcccagcccgcccctcctcccggcactccctaaatgatctctccttccccccccccaccccgagatacggggttccaggaaaggggaggggtagcgggggaggggggcttcagaagggggggaacaccccagatctcagggaaccccgccccctgcctttccctctcccctagaaaagggggggccgtctcacccccgagcccccttggagacaccccccctcccaaaagccatgtccatccagcccttccccccaaacctagcacaaaacggggttcacaagccatggtcggggtccgggggggacagaaatggattttcttggcaataagcggactctgggactccggctccctaccccaaactgaagcgcttccgtgaacacccccgtcctccgtagggggaggggagcaggcgggatcctgggtccctcataagcactttggttttaccgcctgcaacctcactgtgcccgccccgcaccatgccctagccccaggtctagccgggcccattgcagggggcagcacttgggggcatctccggcacttgggtgggaccaaggagatgccaccatagacctttccctcgccttcttcctccctagtccgggttccattcttttcaccagcacccatcgcccaaggggtaccgaggggggcaaggggtgtccagtccaagcccacccccgcctcgccttccgcaaaactgtgagcaaaaagcaatagaagcctcgcccccgcccttccccttcgcaggattcgccgagtctgtagcctccccgatccaagttcctagacctcatggctgtcccctcccaccagtcacctccactgcacaactcgggcgggggtgtgacacctctcccccacccccgactccgtggtttccgtatcgtcaacccttcagccgccgacccgggaggggtctggcctacactggtcttccccttcccatcaactctttctgcttgacaatgtagcaacccaggccccccacccacggtcctcccctttttcctctccctgacaataaagtctgaatttgttctgccctccaaaaaaaaaaaaaaaaa

SEQ ID NO: 506 - DNA, 6127 bp, Homo sapiens
gaggttactggtggtggcggcggcggcggcggcccgggctccggctgtcggggaagctgctgagctgtgatggtgatgacgaggtgaaaatggcggatctttcgaaatacaatcccggcccctgacataccagaggcggcggcgacggcgacgtcgccaccccggctcccttctcggtccccgggtaccctggagcgctccagtttggacaaactgggaaaggaagctgctggccagagctatcgtgcacgggcaaaacaagccccgccggggctcgggattgcccaggaccttctggagcccctacctcggagcccgagggaggagaaagcggcagccgctggagtgcctgatcaactttctagcgggagaacgatcatggaggtggtgccagctgaggtgaatagtttgcttccagaggaaataatggacactggtataactttagtggatgatgatagtattgaggctgttattgtttcatccccaattcccatggagacagaactggaagaaattgtcaacataaattctactggtgactctacagccacgcccatttccacggaaccaatcacagtgtacagtaaccacactaaccaagttgcagtgaataccacaattactaaagcagattctaataccacagtgaaaccagcttttccaagtggccttcaaaaacttggtgctcagactcctgtgactatatcagccaatcagattattttaaacaaagtatcacagacatctgatcttaaacttggcaatcagacccttaaaccagatggacagaagttaattttaacaactttgggcaagtctggttcaccaattgttttagcactaccccatagccaactaccccaggctcagaaagttacaactcaggcccagtcaggagatgctaagttaccaccgcagcaaattaaagtagttaccattggagggaggccagaggtgaaacctgtcattggtgtctcagcattgaccccaggaagtcaactgattaatactacaactcagccctctgtgttacagacccaacagttaaaaacagtacagattgctaagaagcctcgaacgccaacctctggtccagtaatcacgaagctgatctttgcaaaaccaattaatagtaaagcagttacaggacagacaactcaagtttcaccaccagtcattgcaggtagggttctttcacagtctactcccggaactccatcaaagaccataacaatatctgaaagtggtgttattggatcaactttaaattctacaacacagacaccaaataaaatagccatctcacctttgaaatcgccaaataaggcagtgaaatcaactgtgcagaccatcactgttggaggagtgagcacatcacagtttaagacaattattcctctggcaactgctcccaatgtccagcagattcaagtgcctggaagcaagtttcattatgtccgacttgttactgccacatcagccagtagctcaacccagccagttagtcagaatcccagtacaaacactcagcctcttcagcaagcaaagccagtggttgttaatacaaccccagtgcggatgtcagttccaattgtctcagctcaggctgtcaaacaagttgttccaaaaccaatcaatccaacttcacaaatagtaactactagccagccacagcaacggcttatcatgcctgccacaccactgccacagatccagcccaacctcactaacctgccaccaggcactgtcctggcaccagctccgggaacagggaatgtgggttatgcagtgcttccagctcagtatgttactcagctacagcagtcttcatatgtatcaatagcaagcaactctacctttactggaacatctggtatccagacccaggcacggcttccattcaatggcataatcccatcagagtcggccagtcggccccgaaagccctgtaattgtacaaaatcactgtgtttgaaattgtattgtgattgctttgcaaatggtgaattttgcaacaactgcaattgtactaattgttacaacaatttggaacatgaaaatgaaaggcaaaaagcaataaaggcatgccttgacagaaatccagaagcctttaagcctaagatagggaaaggaaaggagggagaatctgatcgacgtcatagcaaagggtgtaattgcaaacgatcaggatgtcttaaaaactactgtgaatgctatgaggcaaaaataatgtgttcctcaatatgcaaatgtattggctgtaagaattttgaagaaagcccggaaaggaagacattgatgcatttggcagatgcagctgaagtaagggtacagcaacaaacagcagccaagacgaagttatcctctcaaatttcagacttgcttactaggccaacaccagctttaaatagtggaggcggaaaattgccatttacatttgtaactaaggaagtagctgaagccacatgtaattgcctccttgcccaggcagagcaggcagacaagaagggaaaatcaaaggcagcagcggaacggatgatacttgaggaattcggacgatgtttgatgagtgtcatcaactctgcaggaaaggcaaaaagtgacccttgtgccatgaattgctaactcttgcacaaaagactgataaatggaactgtacagaaaatttaaggtgcagggacacttgattttctggaagaaaaacaattactgtattttaattcagtccttgttttaaaagacctgaaattataatactgaaggagaagaaattttaaatgaggaaattagtacattttaaatcttagttaaatctgcttatgccccttctaaattgaatttttctttattatatagattttttaatttgcttgggtttcttaagaattagatgttctctttctgatacctttgacaaaaaatgtttataaattcatataatttataatgtatggtgttgtatgactttgttaatagaaaagccaaagcagcagtggttagcacccattctttgggacttgatctagaatatctgcagacagaatgttacataaacaaattcttatgaaacacattcaaatgacattttgtatttagaaaaggactatcttttaaagaaaaagcagccttttagggccgattctggaataatatcctgttgtcactttgggaatgtcagaaggggaaacaatccccaggcacactaaaaattttttaaagttatttaaaaaaacatataaaatattaaaggacagtaaatctcagaggatgggcaatgtgtttctataataaggaaaggctaacagatgctctgggctgtctccattttctttcaaagaggtggtatgtatttgaagtaataaattgtcaaagtgattactgggtactattaaaatgataggtggatataaatggaagtaaacattatgtagtgataatatagaacctcacatagtaatcaagtataaaatttggcatgggtggagaaacaaagaatagggaagctgcaaaagatgaatttagagaagttttcatctatacaatcaattatttttacagacttttttttttttttttttgagacggagtctcgctgtgtagcccaggctggagtgcaatggtgagatctcagctcactgcaacgcctctgcctcccaggttcaagcgattctcctgcctcagcctcccgtgtagctgggactacaggtgcatgccaccatgcccggctcattttttgtatttttagtagagacggggtttcaccgtgttagccaggatggtctcgatctcctgacctcgtgattcgcccgcctcggcctcccaaagtgctgggattacaggcataagccgccgtgccaggccctttttatagacttttgaactaagaggtttcaaaccaaatcgcaactcttacttgatttacagaaatgggcctcctaacaaaattttcaaaattgtggtgggatttctttttataagggaagtttaatatggcattattttcagccagtgatttggaaggtctgttttcctataattactaaaataacctaaatcattttcagtattcaaaaactctatgaatttaagagcctgttgtgacaggactcttgattttatgacaagaaaaaaccatgttggaattcaggcattttgttaggtaccttaatcatcagtaattagtatatgattatttcatttcctacaaggactctatagttgtatgtattaagtgtgtatatatgttcatatgaacatgcaagatataggcaatagaaattaagtaatccaaaagaggattccgttattcactaaagtatcttccttttaaatttggatttataaaatcatagtgcagtaactttaaatgtagatagttcaaacattcttagcacctcaatctagtatgtttaattaaaatttgtataaatgtaaattagtgtaagagggtaaaataataatcaagttatttttcaaaagattgcaataagtttttggtctaaacttaaactttgttcattttgtacatactctgtgttaattctaattgcacctttgtgatgtgtatttatatacagtgtgcagaaaatgttcgtgaaattttgattacaattgtagattatgtatgatggcattgcttacgaatgttttgcttgtaaaaaaatttcaaggtgcaatcaaatgctactagtttttctgattttcaaaaatctatctatctaaaatattaagccttttccttcctgtgtagtacttactaaataactttttgtattcaggcatttgcatcaaattgctgaacaagatgaatagccacattaattcaatgattttaaaagactatttggggagggttgggtatataattttttagctctatttacatcccaaagtagaaagattaaatttatatttactagagctattcaaagaatacacttttctatattgtaaaaacaggacagcaaagtaaatcatacagaaaataaacatttatactattctgtaaaaaaggttttgcattttttctttagtataataacaccactttattaaccatttaatatgcaaaaaaccttttaaattatctgaagtaaatttgacattacttctgaaaacacacaactaaaaaattctatcattttgctcagttattactaacataaattgctttgaaatgagaatatgtcttctctttttttccccactgtttcttttaagagcagaaactcagccgggcatggtggctcacgcctgtaattccagcactttgggaggtcaaggcgggtgaatcacttgagtccaggagttctagaccagcccaggctacatggtgaaaccctgtctctactaaaaatataaaaaaattcactgcgtgtggtggcgcacacctgcagtcctcgctactttgaaggcctgagcctgcagaggttgaggctgtagtgagtcaaaattacaccactgcactccagcctggcaatcagagtgagaccttgtctcaaaaacaaaaatacctagaaaatcaatctactctgtcttttaatgtgaaatgttcttatgatagctatctttcttagtttcctttttttctgaagcactaaacacaacctgtaggtcttatctctggggtctgggaaacagaaccttaatgttacaggtacaaaagcaaacagagtgattagttccccattttctggtagtgaacaactgacattttttcaatcttatgtaaaatgtgaataaaaataattttagaaaagttatctatttttattgttctgtaacacaaatagttaagaaaatgaatacttgttatgtaaatgaagcttcacagcaggacctccggccataactttgatcatgttgtatctcttaagcattttatataggaattctggtgtggctacccaaagcagaagggaaggcaatcaactaaaaatccctttctattggagttattttcatcatgtaaattacttcaggcttttcttgttagggcttcttgaatgcacattttgtcattatctgtataccaaaggtgagcttttttttttaatccatgtgattttatgagttgaaagctataaggttttttttaattaaaaatttccttctaaatggcaaa

SEQ ID NO: 507 - DNA, 4923 bp, Homo sapiens
atggagggagaagaggcagtggctgtgaagaatataaagagatacgtatgtacttaccttagtgtgcaagagagggatcccagagctcacagatttctgggtcttctttatgaattggaagaaaacacagagaaagccgttgaatgttacaggcgttcactggaattaaacccaccacaaaaagatcttgtgttgaagattgcagaattgctttgtaaaaatgatgttactgatggaagagcaaaatactgggttgaaagggcagcgaaacttttcccaggaagtcctgcaatttataaactaaaggaacatcttctagattgtgaaggtgaagatggatggaataaactttttgactggattcagtcagaactttatgtaagacctgatgacgtccatatgaacatccggctagtggagttgtatcgctcaaataaaagattgaaggatgctgtggcccgctgccatgaggcagagaggaacatagctttgcgttcaagtttagagtggaattcgtgtgttgtacagacccttaaggaatatctggagtctttacagtgtttggagtctgataaaagtgactggcgagcaaccaatacagacttactgctggcctatgctaatcttatgcttcttacgctttccactagagatgtgcaggaaagtagagaattactggaaagttttgatagtgctcttcagtctgcaaaatcttctttgggtggaaatgatgaactgtcagctactttcttagaaatgaaaggacatttctacatgcatgctggttctctgctcttgaagatgggtcagcatggtaataatgttcaatggcaagctctttctgagctggctgcattgtgctatgtcatagcatttcaggttccaagaccaaagattaaattaataaaaggtgaagctggacaaaatctgctggaaatgatggcctgtgaccgactgagccaatcagggcatatgttgctaaacttaagtcgtggcaagcaagattttttaaaagaggttgttgaaacttttgccaacaaaagcgggcagtctgtgttatataatgctctgttttctagtcagtcatctaaggatacatcttttcttggtagcgatgatattggaaacattgatgtacaagaaccagagcttgaagatttggctagatacgatgttggtgctattcaagcacataatggtagtcttcagcaccttacttggcttggcttacagtggaattcattgcctgctttacctggaatccgaaaatggctaaaacagcttttccatcatttgccccaggaaacctcaaggcttgaaacaaatgcacctgaatcaatatgtattttagatcttgaagtatttctccttggagtagtatataccagccacttacaattaaaggagaaatgtaattctcaccacagctcctatcagccgttatgcctgccccttcctgtgtgtaaacggctttgtacagagagacaaaaatcttggtgggatgcggtttgtactctgattcacagaaaagcagtagcccaggaaaaacatggccttcaacctgctctgcttgtacattgggcaaaatgccttcagaaaatgggcaggggtcttaattcttcttatgatcaacaagaatacatagggagaagtgttcattattggaagaaagttttgccattgttgaagataataaagaagaacagtattcctgaacctattgatcctctgtttaaacattttcatagtgtagacattcaggcatcagaaattgttgagtatgaagaagatgcacacataacttttgctatattggatgcagtacatggaaatatagaagatgctgtgactgcttttgaatctataaaaagtgttgtttcttattggaatcttgcactgatttttcacaggaaagcagaagacattgaaaatgatgccgtttttcctgaagaacaagaagaatgcaaaaattatctgagaaagaccagggactacctaataaagattatagatgacagtgattcaaatctttcagtggtcaagaaattgcctgtgcccctggagtctgtaaaagagatgcttaagtcagtcatgcaggaactcgaagactatagtgaaggaggtcctctctataaaaatggttctttgcgaaatgcagattcagaaataaaacattctacaccatctcctaccaaatattcactatcaccaagtaaaagttacaagtattctcccaaaacaccacctcgatgggcagaagatcagaattctttacggaaaatgatttgccaagaagtaaaggccattacgaaactaaatagcagtaagtcagcatcccgtcatcgttggcccacagagaattatggaccagactcggtgcctgatggatatcaggggtcacagacatttcatggggctccactaacagttgcaactactggcccttcagtatattatagtcagtcaccagcatataattcccagtatcttctcagaccagcagctaatgttactcccacaaagggttcttctaatacagaatttaagtcaaccaaagaaggattttccatcgctgtgtctgctgatggatttaaatttggcatttcggaaccaggaaatcaagaaaagaaaagtgaaaagcctcttgaaaatgatactggcttccaggctcaggatattagtggccagaagaatggccgtggtgtgatttttggccaaacaagtagcacttttacatttgcagatgttgcaaaatcaacttcaggagaaggatttcagtttggcaaaaaagaccccaatttcaagggattttcaggtgctggagaaaaattattctcatcacaatgcggtaaaatggccaataaagcaaacacttccggtgactttgagaaagatgatgatgcctgtaagactgaggacagcgatgacatccattttgaaccagtagttcaaatgcctgaaaaagtagaacttgtaacaggagaagaaggtgaaaaagttctgtattcacagggggtaaaactatttagatttgatgctgagataagtcagtggaaagaaaggggcttggggaacttaaaaattctcaaaaatgaggtcaatggcaaaccaagaatgctgatgcgaagagaccaagtactaaaagtgtgtgctaatcattggataacaactacaatgaacctgaagcccctctctggatcagatagagcatggatgtggttagccagtgatttctctgatggtgatgccaaactagagcggttggcagcacaatttaaaacaccagagctggctgaagaattcaagcagaaatttgaggaatgccagcggcttctgttagacataccacttcaaactccccataaacttgtagatactggcagagctgccaagctaatacagagagctgaagaaatgaagagtggactgaaagatttcaaaacgtttttgacaaatgatcaaacaaaagtcactgaggaagaaaataagggttcaggtacaggtgcagccggtgcctcagacacaacaataaaacccaatcctgaaaacactgggcccacattagaatgggataactatgatttaagggaagatgctttggatgataatgttagtagtagctcagtacatgattctccgttggcaagtagccctgtgagaaaaaatattttccgctttgatgagtcaacaacaggatttaacttcagttttaaatctgctttgagtctatctaagtctcctgccaagttgaatcagagtgggacttcagttggcactgatgaagaatctgatgttactcaagaagaagagagagatggacagtactttgaacctgttgttcctttacctgatctagttgaagtatccagtggtgaggaaaatgaacaagttgtttttagtcacatggcagaactctacagatatgataaagatgttggtcaatggaaagaaaggggcattggtgatataaagattttacagaattatgataataagcaagttcgtatagtgatgagaagggaccaagtattaaaactttgtgccaatcacagaataactccagacatgagtttgcaaaatatgaaagggacagaaagagtatgggtgtggactgcatgtgattttgcagatggagaaagaaaagtagagcatttagctgttcgttttaaactacaggatgttgcagactcatttaagaaaatttttgatgaagcaaaaacagcccaggaaaaagattctttgataacacctcatgtttctcggtcaagcactcccagagagtcaccatgtggcaaaattgctgtagctgtattagaagaaaccacaagagagaggacagatgttattcagggtgatgatgtagcagatgcagcttcagaagttgaagtgtctagcacatctgaaacaacaacaaaagcagtggtttctcctccaaagtttgtatttggttcagagtctgttaaaagaatttttagtagtgaaaaatcaaacccatttgcatttggcaacagttctgccactgggtctttgtttggatttagttttaatgcacctttgaaaagtaacgatagtgaaactagttcagtagcccagagtggatctgaaagcaaagtggaacctaaaaaatgtgaactgtcaaagaactctgatatcgaacagtcttcagatagcaaagtcaaaaatctctctgcttcctttccaatggaagaatcttcaatcaactacacatttaaaacaccagaaaagggcccagtttcctctcagcagtctttgaagaaccttcgagaaaggagaaacacagacctcccgcttctagacatgcacactgtaacccgggaagagggagaaggcatggagacaactgattacggagtctgtgtcttccgccagcacatacacacagtctttagagcagctgcttaa

SEQ ID NO: 508 - DNA, 456 bp, Homo sapiens
atgagtgctcagtttacctctctggcctttcatcttagttttatcctcttgagtattgcactgtacatacttggtgatgagagctcagtttctgatgaatcctcacagtatttaaccagaataactgtagccccccagaagttgcaagcagaacaagaggaaaacaggtttagtttcaggcattctacgtctgtttctagtctagctgaaagattggttggctggatgactaatgtaggattcactttaagagatttggaaactcttccctttggaattgctcttcccatcagagatgcaatttatcactgtcgtgagcagcctgcctcagactggccagaagctgtctgtctcttgactggacgtcaggatctttccaagcaggcctgcgaaggaaacttacccaaagggaagtctgtgagtatcaacatagaaagttcagagttccaattttag

SEQ ID NO: 509 - DNA, 3325 bp, Homo sapiens
ataaaccccagggctcattcttgagctgctcctgcatagatctcgtcctgttcaacacaccaaagattgacagctgaactgagagaccatcacccacagacacaactggccactgggtggtgcacaagtcagacagaactgaatagtcctgtgaagactctggacactgaactgactttggaaccagactgcagaatggaggggtgggaacttgtggcttgaacctaatcaggtttcattaaggttttctatagataagatcatgtcaagacaccctcagaccacagggcggcgccacgagcccggccgagtgcagctggagcgccgacgtcgccgaggatacacagtgctgaggcagaacgcaggttcgtcacagtgggcctccgtgggcggcgccgcacgctcgtcacagtgggcctccgccggctacgccgctgcttcagtggcttgcaggcactttcctcttggaagtggcgactgctgcggggctgagcggtgctcgcacgcgtctcgggagccaggttggcggcgcgatgaggcgcagcaaggccgatgtggagcggtacgtcgcctcggtgctgggtctcaccccgtcgcctcgacagaagtcaatgaaaggattctattttgcaaagctgtattatgaagctaaagaatatgatcttgctaaaaaatacatatgtacttacattaatgtgcaagagagggatcccaaagctcacagatttctgggtcttctttatgaattggaagaaaacacagagaaagccgttgaatgttacaggcgttcagtggaattaaacccaacacaaaaagatcttgtgttgaagattgcagaattgctttgtaaaaatgatgttactgatggaagagcaaaatactgggtcgaaagagcagcaaaacttttcccaggaagtcctgcaatttataaactaaaggaacagcttctagattgtgaaggtgaagatggatggaataaactttttgacttgattcagtcagaactttatgtaagacctgatgacgtccatgtgaacatccggctagtggagttgtatcgctcaactaaaagattgaaggatgctgtggcccactgccatgaggcagagaggaacatagctttgcgttcaagtttagagtggaattcgtgtgttgtacagacccttaaggaatatctggagtctttacagtgtttggagtctgataaaagtgactggcaagcaaccaatacagacttactgctggcctatgctaatcttatgcttcttacgctttccactagagatgtgcaggaaaatagagaattactggaaagttttgatagtgctcttcagtctgcgaaatcttctttgggtggaaatgatgaactgtcagctactttcttagaaatgaaaggacatttctatatgtatgctggttctctgctcttgaagatgggtcagcatggtaataatgttcaatggcgagctctttctgagctggctgcattgtgctatctcatagcatttcaggttccaagaccaaagattaaattaagagaaggtaaagctggacaaaatctgctggaaatgatggcctgtgaccgactgagccaatcagggcacatgttgctaagcttaagtcgtggcaagcaagatttcttaaaagaggttgttgaaacttttgccaacaaaattgggcagtctgcgttatatgatgctctgttttctagtcagtcacctaaggatacatcttttcttggtagcgatgatattggaaaaattgatgtacaagaaccagagcttgaagatttggctagatacgatgttggtgctattcgagcacataatggtagtcttcagcatcttacttggcttggcttacagtggaattcattgcctgctttacctggaatccgaaaatggctaaaacagcttttccatcgtttgccccatgaaacctcaaggcttgaaacaaatgcgcctgaatcaatatgtattttagatcttgaagtatttctccttggagtagtatataccagccacttacaattaaaggagaaatgtaattctcaccatagctcctatcagccgttatgcctgccctttcctgtgtgtaaacagctttgtacagaaagacaaaaatcttggtgggatgcggtttgtactctgattcacagaaaagcagtacctggaaacttggcaaaattgagacttctagttcagcatgaaataaacactctaagagcccaggaaaaacatggccttcaacctgctctgcttgtacattgggcaaaataccttcagaaaacgggcagcggtcttaattctttttatggtcaactagaatacatagggagaagtgttcattattggaagaaagttttgccattgttgaagataataaagaagaacagtattcctgaacctattgatcctctgtttaaacattttcatagtgtagacattcaggcatcagaaattgttgaatatgaagaagacgcacacataacttttgctatgttggatgcagtaaatggaaatatagaagatgctgtgactgcttttgaatctataaaaagtgttgtttcttattggaatcttgcactgatttttcacaggaaggcagaagacattgaaaatgatgccctttctcctgaagaacaagaagaatgcagaaattatctgacaaagaccagggactacctaataaagattatagatgacggtgattcaaatctttcagtggtcaagaaattgcctgtgcccctggagtctgtaaaacagatgcttaattcagtcatgcaggaactcgaagactatagtgaaggaggtcctctctataaaaatggttctttgcgaaatgcagattcagaaataaaacattctacaccgtctcctaccaaatattcactatcaccaagtaaaagttacaagtattctcccgaaacaccacctcgatggacagaagatcggaattctttactgaatatgatttgccaacaagtagaggccattaagaaagaaatgcaggagttgaaactaaatagcagtaagtcagcatcccgtcatcgttggcccacagagaattatggaccagactcggtgcctgatggatatcaggggtcacagacatttcatggggctccactaacagaagcagcacatcgtcattttacaattgagaaacatggagactccaaatggattatttacaggttcacaaaacagctttgtggcactgaaagggcgagagccaagatctcctgatttctgttcctgtgttcatagattctttttccttaataaaagtaaacatatatcaaaaaaaaaaaaaaaaaaaaaaa

SEQ ID NO: 510 - DNA, 11711 bp, Homo sapiens
cacagtggtcctccgccggctacggcgctgcgtcactggtttgcaggcgctttcctcttggaagtggcgactgctgcgggcctgagcgctggtctcacgcgcctcgggagccaggttggcggcgcgatgaggcgcagcaaggctgacgtggagcggtacatcgcctcggtgcagggctccaccccgtcgcctcgacagaagtcaatgaaaggattctattttgcaaagctgtattatgaagctaaagaatatgatcttgctaaaaaatacatatgtacttacattaatgtgcaagagagggatcccaaagctcacagatttctgggtcttctttatgaattggaagaaaacacagacaaagccgttgaatgttacaggcgttcagtggaattaaacccaacacaaaaagatcttgtgttgaagattgcagaattgctttgtaaaaatgatgttactgatggaagagcaaaatactggcttgaaagagcagccaaacttttcccaggaagtcctgcaatttataaactaaaggaacagcttctagattgtgaaggtgaagatggatggaataaactttttgacttgattcagtcagaactttatgtaagacctgatgacgtccatgtgaacatccggctagtggaggtgtatcgctcaactaaaagattgaaggatgctgtggcccactgccatgaggcagagaggaacatagctttgcgttcaagtttagaatggaattcgtgtgttgtacagacccttaaggaatatctggagtctttacagtgtttggagtctgataaaagtgactggcgagcaaccaatacagacttactgctggcctatgctaatcttatgcttcttacgctttccactagagatgtgcaggaaagtagagaattactgcaaagttttgatagtgctcttcagtctgtgaaatctttgggtggaaatgatgaactgtcagctactttcttagaaatgaaaggacatttctacatgcatgctggttctctgcttttgaagatgggtcagcatagtagtaatgttcaatggcgagctctttctgagctggctgcattgtgctatctcatagcatttcaggttccaagaccaaagattaaattaataaaaggtgaagctggacaaaatctgctggaaatgatggcctgtgaccgactgagccaatcagggcacatgttgctaaacttaagtcgtggcaagcaagattttttaaaagagattgttgaaacttttgccaacaaaagcgggcagtctgcattatatgatgctctgttttctagtcagtcacctaaggatacatcttttcttggtagcgatgatattggaaacattgatgtacgagaaccagagcttgaagatttgactagatacgatgttggtgctattcgagcacataatggtagtcttcagcaccttacttggcttggcttacagtggaattcattgcctgctttacctggaatccgaaaatggctaaaacagcttttccatcatttgccccatgaaacctcaaggcttgaaacaaatgcacctgaatcaatatgtattttagatcttgaagtatttctccttggagtagtatataccagccacttacaattaaaggagaaatgtaattctcaccacagctcctatcagccgttatgcctgccccttcctgtgtgtaaacagctttgtacagaaagacaaaaatcttggtgggatgcggtttgtactctgattcacagaaaagcagtacctggaaacgtagcaaaattgagacttctagttcagcatgaaataaacactctaagagcccaggaaaaacatggccttcaacctgctctgcttgtacattgggcagaatgccttcagaaaacgggcagcggtcttaattctttttatgatcaacgagaatacatagggagaagtgttcattattggaagaaagttttgccattgttgaagataataaaaaagaagaacagtattcctgaacctattgatcctctgtttaaacattttcatagtgtagacattcaggcatcagaaattgttgaatatgaagaagacgcacacataacttttgctatattggatgcagtaaatggaaatatagaagatgctgtgactgcttttgaatctataaaaagtgttgtttcttattggaatcttgcactgatttttcacaggaaggcagaagacattgaaaatgatgccctttctcctgaagaacaagaagaatgcaaaaattatctgagaaagaccagggactacctaataaagattatagatgacagtgattcaaatctttcagtggtcaagaaattgcctgtgcccctggagtctgtaaaagagatgcttaattcagtcatgcaggaactcgaagactatagtgaaggaggtcctctctataaaaatggttctttgcgaaatgcagattcagaaataaaacattctacaccgtctcctaccagatattcactatcaccaagtaaaagttacaagtattctcccaaaacaccacctcgatgggcagaagatcagaattctttactgaaaatgatttgccaacaagtagaggccattaagaaagaaatgcaggagttgaaactaaatagcagtaactcagcatcccctcatcgttggcccacagagaattatggaccagactcagtgcctgatggatatcaggggtcacagacatttcatggggctccactaacagttgcaactactggcccttcagtatattatagtcagtcaccagcatataattcccagtatcttctcagaccagcagctaatgttactcccacaaagggcccagtctatggcatgaataggcttccaccccaacagcatatttatgcctatccgcaacagatgcacacaccgccagtgcaaagctcatctgcttgtatgttctctcaggagatgtatggtcctcctgcattgcgttttgagtctcctgcaacgggaattctatcgcccaggggtgatgattactttaattacaatgttcaacagacaagcacaaatccacctttgccagaaccaggatatttcacaaaacctccgattgcagctcatgcttcaagatctgcagaatctaagactatagaatttgggaaaactaattttgttcagcccatgccgggtgaaggattaaggccatctttgccaacacaagcacacacaacacagccaactccttttaaatttaactcaaatttcaaatcaaatgatggtgacttcacgttttcctcaccacaggttgtgacacagccccctcctgcagcttacagtaacagtgaaagccttttaggtctcctgacttcagataaacccttgcaaggagatggctatagtggagccaaaccaattcctggtggtcaaaccattgggcctcgaaatacattcaattttggaagcaaaaatgtgtctggaatttcatttacagaaaacatggggtcgagtcagcaaaagaattctggttttcggcgaagtgatgatatgtttactttccatggtccagggaaatcagtatttggaacacccactttagagacagcaaacaagaatcatgagacagatggaggaagtgcccatggggatgatgatgatgacggtcctcactttgagcctgtagtacctcttcctgataagattgaagtaaaaactggtgaggaagatgaagaagaattcttttgcaaccgcgcgaaattgtttcgtttcgatgtagaatccaaagaatggaaagaacgtgggattggcaatgtaaaaatactgaggcataaaacatctggtaaaattcgccttctaatgagacgagagcaagtattgaaaatctgtgcaaatcattacatcagtccagatatgaaattgacaccaaatgctggatcagacagatcttttgtatggcatgcccttgattatgcagatgagttgccaaaaccagaacaacttgctattaggttcaaaactcctgaggaagcagcactttttaaatgcaagtttgaagaagcccagagcattttaaaagccccaggaacaaatgtagccatggcgtcaaatcaggctgtcagaattgtaaaagaacccacaagtcatgataacaaggatatttgcaaatctgatgctggaaacctgaattttgaatttcaggttgcaaagaaagaagggtcttggtggcattgtaacagctgctcattaaagaatgcttcaactgctaagaaatgtgtatcatgccaaaatctaaacccaagcaataaagagctcgttggcccaccattagctgaaactgtttttactcctaaaaccagcccagagaatgttcaagatcgatttgcattggtgactccaaagaaagaaggtcactgggattgtagtatttgtttagtaagaaatgaacctactgtatctaggtgcattgcgtgtcagaatacaaaatctgctaacaaaagtggatcttcatttgttcatcaagcttcatttaaatttggccagggagatcttcctaaacctattaacagtgatttcagatctgttttttctacaaaggaaggacagtgggattgcagtgcatgtttggtacaaaatgaggggagctctacaaaatgtgctgcttgtcagaatccgagaaaacagagtctacctgctacttctattccaacacctgcctcttttaagtttggtacttcagagacaagtaaaactctaaaaagtggatttgaagacatgtttgctaagaaggaaggacagtgggattgcagttcatgcttagtgcgaaatgaagcaaatgctacaagatgtgttgcttgtcagaatccggataaaccaagtccatctacttctgttccagctcctgcctcttttaagtttggtacttcagagacaagcaaggctccaaagagcggatttgagggaatgttcactaagaaggagggacagtgggattgcagtgtgtgcttagtaagaaatgaagccagtgctaccaaatgtattgcttgtcagaatccaggtaaacaaaatcaaactacttctgcagtttcaacacctgcctcttcagagacaagcaaggctccaaagagcggatttgagggaatgttcactaagaaggagggacagtgggattgcagtgtgtgcttagtaagaaatgaagccagtgctaccaaatgtattgcttgtcagaatccaggtaaacaaaatcaaactacttctgcagtttcaacacctgcctcttcagagacaagcaaggctccaaagagcggatttgagggaatgttcactaagaaggaaggacagtgggattgcagtgtgtgcttagtaagaaatgaagccagtgctaccaaatgtattgcttgtcagtgtccaagtaaacaaaatcaaacaactgcaatttcaacacctgcctcttcggagataagcaaggctccaaagagtggatttgaaggaatgttcatcaggaaaggacagtgggattgtagtgtttgctgtgtacaaaatgagagttcttccttaaaatgtgtggcttgtgatgcctctaaaccaactcataaacctattgcagaagctccttcagctttcacactgggctcagaaatgaagttgcatgactcttctggaagtcaggtgggaacaggatttaaaagtaatttctcagaaaaagcttctaagtttggcaatacagagcaaggattcaaatttgggcatgtggatcaagaaaattcaccttcatttatgtttcagggttcttctaatacagaatttaagtcaaccaaagaaggattttccatccctgtgtctgctgatggatttaaatttggcatttcggaaccaggaaatcaagaaaagaaaagtgaaaagcctcttgaaaatggtactggcttccaggctcaggatattagtggccagaagaatggccgtggtgtgatttttggccaaacaagtagcacttttacatttgcagatcttgcaaaatcaacttcaggagaaggatttcagtttggcaaaaaagaccccaatttcaagggattttcaggtgctggagaaaaattattctcatcacaatacggtaaaatggccaataaagcaaacacttccggtgactttgagaaagatgatgatgcctataagactgaggacagcgatgacatccattttgaaccagtagttcaaatgcccgaaaaagtagaacttgtaacaggagaagaagatgaaaaagttctgtattcacagcgggtaaaactatttagatttgatgctgaggtaagtcagtggaaagaaaggggcttggggaacttaaaaattctcaaaaacgaggtcaatggcaaactaagaatgctgatgcgaagagaacaagtactaaaagtgtgtgctaatcattggataacgactacgatgaacctgaagcctctctctggatcagatagagcatggatgtggttagccagtgatttctctgatggtgatgccaaactagagcagttggcagcaaaatttaaaacaccagagctggctgaagaattcaagcagaaatttgaggaatgccagcggcttctgttagacataccacttcaaactccccataaacttgtagatactggcagagctgccaagttaatacagagagctgaagaaatgaagagtggactgaaagatttcaaaacatttttgacaaatgatcaaacaaaagtcactgaggaagaaaataagggttcaggtacaggtgcggccggtgcctcagacacaacaataaaacccaatcctgaaaacactgggcccacattagaatgggataactatgatttaagggaagatgctttggatgatagtgtcagtagtagctcagtacatgcttctccattggcaagtagccctgtgagaaaaaatcttttccgttttggtgagtcaacaacaggatttaacttcagttttaaatctgctttgagtccatctaagtctcctgccaagttgaatcagagtgggacttcagttggcactgatgaagaatctgatgttactcaagaagaagagagagatggacagtactttgaacctgttgttcctttacctgatctagttgaagtatccagtggtgaggaaaatgaacaagttgtttttagtcacagggcaaaactctacagatatgataaagatgttggtcaatggaaagaaaggggcattggtgatataaagattttacagaattatgataataagcaagttcgtatagtgatgagaagggaccaagtattaaaactttgtgccaatcacagaataactccagacatgactttgcaaaatatgaaagggacagaaagagtatggttgtggactgcatgtgattttgcagatggagaaagaaaagtagagcatttagctgttcgttttaaactacaggatgttgcagactcgtttaagaaaatttttgatgaagcaaaaacagcccaggaaaaagattctttgataacacctcatgtttctcggtcaagcactcccagagagtcaccatgtggcaaaattgctgtagctgtattagaagaaaccacaagagagaggacagatgttattcagggtgatgatgtagcagatgcaacttcagaagttgaagtgtctagcacatctgaaacaacaccaaaagcagtggtttctcctccaaagtttgtatttggttcagagtctgttaaaagcatttttagtagtgaaaaatcaaaaccatttgcattcggcaacagttcagccactgggtctttgtttggatttagttttaatgcacctttgaaaagtaacaatagtgaaactagttcagtagcccagagtggatctgaaagcaaagtggaacctaaaaaatgtgaactgtcaaagaactctgatatcgaacagtcttcagatagcaaagtcaaaaatctctttgcttcctttccaacggaagaatcttcaatcaactacacatttaaaacaccagaaaaggcaaaagagaagaaaaaacctgaagattctccctcagatgatgatgttctcattgtatatgaactaactccaaccgctgagcagaaagcccttgcaaccaaacttaaacttcctccaactttcttctgctacaagaatagaccagattatgttagtgaagaagaggaggatgatgaagatttcgaaacagctgtcaagaaacttaatggaaaactatatttggatggctcagaaaaatgtagacccttggaagaaaatacagcagataatgagaaagaatgtattattgtttgggaaaagaaaccaacagttgaagagaaggcaaaagcagatacgttaaaacttccacctacatttttttgtggagtctgtagtgatactgatgaagacaatggaaatggggaagactttcaatcagagcttcaaaaagttcaggaagctcaaaaatctcagacagaagaaataactagcacaactgacagtgtatatacaggtgggactgaagtgatggtaccttctttctgtaaatctgaagaacctgattctattaccaaatccattagttcaccatctgtttcctctgaaactatggacaaacctgtagatttgtcaactagaaaggaaattgatacagattctacaagccaaggggaaagcaagatagtttcatttggatttggaagtagcacagggctctcatttgcagacttggcttccagtaattctggagattttgcttttggttctaaagataaaaatttccaatgggcaaatactggagcagctgtgtttggaacacagtcagtcggaacccagtcagccggtaaagttggtgaagatgaagatggtagtgatgaagaagtagttcataatgaagatatccattttgaaccaatagtgtcactaccagaggtagaagtaaaatctggagaagaagatgaagaaattttgtttaaagagagagccaaactttatagatgggatcgggatgtcagtcagtggaaggagcgcggtgttggagatataaagattctttggcatacaatgaagaattattaccggatcctaatgagaagagaccaggtttttaaagtgtgtgcaaaccacgttattactaaaacaatggaattaaagcccttaaatgtttcaaataatgctttagtttggactgcctcagattatgctgatggagaagcaaaagtagaacagcttgcagtgagatttaaaactaaagaagtagctgattgtttcaagaaaacatttgaagaatgtcagcagaatttaatgaaactccagaaaggacatgtatcactggcagcagaattatcaaaggagaccaatcctgtggtgttttttgatgtttgtgcggacggtgaacctctagggcggataactatggaattattttcaaacattgttcctcggactgctgagaacttcagagcactatgcactggagagaaaggctttggtttcaagaattccatttttcacagagtaattccagattttgtttgccaaggaggagatatcaccaaacatgatggaacaggcggacagtccatttatggagacaaatttgaagatgaaaattttgatgtgaaacatactggtcctggtttactatccatggccaatcaaggccagaataccaataattctcaatttgttataacactgaagaaagcagaacatttggactttaagcatgtagtatttgggtttgttaaggatggcatggatactgtgaaaaagattgaatcatttggttctcccaaagggtctgtttgtcgaagaataactatcacagaatgtggacagatataaaatcattgttgttcatagaaaatttcatctgtataagcagttggattgaagcttagctattacaatttgatagttatgttcagcttttgaaaatggacgtttccgatttacaaatgtaaaattgcagcttatagctgttgtcactttttaatgtgttataattgaccttgcatggtgtgaaataaaagtttaaacactggtgtatttcaggtgtacttgtgtttatgtactcctgacgtattaaaatggaataatactaatcttgttaaaagcaatagacctcaaactattgaaggaatatgatatatgcaatttaattttaattccttttaagatatttggacttcctgcatggatatacttaccatttgaataaagggaccacaacttggataatttaattttaggtttgaaatatatttggtaatcttaactattggtgtactcatttatgcatagagactcgtttatgaatgggtagagccacagaacgtatagagttaaccaaagtgctcttctctagaatctttacacctcctgtgtggttacaagttaactttgtaagtagcgtaccttccttccttaaaatatctagcttcctgtgccctttcatagatattcgattaatttttacattttaaacaagttgactatttcctttaggggttttgtttcaaacttttctgtcatctgtctctactacctcagaaactgcagcttggttctgatgatagaaattgaatttttccttgtagttattgtgataaagtatgaatatttttagaaagtctataccatgttctttcgttaaagatttgctttatacaagattgttgcagtacctttttctggtaaattttgtagcagaaataaaatgacaattcctaagagccactgacatccaaaaaattcattacttacgcttcgggttcattctaaagtaaggaagacaatttaaaggcagtaaattcaaactgctgcataatttccagagctcctagtttctcaagtttgatacacaccaaaaacgtatttggaaatggcttgtatcaaatgttaggcaaattgctaaagaaaagaggatgttcttattggcctactcaatatggaactacaaagaatccaggtagaacacaaaattttgtatattgcaattatgaatattgactgtcttccacccatctgtgttctttcgggtgaaattacctcattttatttagtgaggaaagacaggtttattccctgttacatggggatttggaaattgggtatcctaaagcaagtaactgttcaaccaccagtcaaaagaggggagggatgttgtgcgagtaatgagtgatggtataccatcaccattccactcggccacaaagccagatacttgaaataaacctactccaaatgtatcagttcagtcttgaaccatggattacatatgtttacactaaatatttcaaattggcttatttggaaatctatgtaatataaactgatgtaaagtgtgttgtaacttttcagctgagacagttgatgccttcgtcatgattttagaataaattcttaagttaatgcaagtgctttttaagagactttttacagatttgtatgctttcctaaagcactaaagttacaaattaaaaagctttaaaaactttgaccaaaaatttgacaaaatgacatgtaaactgacttttcccgtattagtattccaaagatgcttaaaagtggcttgtggcatttatgagaaagtctttgtgtcacatttcaggaaaggactttgatttctctttgttatttaatcactgatgtggtctaaacccacgataatatgtatctttccttttaaactggattttatgttgtctcattaaaatctgcttaaagatagaataaaattcattatttgtaca

SEQ ID NO: 511 - DNA, 7182 bp, Homo sapiens
ctttcctcttggaagtggcgactgctgcggggctgagcggtgctcgcacgcgtctcgggagccaggttggcggcgcgatgaggcgcagcaaggccgatgtggagcggtacgtcgcctcggtgctgggtctcaccccgtcgcctcgacagaagtcaatgaaaggattctattttgcaaagctgtattatgaagctaaagaatatgatcttgctaaaaaatacatatgtacttacattaatgtgcaagagagggatcccaaagctcacagatttctgggtcttctttatgaattggaagaaaacacagagaaagccgttgaatgttacaggcgttcagtggaattaaacccaacacaaaaagatcttgtgttgaagattgcagaattgctttgtaaaaatgatgttactgatggaagagcaaaatactgggtcgaaagagcagcaaaacttttcccaggaagtcctgcaatttataaactaaaggaacagcttctagattgtgaaggtgaagatggatggaataaactttttgacttgattcagtcagaactttatgtaagacctgatgacgtccatgtgaacatccggctagtggagttgtatcgctcaactaaaagattgaaggatgctgtggcccactgccatgaggcagagaggaacatagctttgcgttcaagtttagagtggaattcgtgtgttgtacagacccttaaggaatatctggagtctttacagtgtttggagtctgataaaagtgactggcaagcaaccaatacagacttactgctggcctatgctaatcttatgcttcttacgctttccactagagatgtgcaggaaaatagagaattactggaaagttttgatagtgctcttcagtctgcgaaatcttctttgggtggaaatgatgaactgtcagctactttcttagaaatgaaaggacatttctatatgtatgctggttctctgctcttgaagatgggtcagcatggtaataatgttcaatggcgagctctttctgagctggctgcattgtgctatctcatagcatttcaggttccaagaccaaagattaaattaagagaaggtaaagctggacaaaatctgctggaaatgatggcctgtgaccgactgagccaatcagggcacatgttgctaagcttaagtcgtggcaagcaagatttcttaaaagaggttgttgaaacttttgccaacaaaattgggcagtctgcgttatatgatgctctgttttctagtcagtcacctaaggatacatcttttcttggtagcgatgatattggaaaaattgatgtacaagaaccagagcttgaagatttggctagatacgatgttggtgctattcgagcacataatggtagtcttcagcatcttacttggcttggcttacagtggaattcattgcctgctttacctggaatccgaaaatggctaaaacagcttttccatcgtttgccccatgaaacctcaaggcttgaaacaaatgcgcctgaatcaatatgtattttagatcttgaagtatttctccttggagtagtatataccagccacttacaattaaaggagaaatgtaattctcaccatagctcctatcagccgttatgcctgccctttcctgtgtgtaaacagctttgtacagaaagacaaaaatcttggtgggatgcggtttgtactctgattcacagaaaagcagtacctggaaacttggcaaaattgagacttctagttcagcatgaaataaacactctaagagcccaggaaaaacatggccttcaacctgctctgcttgtacattgggcaaaataccttcagaaaacgggcagcggtcttaattctttttatggtcaactagaatacatagggagaagtgttcattattggaagaaagttttgccattgttgaagataataaagaagaacagtattcctgaacctattgatcctctgtttaaacattttcatagtgtagacattcaggcatcagaaattgttgaatatgaagaagacgcacacataacttttgctatgttggatgcagtaaatggaaatatagaagatgctgtgactgcttttgaatctataaaaagtgttgtttcttattggaatcttgcactgatttttcacaggaaggcagaagacattgaaaatgatgccctttctcctgaagaacaagaagaatgcagaaattatctgacaaagaccagggactacctaataaagattatagatgacggtgattcaaatctttcagtggtcaagaaattgcctgtgcccctggagtctgtaaaacagatgcttaattcagtcatgcaggaactcgaagactatagtgaaggaggtcctctctataaaaatggttctttgcgaaatgcagattcagaaataaaacattctacaccgtctcctaccaaatattcactatcaccaagtaaaagttacaagtattctcccgaaacaccacctcgatggacagaagatcggaattctttactgaatatgatttgccaacaagtagaggccattaagaaagaaatgcaggagttgaaactaaatagcagtaagtcagcatcccgtcatcgttggcccacagagaattatggaccagactcggtgcctgatggatatcaggggtcacagacatttcatggggctccactaacagttgcaactactggcccttcagtatattatagtcagtcaccagcatataattcccagtatcttctcagaccagcagctaatgttactcccacaaagggttcttctaatacagaatttaagtcaaccaaagaaggattttccatccctgtgtctgctgatggatttaaatttggcatttcggaaccaggaaatcaagaaaagaaaagggaaaagcctcttgaaaatgatactggcttccaggctcaggatattagtggccggaagaagggccgtggtgtgatttttggccaaacaagtagcacttttacatttgcagatgttgcaaaatcaacttcaggagaaggatttcagtttggcaaaaaagacctcaatttcaagggattttcaggtgctggagaaaaattattctcatcacgatacggtaaaatggccaataaagcaaacacttccggtgactttgagaaagatgatgatgcctataagactgaggacagcgatgacatccattttgaaccagtagttcaaatgcctgaaaaagtagaacttgtaacaggagaagaaggtgaaaaagttctgtattcacagggggtaaaactatttagatttgatgctgaggtaaggcagtggaaagaaaggggcttggggaacttaaaaattctcaaaaacgaggtcaatggcaaactaagaatgctgatgcgaagagaacaagtactaaaagtgtgtgctaatcattggataacgactacaatgaacctgaagcccctctctggatcagatagagcatggatgtggtcagccagtgatttctctgacggtgatgccaaactagagcggttggcagcaaaatttaaaacaccagagctggctgaagaattcaagcagaaatttgaggaatgccagcggcttctgttagacataccacttcaaactccccataaacttgtagatactggcagagctgccaagttaatacagagagctgaagaaatgaagagtggactgaaagatttcaaaacatttttgacaaatgatcaaacaaaagtcactgaggaagaaaataagggttcaggtacaggtgcggccggtgcctcagacacaacaataaaacccaatgctgaaaacactgggcccacattagaatgggataactatgacttaagggaagatgctttggatgatagtgtcagtagtagctcagtacatgcttctccattggcaagtagccctgtgagaaaaaatcttttccgctttgatgagtcaacaacaggatctaacttcagttttaaatctgctttgagtctatctaagtctcctgccaagttgaatcagagtgggacttcagttggcactgatgaagaatctgttgttactcaagaagaagagagagatggacagtactttgaacctgttgttcctttacctgatctagttgaagtatccagtggtgaggaaaatgaacaagttgtttttagtcacagggcagaaatctacagatatgataaagatgttggtcaatggaaagaaaggggcattggtgatataaagattttacagaattatgataataagcaagttcgtatagtgatgagaagggaccaagtattaaaactttgtgccaatcacagaataactccagacatgagtttgcaaaatatgaaagggacagaaagagtatgggtgtggactgcatgtgattttgcagatggagaaagaaaagtagagcatttagctgttcgttttaaactacaggatgttgcagactcgtttaagaaaatttttgatgaagcaaaaacagcccaggaaaaagattctttgataacacctcatgtttctcggtcaagcactcccagagagtcaccatgtggcaaaattgctgtagctatattagaagaaaccacaagagagaggacagatgttattcagggtgatgatgtagcagatgcagcttcagaagttgaagtgtctagcacatctgaaacaacaacaaaagcagtggtttctcctccaaagtttgtatttgtttcagagtctgttaaaagaatttttagtagtgaaaaatcaaaaccatttgtatttggcaacagttctgccactgggtctttgtttggatttagttttaatgcacctttgaaaagtaacaatagtgaaactagttcagtagcccagagtggatctgaaagcaaagtggaacctaaaaaatgtgaactgtcaaagaactctgatatcgaacagtcttcagatagcaaagtcaaaaatctctctgcttcctttccaacggaagaatcttcaatcaactacacatttaaaacaccagaaaaggagcctccattatggcatgctgaatttaccaaagaagaattggttcagaagctccgttccaccacaaaaagtgcagatcacttaaacggcctgcttcgggaaatagaggcaaccaatgcagtccttatggagcaaattaagcttctcaaaagtgaaataagaagattggaaaggaatcaagagcgagagaagtctgcagctaacctggaatacttgaagaacgtcttgctgcagttcattttcttgaagccaggtagtgaaagagagagacttcttcctgttataaatacgatgttgcagctcagccctgaagaaaagggaaaacttgctgcggttgctcaagatgaggaagaaaatgcttcccgttcttctggatgagcatcctatcttcgtagttggtttggacttcgataggttgatggaaggaatacttctattaaccaaatagaatctgtttacaaaaatggttcgtgtgtgttaccattattcttttgtcaaaaagtgtgtatatatgtttgcatttacatatatttgtacatctgtatgacagatgtattttaaaagtttcaacttgaagtaaaagtacaacagcttgaagtgttgataccaggccacagccctctaactcatgtgatctcccatgcatgctgccagaataaaaccaccaggaatgaattcactccccacttctctggaacctcaggacccgcccatttctcggcagtactgtgaattttgaagttaaactaaattttggtaccataccaactggaatttaggctttaaaaataatgtttcaaggccaggtgtggtgattcatgcctgaaatcccactactttgggaggctgaggctggagaatcgcttgaggctagtgagctgtgattgtaccactgcactccagctcggggaacagagcgagaccttgtctctaaaaataataatagtaataaaaataacgttttatgactatttattgcaaggtcagatttacagattgttataaattgttgagaaatttttgtgattagaatatgaaggaaaaagctttgttggtaaaagtgacatgttaaggggctatgaagtaaatatgctgcagttaattgtgctaagttaaaatacagtttagttatttgctttaaaataaactcttctttttttctttaaagtatactacctcaaaactcattatgttgtcagagccctagagctggctagtgtaacactgactatgagtaggtgggcccaccacttgagttgaggtgatttcatggtgtctttccaggctcttgatagggtgtcactgcatgcaagccatgaatctgttttgagaatcctctccattttcccaaataaaaacctatcccaacagtgactatatcactcagcattggatctaaatataaaagtggtgctttcagtgtttttggcagatagtgttccataacctttccatcagaagggattttagacaccttagaggtccgtgctacatcttcacagttcctccgaataaccttaggtggtagtgttacttgcctttgacacctgtgcatatgttttaatgactagatccaaactgtgttgttcttaaatcaaaaattggataatttttaatatttatgtattaatcacacagtgtgctctctgaagttctcttaagccttcagtttatactcttaattttctttctgagctggggaactgactttgcactttggttacacagaacattggtttccaatttagtttaactgaaatttgctgctgatatgttgagtttgttctttaaaaaatatctcatatatctcgtctttcctccttagaagaacagacctaactagcgaatgtatgaatgaaaatgcatctatttcagagccgacatgaagagtttagtttttttactttataaactgtgaatatgagtatgccagctgcattagatgtaactaatcatatttaaatatatttcactttgactttagaccttttgaagtctgtataaacttgttttgaaatacagtctccacttacgaatgtcataacaaaatacttttttgcatgataaaaaattactttgattacaaaaggcatattctttcatggtttctgcaatgagaggaagtgtaatgattattttaatatttctattaaaactgtatatttttaaaaaaaaaaaaaaaaaa

SEQ ID NO: 512 - DNA, 7202 bp, Homo sapiens
ctttcctgttggaattggcgactgctgcggggctgagcgctggtttcacgcgtctcgggagccaggttggcggtgcgatgaggcgcagcaaagcctacggggagcggtacctcgcctcggtgcagggctccgccccgtcgcctggaaagaagttgagaggattctattttgcaaagctgtattatgaagctaaagaatatgatcttgctaaaaaatacgtatgtacttaccttagtgtgcaagagagggatcccagagctcacagatttctgggtcttctttatgaattggaagaaaacacagagaaagccgttgaatgttacaggcgttcactggaattaaacccaccacaaaaagatcttgtgttgaagattgcagaattgctttgtaaaaatgatgttactgatggaagagcaaaatactgggttgaaagggcagcgaaacttttcccaggaagtcctgcaatttataaactaaaggaacatcttctagattgtgaaggtgaagatggatggaataaactttttgactggattcagtcagaactttatgtaagacctgatgacgtccatatgaacatccggctagtggagttgtatcgctcaaataaaagattgaaggatgctgtggcccgctgccatgaggcagagaggaacatagctttgcgttcaagtttagagtggaattcgtgtgttgtacagacccttaaggaatatctggagtctttacagtgtttggagtctgataaaagtgactggcgagcaaccaatacagacttactgctggcctatgctaatcttatgcttcttacgctttccactagagatgtgcaggaaagtagagaattactggaaagttttgatagtgctcttcagtctgcaaaatcttctttgggtggaaatgatgaactgtcagctactttcttagaaatgaaaggacatttctacatgcatgctggttctctgctcttgaagatgggtcagcatggtaataatgttcaatggcaagctctttctgagctggctgcattgtgctatgtcatagcatttcaggttccaagaccaaagattaaattaataaaaggtgaagctggacaaaatctgctggaaatgatggcctgtgaccgactgagccaatcagggcatatgttgctaaacttaagtcgtggcaagcaagattttttaaaagaggttgttgaaacttttgccaacaaaagcgggcagtctgtgttatataatgctctgttttctagtcagtcatctaaggatacatcttttcttggtagcgatgatattggaaacattgatgtacaagaaccagagcttgaagatttggctagatacgatgttggtgctattcaagcacataatggtagtcttcagcaccttacttggcttggcttacagtggaattcattgcctgctttacctggaatccgaaaatggctaaaacagcttttccatcatttgccccaggaaacctcaaggcttgaaacaaatgcacctgaatcaatatgtattttagatcttgaagtatttctccttggagtagtatataccagccacttacaattaaaggagaaatgtaattctcaccacagctcctatcagccgttatgcctgccccttcctgtgtgtaaacggctttgtacagagagacaaaaatcttggtgggatgcggtttgtactctgattcacagaaaagcagtacctggaaactcagcagaattgagacttgtagttcagcatgaaataaacactctaagagcccaggaaaaacatggccttcaacctgctctgcttgtacattgggcaaaatgccttcagaaaatgggcaggggtcttaattcttcttatgatcaacaagaatacatagggagaagtgttcattattggaagaaagttttgccattgttgaagataataaagaagaacagtattcctgaacctattgatcctctgtttaaacattttcatagtgtagacattcaggcatcagaaattgttgagtatgaagaagatgcacacataacttttgctatattggatgcagtacatggaaatatagaagatgctgtgactgcttttgaatctataaaaagtgttgtttcttattggaatcttgcactgatttttcacaggaaagcagaagacattgaaaatgatgccgtttttcctgaagaacaagaagaatgcaaaaattatctgagaaagaccagggactacctaataaagattatagatgacagtgattcaaatctttcagtggtcaagaaattgcctgtgcccctggagtctgtaaaagagatgcttaagtcagtcatgcaggaactcgaagactatagtgaaggaggtcctctctataaaaatggttctttgcgaaatgcagattcagaaataaaacattctacaccatctcctaccaaatattcactatcaccaagtaaaagttacaagtattctcccaaaacaccacctcgatgggcagaagatcagaattctttacggaaaatgatttgccaagaagtaaaggccattacgaaactaaatagcagtaagtcagcatcccgtcatcgttggcccacagagaattatggaccagactcggtgcctgatggatatcaggggtcacagacatttcatggggctccactaacagttgcaactactggcccttcagtatattatagtcagtcaccagcatataattcccagtatcttctcagaccagcagctaatgttactcccacaaagggttcttctaatacagaatttaagtcaaccaaagaaggattttccatcgctgtgtctgctgatggatttaaatttggcatttcggaaccaggaaatcaagaaaagaaaagtgaaaagcctcttgaaaatgatactggcttccaggctcaggatattagtggccagaagaatggccgtggtgtgatttttggccaaacaagtagcacttttacatttgcagatgttgcaaaatcaacttcaggagaaggatttcagtttggcaaaaaagaccccaatttcaagggattttcaggtgctggagaaaaattattctcatcacaatgcggtaaaatggccaataaagcaaacacttccggtgactttgagaaagatgatgatgcctgtaagactgaggacagcgatgacatccattttgaaccagtagttcaaatgcctgaaaaagtagaacttgtaacaggagaagaaggtgaaaaagttctgtattcacagggggtaaaactatttagatttgatgctgagataagtcagtggaaagaaaggggcttggggaacttaaaaattctcaaaaatgaggtcaatggcaaaccaagaatgctgatgcgaagagaccaagtactaaaagtgtgtgctaatcattggataacaactacaatgaacctgaagcccctctctggatcagatagagcatggatgtggttagccagtgatttctctgatggtgatgccaaactagagcggttggcagcacaatttaaaacaccagagctggctgaagaattcaagcagaaatttgaggaatgccagcggcttctgttagacataccacttcaaactccccataaacttgtagatactggcagagctgccaagctaatacagagagctgaagaaatgaagagtggactgaaagatttcaaaacgtttttgacaaatgatcaaacaaaagtcactgaggaagaaaataagggttcaggtacaggtgcagccggtgcctcagacacaacaataaaacccaatcctgaaaacactgggcccacattagaatgggataactatgatttaagggaagatgctttggatgataatgttagtagtagctcagtacatgattctccgttggcaagtagccctgtgagaaaaaatattttccgctttgatgagtcaacaacaggatttaacttcagttttaaatctgctttgagtctatctaagtctcctgccaagttgaatcagagtgggacttcagttggcactgatgaagaatctgatgttactcaagaagaagagagagatggacagtactttgaacctgttgttcctttacctgatctagttgaagtatccagtggtgaggaaaatgaacaagttgtttttagtcacatggcagaactctacagatatgataaagatgttggtcaatggaaagaaaggggcattggtgatataaagattttacagaattatgataataagcaagttcgtatagtgatgagaagggaccaagtattaaaactttgtgccaatcacagaataactccagacatgagtttgcaaaatatgaaagggacagaaagagtatgggtgtggactgcatgtgattttgcagatggagaaagaaaagtagagcatttagctgttcgttttaaactacaggatgttgcagactcatttaagaaaatttttgatgaagcaaaaacagcccaggaaaaagattctttgataacacctcatgtttctcggtcaagcactcccagagagtcaccatgtggcaaaattgctgtagctgtattagaagaaaccacaagagagaggacagatgttattcagggtgatgatgtagcagatgcagcttcagaagttgaagtgtctagcacatctgaaacaacaacaaaagcagtggtttctcctccaaagtttgtatttggttcagagtctgttaaaagaatttttagtagtgaaaaatcaaacccatttgcatttggcaacagttctgccactgggtctttgtttggatttagttttaatgcacctttgaaaagtaacgatagtgaaactagttcagtagcccagagtggatctgaaagcaaagtggaacctaaaaaatgtgaactgtcaaagaactctgatatcgaacagtcttcagatagcaaagtcaaaaatctctctgcttcctttccaatggaagaatcttcaatcaactacacatttaaaacaccagaaaaggagcctccattatggcatgctgaatttaccaaagaagaattggttcagaagctcagttccaccacaaaaagtgcagatcagttaaacggcctgcttcgggaaacagaggcaaccagtgcagtccttatggagcaaattaagcttctcaaaagtgaaataagaagattggaaaggaatcaagaggagtctgcagctaacgtggaacacttgaagaacgtcttgctgcagttcattttcttgaagccaggtagtgagagagagagccttcttcctgttataaatacgatgttgcagctcagccctgaagaaaagggaaaacttgctgcggttgctcaaggtcttcaagaaacctccatacccaagaaaaaatagaaagcaaccatgttctactatggtgccaaaaatagttgaacatcgacatcaaaaagattctttctgtctgcttattcacatattctggtttgaattaaaagtgatgaaattatcctaaatacagttggccctctgtatccatgggttccacatccacaaattcaaccaactgtggatggaaaagacttgaaaaagatgagagaaaataacaatatgacaataaaacataatacaaataaaaacaatacagtataacaacgattacatagcatttacattatattagggattgcacaagagaaggtatgtaggttatatgcaaatactgcaccattttacataagggacttgagaagcatggattttggtagccacaggggtcctggaaccaatccctcacagacacagacggacactttacagtagatgaacacaaagatgaaaggaaaagtctgacctaggtctgcggggagaagtggaactccatttttgacaggtgatgccattttttgttttggacatcgtccctctgtagttctttccattcccagtcttgcactctgaaagatacactgaaggaaagtccacacagtggtcaaagtctttcacaagacaccacgtgaaggtctgcacagcacagtcacattgagaaaaagatctcatgcaccagaccccctgtttctgctttctaaaagatcatcttttgcacctgcaaaaaggctgcagtaaactgggccattccatactttgattcatgtattcaaatgctacttatgagctctctgtgtattgagccccaccaggatgctggggacacacggggcacagtgcagccagaggcttggccatcatagagctcacattctagtggaatcagacaggggggttacaggaaatattcaagtaaacaatataaaatgagatcacttaatgatgatacatggatacatgttacatacatgatgagacagagtaagagaatggggaaagggtttttagatgggggaatggcaggcttttccgaggctgaaagagatccaacccacttctatttcttcaggctcccagtgatatgaaaaagtgccaaacaggactataaaattgtggtctactgtaaatggtttgcagtaaaagttctcaaccagcttccactcaaccaactcaccagttagacaatgggccctctcctgtgtttaaaacagtccggtgcccacctgggtccacatgcagctggcaggtgtttgctagtgtgcccacccatgtctgttccccccacgtgagttatgtgcttacaacgagtcgtttctttgcattttccaactttcttacatttatatttaattaaagatgatctaaactgagaaatgaatgtgaaaagaaacaaagctcttttttgtttggtttttaactaaattaaatgtttttaacaagttgaaacgtgaatcatttaaaaaattgctatcagatccacagagggcaatccactcatatagttgactataaagcttgaggaggaattcataaaaatctaaaggttttacacatgcagattgattaataaatgtcgagatatggtccacttcaaaaataaggaaagtaattattgtagatgttgcactagagcatagtttatgcaggaaatgcaccagagaccttctactggtgaccccatattcgaagaaaaaaagcctctgctctacatcaagaggtgtcaagtacacttgtgttttcaatgaaaatataaaatgtttaaggtatatttgcaccatcatttaaggttacccactttagccatttttaaattcactgatcaatcacatggggagtactcctaacgtacctacagcaaactaa

SEQ ID NO: 513 - DNA, 1929 bp, Homo sapiens
atgcaggcaaagccaccgtttcactgggtggattcagtaggtcccccacccccagcagttcccgaagtaagtcgtgtatttagcattcattcatcaaagcctccggatgcctcctacgtgccctgcactatgctggtcttggtaatccgtggtccctatcccagcgcccagtgtcaggggaagctgatggagaatcgagctctggatccagggactcgggactcctatggtgccaccagccacctccccaacaagggggccctggcgaaggtcaagaacaacttcaaagacttgatgtccaaactgacggagggccagtatgtgctgtgccggtggacagatggcctgtactacctcgggaagatcaagagggtcagcagctctaagcaaagctgcctcgtgactttcgaagataattccaaatactgggtcctatggaaggacatacagcatgccggtgttccaggagaggagcccaagtgcaacatctgcctagggaagacatcagggccgctgaatgagatcctcatctgcgggaagtgtggcctgggttaccaccagcagtgccacatccccatagcgggcagtgctgaccagcccctgctcacaccttggttctgccgacgctgcatcttcgcactggctgtgcggaaaggcggcgcgctgaagaagggcgccatcgccaggacgctgcaggccgtgaagatggtgctgtcctaccagcccgaggagctcgagtgggactcgccccatcgcaccaaccagcagcaatgctactgctactgcggcgggcccggagaatggtacctgcggatgctgcaatgttaccggtgcaggcagtggttccacgaggcctgcacccagtgcctcaatgagcccatgatgtttggagaccggttttacctgttcttctgctccgtgtgtaaccagggcccagagtacatcgagaggctgcccctgcgatgggtggatgtggttcacctggccctctataatctgggggtacagagcaagaagaagtactttgactttgaggagattctggcctttgtcaaccaccactgggagctcctgcagcttggcaagctcaccagcaccccagtgacagatcgaggaccacatctcctcaacgctctgaacagttataaaagccggttcctctgcggcaaggagatcaagaagaagaagtgcatcttccgcctgcgcatccgcgtcccacccaacccgccagggaagctgctgcctgacaaaggactgctgccaaatgagaacagcgcctcctctgagctgcgtaagagaggaaagagcaagcctggtttgttgcctcacgaattccagcagcagaaaaggcgagtttatagaagaaaaagatcaaagtttttgctggaagatgctattcccagtagtgacttcacctcagcctggagcaccaaccaccacctggctagcatatttgacttcacgctggatgaaattcaaagtttaaaaagtgccagctcaggccagaccttcttctcagatgtcgactccaccgacgctgccagcacctctggctctgcctccaccagcctctcctatgactccagatggacagtgggcagccgaaagaggaagctggcagccaaggcatacatgcccctgcgggcaaagcggtgggcagctgagctggatggacgctgcccctcggacagcagtgcagagggggcttcagtccccgagcggccagacgaaggcattgacagccacacatttgagagcatcagtgaagatgactcatccctgtcccacctcaagtcatctatcaccaactactttggtgcagctgggcggttggcctgtggggagaagtaccaggtgttggctcggagggtcacacctgagggcaaggttcagtacctggtggagtgggaagggaccaccccttactga

SEQ ID NO: 514 - DNA, 2759 bp, Homo sapiens
ccgggttctctcccggcgtgccccgcgccgggtttgttggggggtactcggcagtgcagccatgactatactccccaaaaagaagccgccgcctcccgacgccgaccccgccaacgagccgccgccgcccgggccgatgcccccggcgccgcggcgcggcggaggtgtgggcgtgggcggcggcggcacgggcgtgggcggcggcgatcgcgaccgtgactccggcgtcgtgggggcccgtccgcgagcttcgccaccgcctcaaggcccgctaccaggaccgccgggcgctcttcatcgctgggcgctggccgtgccgcctggtgcagtggcgggtccccggccacaacaggcttctccacctccttgcgggggcccaggtggtcccggcggcggtcccggcgacgcgctgggcgcagcggcggcgggtgtgggtgccgcgggcgtggtggtgggtgtgggtggtgccgtaggcgtgggcggctgctgctccgggcctgggcacagcaagcggcgacgtcaagctcccggggttggcgcggttggcgggggcagtcccgagcgtgaggaggtcggcgcaggctacaacagtgaggacgagtatgaggcggctgcagcacgcatcgaggctatggaccctgccactgtcgagcagcaggagcattggtttgaaaaggccctacgagacaagaagggcttcatcatcaagcagatgaaggaggatggcgcctgtctcttccgggctgtagctgaccaggtgtatggagaccaggacatgcatgaggttgtgcgaaagcattgcatggactatctgatgaagaatgccgactacttctccaactatgtcacagaggactttaccacctacattaacaggaagcggaaaaacaattgccatggcaaccacattgagatgcaggccatggcagagatgtacaaccgtcctgtggaggtgtaccagtacagcacaggtacttctgcagtggaacccatcaacacattccatgggatacatcaaaacgaggacgaacccattcgtgttagctaccatcggaatatccactataattcagtggtgaatcctaacaaggccaccattggtgtggggctgggcctgccatcattcaaaccagggtttgcagagcagtctctgatgaagaatgccataaaaacatcggaggagtcatggattgaacagcagatgctagaagacaagaaacgggccacagactgggaggccacaaatgaagccatcgaggagcaggtggctcgggaatcctacctgcagtggttgcgggatcaggagaaacaggctcgccaggtccgaggccccagccagccccggaaagccagcgccacatgcagttcggccacagcagcagcctccagtggcctggaggagtggactagccggtccccgcggcagcggagttcagcctcgtcacctgagcaccctgagctgcatgctgaattgggcatgaagcccccttccccaggcactgttttagctcttgccaaacctccttcgccctgtgcgccaggtacaagcagtcagttctcggcaggggccgaccgggcaacttccccccttgtgtccctctaccctgctttggagtgccgggccctcattcagcagatgtccccctctgcctttggtctgaatgactgggatgatgatgagatcctagcttcggtgctggcagtgtcccaacaggaatacctagacagtatgaagaaaaacaaagtgcacagagacccgcccccagacaagagttgatggagacccagggattggacaccatctcccaaccccagtactcctgctctccggtgccacctcaccttctttggcttcttccctcttgcctccttctgttctttctgctctcccctcttttccctcctcctcacttccctctggctagcccacccctgcactctctctcattgccgctgccactatcacctgtctctctgccagctgatgtgccctgttgccccccaccccatcccgcacagaaccatccctgcattccacaggggactcgggcaagggtgccgaagatagacaagaggcacacagagacagaccaactggcagccaggcagccccagaggagagagacattcagacagaggaaagtctccctgcccctcattccttccaagatgagaaaaacttgccgccaccccccgacactgatgccagggaggtgggaggaagaagtgggaaatttcccttcccagtacccccaagaacgtctgagccttcaatgttgaattttttctttattaaaattacttttatcttataaaatcaactaatcaaaaatgatatagacgacagcactggctctgtgaaggtggcatctttctgggcaggcaggccatggggcatggaggagggtgcaaagatatgggttgctgtcttctggcctccagctgcatggaggccggcccagggtctagggtgtgcactgggcaagggcagggcggcaggtgtcaggccggcttggacaatgaaaccctgaccttgctgcattccttttgcttccaccaccactagcttctttggaatcttggggtgggggtcatctttggggattatggctgccacccgggatttgagtgtagggagtgtgggagcagccttggcagatggggcacccgtgccctgcaggtgttgacaagatccgccatctgtaatgtccttggcacaataaaaccaaatgtcagtttcaaaaaaaaaaaaaaaaaaa

SEQ ID NO: 515 - DNA, 3715 bp, Homo sapiens
gtcggtggccccgccccgcccgcagccgcgggtggagaccgaggacggcgccggcgcgtgcgcgctccctcggtgcggcgggctgcgtgcgcgagtgggaggtggcaggcctgcgactccggccttgtccgcgcccgctctcggcgcgacgtctccagccatgaaccggtttggtacccggttggtgggagccacggcgacttcttcgccgccgccgaaggcccgcagcaatgaaaacctcgacaaaatagatatgtctttggatgatatcatcaagttgaatcgaaaggaagggaagaagcagaattttccaagactaaatagaagactcctccagcaaagtggtgcccagcaattcaggatgagagtgcgatggggaatccaacagaattctgacacaaaaactttggagtcctcaattgttaagcatatgaagaggttcgtgcttgtaatcccagcactttgggaggtgagagcaagaggattgcttaagccaaggacttcaggaccagcgtgggcaacatagggagaccccgtctctacaaaaaaaaagaaagagtataaagaggttttggtaagactagtctgaatcgtagaggaagagtaatgcctggaaagagacgtcctaatggagttatcactggccttgcagctaggaaaacgactggaattcgaaaaggaattagtcctatgaatcgtccacctctaagtgacaagaatatagaacaatattttccagtgttaaaaaggaaggcaaaccttctgagacaaaatgaagggcagaggaaaccagtagcagttctcaagagacctagccagctaagcagaaaaaataacattccagctaattttaccaggagtggaaataaattaaatcatcagaaagatactcgtcaggcaacttttcttttcagaagaggcctgaaggtgcaggcccagttgaatacagaacaactgctagacgatgtagtagcaaagagaactcgtcaatggcggacttccaccacaaatggagggattttgactgtatctattgacaatcctggagcagtgcaatgcccagtaactcagaaaccacgattaactcgtactgctgtaccttcatttttaacaaagcgggagcaaagtgacgtcaagaaagttcctaaaggtgttcccctgcagtttgacataaacagtgtcggaaaacagacagggatgacgttgaatgagcggtttgggatcctgaaggaacaaagagccactctcacatacaacaaagggggaagccgctttgtcaccgtgggataggtcccatgtcaaaggaacttttgagtgatgactctgagaagttgaattgcttgaagagttcatcacggaaattcaagaaactttacttcaaaatattcacaaggctaaataactcttatttttatttttgaaggtttttttttttaaaaaaaaaaacgtataaaataatgccctgaaagaataatagggattatacctgtctgttcttaaagatttcatggttggctcagacagaacaatcatctgtttgacttctttggttcctcatgcagcagaaggaagacagaaagatagaaattgattatttttatgatagcagtattcaggatctcatcacctttgcccgtgttttagactttgtcatggtaaatcctggtcttcataaacatgagtaggtcccttggttgctgtcacttgccctttaatagtgttgatgtagtcagtgccgttgccttttcttcattagagacacagaacaatgtattagaatttccagctgtgggtttgaagacttagggggacatccagaacgtgcttcctctttcagacggtgtaaagtcccctggaattacacagctttagtgctgagcttttaacaggaaatgtggccctaggtattagtcttagtttaaaatgttggtgtttagagactgtaaatgcatattcacaaagttatctgatagggccttggaggagaaggtccagttttaaaaaatgacagtttgtgtttaataaatgaaggcatgagaggaagtaagtagcaagttgaaggacaggtagttgagatgaaacacttcaaaaccctggttatagatgtactgtttggatgtagcatagtcttgagtctagcgtccacaaagaattattcaaatgatatttagaagaattataactattacattgaatggagtcccttggatattttgatagtaaaattaatagccataaagtcctagacttcttatttgaagttaaaatttcttatttgaaaagttgaaatttatgagctttgaagattgctaaattaaataatttatagctccaaaaacaaaaatatacttgtatatgtcacagagaaaaaaaatgcaaaatttataatagagttacattaaccttgttgtttacctttcactgatttcttatatggtataaattaaagttcaggcatttatggggagaaaaggccctccccaccgacccgccacctgccacctctgacggagtgggagaagttagtctgtgctaagatagtactgagtccccagatgttgtatactgtaaattacagtataatgccaaatgcagcaaaatcttccagctgtacgttacaagtttggtcattttgaagcttgacattttagtttgccattatgttaaaaacatctaaataggtgttagtttctcaggagtagattgttagtgttgacttttcctgtaaagcagacatcgttcttggcctgccctgcattgtatactagatttcattgttgtctctcatgcttcttgagttgcttcatggtttatgctcgccatggaaagctatcagtaacagtttcatgcttataccaaagaattaaatctgatctttaatatctgatattttcctggtactcgtactgataagggattattggaagtcagtcacagaatttggaaataaattctagtctctccttagctatttgatgcttttcatataggccaagaactcattgcaaaacatttttgcaaggatgaatgcctgtatttggtctaggaacagtacattttagtctgatttagaattactggtagcttattttaaagcaaggaaaagcagctgagctcaagtttgctgtctttagaatggtttgtgaaaatatggtataaaggtgttttcattttcctgttcttacctattattgtatagagctattcatgccattttttgggaaaactttaaaaattgccccaaatactgacattgagtgcattaaataacaaattatctttgatacattaaacttttattcttcatgcatctgtaatttaattttaagtataatgttttgcctttggtacaactaaattaaaactcttggtggtcacatattgtatataaacaaaacaatatgctttgttgaaggaaaattttctttattggaatgtggttgtaatccttgttcagttcttaagtttcggttttttttaaaaacaggatgcaacttaaacttttctttgcatcaaggtatatgcaaaacattggtgccgtgcatcaccaaatgaaagtttgtatttaacgaggaggtgctttacactgtactttttggtgttttttggaaaagttacatttagatctattctgaagctgttcatttttaacaaataaaatgttacaggtttcacatgatttattctcagctctaaaaaaaaaaaaaaaaaaaaa

SEQ ID NO: 516 - DNA, 2210 bp, Homo sapiens
cttagcagtgttccagttcatcacgtatacccatatttaaggacttttaaagtaatttggatttttaactcaaaagacgatgtgtaccccttggggcatgcgtgtgttcttaggaacaccagcgtgtggtatttcctgtgtcctctcatgcatgctcagcatgtcactgttgtactcattccctggcacggaagaattgttgcacatctttaatagaagccaaagcccatgatttgatggtttcaagagcctaaaatctgtatttggagagaggaagtctactcttaactgtgagagttaagagtatcaccatcaaggcgcaaggcttcagtcttatcccggacaatcctcagggattgggtttgatgtcgggggagcattggatgccatcacgttgacactcaattgattgggtgacccaagatggtcagtttcctaaggaccagaccatagtgactgctcatgcatcggctgaaataccaaacaccctgcaccaaaagactcagcttgacattgctttgcactcaactcatgtattaccaaatctttgcttgaattattaatagtaaccaaactctctgctctaacaaccttcgaatgtcaagttcccttgcaagctgaaattgttccaaacctcaacactcctgttttacaacaaacatgtaaatacaacctcttttggagtgcagaaacatttgcggagtctggtgtgccaccaaccccatcaggatttccccaggggaaaatggctaactctggatcacaaacagcacaaattaaaaaggtgccttgcctgatgcccattaccacctggggtggtttttctagacaccagaataggccagatttaattttcacaggctcatctgggagaaggatcaaatcctgccatctggatgtgcattattaatgctggtgtttggtgaggaagctcctaggaatgcatagatctctccttctgccatagtatgtcgtgtgtagtggatgccagtagacaactttagccactcctgtccgtccttcttcatggaacacactcatttcgccacacggaggctttactctgcccagtgtccaatgggagaaccatcccttccctttagtgagaggacagctggctaaatgctatcctcagtcctcctggaggctcctagtaatgagggcactgaacaccaattctttacattccttgaattttcatagattctatttttttcatgtctgtgaaaagtggggtggggaactcacaccaaccatagcttggggcatccagagagtggctagtagatgatagaagggagtccagttaaggaaacctaaggtatgtgccagctggtttagcattcaatatggaaatgcactttatatttatttgcacacatcaagaatacttttggaaaccaggatttagaaaaataaaagatatttctttcctggggacaaagtgacctgcaaatgattggcttctgtacaatgttgcaatcccttaatgtcagactcttaggaaaatgggtgggacatctgtgtgtttgtgttggagtgaatgtgcccataaccctgtgctcccataagtctgtgtgcccgtgatcatatgcatatgggtgaatgtttgtgtgcccatgattttatgcatataggtgaatatttgtgtgcccatgagcatatgcatatgggtgaatgtttgtgtgcccatgagtatatgcatacgggtgaatgtttgtgtgcccatgagtatatgcatatgggtatatgtttgtgtgcccgtgattatatgcatatgggtgaatgtttgtgtgcccgtgattatatgcatgtgggtgaatgttcatgaacacaaacagctacactcggagtagaaaacaaatgaagcaaaagtttagcatcctctcatgtgtgtcaacattgtagttttacatttactttcttctaatctattaaacataagtatggctccatttttttagtattaccagaagccctcccaatacggcaatattaccttctgtgtaatccacttgccaacagctgttttctgttgaaatgggactcaagaattttgaatccaaggccaatgctgcctgctctgtttacaatggtttgtgttttgtggatacatatcaaatgctgtaatatatttttatgatagaattgatggttaatacagggaaaaagtatatattgtgattctgtccaataaagcctcctgttat

SEQ ID NO: 517 - DNA, 2886 bp, Homo sapiens
tgtttggtatatttaaagcagtgactgagtgtgtttgagtgagtggctgagtgcagtgtcttttgtttaaacacactgcctcgtgtctttgtagctgattcagagagtttgaattgtggggtgggagactaacttcagctccaggctgcagtaatgtgttggtagttacacttgaggcatttttttgttgttgttaattaactctatagtctcaaactatttttgcaaatatatcatttttcctaattggttcttgacgtgcagtggactggctctgtgaatgattggcagggtcttagttttgcgagagcatttccttctaagaattattgtgatctgcagaaacagccatttgattcaaaaatcatgtagaaaaggagtaggagaagcaaaacgtttcatttttgggccttaaccatttgaaatgtttggactttaaacataaagccatggagtttataaagccaagtaaccatttgatatggataataatatctactctagagagagtatatatatgcacattgatttttaatgctgttaagatacttttgtaaaactgtaggaacaagagtaattagaccaaattgaagcttaggggacagtaaagtggttgctttccatttagggtaaccatgcatgtggttagtcctctcctcctgagattcagaaccagttgactgtccccttaggtgtataaggagaaaagttgacatgtctgggacctctgacatgtgtacacatgcttgcacacatgcacacacagtgaatgttttaagttatacaaacataagaccttaagatgcaaagagccagaatattctaaagaggtgatgaacagagggggtggaaactgcatcacagatgttttccaagggccagggtggaatctgagctctagtgtctgactttgagatgcattatatttttaacacataaatgaggggatccatatcacattctttcttgtggaccaccaaattgaaggctttcttgtaattcacaagcagcagctctccagcatctctccgtagcctgggtgaagtcccagaagctggtgtgcatcattttccaaggtggcagagctgcttgctctgcagatcattcctttgagagaggagtacaagtgaagaaacaaggaggcacttcctgtaggagcactgatgtgccttgtccacactcccctctgagctttactggtaagagagctccgactgaacatgctgagcagttgagcacttttccatcagcaacaacagcgaggatggaaatggaaaggaaccgaactaaaatgcatttccctttgcagggcagagagctaagctcttaggaatagtgttatagaaataagcaccctaacttcaattcctgaaaatgttggttaatggagagaattttggagtttcacttaatattttcccatcggtcgccataaataagtcttcaggcgctcctagaagagtcccagcccaaggctcgattaaggaccacactgcaggtctgaggctcactgctctgagtcctgaacaccagagccctgcagagagtggtgataacacatcatctctgcaaagaggaacctctcccccggccgccacttcactcaggcttctactgagcagcaaggacagcctgggtttcaaatgccacttcccctgctttagggatccaggtgtcctgatagcgtgaccctgctgaggcaaggtatcaactccgagagtgactgagtcactgagcgtggcacatgaacaaacgtcatgacaaagattctctgagtgaagttaacaccacgtattttacctttgcaaaaaacaaactggcaccctgagttctaactacggacggacgatatctttgcctccacacccagattcctggaaatggctaacgtttcctttctaggggaagggtcgaggaatactcaagtgctagcttagcagctttgttcagtccagatcagagctgttaggtaaaggcctaaccacctccctgcagtctcttatatctcaagctttaggaacccatttctaaatgtacactagcggagaatttatattgtcagccttgattaccataggacaggcagaaaggcgataatttgtatcttttaatataaaagaagcttttaacttttccagcctattataataactgagttatattcactgtggctcaaactaattggcattgtggaacatttctttaccttcaaagttttctccaccaatcatttcagttctattgcagtcctggtgccatatgtcccctgcaaattgtgaaagtaattagtgacaaaatagcagcctgctccttttcaatggcgaaactgtcggcattagcagttttgggtaagctggcggtactataacacgtactggaaacctgttcctcatcaccacctaccagattctggaaatgccgtcttctagaaaacgatggcgtttgtggtggtcttcttttgaaaggaacagtaatttgtgtggatattgttaaagtgtttaaagaatattttgacaattaagtttacattttacaattgctttattttttattaaaatagttgtatataaatattaccctatttcactgttgttcaagtaaatctaaaccttgtagacaagtgagtcatctgatatgtatagaagctgtgatatatagagtacatttattgtgtaaatgtttatgaatataattgttcctgtgtttttataagttggggatattttgttgttttacggcaacaaaatttattgcatttaaatggtttttatgtaatagaaatcacgcaaaatagtgaaggatttaaaatatgtatatgatacatgtaaatgtacaaactttagaaagaaataaatccaacaaatttcaaaaaaaaaaaaaaaaaaa

SEQ ID NO: 518 - DNA, 2844 bp, Homo sapiens
acccaaccctgtcattatttcccctccgactgggccggtgccatcggaaaccggagtgaccagaggagggacacgcatccaatttcactgggctgcaagatatcaataagccttgcctctttaaactacttatgtacaaataaaagtgatggtgagaacctggctcaggaaatgcagtagcaggccatattgcatccaaaggaattactcacagctgtgctgtgtgcattctctgtgggcctagcagggaaggggacagccctgtggcaatgggcatgacacggatgctcctggaatgcagtctcagtgacaagttgtgtgtcatccaggagaagcagtatgaagtgattatcgtcccaactttgttggttactatcttcctcatccttcttggggtcatcctgtggctttttatcagagaacaaagaactcaacagcagcgttctggacctcaaggcattgcccctgttcctccacctagggacctaagctgggaagcaggacatggaggaaatgtggctttgccacttaaggagacatccgtggaaaactttctgggagctaccacacctgccctggctaagctgcaggtgccgcgggagcaactctctgaagttctggagcagatttgcagtggtagctgtgggcccatctttcgagccaatatgaacactggggacccttctaagcccaagagtgttattctcaaggctttaaaagaaccagctgggctccatgaggtacaagatttcttagggcgaatccaattccatcaatacctggggaaacacaaaaacctggtgcagctggaaggctgctgcactgaaaagctgccactctatatggtgttggaggatgtggcccagggggacctgctcggctttctctggacctgtcggcgggatgtgatgactatggatggtcttctctatgatctcacagaaaaacaagtatatcacatcggaaagcaggtccttttggcgctggaattcctgcaggagaagcatttgttccatggggatgtggcagccaggaatattctgatgcaaagtgatctcactgctaagctctgtggattaggcctggcttatgaagtttacacccgaggggccatctcctctactcaaaccatacctctcaagtggcttgccccagaacggcttctcctgagacctgctagcatcagagcagatgtctggtcttttgggatcctgctctatgagatggtgactctaggagcaccaccgtatcctgaagtccctcctaccagcatcctagagcatctccaaagaaggaaaatcatgaagagacccagtagctgcacacataccatgtacagtatcatgaagtcctgctggcgctggcgtgaggctgaccgcccctcacctagagagctgcgcttgcgcctagaagctgccattaaaactgcagatgacgaggctgtgttacaagtaccagagttggtggtacctgaactgtatgcagctgtggccggcatcagagtggagagcctcttctacaactatagcatgctttgaagagtctcgggcaagaaacattcatgcatgagtatatgttcttggaatcaattcctctaagaacagagaatggtctttcccagggacacaaagggagaaatgggacatggattcttgatcttcctttacacatttctcgggaaatctgaaatgatgctggatgggactctacacatcctgagctaagacatactgtcagtctcacttctgctgtcccagtcctagaaatcctgggtagaagtggtggacctgtgcaaaggaggttttagaactctgcagtatttgttggggcatggcacaaataagctcatccctcccgtccgaggctagtttcctctggaaccacatttttatctagatgaaaatttggaatgaaatgaaggaatagaaatccaataaaagagttgaagggaaagaaaatttaaggttcttcttgctcaggattacagatatggaccaacacctccttcaagaaaaggtggtaggacacaaagttcttcagtcctgagccctacatgtggggttggaggagaactataacggaaaaacctctgagtttcaccttaggtatagataaaagaaagatggtccccttttatctgattctgagacaggtaaattctgtttgttactacgtttaattagaaggtggaggagtcatttcatgattaagaacattcaacatgtattgttcattaagctagcttcctagttccgattagactaaggagactaagcctagagagtcaatgttagaacagtgaaaagaattctgtgtgtgtgtgtgtgtgtgtgcacaataaataggaaatgtagaaaccaagcaagaaggcttagtagctcagtctttaacaagggctagaaaagaatgtaatctgatatggaaggatagcagcttctaattttcaatcatctgttgatatactgtgaaacttattttattaaattaatatttattaaatggaaatatgcttttctggtttataactactaaaaatatcatagggaggataaaagtaaataagtgaaagttaatgccaatagaaaaattcaagagataatgtacaatgtcagaaaagggattctttatgtgtaaatggggataatacctatttcacaaggttgttctgaggattgatacgttttgagtatgtatttgtacactatctggcacatatgcgctcaataaacgtgtttctccttttaaaaaaaaaaaaaaaaaaaaaaaaaaaaaaaaaaaaaaaaaaaaaaaaaaaaaaaaaaaaaaaaaaaaaaaaaaaaaaaaaaaaaaaaaaaaaaaaaaaaa

SEQ ID NO: 519 - DNA, 2288 bp, Homo sapiens
cggaagtcggcggcggtggcggaggcggtgagtgcgcggctccggggctggccgactccgctagtggcccggccggcctgggctcgggggctccgggctctgggctctgggtgcgcggaccgggccaggctgcttgaagacctcgcgacctgtgtcagcagagccgccctgcaccaccatgtgcatcatcttctttaagtttgatcctcgccctgtttccaaaaacgcgtacaggctcatcttggcagccaacagggatgaattctacagccgaccctccaagttagctgacttctgggggaacaacaacgagatcctcagtgggctggacatggaggaaggcaaggaaggaggcacatggctgggcatcagcacacgtggcaagctggcagcactcaccaactacctgcagccgcagctggactggcaggcccgagggcgaggtgaacttgtcacccactttctgaccactgacgtggacagcttgtcctacctgaagaaggtctctatggagggccatctgtacaatggcttcaacctcatagcagccaacctgagcacagcaaagggagacgtcatttgctactatgggaaccgaggggagcctgatcctatcgttttgacgccaggcacctacgggctgagcaacgcgctgctggagactccctggaggaagctgtgctttgggaagcagctcttcctggaggctgtggaacggagccaggcgctgcccaaggatgtgctcatcgccagcctcctggatgtgctcaacaataaagaggcgcagctgccagacccggccatcgaggaccagggtggggagtacgtgcagcccatgctgagcaagtacgcggctgtgtgcgtgcgctgccctggctacggcaccagaaccaacactatcatcctggtagatgcggacggccacgtgaccttcactgagcgtagcatgatggacaaggacctctcccactgggagaccagaacctatgagttcacactgcagagctaaccccacctctgggcctggccagtgggctcctggggggccctgccttgaggggcactgtggacaggaaaccttcctttgccatactgcattgcactgcccgtggcttggccagcatcccccggatcagggccctgtggtttgcgtgttacccatctgtgtccccatgcccagttcagggtctgcctttatgccagtgaggagcagcagagtctgatactaggtctaggaccggccgaggtataccatgaacatgtggatacacctgagcccactcttgcacatgtacacaggcactcacatggcacacacatacactcctgcgtgtgcacaagcacacacatgcaagccatatacatggacaccgacacaggcacatgtacgtgcacaggtgtgctacacatgtgcacacatgcacagttgcacagacacacacacacaggtgcacacacacgatgccgaacaaggcagaagggcgactctcacctctcatgtgcttctggccagtaggtctttgttctggtccaacgacaggagtaggcttgtatttaaaagcggcccctcctctcctgtggccacagaacacaggcgtgcttggactcttgacaagcagacctgctcctgcagaggagacagccacatttggaattgggcaccgagaagacctgagaaaaacccactctctctttttttttttttttgagacggagtcttgctctgtcacccaggctggagtgcagtggcacgatctcggctcactgcaacctccgcctcccaagttcaagcaattctcctgccccagcctcctgattagctgggattacaggcgtgtgccaccatgcccagctaatttttgtgtttttagtagagacggggtttcaccatgttggtcaggctggtcttgaactcctgacgtggtgatccacctgcctcggcctcccaaagtgctgggattacaggcgtgagccaccacgcctggccgaaaaacccactctcataacagaagtgcagactcattgctagattcagtgcccttgagtgtgccagaggtcctctgtgtttgagacaatcctgtgtgtgccaggaggctccgtgtgcaccaggggctctcagaatcccgcttacccagctggagaccatgcctctggcagccccatctcagccagccctgctctctccctcttccctccaggtgaggcaaacttcataggaatctgtacctgaatgtgagctccggataataaaactctgaggctttggtgagcgtaaaaaaaaaaaaaaa

SEQ ID NO: 520 - DNA, 3243 bp, Homo sapiens
cggcgcctatctggagcgccacggtccgcccgaggcttcggagctgccggagccgggcggggccttggcgggcggccccgggagtggcggcggcggcgtggtggtcggcgtggctgaggtgagaaactggcgctgctgctgcctcggcagcacctgttggtgccggagcctcgtgctggtctgcgtgttggccgccctgtgcttcgcttccctggccctggtccgccgctaccttcaccacctcctgctgtgggtggagagccttgactcgctgctgggggtcctgctcttcgtcgtgggcttcatcgtggtctctttcccctgcggctggggctacatcgtgctcaacgtggccgctggctacctgtacggcttcgtgctgggcatgggtctgatgatggtgggcgtcctcatcggcaccttcatcgcccatgtggtctgcaagcggctcctcaccgcctgggtggccgccaggatccagagcagcgagaagctgagcgcggttattcgcgtagtggagggaggaagcggcctgaaagtggtggcgctggccagactgacacccataccttttgggcttcagaatgcagtgttttcgattactgatctctcattacccaactatctgatggcatcttcggttggactgcttcctacccagcttctgaattcttacttgggtaccaccctgcggacaatggaagatgtcattgcagaacagagtgttagtggatattttgttttttgtttacagattattataagtataggcctcatgttttatgtagttcatcgagctcaagtggaattgaatgcagctattgtagcttgtgaaatggaactgaaatcttctctggttaaaggcaatcaaccaaataccagtggctcttcattctacaacaagaggaccctaacattttctggaggtggaatcaatgttgtatgattctaatgagatacgtgattgtcaagagcctagtgtgctatctaaggtctagcagtcacttcactagtgggcagagacaagttctaattgtattacagcacaaacaaaactgactagtttttaaattgcacaattttttttttttaaagcaagaatcattttctgggtatgtaagtgtaaatgtagatgcaaatttggctgcacctctttatcatgcctgtattggcctataggtctgcactttagtgttttttaattgttttatttctgtgtatttacgaacagagaaataacccaaatattatttctgcttagtgtctttatttataaagcccatgagtagtttgtatgcatctttcctacttgtaaagatgagtaaaagtatgcagttttaaatttataatattattggatgttctttgctttggtagtctttccagaaaggataaacagtggtttttgttttgttttgttttattgtttaagtgggaccacttagcttcccgtttccttactagttaaagaacagacattaattttcagttgaatgtatttttgcaggcatcatattgttacagggccatttacacctattcacaaagcttaaatcctaccttgtgggactgaagtgctcttaatataactgtttattttcactgtgtaatatgcaaagcaaaagggaaattatttggtggatggtagctcaaaattggaactcttgttctaattcagttacattggctttaccctccttagatttttcatcaaagggctgtcccattgcaatcttactaaaacattttgttaaaataaactcttttcctttttatattaataattaggcttttaaataaagatgttattcctttaaaatggtgggcttaccatcattgaagatgtcactcaggtggccttgtttgatcaaaacgccttttttaaaaaccaagctttaaaaacatgtttataatttcatgaagtacatatatattgttcccatagtcttcagctttaaaactataaatatgcccaaattttgttatttgccctactttaagtaggtttattgtgtttgttttttcagtacttgtttttctctgataagactcaggaattctgaaatgtgaaattgtctcaattctttctcttgtagcatgaatcaaatgtatttattaatagcacttatgactatagaatataatttggcatatgattcatattacatatgtattcgttttatttttaaaatagtttataaacttaatgatttttttttacaaatgaggttatagatattaatgcaaattttctggtaggtatctctttttttgctatgatgattccaacttatcagagacctcccatttgccttttcattacggtgaaagctttgccctcatctactaaagtacaaaggaattctttggaagcagattattctagtcttatgctagagatgaatttgatcattttaatgtgtgatctttttgctctatcaggtataattgttttcctttcctttataatgggtaagttttctcacctttgagtaacagtaaagttcatttatatgtccatacctagaagaccagtgcaaatactttgagagcacctgggtctacaggacataattggcatctaaatcctcatttcttgctattagtaggaaaacagatatagtattgtaatacccttattctttttgaatcctaattactcatttcggttttttttctctcttttgaatctagttgctggttttcgtttaatgattttagtttaacaatcccaaccaacaatacatttgatttatttttttctgtctaacctgacaacctttttcttgtgcttcttgtttgttggttagtttttgtgaaaggaatcattgtttaagatcactgttttcatacttgttttacacttcacgtattttgaagtacatttatttactaagcatttgtgacttgaataatttcaccaaatgaatacattttggtagtttgtaatgagttcttctaattgttacactttgcttggtacttaacaataaatatgtaaaggtaaaagaaataattttctgtattctgccaatcttaattttatataataaatcatccatttttttcttaaaatagtatggattgactgtttctaaaataccaatctgtggctgtggtttttcttttcttcagcatttccagcatccaagtaaacaatagtcccttatagtcctgctacttgatgggtaaatttggttgctgggtttttaagttgcactcacaataaatcgtgcaaagcat

SEQ ID NO: 521 - DNA, 2252 bp, Homo sapiens
gcttcgcgactgcggaaggttgcccgggctggcgccgctgggcagagccggtgcgacgtttccctttccagctttgttcttccggccctgctgtctgcctccccggctgattggattcgttactgctttgcaacgcgcacctaactccagacggggtctcactctgtcgcccaggctggagtgcagtggcacaatctcagcttgctgtgacctcagctctctgcgacctctgcttgctggactcaagcgatcctcccaccacctcagcctcctgagtagctggaaccatcatatgcaccagcacgcctggctaagctggaatgcaatagcgtggtcttggctcactgcaacctccgcctcccgggttcaagcaattctcctgcctcagcctcctaagtagctgggactacaggggccctcctgctgctccctccatgaggctggtcctgaaggaataggcctgtggctcgtccctcctccccatctcggccctgaggcaaacataccttccacagctctgggagcaccgcctccacccaggtctcacaggatgggacacaaggataggcattaagcaggacttccagggcccgagggaagttggcgcagtgtttcagcatctaggggtcaaaagagggtcttgggcacatgcctcccccacccgagggcagacccaagtcttgcctcacccacatggccaatcctagcctaatctggggggctaaggtctgagtctctcttcccttttttgtgcctctgtctaccccaccctcaagtatgctccaaccttttggccccagttttcctctggggctcttccctcccttggactctctctcccagaatcctctctccccctcccaagctggggacagccccctggccactgagggcaggctttcagtctcttggaccctctgtcttccccagaagcggagcagttccagccgcgggctcccccacacaggagcctcctatgtcagggcctcccagcgcacctcagggcgcactggctgcgccccgtagtccagcagtgcggcgaaaaggacttcaggctcccagttgggggagtcctggacggcctgcagcgcacagtccatgggcgtgtggcccgccccattggggacctcagcgcgggccccgtaacgcagcagcagctcggccaggcccccgcagccgttggcacaagcgttgtgcagcggcgtgtggcgcttgcgcccggccgcccgggcatcagctccagcctccaggagccggcgcgccgcagcctggtgtcgcctgcagctacctgggccctcggccccagcgcacgccgtgttcagcgcagtctcgccctggctggtgcgcaggcccacgtcggcgccatgctccaggtacagagccacatgttgctccaggccgcgcgccgccgccacgtgcaggggcgtctcctggctctcgcctgctgccaggttcaccgtcgctcctgcttccagcagcaacttggcgcacctggggacaagagagcaaggtcctgaggaaaatcctgaaggcttgggaccccttcagcttgctgtgacactcccttgcctttccacccctctcagcttgaggtcctacctggtgtcctccatgagaatcatacaagccccgctacagacaacagaattggaaggtcctgagagctaccagaagcatcttcagttttcatatgaaaaacttaagcccaggagtgatttgtgcagccaaggacacacagcaagttagtggctgcaccagaaatagtactcactgcctcagacagtccctcccacagtctactctgtctccaccccaaggtctggttctgaatcattcagttgtcagttgtctccttttttttttttttttttggagacagggtctctctctgtggcccaggctgaagtgcagtggtgtgattacagctcatgtagcctggacctcccaagctcaagcaatcctcctgcctctgcctcccaagtagctgggaccacaggtgggcagcaccacacctggctaattttttaaatttttttttatagagacagggtcttaccatttgccccagctggtctcaaacccctgggctcaagcaagcctcctgccttggcctcccaaagtgctgggattacaggtgtgagccaccacacccggccttatctcctaacattttgatagcacaaaattttgaaaacccacttctgtgtacgttatgaagcatagaaaattaaacagtatgcaccaaaaaaaaa

SEQ ID NO: 522 - DNA, 3065 bp, Homo sapiens
ctatttgagtttgtggcgcgcgaggccctgcagtccgggttggcgcttgggtactggctgggtccgatgctgggtacgctgcgcgccatggagggcgaggacgtggaagacgaccagctgctgcagaagctcagggccagtcgccgccgcttccagaggcgcatgcagcggctgatagagaagtacaaccagcccttcgaggacaccccggtggtgcaaatggccacgctgacctacgagacgccacagggattgagaatttggggtggaagactaataaaggaaagaaacgaaggagagatccaggactcctccatgaagcccgcggacaggacagatggctccgtgcaagctgcagcctggggtcctgagcttccctcgcaccgcacagtcctgggagccgattcaaaaagcggtgaggtcgatgccacgtcagaccaggaagagtcagttgcttgggccttagcacctgcagtgcctcaaagccctttgaaaaatgaattaagaaggaaatacttgacccaagtggatatactgctacaaggtgcagagtattttgagtgtgcaggtaacagagctggaagggatgtacgtgtgactccgctgccttcactggcctcacctgccgtgcctgcccccggatactgcagtcgtatctccagaaagagtcctggtgacccagcgaaaccagcttcatctcccagagaatgggatcctttgcatccttcctccacagacatggccttagtacctagaaatgacagcctctccctacaagagaccagtagcagcagcttcttaagcagccagccctttgaagatgatgacatttgcaatgtgaccatcagtgacctgtacgcagggatgctgcactccatgagccggctgttgagcacaaagccatcaagcatcatctccaccaaaacgttcatcatgcaaaactggaactccaggaggaggcacagatataagagcaggatgaacaaaacatattgcaaaggagccagacgttctcagaggagctccaaggagaacttcataccctgctctgagcctgtgaaagggacaggggcattaagagattgcaagaacgtattagatgtttcttgccgtaagacaggtttaaaattggaaaaagcttttcttgaagtcaacagaccccaaatccataagttagatccaagttggaaggagcgcaaagtgacaccctcgaagtattcttccttgatttacttcgactccagtgcaacatataatcttgatgaggaaaatagatttaggacattaaaatggttaatttctcctgtaaaaatagtttccagaccaacaatacgacagggccatggagagaaccgtcagagggagattgaaatccgatttgatcagcttcatcgggaatattgcctgagtcccaggaaccagcctcgccggatgtgcctcccggactcctgggccatgaacatgtacagagggggtcctgcgagtcctggtggccttcagggcttagaaacccgcaggctgagtttaccttccagcaaagcaaaagcaaaaagtttaagtgaggcttttgaaaacctaggcaaaagatctctggaagcaggtaggtgcctgcccaagagcgattcatcttcatcacttccaaagaccaaccccacacacagcgcaactcgcccgcagcagacatctgaccttcacgttcagggaaatagttctggaatatttagaaagtcagtgtcacccagcaaaactctttcagtcccagataaagaagtgccaggccacggaaggaatcgttacgatgaaattaaagaagaatttgacaagcttcatcaaaagtattgcctcaaatctcctgggcagatgacagtgcctttatgtattggagtgtctacagataaagcaagtatggaagttcgatatcaaacagaaggcttcttaggaaaattaaatccagaccctcacttccagggtttccagaagttgccatcatcacccctggggtgcagaaaaagtctactgggctcaactgcaattgaggctccttcatctacatgtgttgctcgtgccatcacgagggatggcacgagggaccatcagttccctgcaaaaagacccaggctatcagaaccccagggctccggacgccagggcaattccctgggtgcctcagatggggtggacaacaccgtcagaccgggagaccagggcagctcttcacagcccaactcagaagagagaggagagaacacgtcttacaggatggaagagaaaagtgatttcatgctagaaaaattggaaactaaaagtgtgtagctaggttatttcggagtgttatttatcttcccacttgctctctgtttgtatttttgttttgtttttgattcttgagactgtgaggacttggttgacttctctgcccttaaagtaaatattagtgaaattggttccatcagagataacctcgagttcttggtgtagaaattatgtgaataaagttgctcaattagaatttttagggttctctttgataggcctgtttttctgatgtgtgtgttttttttgggggggggttatttgtttgtttgtttgtttgtttgtttgtttttgagacagtctctctctatcgcccaggctggagtgcggtggcacaatcttggctcactgcaacttccgcctcccgggttcaagcgattcttctgcctcagcctcccgagtagctgggattacaggcgcgcgccaccacgcctggctaatttttgtagttttagtagagacggggtttcaccatattgaccaggctggtctcgagctcctggcctcgtgatccatctgcctcggcctcccaaagtgctgggattataggcgtgagccactgctcccagccgtgtgttcttttttaaatttagatatgtccagagaatcctctctcctgtttcccatttcattcgagaatattgtttgcttgtgagacgtaagttcgagccctgcatgcaatgacccttgaaggaaaataaacagtcctggtggtcccagacgctcctgcagccacaaaaaaaaaaaaaaaa

SEQ ID NO: 523 - DNA, 4828 bp, Homo sapiens
cactgttcctacagcaatcggtcagttgtgggagtgcttgtccactaccagaaaagacacccagaaataaaggttactgccaaatatatcagacaggctcctcccacagctgcaatgatgagaggggtcgaagggccccaaggctccccccggccacccgcccccatacaacagctgaaccgaagcagctctgagagagatggccctcctgtggagaatgagatgttcttttgccagcactgtgattatgggaaccggacggtcaaaggggtactcattcattatcagaagaagcaccgagacttcaaggccaatgcagatgtgatccggcagcatacggccaccattcgaagcctctgcgaccgaaatcggaagaagcctgccagctgcgtgcttatctccccctctaatctggagcgggacaaaacgaaactccgagcactcaaatgtaggcagtgctcatatacctccccctacttctatgcactgaggaagcatatcaagaaagaccaccccgccctgaaagccacagtcacgtccatcatgcgatgggcatttctagatggcttgatagaagctggctaccactgcgagtggtgcatctactcccatacggagcccaacggtttgctcctgcattaccgacggaggcatccagaacactatgttgattacacctacatggctactaaactgtgggctgggccagacccatcccctccctctctcacaatgccagccgaagccaaaacctacagatgcagggactgtgttttcgaagctgtttccatctgggacatcactaatcactaccaagcattccacccctgggccatgaatggtgatgagtcagtgctactggacatcatcaaggagaaagatgctgtggagaagcccattctttcatccgaagagttgacaggccctgtgaattgtgcaaacagtatacccacccctttcccggagcaggaagctgaatgtccagaggatgcaagactgtcccctgagaaaagcctgcagctagcttcagccaaccccgccatatcctccaccccataccagtgcacggtatgccaatctgagtataacaacttgcacggccttctcactcattatgggaagaagcaccctggcatgaaagtgaaggctgctgactttgcccaggacattgacatcaacccaggtgccgtctacaaatgcaggcattgcccatacatcaacacccgcatccacggcgtactgacccactaccagaagcgacacccgtccatcaaggtgaccgctgaggactttgtgcacgacgtagagcagtctgctgacatatcccagaatgacgtggaggagacgagcaggatcttcaagcaagggtatggcgcctaccggtgcaaactgtgtccgtacacacacggcactttggagaaactaaaaatccactacgagaagtatcacaatcagcctgaatttgatgtcttttcccagtcgcccccgaagctgccagtccccctcgagcccgagatgaccactgaagtgagcccttcccaagtctccatcactgaggaggaggtgggagaggagcccgtgtccacttctcacttctctacctcccacctggtctcccacactgtgttccggtgccagctctgcaagtacttctgctccacgaggaaggggatcgccaggcactaccgcatcaagcacaataatgtccgagcccagccagaaggcaagaacaacctcttcaagtgtgccctgtgtgcctacaccaaccccatccgcaaaggtctggcagcccactaccagaagcgccacgacattgatgcgtattacactcactgcttggcagcctccaggaccatcagcgacaagcccaacaaagtgatcatcccatccccgcccaaggacgactcccctcagctgagcgaggaactccggcgggcagtggagaagaaaaagtgctccttgtgctctttccagtcgttcagcaagaagggcatcgtgtcccattacatgaaacgccacccaggggtgttcccaaagaagcagcacgccagcaagttggggggctacttcacggccgtctatgcagatgagcatgagaagcccacactgatggaagaagaggagagaggcaactttgagaaagccgaggtggagggtgaagctcaggaaatcgagtggctcccattccgctgcatcaaatgcttcaagctgtcctttagcactgcagagctgctgtgcatgcattacactgaccaccacagtcgggacctaaagagggacttcatcatactgggcaacggcccccgcttgcagaactccacctaccagtgtaagcactgtgatagcaaactgcaaagcacagccgagctgacctcacacttgaacattcacaatgaggaattccagaagcgtgccaaacgtcaggagaggaggaaacagcttttgagcaagcaggaatatgcagatggtgcttttgcagatttcaaacaagagaggccttttggtcacttagaagaggtgccaaagatcaaggagaggaaagtggtgggctacaaatgtaaattctgtgtggaagtgcacccaacgctccgagccatctgcaatcacctccgaaagcacgtccagtatggcaatgtcccagctgtgtcagctgctgtgaaggaggcggatgaccctgcccacttattcctggatggattggaagcagccaaagacgcaagtggcgccctggtgggccgggtggatggtgaacactgcttgcttgatggaatgttggaggatgaaacccggccggggggataccattgcagtcaatgtgacagagtcctgatgtccatgcaggggctgcgttctcatgagaggagccacctggccctggccatgtttacccgcgaggacaagtacagctgccagtatagctcgtttgtttctgctttcaggcacaatttggatcgccatatgcaaacccaccacggacaccataaaccattccgatgcaaactctgctccttcaagtcctcctataacagccggctgaaaacacatatactcaaagctcatgctggtgagcatgcctacaagtgttcttggtgctcattctccaccatgacaatcagccagctgaaggaacactccctcaaggtccacggaaaagccctgaccctccccaggccacggatcgtcagtctcctctcctcacactcccaccactcctcccaaaaagctaccccggctgaagaagtggaagactccaatgactcatcatattcagagcccccagatgttcagcagcagttgaaccactatcagtcagctgccctggcaaggaacaacagccgtgttagccctgtgcctctttctggggctgctgctggcactgagcagaaaactgaagccgtgcttcactgcgaattctgtgaattctcctccggctacatccagagcatcaggcgtcattaccgggacaagcatggtgggaagaagcttttcaagtgcaaagactgctccttttacacaggctttaaatctgcttttactatgcacgtggaagctgggcactcagcagttcccgaggagggccccaaagatcttcgctgtcctctctgcctctatcacaccaaatacaagcgcaacatgattgaccacatcgtgctgcactgagaagagcgtgttgtccccattgaagtttgccggtccaaactgtccaaatacttgcagggagtagttttccgctgtgataagtgtaccttcacctgctccagtgatgagagcctccagcaacatatagaaaagcacaatgaactgaaaccttacaaatgccagctctgctactatgagaccaagcacacggaggaactggacagccaccttcgggatgagcataaggtaagccgtaactttgagctggttggacgggttaacttggatcagctggaacagatgaaggagaaaatggagagctccagcagcgatgatgaggacaaggaagaagaaatgaacagcaaggctgaagacagagagctgatgagattttctgaccacggggctgctcttaacactgagaagcgttttccatgtgaattttgtggacgggcgttttcacagggctctgagtgggaaagacatgtgctgagacacggcatggcattgaatgacaccaagcaggtgagcagagaagaaatccacccaaaagagatcatggagaacagtgttaaaatgccctccatagaggaaaaggaagatgacgaggccattgggatagacttttccctaaagaatgaaacagtagccatctgtgtagtaactgccgacaaatctctcctggagaatgcagaggccaaaaaagaatgagcgtttggtgaaattcttaatcaaaccttacttgaacagtgatgaaaaagtgggagggctggctttggctgagaagggagggacagaaaagagaagacagaacaaagctgctttttaggactgaacaatctattttcaaagcactggtacctgtgtgagtgagtatgtaaattaaagttatttaaatggttggaatatgtggctccttttccatcactacatcttttcttccggatcttcatcatggaagtttcatttgttgcggaatatggaagcacctcccaatggtacggtgcaccctgtggtggtcttggacagtatgtggaaacagaagctccatgacggtagaagacttctcattggggagcaacttttttacgcacaacttttggtgcgtttttctagttttaataccttaagctttttcaagacctaactgcagccgctttgggaaaaaaaaacaaaaaacaaaaaacag

SEQ ID NO: 524 - DNA, 1815 bp, Homo sapiens
gcagagctctgtgctccctgcagtcaggactctgggaccgcagggggctcccggaccctgactctgcagccgaaccggcacggtttcgtggggacccaggcttgcaaagtgacggtcattttctctttctttctccctcttgagtccttctgagatgatggctctgggcgcagcgggagctacccgggtctttgtcgcgatggtagcggcggctctcggcggccaccctctgctgggagtgagcgccaccttgaactcggttctcaattccaacgctatcaagaacctgcccccaccgctgggcggcgctgcggggcacccaggctctgcagtcagcgccgcgccgggaatcctgtacccgggcgggaataagtaccagaccattgacaactaccagccgtacccgtgcgcagaggacgaggagtgcggcactgatgagtactgcgctagtcccacccgcggaggggacgcaggcgtgcaaatctgtctcgcctgcaggaagcgccgaaaacgctgcatgcgtcacgctatgtgctgccccgggaattactgcaaaaatggaatatgtgtgtcttctgatcaaaatcatttccgaggagaaattgaggaaaccatcactgaaagctttggtaatgatcatagcaccttggatgggtattccagaagaaccaccttgtcttcaaaaatgtatcacaccaaaggacaagaaggttctgtttgtctccggtcatcagactgtgcctcaggattgtgttgtgctagacacttctggtccaagatctgtaaacctgtcctgaaagaaggtcaagtgtgtaccaagcataggagaaaaggctctcatggactagaaatattccagcgttgttactgtggagaaggtctgtcttgccggatacagaaagatcaccatcaagccagtaattcttctaggcttcacacttgtcagagacactaaaccagctatccaaatgcagtgaactccttttatataatagatgctatgaaaaccttttatgaccttcatcaactcaatcctaaggatatacaagttctgtggtttcagttaagcattccaataacaccttccaaaaacctggagtgtaagagctttgtttctttatggaactcccctgtgattgcagtaaattactgtattgtaaattctcagtgtggcacttacctgtaaatgcaatgaaacttttaattatttttctaaaggtgctgcactgcctatttttcctcttgttatgtaaatttttgtacacattgattgttatcttgactgacaaatattctatattgaactgaagtaaatcatttcagcttatagttcttaaaagcataaccctttaccccatttaattctagagtctagaacgcaaggatctcttggaatgacaaatgataggtacctaaaatgtaacatgaaaatactagcttattttctgaaatgtactatcttaatgcttaaattatatttccctttaggctgtgatagtttttgaaataaaatttaacatttaatatcatgaaatgttataagtagacatacattttgggattgtgatcttagaggtttgtgtgtgtgtacgtatgtgtgtgttctacaagaacggaagtgtgatatgtttaaagatgatcagagaaaagacagtgtctaaatataagacaatattgatcagctctagaataactttaaagaaagacgtgttctgcattgataaactcaaatgatcatggcagaatgagagtgaatcttacattactactttcaaaaatagtttccaataaattaataatacctaaaaaaaaaaa

SEQ ID NO: 525 - DNA, 7445 bp, Homo sapiens
gggcctggttgtggaggccccttttgcaaaacctcagtctgaatttagtagacagaagtcactaggaatgccttgacaggatcctgccttagctaaggctccctccagctgcagagggtgtttttgttagactcacacactgcgtgaaactgctcagaatagagccatgatctcaaccacgaaatgggaacttagattttggagaaactaacggggacggacttctttcctagcctgagtgttgagcagtgtcatgccttggcgtttcagctcctcgttgtctaggtggtgaaatgacagaactcattcgcttctttgattggtgattttgaaataatctttcatcaagttccatctcctttaccctcatatggaatatatctctctgtctgttgttaaactacgatgacatgtctgtagctatcagaaagagaagctgggaagaacatgtgacccactggatgggacagccttttaattctgatgatcgtaacacagcatgtcatcatggactagtagctgacagcttgcaggcaagtatggaaaaagatgcaactctaaatgtggaccgcaaagagaagtgtgtttcactacctgactgctgtcatggatcagagctgagagattttcctgggaggccaatgggtcatctttcaaaggatgtggacgaaaatgacagccatgaaggtgaagatcagtttctttctctggaagccagcacagaaacactagtgcatgtttctgatgaggataacaatgctgatttatgccttacagatgataaacaggttttaaatacccaagggcagaaaacatcaggccaacatatgatccaaggagcaggctccttagaaaaggcactgcccatcatacaaagtaaccaagtttcttctaactcctggggaatagctggtgaaactgaattagcactggtaaaagaaagtggggagagaaaagttactgactctataagtaaaagcctggagctttgcaatgaaataagcttaagtgaaataaaagatgcacccaaagtaaatgcagtggatactttgaacgtgaaagatattgcacctgagaaacaattgcttaactctgctgtaattgctcagcaacgaaggaaacctgacccccctaaagatgaaaatgaaagaagcacctgcaatgtagtacaagatgagttcttggatactccttgcacaaacagaggactgccattattaaaaacagattttggaagctgccttctgcagcctccttcctgccccaatggaatgtcagctgaaaatggcctggagaagagtggtttttcacaacatcaaaacaaaagtccaccaaaggtcaaggcagaagatggcatgcagtgtttacaattaaaggagaccctggccacccaggaacccacagataaccaagtcagacttcgtaagagaaaggaaataagagaagatcgagatagggcgcggctggactccatggtgctgctgattatgaaactggaccagcttgatcaggacatagaaaatgccctcagcaccagctcctctccatcaggcacaccaacaaacctgcggcggcacgttcctgatctggaatcaggatctgaaagtggagcagataccatttcagtaaatcagacacgagtaaatttgtcttctgacactgagtccacggacctcccatcttccactccagtagccaattctggaaccaaacccaagactacggctattcaaggtatttcagagaaggaaaaggctgaaattgaagccaaggaagcttgtgattggctacgggcaactggtttcccccagtatgcacagctttatgaagatttcctgttccccatcgatatttccttggtcaagagagagcatgattttttggacagagatgccattgaggctctatgcaggcgtctaaatactttaaacaaatgtgcggtgatgaagctagaaattagtcctcatcggaaacgaagtgacgattcagacgaggatgagccttgtgccatcagtggcaaatggactttccaaagggacagcaagaggtggtcccggcttgaagagtttgatgtcttttctccaaaacaagacctggtccctgggtccccagacgactcccacccgaaggacggccccagccccggaggcacgctgatggacctcagcgagcgccaggaggtgtcttccgtccgcagcctcagcagcactggcagcctccccagccacgcgccccccagcgaggatgctgccaccccccggactaactccgtcatcagcgtttgctcctccagcaacttggcaggcaatgacgactctttcggcagcctgccctctcccaaggaactgtccagcttcagcttcagcatgaaaggccacgaaaaaactgccaagtccaagacgcgcagtctgctgaaacggatggagagcctgaagctcaagagctcccatcacagcaagcacaaagcgccctcaaagctggggttgatcatcagcgggcccatcttgcaagaggggatggatgaggagaagctgaagcagctcaactgcgtggagatctccgccctcaatggcaaccgcatcaacgtccccatggtacgaaagaggagcgtttccaactccacgcagaccagcagcagcagcagccagtcggagaccagcagcgcggtcagcacgcccagccctgttacgaggacccggagcctcagtgcgtgcaacaagcgggtgggcatgtacttagagggcttcgatcctttcaatcagtcaacatttaacaacgtggtggagcagaactttaagaaccgcgagagctacccagaggacacggtgttctacatccctgaagatcacaagcctggcactttccccaaagctctcaccaatggcagtttctccccctcggggaataacggctctgtgaactggaggacgggaagcttccacggccctggccacatcagcctcaggagggaaaacagtagcgacagccccaaggaactgaagagacgcaattcttccagctccatgagcagccgcctgagcatctacgacaacgtgccgggctccatcctctactccagttcaggggacctggcggatctggagaacgaggacatcttccccgagctggacgacatcctctaccacgtgaaggggatgcagcggatagtcaatcagtggtcggagaagttttctgatgagggagattcggactcagccctggactcggtctctccctgcccgtcctctccaaaacagatacacctggatgtggacaacgaccgaaccacacccagcgacctggacagcacaggcaactccctgaatgaaccggaagagccctccgagatcccggaaagaagggattctggggttggggcttccctaaccaggtccaacaggcaccgactgagatggcacagtttccagagctcacatcggccaagcctcaactctgtatcactacagattaactgccagtctgtggcccagatgaacctgctgcagaaatactcactcctaaagctaacggccctgctggagaaatacacaccttctaacaagcatggttttagctgggccgtgcccaagttcatgaagaggatcaaggttccagactacaaggaccggagtgtgtttggggtcccactgacggtcaacgtgcagcgcacaggacaaccgttgcctcagagcatccagcaggccatgcgatacctccggaaccattgtttggatcaggttgggctcttcagaaaatcgggggtcaagtcccggattcaggctctgcgccagatgaatgaaggtgccatagactgtgtcaactacgaaggacagtctgcttatgacgtggcagacatgctgaagcagtattttcgagatcttcctgagccactaatgacgaacaaactctcggaaacctttctacagatctaccaatatgtgcccaaggaccagcgcctgcaggccatcaaggctgccatcatgctgctgcctgacgagaaccgggaggttctgcagaccctgctttatttcctgagcgatgtcacagcagccgtaaaagaaaaccagatgaccccaaccaacctggccgtgtgcttagcgccttccctcttccatctcaacaccctgaagagagagaattcctctcccagggtaatgcaaagaaaacaaagtttgggcaaaccagatcagaaagatttgaatgaaaacctagctgccactcaagggctggcccatatgatcgccgagtgcaagaagcttttccaggttcccgaggaaatgagccgatgtcgtaattcctataccgaacaagagctgaagcccctcactctggaagcactcgggcacctgggtaatgatgactcagctgactaccaacacttcctccaggactgtgtggatggcctgtttaaagaagtcaaagagaagtttaaaggctgggtcagctactccacttcggagcaggctgagctgtcctataagaaggtgagcgaaggaccccctctgaggctttggaggtcagtcattgaagtccctgctgtgccagaggaaatcttaaagcgcctacttaaagaacagcacctctgggatgtagacctgttggattcaaaagtgatcgaaattctggacagccaaactgaaatttaccagtatgtccaaaacagtatggcacctcatcctgctcgagactacgttgttttaagaacctggaggactaatttacccaaaggagcctgtgcccttttactaacctctgtggatcacgatcgcgcacctgtggtgggtgtgagggttaatgtgctcttgtccaggtatttgattgaaccctgtgggccaggaaaatccaaactcacctacatgtgcagagttgacttaaggggccacatgccagaatggtacacaaaatcttttggacatttgtgtgcagctgaagttgtaaagatccgggattccttcagtaaccagaacactgaaaccaaagacaccaaatctaggtgatcactgaagcaacgcaaccgcttccaccaccatggtgtttgtttctagaacttttgccagtccttgaagaatgggttctgtgtctaatcctgaaacaaagaaaactacaagctggagtgtaggaattgactatagcaatttgatacatttttaaagctgcttcctgtttgttgagggtctgtattcatagaccttgactggaatatgtaagactgtgcaaaaaaaaaaaaaaaatttatgtgtattcttattcagattgcttctgagaagcaaaactctttaaatacattatggaagataatgaagatacttcattctcttgtgatatcagtgtatgcgtacctgtgtcgctttatttgcagtgtgttgagggactggtgtatccactggaatagttggtactcttggatgtgttttctcaccaagatgagcaaagaaaggtttgcacagaggagtgtgaatgtgtgtttgttgctggctgaatggcaatagatgtctaaggtggattcagtgtctggcacactgagacacctccaagaaggagattgatgcatcaggttcagtttaacctggaatatctgactacccctgaatccacccagaaagggggcccaacacccttgtccatttatgggtattttttttcgaagttattaagcatattccttttccacgaacctcttctgtactttgattgtaataggttggctcttacacccattccaaatgcagtttatttttagacccgattgcaaatagtgatgtagttttaaccagtatggattagttcagggatgaactgctccctctagccttactggctctgatccacagggttttgttttgttttgttttgttttttgtttaagtcgagatataaaaactgaacacgataacacttactcttaaatcaagcatcaacactttttccctgttagaattctttgcatttttgtgtttgtaacagaaacgccttaagacactatgtttgggaatataggaaactatgtgtgtcccaaggaaatccctgtaaatttaactcacctacaaaaggctttttccccgcctttggttgttaacggcattcctgaaagccacatgtgtttattcattgggcttgttcttatcagcaaataggttttctggttttatgactttttgtcttattttatttttcctacatttctttttttttttttttcctttagaatgccctggaaatatatttaagtggtaatgaaaaatagtaatcatagtaaaacgcaacaagaagaaaaccaacccaaaccagtgaagttttttagaacctttagaagggtggtctttattcaggttttactgtaatggtaaggattgactcaagagacagtattagtaaatttattgtgtatggatcaaaagtgaataatgtatgaatgagagctgtaagaaggatttttattttgttataatttagttaccattttcagtgttatttcaaaggttctttgaagaattttggggcagggcatcagattagagttttaaaatttgagtattttggatatcagtgttcctcatgaagatatacatggatattcaattttgatggcttccagatttgtaagattgtatgttgtatataccattctattaagaaacatgtccactgtgctttcaaacatagataaagcatgataaagattattatttaagatatacttgtatttatacctcagatattcttttgggttttgtacctcaaggcttttttcttcttattgtaaatacactttacgtgaatacagtctaagtgaagaaaataaataaaaggaagaggtttataacttgctctatatctgtacagattataatcaataagtgcactattattaaatgtttaaagtaagggaaaagtctgggctgccttccttaatattgcatctcactcccacccttaaaaccacagattgcaaagcatagcattttagcatcaactacaatcaaaagagcgatttgctgaaggaaaaatcggactgcaaatcattccaaggccaaactgcaactgagccacccactcccaaacaggaaaccctggtgaaggttcaggaagcacggagattctctccaacaaaggtccagttaggaaacgacgctgagaggatgacgacaacgtgcaacagcagaaagatgcttgcaagcagagtcagggtcaccagtgaatgccacaaaagttctctttcccactgtttaatttgacaagagaagaatttgaaggatatgaacattttcaagaactctgctgaggtcacttagagcgccatcacaacttatttgtgtgactaattgcctagattgtaagctctttgagggcagggcttgtctcttacacatctttataatcccctgcagcggctttcagtattttgtacttgtaggcacctaataaatttattatttgctatactg

SEQ ID NO: 526 - DNA, 1975 bp, Homo sapiens
gggcctggttgtggaggccccttttgcaaaacctcagtctgaatttagtagacagaagtcactaggaatgccttgacaggatcctgccttagctaaggctccctccagctgcagagggtgtttttgttagactcacacactgcgtgaaactgctcagaatagagccatgatctcaaccacgaaatgggaacttagattttggagaaactaacggggacggacttctttcctagcctgagtgttgagcagtgtcatgccttggcgtttcagctcctcgttgtctaggtggtgaaatgacagaactcattcgcttctttgattggtgattttgaaataatctttcatcaagttccatctcctttaccctcatatggaatatatctctctgtctgttgttaaactacgatgacatgtctgtagctatcagaaagagaagctgggaagaacatgtgacccactggatgggacagccttttaattctgatgatcgtaacacagcatgtcatcatggactagtagctgacagcttgcaggcaagtatggaaaaagatgcaactctaaatgtggaccgcaaagagaagtgtgtttcactacctgactgctgtcatggatcagagctgagagattttcctgggaggccaatgggtcatctttcaaaggatgtggacgaaaatgacagccatgaaggtgaagatcagtttctttctctggaagccagcacagaaacactagtgcatgtttctgatgaggataacaatgctgatttatgccttacagatgataaacaggttttaaatacccaagggcagaaaacatcaggccaacatatgatccaaggagcaggctccttagaaaaggcactgcccatcatacaaagtaaccaagtttcttctaactcctggggaatagctggtgaaactgaattagcactggtaaaagaaagtggggagagaaaagttactgactctataagtaaaagcctggagctttgcaatgaaataagcttaagtgaaataaaagatgcacccaaagtaaatgcagtggatactttgaacgtgaaagatattgcacctgagaaacaattgcttaactctgctgtaattgctcagcaacgaaggaaacctgacccccctaaagatgaaaatgaaagaagcacctgcaatgtagtacaaaatgagttcttggatactccttgcacaaacagaggactgccattattaaaaacagattttggaagctgccttctgcagcctccttcctgccccaatggaatgtcagctgaaaatggcctggagaagagtggtttttcacaacatcaaaacaaaagtccaccaaaggtcaaggcagaagatggcatgcagtgtttacaattaaaggagaccctggccacccaggaacccacagataaccaagtcagacttcgtaagagaaaggaaataagagaagatcgagatagggcgcggctggactccatggtgctgctgattatgaaactggaccagcttgatcaggacatagaaaatgccctcagcaccagctcctctccatcaggcacaccaacaaacctgcggcggcacgttcctgatctggaatcaggatctgaaagtggagcagataccatttcagtaaatcagacacgagtaaatttgtcttctgacactgagtccacggacctcccatcttccactccagtagccaattctggaaccaaacccaagactacggctattcaaggtatttcagagaaggaaaaggctgcggtaaaatcagtaaagttggaagtggatgaagataagagcacaaagggatccaatttttccaactcggaagtggcaattggtttgtctccttacacctttccccagaagaggcttttccatgttgctggagaagaaaacatcacctaggccggtgtgtgcctggcagaacactgcactccaatttcctcgggcagccacaaaaaaaaaaaaaaaaa

SEQ ID NO: 527 - DNA, 1563 bp, Homo sapiens
gcaccgccggaagtttctgccgcggctttgcggggacgggggagtggtagtgggggctgcagctgccggacccaggcgcgatggctacgggcgcggatgtacgggacattctagaactcgggggtccagaaggggatgcagcctctgggaccatcagcaagaaggacattatcaacccggacaagaaaaaatccaagaagtcctctgagacactgactttcaagaggcccgagggcatgcaccgggaagtctatgccttgctctactctgacaagaaggatgcacccccactgctacccagtgacactggccagggataccgtacagtgaaggccaagttgggctccaagaaggtgcggccttggaagtggatgccattcaccaacccggcccgcaaggacggagcaatgttcttccactggcgacgtgcagcggaggagggcaaggactacccctttgccaggttcaataagactgtgcaggtgcctgtgtactcggagcaggagtaccagctttatctccacgatgatgcttggactaaggcagaaactgaccacctctttgacctcagccgccgctttgacctgcgttttgttgttatccatgaccggtatgaccaccagcagttcaagaagcgttctgtggaagacctgaaggagcggtactaccacatctgtgctaagcttgccaacgtgcgggctgtgccaggcacagaccttaagataccagtatttgatgctgggcacgaacgacggcggaaggaacagcttgagcgtctctacaaccggaccccagagcaggtggcagaggaggagtacctgctacaggagctgcgcaagattgaggcccggaagaaggagcgggagaaacgcagccaggacctgcagaagctgatcacagcggcagacaccactgcagagcagcggcgcacggaacgcaaggcccccaaaaagaagctaccccagaaaaaggaggctgagaagccggctgttcctgagactgcaggcatcaagtttccagacttcaagtctgcaggtgtcacgctgcggagccaacggatgaagctgccaagctctgtgggacagaagaagatcaaggccctggaacagatgctgctggagcttggtgtggagctgagcccgacacctacggaggagctggtgcacatgttcaatgagctgcgaagcgacctggtgctgctctacgagctcaagcaggcctgtgccaactgcgagtatgagctgcagatgctgcggcaccgtcatgaggcactggcccgggctggtgtgctagggggccctgccacaccagcatcaggcccaggcccggcctctgctgagccggcagtgactgaacccggacttggtcctgaccccaaggacaccatcattgatgtggtgggcgcacccctcacgcccaattcgagaaagcgacgggagtcggcctccagctcatcttccgtgaagaaagccaagaagccgtgagaggccccacggggtgtgggcgacgctgttatgtaaatagagctgctgagttggaccaggcaaaaaaaaaaaaaaaaaa

SEQ ID NO: 528 - DNA, 1603 bp, Homo sapiens
gcaccgccggaagtttctgccgcggctttgcggggacgggggagtggtagtgggggctgcagctgccggacccaggcactgacccttgacctccggtggctcccccatctctcaggcgcgatggctacgggcgcggatgtacgggacattctagaactcgggggtccagaaggggatgcagcctctgggaccatcagcaagaaggacattatcaacccggacaagaaaaaatccaagaagtcctctgagacactgactttcaagaggcccgagggcatgcaccgggaagtctatgccttgctctactctgacaagaaggatgcacccccactgctacccagtgacactggccagggataccgtacagtgaaggccaagttgggctccaagaaggtgcggccttggaagtggatgccattcaccaacccggcccgcaaggacggagcaatgttcttccactggcgacgtgcagcggaggagggcaaggactacccctttgccaggttcaataagactgtgcaggtgcctgtgtactcggagcaggagtaccagctttatctccacgatgatgcttggactaaggcagaaactgaccacctctttgacctcagccgccgctttgacctgcgttttgttgttatccatgaccggtatgaccaccagcagttcaagaagcgttctgtggaagacctgaaggagcggtactaccacatctgtgctaagcttgccaacgtgcgggctgtgccaggcacagaccttaagataccagtatttgatgctgggcacgaacgacggcggaaggaacagcttgagcgtctctacaaccggaccccagagcaggtggcagaggaggagtacctgctacaggagctgcgcaagattgaggcccggaagaaggagcgggagaaacgcagccaggacctgcagaagctgatcacagcggcagacaccactgcagagcagcggcgcacggaacgcaaggcccccaaaaagaagctaccccagaaaaaggaggctgagaagccggctgttcctgagactgcaggcatcaagtttccagacttcaagtctgcaggtgtcacgctgcggagccaacggatgaagctgccaagctctgtgggacagaagaagatcaaggccctggaacagatgctgctggagcttggtgtggagctgagcccgacacctacggaggagctggtgcacatgttcaatgagctgcgaagcgacctggtgctgctctacgagctcaagcaggcctgtgccaactgcgagtatgagctgcagatgctgcggcaccgtcatgaggcactggcccgggctggtgtgctagggggccctgccacaccagcatcaggcccaggcccggcctctgctgagccggcagtgactgaacccggacttggtcctgaccccaaggacaccatcattgatgtggtgggcgcacccctcacgcccaattcgagaaagcgacgggagtcggcctccagctcatcttccgtgaagaaagccaagaagccgtgagaggccccacggggtgtgggcgacgctgttatgtaaatagagctgctgagttggaccaggcaaaaaaaaaaaaaaaaaa

SEQ ID NO: 529 - DNA, 7048 bp, Homo sapiens
acactagcaatggcaaagctttgtgcggaggcattgctggctgctctgaactaaaagcatccgtggggaccgaaagaggtttttgcacaccttattaaggaactccaggatggcattgggcagcggcaaactgttgtcagaacattgaatgcaactggggaagaaataattcagcaatcctcaaaaacagatgccagtattctacaggaaaaattgggaagcctgaatctgcggtggcaggaggtctgcaaacagctgtcagacagaaaaaagaggctagaagaacaaaagaatatcttgtcagaatttcaaagagatttaaatgaatttgttttatggttggaggaagcagataacattgctagtatcccacttgaacctggaaaagagcagcaactaaaagaaaagcttgagcaagtcaagttactggtggaagagttgcccctgcgccagggaattctcaaacaattaaatgaaactggaggacccgtgcttgtaagtgctcccataagcccagaagagcaagataaacttgaaaataagctcaagcagacaaatctccagtggataaaggtttccagagctttacctgagaaacaaggagaaattgaagctcaaataaaagaccttgggcagcttgaaaaaaagcttgaagaccttgaagagcagttaaatcatctgctgctgtggttatctcctattaggaatcagttggaaatttataaccaaccaaaccaagaaggaccatttgacgttcaggaaactgaaatagcagttcaagctaaacaaccggatgtggaagagattttgtctaaagggcagcatttgtacaaggaaaaaccagccactcagccagtgaagaggaagttagaagatctgagctctgagtggaaggcggtaaaccgtttacttcaagagctgagggcaaagcagcctgacctagctcctggactgaccactattggagcctctcctactcagactgttactctggtgacacaacctgtggttactaaggaaactgccatctccaaactagaaatgccatcttccttgatgttggaggtacctgctctggcagatttcaaccgggcttggacagaacttaccgactggctttctctgcttgatcaagttataaaatcacagagggtgatggtgggtgaccttgaggatatcaacgagatgatcatcaagcagaaggcaacaatgcaggatttggaacagaggcgtccccagttggaagaactcattaccgctgcccaaaatttgaaaaacaagaccagcaatcaagaggctagaacaatcattacggatcgaattgaaagaattcagaatcagtgggatgaagtacaagaacaccttcagaaccggaggcaacagttgaatgaaatgttaaaggattcaacacaatggctggaagctaaggaagaagctgagcaggtcttaggacaggccagagccaagcttgagtcatggaaggagggtccctatacagtagatgcaatccaaaagaaaatcacagaaaccaagcagttggccaaagacctccgccagtggcagacaaatgtagatgtggcaaatgacttggccctgaaacttctccgggattattctgcagatgataccagaaaagtccacatgataacagagaatatcaatgcctcttggagaagcattcataaaagggtgagtgagcgagaggctgctttggaagaaactcatagattactgcaacagttccccctggacctggaaaagtttcttgcctggcttacagaagctgaaacaactgccaatgtcctacaggatgctacccgtaaggaaaggctcctagaagactccaagggagtaaaagagctgatgaaacaatggcaagacctccaaggtgaaattgaagctcacacagatgtttatcacaacctggatgaaaacagccaaaaaatcctgagatccctggaaggttccgatgatgcagtcctgttacaaagacgtttggataacatgaacttcaagtggagtgaacttcggaaaaagtctctcaacattaggtcccatttggaagccagttctgaccagtggaagcgtctgcacctttctctgcaggaacttctggtgtggctacagctgaaagatgatgaattaagccggcaggcacctattggaggcgactttccagcagttcagaagcagaacgatgtacatagggccttcaagagggaattgaaaactaaagaacctgtaatcatgagtactcttgagactgtacgaatatttctgacagagcagcctttggaaggactagagaaactctaccaggagcccagagagctgcctcctgaggagagagcccagaatgtcactcggcttctacgaaagcaggctgaggaggtcaatactgagtgggaaaaattgaacctgcactccgctgactggcagagaaaaatagatgagacccttgaaagactccaggaacttcaagaggccacggatgagctggacctcaagctgcgccaagctgaggtgatcaagggatcctggcagcccgtgggcgatctcctcattgactctctccaagatcacctcgagaaagtcaaggcacttcgaggagaaattgcgcctctgaaagagaacgtgagccacgtcaatgaccttgctcgccagcttaccactttgggcattcagctctcaccgtataacctcagcactctggaagacctgaacaccagatggaagcttctgcaggtggccgtcgaggaccgagtcaggcagctgcatgaagcccacagggactttggtccagcatctcagcactttctttccacgtctgtccagggtccctgggagagagccatctcgccaaacaaagtgccctactatatcaaccacgagactcaaacaacttgctgggaccatcccaaaatgacagagctctaccagtctttagctgacctgaataatgtcagattctcagcttataggactgccatgaaactccgaagactgcagaaggccctttgcttggatctcttgagcctgtcagctgcatgtgatgccttggaccagcacaacctcaagcaaaatgaccagcccatggatatcctgcagattattaattgtttgaccactatttatgaccgcctggagcaagagcacaacaatttggtcaacgtccctctctgcgtggatatgtgtctgaactggctgctgaatgtttatgatacgggacgaacagggaggatccgtgtcctgtcttttaaaactggcatcatttccctgtgtaaagcacatttggaagacaagtacagataccttttcaagcaagtggcaagttcaacaggattttgtgaccagcgcaggctgggcctccttctgcatgattctatccaaattccaagacagttgggtgaagttgcatcctttgggggcagtaacattgagccaagtgtccggagctgcttccaatttgctaataataagccagagatcgaagcggccctcttcctagactggatgagactggaaccccagtccatggtgtggctgcccgtcctgcacagagtggctgctgcagaaactgccaagcatcaggccaaatgtaacatctgcaaagagtgtccaatcattggattcaggtacaggagtctaaagcactttaattatgacatctgccaaagctgctttttttctggtcgagttgcaaaaggccataaaatgcactatcccatggtggaatattgcactccgactacatcaggagaagatgttcgagactttgccaaggtactaaaaaacaaatttcgaaccaaaaggtattttgcgaagcatccccgaatgggctacctgccagtgcagactgtcttagagggggacaacatggaaacgaatctgcaagcagaatatgaccgtctaaagcagcagcacgaacataaaggcctgtccccactgccgtcccctcctgaaatgatgcccacctctccccagagtccccgggatgctgagctcattgctgaggccaagctactgcgtcaacacaaaggccgcctggaagccaggatgcaaatcctggaagaccacaataaacagctggagtcacagttacacaggctaaggcagctgctggagcaaccccaggcagaggccaaagtgaatggcacaacggtgtcctctccttctacctctctacagaggtccgacagcagtcagcctatgctgctccgagtggttggcagtcaaacttcggactccatgggtgaggaagatcttctcagtcctccccaggacacaagcacagggttagaggaggtgatggagcaactcaacaactccttccctagttcaagaggacacaatgtaggaagtcttttccacatggcagatgatttgggcagagcgatggagtccttagtatcagtcatgacagatgaagaaggagcagaataaatgttttacaactcctgattcccgcatggtttttataatattcatacaacaaagaggattagacagtaagagtttacaagaaataaatctatatttttgtgaagggtagtggtattatactgtagatttcagtagtttctaagtctgttattgttttgttaacaatggcaggttttacacgtctatgcaattgtacaaaaaagttataagaaaactacatgtaaaatcttgatagctaaataacttgccatttctttatatggaacgcattttgggttgtttaaaaatttataacagttataaagaaagattgtaaactaaagtgtgctttataaaaaaaagttgtttataaaaacccctaaaaacaaaacaaacacacacacacacacatacacacacacacacaaaactttgaggcagcgcattgttttgcatccttttggcgtgatatccatatgaaattcatggctttttctttttttgcatattaaagataagacttcctctaccaccacaccaaatgactactacacactgctcatttgagaactgtcagctgagtggggcaggcttgagttttcatttcatatatctatatgtctataagtatataaatactatagttatatagataaagagatacgaatttctatagactgactttttccattttttaaatgttcatgtcacatcctaatagaaagaaattacttctagtcagtcatccaggcttacctgcttggtctagaatggatttttcccggagccggaagccaggaggaaactacaccacactaaaacattgtctacagctccagatgtttctcattttaaacaactttccactgacaacgaaagtaaagtaaagtattggatttttttaaagggaacatgtgaatgaatacacaggacttattatatcagagtgagtaatcggttggttggttgattgattgattgattgatacattcagcttcctgctgctagcaatgccacgatttagatttaatgatgcttcagtggaaatcaatcagaaggtattctgaccttgtgaacatcagaaggtattttttaactcccaagcagtagcaggacgatgatagggctggagggctatggattcccagcccatccctgtgaaggagtaggccactctttaagtgaaggattggatgattgttcataatacataaagttctctgtaattacaactaaattattatgccctcttctcacagtcaaaaggaactgggtggtttggtttttgttgcttttttagatttattgtcccatgtgggatgagtttttaaatgccacaagacataatttaaaataaataaactttgggaaaaggtgtaagacagtagccccatcacatttgtgatactgacaggtatcaacccagaagcccatgaactgtgtttccatcctttgcatttctctgcgagtagttccacacaggtttgtaagtaagtaagaaagaaggcaaattgattcaaatgttacaaaaaaacccttcttggtggattagacaggttaaatatataaacaaacaaacaaaaattgctcaaaaaagaggagaaaagctcaagaggaaaagctaaggactggtaggaaaaagctttactctttcatgccattttatttctttttgatttttaaatcattcattcaatagataccaccgtgtgacctataattttgcaaatctgttacctctgacatcaagtgtaattagcttttggagagtgggctgacatcaagtgtaattagcttttggagagtgggttttgtccattattaataattaattaattaacatcaaacacggcttctcatgctatttctacctcactttggttttggggtgttcctgataattgtgcacacctgagttcacagcttcaccacttgtccattgcgttattttctttttcctttataattctttctttttccttcataattttcaaaagaaaacccaaagctctaaggtaacaaattaccaaattacatgaagatttggtttttgtcttgcatttttttcctttatgtgacgctggaccttttctttacccaaggatttttaaaactcagatttaaaacaaggggttactttacatcctactaagaagtttaagtaagtaagtttcattctaaaatcagaggtaaatagagtgcataaataattttgttttaatctttttgtttttcttttagacacattagctctggagtgagtctgtcataatatttgaacaaaaattgagagctttattgctgcattttaagcataattaatttggacattatttcgtgttgtgttctttataaccaccgagtattaaactgtaaatcataatgtaactgaagcataaacatcacatggcatgttttgtcattgttttcaggtactgagttcttacttgagtatcataatatattgtgttttaacaccaacactgtaacatttacgaattatttttttaaacttcagttttactgcattttcacaacatatcagacttcaccaaatatatgccttactattgtattatagtactgctttactgtgtatctcaataaagcacgcagttatgttac

SEQ ID NO: 530 - DNA, 1571 bp, Homo sapiens
actttcggggagcccggcggctctgggaagctcactcctccactcgtacccacactcgaccgcggagcccttgcagccatgagggaacagctcaaaggccacgagactcaaacaacttgctgggaccatcccaaaatgacagagctctaccagtctttagctgacctgaataatgtcagattctcagcttataggactgccatgaaactccgaagactgcagaaggccctttgcttggatctcttgagcctgtcagctgcatgtgatgccttggaccagcacaacctcaagcaaaatgaccagcccatggatatcctgcagattattaattgtttgaccactatttatgaccgcctggagcaagagcacaacaatttggtcaacgtccctctctgcgtggatatgtgtctgaactggctgctgaatgtttatgatacgggacgaacagggaggatccgtgtcctgtcttttaaaactggcatcatttccctgtgtaaagcacatttggaagacaagtacagataccttttcaagcaagtggcaagttcaacaggattttgtgaccagcgcaggctgggcctccttctgcatgattctatccaaattccaagacagttgggtgaagttgcatcctttgggggcagtaacattgagccaagtgtccggagctgcttccaatttgctaataataagccagagatcgaagcggccctcttcctagactggatgagactggaaccccagtccatggtgtggctgcccgtcctgcacagagtggctgctgcagaaactgccaagcatcaggccaaatgtaacatctgcaaagagtgtccaatcattggattcaggtacaggagtctaaagcactttaattatgacatctgccaaagctgctttttttctggtcgagttgcaaaaggccataaaatgcactatcccatggtggaatattgcactccgactacatcaggagaagatgttcgagactttgccaaggtactaaaaaacaaatttcgaaccaaaaggtattttgcgaagcatccccgaatgggctacctgccagtgcagactgtcttagagggggacaacatggaaacgtgagtagtagcaaaagcagaacacactcttgtttgatgtatatttgaactcctctcagctgaacaccctccttcactcccaaatgcaaacagtctcttctatttctttctttttatttacattagctgaaaagagaaaaataagctgatgtccagttgccactttcccacgtcacttgacaatttctttttccaaaagttaaactttatctcacagggggaaaaaaaaaaaaaaaccacaacacaatacagccactaattgccttacaagccttataagaaatatgggactgtttacaaatgagtgattccagtatttcattttgattttcctctctcacaaatcagtaaatgtgtgtctttttgtatctcattgtgtggtcatatctagtcacttgtttctactcaaaagaaaatatagtcacaggaaactacttcacagtaagtagtaatgattctcaagatcaaagggga

SEQ ID NO: 531 - DNA, 7378 bp, Homo sapiens
acactagcaatggcaaagctttgtgcggaggcattgctggctgctctgaactaaaagcatccgtggggaccgaaagaggtttttgcacaccttattaaggaactccaggatggcattgggcagcggcaaactgttgtcagaacattgaatgcaactggggaagaaataattcagcaatcctcaaaaacagatgccagtattctacaggaaaaattgggaagcctgaatctgcggtggcaggaggtctgcaaacagctgtcagacagaaaaaagaggctagaagaacaaaagaatatcttgtcagaatttcaaagagatttaaatgaatttgttttatggttggaggaagcagataacattgctagtatcccacttgaacctggaaaagagcagcaactaaaagaaaagcttgagcaagtcaagttactggtggaagagttgcccctgcgccagggaattctcaaacaattaaatgaaactggaggacccgtgcttgtaagtgctcccataagcccagaagagcaagataaacttgaaaataagctcaagcagacaaatctccagtggataaaggtttccagagctttacctgagaaacaaggagaaattgaagctcaaataaaagaccttgggcagcttgaaaaaaagcttgaagaccttgaagagcagttaaatcatctgctgctgtggttatctcctattaggaatcagttggaaatttataaccaaccaaaccaagaaggaccatttgacgttcaggaaactgaaatagcagttcaagctaaacaaccggatgtggaagagattttgtctaaagggcagcatttgtacaaggaaaaaccagccactcagccagtgaagaggaagttagaagatctgagctctgagtggaaggcggtaaaccgtttacttcaagagctgagggcaaagcagcctgacctagctcctggactgaccactattggagcctctcctactcagactgttactctggtgacacaacctgtggttactaaggaaactgccatctccaaactagaaatgccatcttccttgatgttggaggtacctgctctggcagatttcaaccgggcttggacagaacttaccgactggctttctctgcttgatcaagttataaaatcacagagggtgatggtgggtgaccttgaggatatcaacgagatgatcatcaagcagaaggcaacaatgcaggatttggaacagaggcgtccccagttggaagaactcattaccgctgcccaaaatttgaaaaacaagaccagcaatcaagaggctagaacaatcattacggatcgaattgaaagaattcagaatcagtgggatgaagtacaagaacaccttcagaaccggaggcaacagttgaatgaaatgttaaaggattcaacacaatggctggaagctaaggaagaagctgagcaggtcttaggacaggccagagccaagcttgagtcatggaaggagggtccctatacagtagatgcaatccaaaagaaaatcacagaaaccaagcagttggccaaagacctccgccagtggcagacaaatgtagatgtggcaaatgacttggccctgaaacttctccgggattattctgcagatgataccagaaaagtccacatgataacagagaatatcaatgcctcttggagaagcattcataaaagggtgagtgagcgagaggctgctttggaagaaactcatagattactgcaacagttccccctggacctggaaaagtttcttgcctggcttacagaagctgaaacaactgccaatgtcctacaggatgctacccgtaaggaaaggctcctagaagactccaagggagtaaaagagctgatgaaacaatggcaagacctccaaggtgaaattgaagctcacacagatgtttatcacaacctggatgaaaacagccaaaaaatcctgagatccctggaaggttccgatgatgcagtcctgttacaaagacgtttggataacatgaacttcaagtggagtgaacttcggaaaaagtctctcaacattaggtcccatttggaagccagttctgaccagtggaagcgtctgcacctttctctgcaggaacttctggtgtggctacagctgaaagatgatgaattaagccggcaggcacctattggaggcgactttccagcagttcagaagcagaacgatgtacatagggccttcaagagggaattgaaaactaaagaacctgtaatcatgagtactcttgagactgtacgaatatttctgacagagcagcctttggaaggactagagaaactctaccaggagcccagagagctgcctcctgaggagagagcccagaatgtcactcggcttctacgaaagcaggctgaggaggtcaatactgagtgggaaaaattgaacctgcactccgctgactggcagagaaaaatagatgagacccttgaaagactccaggaacttcaagaggccacggatgagctggacctcaagctgcgccaagctgaggtgatcaagggatcctggcagcccgtgggcgatctcctcattgactctctccaagatcacctcgagaaagtcaaggcacttcgaggagaaattgcgcctctgaaagagaacgtgagccacgtcaatgaccttgctcgccagcttaccactttgggcattcagctctcaccgtataacctcagcactctggaagacctgaacaccagatggaagcttctgcaggtggccgtcgaggaccgagtcaggcagctgcatgaagcccacagggactttggtccagcatctcagcactttctttccacgtctgtccagggtccctgggagagagccatctcgccaaacaaagtgccctactatatcaaccacgagactcaaacaacttgctgggaccatcccaaaatgacagagctctaccagtctttagctgacctgaataatgtcagattctcagcttataggactgccatgaaactccgaagactgcagaaggccctttgcttggatctcttgagcctgtcagctgcatgtgatgccttggaccagcacaacctcaagcaaaatgaccagcccatggatatcctgcagattattaattgtttgaccactatttatgaccgcctggagcaagagcacaacaatttggtcaacgtccctctctgcgtggatatgtgtctgaactggctgctgaatgtttatgatacgggacgaacagggaggatccgtgtcctgtcttttaaaactggcatcatttccctgtgtaaagcacatttggaagacaagtacagataccttttcaagcaagtggcaagttcaacaggattttgtgaccagcgcaggctgggcctccttctgcatgattctatccaaattccaagacagttgggtgaagttgcatcctttgggggcagtaacattgagccaagtgtccggagctgcttccaatttgctaataataagccagagatcgaagcggccctcttcctagactggatgagactggaaccccagtccatggtgtggctgcccgtcctgcacagagtggctgctgcagaaactgccaagcatcaggccaaatgtaacatctgcaaagagtgtccaatcattggattcaggtacaggagtctaaagcactttaattatgacatctgccaaagctgctttttttctggtcgagttgcaaaaggccataaaatgcactatcccatggtggaatattgcactccgactacatcaggagaagatgttcgagactttgccaaggtactaaaaaacaaatttcgaaccaaaaggtattttgcgaagcatccccgaatgggctacctgccagtgcagactgtcttagagggggacaacatggaaactcccgttactctgatcaacttctggccagtagattctgcgcctgcctcgtcccctcagctttcacacgatgatactcattcacgcattgaacattatgctagcaggctagcagaaatggaaaacagcaatggatcttatctaaatgatagcatctctcctaatgagagcatagatgatgaacatttgttaatccagcattactgccaaagtttgaaccaggactcccccctgagccagcctcgtagtcctgcccagatcttgatttccttagagagtgaggaaagaggggagctagagagaatcctagcagatcttgaggaagaaaacaggaatctgcaagcagaatatgaccgtctaaagcagcagcacgaacataaaggcctgtccccactgccgtcccctcctgaaatgatgcccacctctccccagagtccccgggatgctgagctcattgctgaggccaagctactgcgtcaacacaaaggccgcctggaagccaggatgcaaatcctggaagaccacaataaacagctggagtcacagttacacaggctaaggcagctgctggagcaaccccaggcagaggccaaagtgaatggcacaacggtgtcctctccttctacctctctacagaggtccgacagcagtcagcctatgctgctccgagtggttggcagtcaaacttcggactccatgggtgaggaagatcttctcagtcctccccaggacacaagcacagggttagaggaggtgatggagcaactcaacaactccttccctagttcaagaggacacaatgtaggaagtcttttccacatggcagatgatttgggcagagcgatggagtccttagtatcagtcatgacagatgaagaaggagcagaataaatgttttacaactcctgattcccgcatggtttttataatattcatacaacaaagaggattagacagtaagagtttacaagaaataaatctatatttttgtgaagggtagtggtattatactgtagatttcagtagtttctaagtctgttattgttttgttaacaatggcaggttttacacgtctatgcaattgtacaaaaaagttataagaaaactacatgtaaaatcttgatagctaaataacttgccatttctttatatggaacgcattttgggttgtttaaaaatttataacagttataaagaaagattgtaaactaaagtgtgctttataaaaaaaagttgtttataaaaacccctaaaaacaaaacaaacacacacacacacacatacacacacacacacaaaactttgaggcagcgcattgttttgcatccttttggcgtgatatccatatgaaattcatggctttttctttttttgcatattaaagataagacttcctctaccaccacaccaaatgactactacacactgctcatttgagaactgtcagctgagtggggcaggcttgagttttcatttcatatatctatatgtctataagtatataaatactatagttatatagataaagagatacgaatttctatagactgactttttccattttttaaatgttcatgtcacatcctaatagaaagaaattacttctagtcagtcatccaggcttacctgcttggtctagaatggatttttcccggagccggaagccaggaggaaactacaccacactaaaacattgtctacagctccagatgtttctcattttaaacaactttccactgacaacgaaagtaaagtaaagtattggatttttttaaagggaacatgtgaatgaatacacaggacttattatatcagagtgagtaatcggttggttggttgattgattgattgattgatacattcagcttcctgctgctagcaatgccacgatttagatttaatgatgcttcagtggaaatcaatcagaaggtattctgaccttgtgaacatcagaaggtattttttaactcccaagcagtagcaggacgatgatagggctggagggctatggattcccagcccatccctgtgaaggagtaggccactctttaagtgaaggattggatgattgttcataatacataaagttctctgtaattacaactaaattattatgccctcttctcacagtcaaaaggaactgggtggtttggtttttgttgcttttttagatttattgtcccatgtgggatgagtttttaaatgccacaagacataatttaaaataaataaactttgggaaaaggtgtaagacagtagccccatcacatttgtgatactgacaggtatcaacccagaagcccatgaactgtgtttccatcctttgcatttctctgcgagtagttccacacaggtttgtaagtaagtaagaaagaaggcaaattgattcaaatgttacaaaaaaacccttcttggtggattagacaggttaaatatataaacaaacaaacaaaaattgctcaaaaaagaggagaaaagctcaagaggaaaagctaaggactggtaggaaaaagctttactctttcatgccattttatttctttttgatttttaaatcattcattcaatagataccaccgtgtgacctataattttgcaaatctgttacctctgacatcaagtgtaattagcttttggagagtgggctgacatcaagtgtaattagcttttggagagtgggttttgtccattattaataattaattaattaacatcaaacacggcttctcatgctatttctacctcactttggttttggggtgttcctgataattgtgcacacctgagttcacagcttcaccacttgtccattgcgttattttctttttcctttataattctttctttttccttcataattttcaaaagaaaacccaaagctctaaggtaacaaattaccaaattacatgaagatttggtttttgtcttgcatttttttcctttatgtgacgctggaccttttctttacccaaggatttttaaaactcagatttaaaacaaggggttactttacatcctactaagaagtttaagtaagtaagtttcattctaaaatcagaggtaaatagagtgcataaataattttgttttaatctttttgtttttcttttagacacattagctctggagtgagtctgtcataatatttgaacaaaaattgagagctttattgctgcattttaagcataattaatttggacattatttcgtgttgtgttctttataaccaccgagtattaaactgtaaatcataatgtaactgaagcataaacatcacatggcatgttttgtcattgttttcaggtactgagttcttacttgagtatcataatatattgtgttttaacaccaacactgtaacatttacgaattatttttttaaacttcagttttactgcattttcacaacatatcagacttcaccaaatatatgccttactattgtattatagtactgctttactgtgtatctcaataaagcacgcagttatgttac

SEQ ID NO: 532 - DNA, 7339 bp, Homo sapiens
acactagcaatggcaaagctttgtgcggaggcattgctggctgctctgaactaaaagcatccgtggggaccgaaagaggtttttgcacaccttattaaggaactccaggatggcattgggcagcggcaaactgttgtcagaacattgaatgcaactggggaagaaataattcagcaatcctcaaaaacagatgccagtattctacaggaaaaattgggaagcctgaatctgcggtggcaggaggtctgcaaacagctgtcagacagaaaaaagaggctagaagaacaaaagaatatcttgtcagaatttcaaagagatttaaatgaatttgttttatggttggaggaagcagataacattgctagtatcccacttgaacctggaaaagagcagcaactaaaagaaaagcttgagcaagtcaagttactggtggaagagttgcccctgcgccagggaattctcaaacaattaaatgaaactggaggacccgtgcttgtaagtgctcccataagcccagaagagcaagataaacttgaaaataagctcaagcagacaaatctccagtggataaaggtttccagagctttacctgagaaacaaggagaaattgaagctcaaataaaagaccttgggcagcttgaaaaaaagcttgaagaccttgaagagcagttaaatcatctgctgctgtggttatctcctattaggaatcagttggaaatttataaccaaccaaaccaagaaggaccatttgacgttcaggaaactgaaatagcagttcaagctaaacaaccggatgtggaagagattttgtctaaagggcagcatttgtacaaggaaaaaccagccactcagccagtgaagaggaagttagaagatctgagctctgagtggaaggcggtaaaccgtttacttcaagagctgagggcaaagcagcctgacctagctcctggactgaccactattggagcctctcctactcagactgttactctggtgacacaacctgtggttactaaggaaactgccatctccaaactagaaatgccatcttccttgatgttggaggtacctgctctggcagatttcaaccgggcttggacagaacttaccgactggctttctctgcttgatcaagttataaaatcacagagggtgatggtgggtgaccttgaggatatcaacgagatgatcatcaagcagaaggcaacaatgcaggatttggaacagaggcgtccccagttggaagaactcattaccgctgcccaaaatttgaaaaacaagaccagcaatcaagaggctagaacaatcattacggatcgaattgaaagaattcagaatcagtgggatgaagtacaagaacaccttcagaaccggaggcaacagttgaatgaaatgttaaaggattcaacacaatggctggaagctaaggaagaagctgagcaggtcttaggacaggccagagccaagcttgagtcatggaaggagggtccctatacagtagatgcaatccaaaagaaaatcacagaaaccaagcagttggccaaagacctccgccagtggcagacaaatgtagatgtggcaaatgacttggccctgaaacttctccgggattattctgcagatgataccagaaaagtccacatgataacagagaatatcaatgcctcttggagaagcattcataaaagggtgagtgagcgagaggctgctttggaagaaactcatagattactgcaacagttccccctggacctggaaaagtttcttgcctggcttacagaagctgaaacaactgccaatgtcctacaggatgctacccgtaaggaaaggctcctagaagactccaagggagtaaaagagctgatgaaacaatggcaagacctccaaggtgaaattgaagctcacacagatgtttatcacaacctggatgaaaacagccaaaaaatcctgagatccctggaaggttccgatgatgcagtcctgttacaaagacgtttggataacatgaacttcaagtggagtgaacttcggaaaaagtctctcaacattaggtcccatttggaagccagttctgaccagtggaagcgtctgcacctttctctgcaggaacttctggtgtggctacagctgaaagatgatgaattaagccggcaggcacctattggaggcgactttccagcagttcagaagcagaacgatgtacatagggccttcaagagggaattgaaaactaaagaacctgtaatcatgagtactcttgagactgtacgaatatttctgacagagcagcctttggaaggactagagaaactctaccaggagcccagagagctgcctcctgaggagagagcccagaatgtcactcggcttctacgaaagcaggctgaggaggtcaatactgagtgggaaaaattgaacctgcactccgctgactggcagagaaaaatagatgagacccttgaaagactccaggaacttcaagaggccacggatgagctggacctcaagctgcgccaagctgaggtgatcaagggatcctggcagcccgtgggcgatctcctcattgactctctccaagatcacctcgagaaagtcaaggcacttcgaggagaaattgcgcctctgaaagagaacgtgagccacgtcaatgaccttgctcgccagcttaccactttgggcattcagctctcaccgtataacctcagcactctggaagacctgaacaccagatggaagcttctgcaggtggccgtcgaggaccgagtcaggcagctgcatgaagcccacagggactttggtccagcatctcagcactttctttccacgtctgtccagggtccctgggagagagccatctcgccaaacaaagtgccctactatatcaaccacgagactcaaacaacttgctgggaccatcccaaaatgacagagctctaccagtctttagctgacctgaataatgtcagattctcagcttataggactgccatgaaactccgaagactgcagaaggccctttgcttggatctcttgagcctgtcagctgcatgtgatgccttggaccagcacaacctcaagcaaaatgaccagcccatggatatcctgcagattattaattgtttgaccactatttatgaccgcctggagcaagagcacaacaatttggtcaacgtccctctctgcgtggatatgtgtctgaactggctgctgaatgtttatgatacgggacgaacagggaggatccgtgtcctgtcttttaaaactggcatcatttccctgtgtaaagcacatttggaagacaagtacagataccttttcaagcaagtggcaagttcaacaggattttgtgaccagcgcaggctgggcctccttctgcatgattctatccaaattccaagacagttgggtgaagttgcatcctttgggggcagtaacattgagccaagtgtccggagctgcttccaatttgctaataataagccagagatcgaagcggccctcttcctagactggatgagactggaaccccagtccatggtgtggctgcccgtcctgcacagagtggctgctgcagaaactgccaagcatcaggccaaatgtaacatctgcaaagagtgtccaatcattggattcaggtacaggagtctaaagcactttaattatgacatctgccaaagctgctttttttctggtcgagttgcaaaaggccataaaatgcactatcccatggtggaatattgcactccgactacatcaggagaagatgttcgagactttgccaaggtactaaaaaacaaatttcgaaccaaaaggtattttgcgaagcatccccgaatgggctacctgccagtgcagactgtcttagagggggacaacatggaaacgcctgcctcgtcccctcagctttcacacgatgatactcattcacgcattgaacattatgctagcaggctagcagaaatggaaaacagcaatggatcttatctaaatgatagcatctctcctaatgagagcatagatgatgaacatttgttaatccagcattactgccaaagtttgaaccaggactcccccctgagccagcctcgtagtcctgcccagatcttgatttccttagagagtgaggaaagaggggagctagagagaatcctagcagatcttgaggaagaaaacaggaatctgcaagcagaatatgaccgtctaaagcagcagcacgaacataaaggcctgtccccactgccgtcccctcctgaaatgatgcccacctctccccagagtccccgggatgctgagctcattgctgaggccaagctactgcgtcaacacaaaggccgcctggaagccaggatgcaaatcctggaagaccacaataaacagctggagtcacagttacacaggctaaggcagctgctggagcaaccccaggcagaggccaaagtgaatggcacaacggtgtcctctccttctacctctctacagaggtccgacagcagtcagcctatgctgctccgagtggttggcagtcaaacttcggactccatgggtgaggaagatcttctcagtcctccccaggacacaagcacagggttagaggaggtgatggagcaactcaacaactccttccctagttcaagaggacacaatgtaggaagtcttttccacatggcagatgatttgggcagagcgatggagtccttagtatcagtcatgacagatgaagaaggagcagaataaatgttttacaactcctgattcccgcatggtttttataatattcatacaacaaagaggattagacagtaagagtttacaagaaataaatctatatttttgtgaagggtagtggtattatactgtagatttcagtagtttctaagtctgttattgttttgttaacaatggcaggttttacacgtctatgcaattgtacaaaaaagttataagaaaactacatgtaaaatcttgatagctaaataacttgccatttctttatatggaacgcattttgggttgtttaaaaatttataacagttataaagaaagattgtaaactaaagtgtgctttataaaaaaaagttgtttataaaaacccctaaaaacaaaacaaacacacacacacacacatacacacacacacacaaaactttgaggcagcgcattgttttgcatccttttggcgtgatatccatatgaaattcatggctttttctttttttgcatattaaagataagacttcctctaccaccacaccaaatgactactacacactgctcatttgagaactgtcagctgagtggggcaggcttgagttttcatttcatatatctatatgtctataagtatataaatactatagttatatagataaagagatacgaatttctatagactgactttttccattttttaaatgttcatgtcacatcctaatagaaagaaattacttctagtcagtcatccaggcttacctgcttggtctagaatggatttttcccggagccggaagccaggaggaaactacaccacactaaaacattgtctacagctccagatgtttctcattttaaacaactttccactgacaacgaaagtaaagtaaagtattggatttttttaaagggaacatgtgaatgaatacacaggacttattatatcagagtgagtaatcggttggttggttgattgattgattgattgatacattcagcttcctgctgctagcaatgccacgatttagatttaatgatgcttcagtggaaatcaatcagaaggtattctgaccttgtgaacatcagaaggtattttttaactcccaagcagtagcaggacgatgatagggctggagggctatggattcccagcccatccctgtgaaggagtaggccactctttaagtgaaggattggatgattgttcataatacataaagttctctgtaattacaactaaattattatgccctcttctcacagtcaaaaggaactgggtggtttggtttttgttgcttttttagatttattgtcccatgtgggatgagtttttaaatgccacaagacataatttaaaataaataaactttgggaaaaggtgtaagacagtagccccatcacatttgtgatactgacaggtatcaacccagaagcccatgaactgtgtttccatcctttgcatttctctgcgagtagttccacacaggtttgtaagtaagtaagaaagaaggcaaattgattcaaatgttacaaaaaaacccttcttggtggattagacaggttaaatatataaacaaacaaacaaaaattgctcaaaaaagaggagaaaagctcaagaggaaaagctaaggactggtaggaaaaagctttactctttcatgccattttatttctttttgatttttaaatcattcattcaatagataccaccgtgtgacctataattttgcaaatctgttacctctgacatcaagtgtaattagcttttggagagtgggctgacatcaagtgtaattagcttttggagagtgggttttgtccattattaataattaattaattaacatcaaacacggcttctcatgctatttctacctcactttggttttggggtgttcctgataattgtgcacacctgagttcacagcttcaccacttgtccattgcgttattttctttttcctttataattctttctttttccttcataattttcaaaagaaaacccaaagctctaaggtaacaaattaccaaattacatgaagatttggtttttgtcttgcatttttttcctttatgtgacgctggaccttttctttacccaaggatttttaaaactcagatttaaaacaaggggttactttacatcctactaagaagtttaagtaagtaagtttcattctaaaatcagaggtaaatagagtgcataaataattttgttttaatctttttgtttttcttttagacacattagctctggagtgagtctgtcataatatttgaacaaaaattgagagctttattgctgcattttaagcataattaatttggacattatttcgtgttgtgttctttataaccaccgagtattaaactgtaaatcataatgtaactgaagcataaacatcacatggcatgttttgtcattgttttcaggtactgagttcttacttgagtatcataatatattgtgttttaacaccaacactgtaacatttacgaattatttttttaaacttcagttttactgcattttcacaacatatcagacttcaccaaatatatgccttactattgtattatagtactgctttactgtgtatctcaataaagcacgcagttatgttac

SEQ ID NO: 533 - DNA, 4584 bp, Homo sapiens
actttcggggagcccggcggctctgggaagctcactcctccactcgtacccacactcgaccgcggagcccttgcagccatgagggaacagctcaaaggccacgagactcaaacaacttgctgggaccatcccaaaatgacagagctctaccagtctttagctgacctgaataatgtcagattctcagcttataggactgccatgaaactccgaagactgcagaaggccctttgcttggatctcttgagcctgtcagctgcatgtgatgccttggaccagcacaacctcaagcaaaatgaccagcccatggatatcctgcagattattaattgtttgaccactatttatgaccgcctggagcaagagcacaacaatttggtcaacgtccctctctgcgtggatatgtgtctgaactggctgctgaatgtttatgatacgggacgaacagggaggatccgtgtcctgtcttttaaaactggcatcatttccctgtgtaaagcacatttggaagacaagtacagataccttttcaagcaagtggcaagttcaacaggattttgtgaccagcgcaggctgggcctccttctgcatgattctatccaaattccaagacagttgggtgaagttgcatcctttgggggcagtaacattgagccaagtgtccggagctgcttccaatttgctaataataagccagagatcgaagcggccctcttcctagactggatgagactggaaccccagtccatggtgtggctgcccgtcctgcacagagtggctgctgcagaaactgccaagcatcaggccaaatgtaacatctgcaaagagtgtccaatcattggattcaggtacaggagtctaaagcactttaattatgacatctgccaaagctgctttttttctggtcgagttgcaaaaggccataaaatgcactatcccatggtggaatattgcactccgactacatcaggagaagatgttcgagactttgccaaggtactaaaaaacaaatttcgaaccaaaaggtattttgcgaagcatccccgaatgggctacctgccagtgcagactgtcttagagggggacaacatggaaacgcctgcctcgtcccctcagctttcacacgatgatactcattcacgcattgaacattatgctagcaggctagcagaaatggaaaacagcaatggatcttatctaaatgatagcatctctcctaatgagagcatagatgatgaacatttgttaatccagcattactgccaaagtttgaaccaggactcccccctgagccagcctcgtagtcctgcccagatcttgatttccttagagagtgaggaaagaggggagctagagagaatcctagcagatcttgaggaagaaaacaggaatctgcaagcagaatatgaccgtctaaagcagcagcacgaacataaaggcctgtccccactgccgtcccctcctgaaatgatgcccacctctccccagagtccccgggatgctgagctcattgctgaggccaagctactgcgtcaacacaaaggccgcctggaagccaggatgcaaatcctggaagaccacaataaacagctggagtcacagttacacaggctaaggcagctgctggagcaaccccaggcagaggccaaagtgaatggcacaacggtgtcctctccttctacctctctacagaggtccgacagcagtcagcctatgctgctccgagtggttggcagtcaaacttcggactccatgggtgaggaagatcttctcagtcctccccaggacacaagcacagggttagaggaggtgatggagcaactcaacaactccttccctagttcaagaggaagaaatacccctggaaagccaatgagagaggacacaatgtaggaagtcttttccacatggcagatgatttgggcagagcgatggagtccttagtatcagtcatgacagatgaagaaggagcagaataaatgttttacaactcctgattcccgcatggtttttataatattcatacaacaaagaggattagacagtaagagtttacaagaaataaatctatatttttgtgaagggtagtggtattatactgtagatttcagtagtttctaagtctgttattgttttgttaacaatggcaggttttacacgtctatgcaattgtacaaaaaagttataagaaaactacatgtaaaatcttgatagctaaataacttgccatttctttatatggaacgcattttgggttgtttaaaaatttataacagttataaagaaagattgtaaactaaagtgtgctttataaaaaaaagttgtttataaaaacccctaaaaacaaaacaaacacacacacacacacatacacacacacacacaaaactttgaggcagcgcattgttttgcatccttttggcgtgatatccatatgaaattcatggctttttctttttttgcatattaaagataagacttcctctaccaccacaccaaatgactactacacactgctcatttgagaactgtcagctgagtggggcaggcttgagttttcatttcatatatctatatgtctataagtatataaatactatagttatatagataaagagatacgaatttctatagactgactttttccattttttaaatgttcatgtcacatcctaatagaaagaaattacttctagtcagtcatccaggcttacctgcttggtctagaatggatttttcccggagccggaagccaggaggaaactacaccacactaaaacattgtctacagctccagatgtttctcattttaaacaactttccactgacaacgaaagtaaagtaaagtattggatttttttaaagggaacatgtgaatgaatacacaggacttattatatcagagtgagtaatcggttggttggttgattgattgattgattgatacattcagcttcctgctgctagcaatgccacgatttagatttaatgatgcttcagtggaaatcaatcagaaggtattctgaccttgtgaacatcagaaggtattttttaactcccaagcagtagcaggacgatgatagggctggagggctatggattcccagcccatccctgtgaaggagtaggccactctttaagtgaaggattggatgattgttcataatacataaagttctctgtaattacaactaaattattatgccctcttctcacagtcaaaaggaactgggtggtttggtttttgttgcttttttagatttattgtcccatgtgggatgagtttttaaatgccacaagacataatttaaaataaataaactttgggaaaaggtgtaagacagtagccccatcacatttgtgatactgacaggtatcaacccagaagcccatgaactgtgtttccatcctttgcatttctctgcgagtagttccacacaggtttgtaagtaagtaagaaagaaggcaaattgattcaaatgttacaaaaaaacccttcttggtggattagacaggttaaatatataaacaaacaaacaaaaattgctcaaaaaagaggagaaaagctcaagaggaaaagctaaggactggtaggaaaaagctttactctttcatgccattttatttctttttgatttttaaatcattcattcaatagataccaccgtgtgacctataattttgcaaatctgttacctctgacatcaagtgtaattagcttttggagagtgggctgacatcaagtgtaattagcttttggagagtgggttttgtccattattaataattaattaattaacatcaaacacggcttctcatgctatttctacctcactttggttttggggtgttcctgataattgtgcacacctgagttcacagcttcaccacttgtccattgcgttattttctttttcctttataattctttctttttccttcataattttcaaaagaaaacccaaagctctaaggtaacaaattaccaaattacatgaagatttggtttttgtcttgcatttttttcctttatgtgacgctggaccttttctttacccaaggatttttaaaactcagatttaaaacaaggggttactttacatcctactaagaagtttaagtaagtaagtttcattctaaaatcagaggtaaatagagtgcataaataattttgttttaatctttttgtttttcttttagacacattagctctggagtgagtctgtcataatatttgaacaaaaattgagagctttattgctgcattttaagcataattaatttggacattatttcgtgttgtgttctttataaccaccgagtattaaactgtaaatcataatgtaactgaagcataaacatcacatggcatgttttgtcattgttttcaggtactgagttcttacttgagtatcataatatattgtgttttaacaccaacactgtaacatttacgaattatttttttaaacttcagttttactgcattttcacaacatatcagacttcaccaaatatatgccttactattgtattatagtactgctttactgtgtatctcaataaagcacgcagttatgttac

SEQ ID NO: 534 - DNA, 13764 bp, Homo sapiens
tcactgacacatagagtaacttctagttctccaagctctactcatgatgaaagagaagatgttcaaaagaaaacattcacaaaatgggtaaatgcacaattttctaagtttgggaagcagcatattgagaacctcttcagtgacctacaggatgggaggcgcctcctagacctcctcgaaggcctgacagggcaaaaactgccaaaagaaaaaggatccacaagagttcatgccctgaacaatgtcaacaaggcactgcgggttttgcagaacaataatgttgatttagtgaatattggaagtactgacatcgtagatggaaatcataaactgactcttggtttgatttggaatataatcctccactggcaggtcaaaaatgtaatgaaaaatatcatggctggattgcaacaaaccaacagtgaaaagattctcctgagctgggtccgacaatcaactcgtaattatccacaggttaatgtaatcaacttcaccaccagctggtctgatggcctggctttgaatgctctcatccatagtcataggccagacctatttgactggaatagtgtggtttgccagcagtcagccacacaacgactggaacatgcattcaacatcgccagatatcaattaggcatagagaaactactcgatcctgaagatgttgataccacctatccagataagaagtccatcttaatgtacatcacatcactcttccaagttttgcctcaacaagtgagcattgaagccatccaggaagtggaaatgttgccaaggccacctaaagtgactaaagaagaacattttcagttacatcatcaaatgcactattctcaacagatcacggtcagtctagcacagggatatgagagaacttcttcccctaagcctcgattcaagagctatgcctacacacaggctgcttatgtcaccacctctgaccctacacggagcccatttccttcacagcatttggaagctcctgaagacaagtcatttggcagttcattgatggagagtgaagtaaacctggaccgttatcaaacagctttagaagaagtattatcgtggcttctttctgctgaggacacattgcaagcacaaggagagatttctaatgatgtggaagtggtgaaagaccagtttcatactcatgaggggtacatgatggatttgacagcccatcagggccgggttggtaatattctacaattgggaagtaagctgattggaacaggaaaattatcagaagatgaagaaactgaagtacaagagcagatgaatctcctaaattcaagatgggaatgcctcagggtagctagcatggaaaaacaaagcaatttacatagagttttaatggatctccagaatcagaaactgaaagagttgaatgactggctaacaaaaacagaagaaagaacaaggaaaatggaggaagagcctcttggacctgatcttgaagacctaaaacgccaagtacaacaacataaggtgcttcaagaagatctagaacaagaacaagtcagggtcaattctctcactcacatggtggtggtagttgatgaatctagtggagatcacgcaactgctgctttggaagaacaacttaaggtattgggagatcgatgggcaaacatctgtagatggacagaagaccgctgggttcttttacaagacatccttctcaaatggcaacgtcttactgaagaacagtgcctttttagtgcatggctttcagaaaaagaagatgcagtgaacaagattcacacaactggctttaaagatcaaaatgaaatgttatcaagtcttcaaaaactggccgttttaaaagcggatctagaaaagaaaaagcaatccatgggcaaactgtattcactcaaacaagatcttctttcaacactgaagaataagtcagtgacccagaagacggaagcatggctggataactttgcccggtgttgggataatttagtccaaaaacttgaaaagagtacagcacagatttcacaggctgtcaccaccactcagccatcactaacacagacaactgtaatggaaacagtaactacggtgaccacaagggaacagatcctggtaaagcatgctcaagaggaacttccaccaccacctccccaaaagaagaggcagattactgtggattctgaaattaggaaaaggttggatgttgatataactgaacttcacagctggattactcgctcagaagctgtgttgcagagtcctgaatttgcaatctttcggaaggaaggcaacttctcagacttaaaagaaaaagtcaatgccatagagcgagaaaaagctgagaagttcagaaaactgcaagatgccagcagatcagctcaggccctggtggaacagatggtgaatgagggtgttaatgcagatagcatcaaacaagcctcagaacaactgaacagccggtggatcgaattctgccagttgctaagtgagagacttaactggctggagtatcagaacaacatcatcgctttctataatcagctacaacaattggagcagatgacaactactgctgaaaactggttgaaaatccaacccaccaccccatcagagccaacagcaattaaaagtcagttaaaaatttgtaaggatgaagtcaaccggctatcaggtcttcaacctcaaattgaacgattaaaaattcaaagcatagccctgaaagagaaaggacaaggacccatgttcctggatgcagactttgtggcctttacaaatcattttaagcaagtcttttctgatgtgcaggccagagagaaagagctacagacaatttttgacactttgccaccaatgcgctatcaggagaccatgagtgccatcaggacatgggtccagcagtcagaaaccaaactctccatacctcaacttagtgtcaccgactatgaaatcatggagcagagactcggggaattgcaggctttacaaagttctctgcaagagcaacaaagtggcctatactatctcagcaccactgtgaaagagatgtcgaagaaagcgccctctgaaattagccggaaatatcaatcagaatttgaagaaattgagggacgctggaagaagctctcctcccagctggttgagcattgtcaaaagctagaggagcaaatgaataaactccgaaaaattcagaatcacatacaaaccctgaagaaatggatggctgaagttgatgtttttctgaaggaggaatggcctgcccttggggattcagaaattctaaaaaagcagctgaaacagtgcagacttttagtcagtgatattcagacaattcagcccagtctaaacagtgtcaatgaaggtgggcagaagataaagaatgaagcagagccagagtttgcttcgagacttgagacagaactcaaagaacttaacactcagtgggatcacatgtgccaacaggtctatgccagaaaggaggccttgaagggaggtttggagaaaactgtaagcctccagaaagatctatcagagatgcacgaatggatgacacaagctgaagaagagtatcttgagagagattttgaatataaaactccagatgaattacagaaagcagttgaagagatgaagagagctaaagaagaggcccaacaaaaagaagcgaaagtgaaactccttactgagtctgtaaatagtgtcatagctcaagctccacctgtagcacaagaggccttaaaaaaggaacttgaaactctaaccaccaactaccagtggctctgcactaggctgaatgggaaatgcaagactttggaagaagtttgggcatgttggcatgagttattgtcatacttggagaaagcaaacaagtggctaaatgaagtagaatttaaacttaaaaccactgaaaacattcctggcggagctgaggaaatctctgaggtgctagattcacttgaaaatttgatgcgacattcagaggataacccaaatcagattcgcatattggcacagaccctaacagatggcggagtcatggatgagctaatcaatgaggaacttgagacatttaattctcgttggagggaactacatgaagaggctgtaaggaggcaaaagttgcttgaacagagcatccagtctgcccaggagactgaaaaatccttacacttaatccaggagtccctcacattcattgacaagcagttggcagcttatattgcagacaaggtggacgcagctcaaatgcctcaggaagcccagaaaatccaatctgatttgacaagtcatgagatcagtttagaagaaatgaagaaacataatcaggggaaggaggctgcccaaagagtcctgtctcagattgatgttgcacagaaaaaattacaagatgtctccatgaagtttcgattattccagaaaccagccaattttgagcagcgtctacaagaaagtaagatgattttagatgaagtgaagatgcacttgcctgcattggaaacaaagagtgtggaacaggaagtagtacagtcacagctaaatcattgtgtgaacttgtataaaagtctgagtgaagtgaagtctgaagtggaaatggtgataaagactggacgtcagattgtacagaaaaagcagacggaaaatcccaaagaacttgatgaaagagtaacagctttgaaattgcattataatgagctgggagcaaaggtaacagaaagaaagcaacagttggagaaatgcttgaaattgtcccgtaagatgcgaaaggaaatgaatgtcttgacagaatggctggcagctacagatatggaattgacaaagagatcagcagttgaaggaatgcctagtaatttggattctgaagttgcctggggaaaggctactcaaaaagagattgagaaacagaaggtgcacctgaagagtatcacagaggtaggagaggccttgaaaacagttttgggcaagaaggagacgttggtggaagataaactcagtcttctgaatagtaactggatagctgtcacctcccgagcagaagagtggttaaatcttttgttggaataccagaaacacatggaaacttttgaccagaatgtggaccacatcacaaagtggatcattcaggctgacacacttttggatgaatcagagaaaaagaaaccccagcaaaaagaagacgtgcttaagcgtttaaaggcagaactgaatgacatacgcccaaaggtggactctacacgtgaccaagcagcaaacttgatggcaaaccgcggtgaccactgcaggaaattagtagagccccaaatctcagagctcaaccatcgatttgcagccatttcacacagaattaagactggaaaggcctccattcctttgaaggaattggagcagtttaactcagatatacaaaaattgcttgaaccactggaggctgaaattcagcagggggtgaatctgaaagaggaagacttcaataaagatatgaatgaagacaatgagggtactgtaaaagaattgttgcaaagaggagacaacttacaacaaagaatcacagatgagagaaagcgagaggaaataaagataaaacagcagctgttacagacaaaacataatgctctcaaggatttgaggtctcaaagaagaaaaaaggctctagaaatttctcatcagtggtatcagtacaagaggcaggctgatgatctcctgaaatgcttggatgacattgaaaaaaaattagccagcctacctgagcccagagatgaaaggaaaataaaggaaattgatcgggaattgcagaagaagaaagaggagctgaatgcagtgcgtaggcaagctgagggcttgtctgaggatggggccgcaatggcagtggagccaactcagatccagctcagcaagcgctggcgggaaattgagagcaaatttgctcagtttcgaagactcaactttgcacaaattcacactgtccgtgaagaaacgatgatggtgatgactgaagacatgcctttggaaatttcttatgtgccttctacttatttgactgaaatcactcatgtctcacaagccctattagaagtggaacaacttctcaatgctcctgacctctgtgctaaggactttgaagatctctttaagcaagaggagtctctgaagaatataaaagatagtctacaacaaagctcaggtcggattgacattattcatagcaagaagacagcagcattgcaaagtgcaacgcctgtggaaagggtgaagctacaggaagctctctcccagcttgatttccaatgggaaaaagttaacaaaatgtacaaggaccgacaagggcgatttgacagatctgttgagaaatggcggcgttttcattatgatataaagatatttaatcagtggctaacagaagctgaacagtttctcagaaagacacaaattcctgagaattgggaacatgctaaatacaaatggtatcttaaggaactccaggatggcattgggcagcggcaaactgttgtcagaacattgaatgcaactggggaagaaataattcagcaatcctcaaaaacagatgccagtattctacaggaaaaattgggaagcctgaatctgcggtggcaggaggtctgcaaacagctgtcagacagaaaaaagaggctagaagaacaaaagaatatcttgtcagaatttcaaagagatttaaatgaatttgttttatggttggaggaagcagataacattgctagtatcccacttgaacctggaaaagagcagcaactaaaagaaaagcttgagcaagtcaagttactggtggaagagttgcccctgcgccagggaattctcaaacaattaaatgaaactggaggacccgtgcttgtaagtgctcccataagcccagaagagcaagataaacttgaaaataagctcaagcagacaaatctccagtggataaaggtttccagagctttacctgagaaacaaggagaaattgaagctcaaataaaagaccttgggcagcttgaaaaaaagcttgaagaccttgaagagcagttaaatcatctgctgctgtggttatctcctattaggaatcagttggaaatttataaccaaccaaaccaagaaggaccatttgacgttcaggaaactgaaatagcagttcaagctaaacaaccggatgtggaagagattttgtctaaagggcagcatttgtacaaggaaaaaccagccactcagccagtgaagaggaagttagaagatctgagctctgagtggaaggcggtaaaccgtttacttcaagagctgagggcaaagcagcctgacctagctcctggactgaccactattggagcctctcctactcagactgttactctggtgacacaacctgtggttactaaggaaactgccatctccaaactagaaatgccatcttccttgatgttggaggtacctgctctggcagatttcaaccgggcttggacagaacttaccgactggctttctctgcttgatcaagttataaaatcacagagggtgatggtgggtgaccttgaggatatcaacgagatgatcatcaagcagaaggcaacaatgcaggatttggaacagaggcgtccccagttggaagaactcattaccgctgcccaaaatttgaaaaacaagaccagcaatcaagaggctagaacaatcattacggatcgaattgaaagaattcagaatcagtgggatgaagtacaagaacaccttcagaaccggaggcaacagttgaatgaaatgttaaaggattcaacacaatggctggaagctaaggaagaagctgagcaggtcttaggacaggccagagccaagcttgagtcatggaaggagggtccctatacagtagatgcaatccaaaagaaaatcacagaaaccaagcagttggccaaagacctccgccagtggcagacaaatgtagatgtggcaaatgacttggccctgaaacttctccgggattattctgcagatgataccagaaaagtccacatgataacagagaatatcaatgcctcttggagaagcattcataaaagggtgagtgagcgagaggctgctttggaagaaactcatagattactgcaacagttccccctggacctggaaaagtttcttgcctggcttacagaagctgaaacaactgccaatgtcctacaggatgctacccgtaaggaaaggctcctagaagactccaagggagtaaaagagctgatgaaacaatggcaagacctccaaggtgaaattgaagctcacacagatgtttatcacaacctggatgaaaacagccaaaaaatcctgagatccctggaaggttccgatgatgcagtcctgttacaaagacgtttggataacatgaacttcaagtggagtgaacttcggaaaaagtctctcaacattaggtcccatttggaagccagttctgaccagtggaagcgtctgcacctttctctgcaggaacttctggtgtggctacagctgaaagatgatgaattaagccggcaggcacctattggaggcgactttccagcagttcagaagcagaacgatgtacatagggccttcaagagggaattgaaaactaaagaacctgtaatcatgagtactcttgagactgtacgaatatttctgacagagcagcctttggaaggactagagaaactctaccaggagcccagagagctgcctcctgaggagagagcccagaatgtcactcggcttctacgaaagcaggctgaggaggtcaatactgagtgggaaaaattgaacctgcactccgctgactggcagagaaaaatagatgagacccttgaaagactccaggaacttcaagaggccacggatgagctggacctcaagctgcgccaagctgaggtgatcaagggatcctggcagcccgtgggcgatctcctcattgactctctccaagatcacctcgagaaagtcaaggcacttcgaggagaaattgcgcctctgaaagagaacgtgagccacgtcaatgaccttgctcgccagcttaccactttgggcattcagctctcaccgtataacctcagcactctggaagacctgaacaccagatggaagcttctgcaggtggccgtcgaggaccgagtcaggcagctgcatgaagcccacagggactttggtccagcatctcagcactttctttccacgtctgtccagggtccctgggagagagccatctcgccaaacaaagtgccctactatatcaaccacgagactcaaacaacttgctgggaccatcccaaaatgacagagctctaccagtctttagctgacctgaataatgtcagattctcagcttataggactgccatgaaactccgaagactgcagaaggccctttgcttggatctcttgagcctgtcagctgcatgtgatgccttggaccagcacaacctcaagcaaaatgaccagcccatggatatcctgcagattattaattgtttgaccactatttatgaccgcctggagcaagagcacaacaatttggtcaacgtccctctctgcgtggatatgtgtctgaactggctgctgaatgtttatgatacgggacgaacagggaggatccgtgtcctgtcttttaaaactggcatcatttccctgtgtaaagcacatttggaagacaagtacagataccttttcaagcaagtggcaagttcaacaggattttgtgaccagcgcaggctgggcctccttctgcatgattctatccaaattccaagacagttgggtgaagttgcatcctttgggggcagtaacattgagccaagtgtccggagctgcttccaatttgctaataataagccagagatcgaagcggccctcttcctagactggatgagactggaaccccagtccatggtgtggctgcccgtcctgcacagagtggctgctgcagaaactgccaagcatcaggccaaatgtaacatctgcaaagagtgtccaatcattggattcaggtacaggagtctaaagcactttaattatgacatctgccaaagctgctttttttctggtcgagttgcaaaaggccataaaatgcactatcccatggtggaatattgcactccgactacatcaggagaagatgttcgagactttgccaaggtactaaaaaacaaatttcgaaccaaaaggtattttgcgaagcatccccgaatgggctacctgccagtgcagactgtcttagagggggacaacatggaaactcccgttactctgatcaacttctggccagtagattctgcgcctgcctcgtcccctcagctttcacacgatgatactcattcacgcattgaacattatgctagcaggctagcagaaatggaaaacagcaatggatcttatctaaatgatagcatctctcctaatgagagcatagatgatgaacatttgttaatccagcattactgccaaagtttgaaccaggactcccccctgagccagcctcgtagtcctgcccagatcttgatttccttagagagtgaggaaagaggggagctagagagaatcctagcagatcttgaggaagaaaacaggaatctgcaagcagaatatgaccgtctaaagcagcagcacgaacataaaggcctgtccccactgccgtcccctcctgaaatgatgcccacctctccccagagtccccgggatgctgagctcattgctgaggccaagctactgcgtcaacacaaaggccgcctggaagccaggatgcaaatcctggaagaccacaataaacagctggagtcacagttacacaggctaaggcagctgctggagcaaccccaggcagaggccaaagtgaatggcacaacggtgtcctctccttctacctctctacagaggtccgacagcagtcagcctatgctgctccgagtggttggcagtcaaacttcggactccatgggtgaggaagatcttctcagtcctccccaggacacaagcacagggttagaggaggtgatggagcaactcaacaactccttccctagttcaagaggaagaaatacccctggaaagccaatgagagaggacacaatgtaggaagtcttttccacatggcagatgatttgggcagagcgatggagtccttagtatcagtcatgacagatgaagaaggagcagaataaatgttttacaactcctgattcccgcatggtttttataatattcatacaacaaagaggattagacagtaagagtttacaagaaataaatctatatttttgtgaagggtagtggtattatactgtagatttcagtagtttctaagtctgttattgttttgttaacaatggcaggttttacacgtctatgcaattgtacaaaaaagttataagaaaactacatgtaaaatcttgatagctaaataacttgccatttctttatatggaacgcattttgggttgtttaaaaatttataacagttataaagaaagattgtaaactaaagtgtgctttataaaaaaaagttgtttataaaaacccctaaaaacaaaacaaacacacacacacacacatacacacacacacacaaaactttgaggcagcgcattgttttgcatccttttggcgtgatatccatatgaaattcatggctttttctttttttgcatattaaagataagacttcctctaccaccacaccaaatgactactacacactgctcatttgagaactgtcagctgagtggggcaggcttgagttttcatttcatatatctatatgtctataagtatataaatactatagttatatagataaagagatacgaatttctatagactgactttttccattttttaaatgttcatgtcacatcctaatagaaagaaattacttctagtcagtcatccaggcttacctgcttggtctagaatggatttttcccggagccggaagccaggaggaaactacaccacactaaaacattgtctacagctccagatgtttctcattttaaacaactttccactgacaacgaaagtaaagtaaagtattggatttttttaaagggaacatgtgaatgaatacacaggacttattatatcagagtgagtaatcggttggttggttgattgattgattgattgatacattcagcttcctgctgctagcaatgccacgatttagatttaatgatgcttcagtggaaatcaatcagaaggtattctgaccttgtgaacatcagaaggtattttttaactcccaagcagtagcaggacgatgatagggctggagggctatggattcccagcccatccctgtgaaggagtaggccactctttaagtgaaggattggatgattgttcataatacataaagttctctgtaattacaactaaattattatgccctcttctcacagtcaaaaggaactgggtggtttggtttttgttgcttttttagatttattgtcccatgtgggatgagtttttaaatgccacaagacataatttaaaataaataaactttgggaaaaggtgtaagacagtagccccatcacatttgtgatactgacaggtatcaacccagaagcccatgaactgtgtttccatcctttgcatttctctgcgagtagttccacacaggtttgtaagtaagtaagaaagaaggcaaattgattcaaatgttacaaaaaaacccttcttggtggattagacaggttaaatatataaacaaacaaacaaaaattgctcaaaaaagaggagaaaagctcaagaggaaaagctaaggactggtaggaaaaagctttactctttcatgccattttatttctttttgatttttaaatcattcattcaatagataccaccgtgtgacctataattttgcaaatctgttacctctgacatcaagtgtaattagcttttggagagtgggctgacatcaagtgtaattagcttttggagagtgggttttgtccattattaataattaattaattaacatcaaacacggcttctcatgctatttctacctcactttggttttggggtgttcctgataattgtgcacacctgagttcacagcttcaccacttgtccattgcgttattttctttttcctttataattctttctttttccttcataattttcaaaagaaaacccaaagctctaaggtaacaaattaccaaattacatgaagatttggtttttgtcttgcatttttttcctttatgtgacgctggaccttttctttacccaaggatttttaaaactcagatttaaaacaaggggttactttacatcctactaagaagtttaagtaagtaagtttcattctaaaatcagaggtaaatagagtgcataaataattttgttttaatctttttgtttttcttttagacacattagctctggagtgagtctgtcataatatttgaacaaaaattgagagctttattgctgcattttaagcataattaatttggacattatttcgtgttgtgttctttataaccaccgagtattaaactgtaaatcataatgtaactgaagcataaacatcacatggcatgttttgtcattgttttcaggtactgagttcttacttgagtatcataatatattgtgttttaacaccaacactgtaacatttacgaattatttttttaaacttcagttttactgcattttcacaacatatcagacttcaccaaatatatgccttactattgtattatagtactgctttactgtgtatctcaataaagcacgcagttatgttac

SEQ ID NO: 535 - DNA, 2704 bp, Homo sapiens
gatggctgcgcggtgctccacacgctggttgctggtggttgtggggaccccgcggctgccggctatatcgggtagaggggcccggccgcccagggagggcgtggtgggggcatggctgagccgcaagctgagcgtccccgcctttgcgtcttccctgacctcttgcggcccccgagcgctgctgacattgagacctggtgtcagcctcacaggaacaaaacattaccctttcatttgtactgcctccttccacacgagtgcccctttggccaaagaagattattatcagatattaggagtgcctcgaaatgccagccagaaagagatcaagaaagcctattatcagcttgccaagaagtatcaccctgacacaaataaggatgatcccaaagccaaggagaagttctcccagctggcagaagcctatgaggttttgagtgatgaggtgaagaggaagcagtacgatgcctacggctctgcaggcttcgatcctggggccagcggctcccagcatagctactggaagggaggccccactgtggaccccgaggagctgttcaggaagatctttggcgagttctcatcctcttcatttggagatttccagaccgtgtttgatcagcctcaggaatacttcatggagttgacattcaatcaagctgcaaagggggtcaacaaggagttcaccgtgaacatcatggacacgtgtgagcgctgcaacggcaaggggaacgagcccggcaccaaggtgcagcattgccactactgtggcggctccggcatggaaaccatcaacacaggcccttttgtgatgcgttccacgtgtaggagatgtggtggccgcggctccatcatcatatcgccctgtgtggtctgcaggggagcaggacaagccaagcagaaaaagcgagtgatgatccctgtgcctgcaggagtcgaggatggccagaccgtgaggatgcctgtgggaaaaagggaaattttcattacgttcagggtgcagaaaagccctgtgttccggagggacggcgcagacatccactccgacctctttatttctatagctcaggctcttcttgggggaacagccagagcccagggcctgtacgagacgatcaacgtgacgatcccccctgggactcagacagaccagaagattcggatgggtgggaaaggcatcccccggattaacagctacggctacggagaccactacatccacatcaagatacgagttccaaagaggctaacgagccggcagcagagcctgatcctgagctacgccgaggacgagacagatgtggaggggacggtgaacggcgtcaccctcaccagctctggtggcagcaccatggatagctccgcaggaagcaaggctaggcgtgaggctggggaggacgaggagggattcctttccaaacttaagaaaatgtttacctcatgatatcccagccgaggaaaaagatccactggaaactaggccgggaagcagcagcccctccaagggccagggcacctgggagacgggaggattccagaacagcagcactgagctcccacccgcagagcctctggacggccttggcaacagcaaaatcatgggacaacacctctctccacggaaaggtcacagtggacagcccgggcagtaggatgcagccccagaggctggtggcagtttcctgtccattggtaggtgacggcccctggctcaggcagagggagatggttagactcttgcagggctaaaactctaatttggaattgaatattgtggatatcttagttaaaggccatgcttacagcttagaaatgaagccttaagctgcatcaagttacgaagtgattaatttccttctcagcaaacctccgggaggttccagaatgagttcttcctgacaggttgtcttcactgggagcgtggggcccccaggccccaccagcaccgtcctcccctaatgaggggccctgccgaggcatcagctgctctgctcagttagtttttattcccggggtaccaagcagctgcacagtcggtgcctgggaggcacgtagaggcccagagagtccctgggggttctgctctgaccgtgtgggtggtgatccttgtcaggatgtacagtccttgctcccaccccatccaggatggccgcctgtccctgactattgagtcctgttgttgtaagccaggcatggagggctcctgcccttctgctgagccacagcccattgcagcactgtgctggccagacttcagctgccttgggaactgaagccctgccactgttgctagtcaggggcttggttctcccacttacactgttgacatctattttctgaagtgtgtttaaattattcagtgctaatcattgttttttcctttgtaaatgttgattcagaaaaggaaagcacaggctaagcagttgaaggttccccaccattcagtgagagcagaacccccattccccagcctctgctggtagcatgtcgcagtttccatgtgtttcaggatcttcgggctgtcgttagacaggttaatgaagaacacttctcaacagtttcctttttgttttcctttataattcactaaaataaagcatctattagtgtctgatttaggaatgtaaaatgattctgtattaatgtaaataagattatctattgcaaaaagatatttcaaacctaaaaaaaaaaaaaaaaaaaa

SEQ ID NO: 536 - DNA, 2494 bp, Homo sapiens
gagaaaggagagaaaggaaagcgcgaggagccgccgccaccaccagcgcagcagtcctggagctgtgaggagattcgggccgtcaccctgcctcccctgcgtcccgccaccggccgcttctgtcctcggacccattccaacaatctcgtaaaacatggtggattactatgaagttctaggcgtgcagagacatgcctcacccgaggatattaaaaaggcatatcggaaactggcactgaagtggcatccagataaaaatcctgagaataaagaagaagcagagagaaaattcaagcaagtagcggaggcatatgaagtgctgtcggatgctaagaaacgggacatctatgacaaatatggcaaagaaggattaaatggtggaggaggaggtggaagtcattttgacagtccatttgaatttggcttcacattccgtaacccagatgatgtcttcagggaattttttggtggaagggacccattttcatttgacttctttgaagacccttttgaggacttctttgggaatcgaaggggtccccgaggaagcagaagccgagggacggggtcgtttttctctgcgttcagtggatttccgtcttttggaagtggattttcttcttttgatacaggatttacttcatttgggtcactaggtcacgggggcctcacttcattctcttccacgtcatttggtggtagtggcatgggcaacttcaaatcgatatcaacttcaactaaaatggttaatggcagaaaaatcactacaaagagaattgtcgagaacggtcaagaaagagtagaagttgaagaagatggccagttaaagtccttaacaataaatggtgtggccgacgacgatgccctcgctgaggagcgcatgcggagaggccagaacgccctgccagcccagcctgccggcctccgcccgccgaagccgccccggcctgcctcgctgctgagacacgcgcctcactgtctctctgaggaggagggcgagcaggaccgacctcgggcacccgggccctgggaccccctcgcgtccgcagcaggattgaaagaaggtggcaagaggaagaagcagaagcagagagaggagtcgaagaagaagaagtcgaccaaaggcaatcactagaccggacttgaggcacgcggtgcacccccagacgctggcgctccaccgtgctcggcatgcggtcgtgcacacgcgctaggtagcagcgtcggtcaggactgtctcgaggccacactcgctcggcaggattatgcgatcacggatcagtcagagcagggtcaggagacggggctgacggcacgggtggcggggacagacgtttgggacttggccgcgactctctgcttctctccagctctcaatctgctgcattttcctctagtgcttccggatcctcttcattcttttcggctactcaaccactccgcatgctgctggaatatttctggctttagaagtacaggagggcgcagatggctaactgagtaacattcatgaaatgaggctttctgtggcggcgtagtgtttggaattagaaggtaattcagtagagtgtaacttagagaatattgcaagtgacacattgaatcctgcccgtcagggcaccttttcctcagagcaatccggccacacgaatagaaggctgtcgtgaatcacatcagatgtaaaatcattccttctgtttactcttttaattttcatcctttgcaggtagtgcaaattcaacttcaaatatggtgtaggttttgctagattccatatttttttcttggatttttgctaattatttttagcaaaaaatttttgctcagtggcactctccctagtgtccatgggttagggccatgctggggaaaacgggccggtatttacacacgcgcaaaacacccagagacggcacaaggaggttgaactcatgtttcagttcgcgaacattgactccttacgaaagtcacttcattctaactagatgcgcccacttccggtcattatttcgtttgcatgatgtattgcttcttcacgttttgtttttattgagcacggagtagaattccagggctgccttgacttcttccctgcatgctccctcccagtgactttccttccctttcacatgaggatctgccgttcatgttgctttctcctttgtcctcttggacttgagggcattgtgaaaagctttgctgtgatttaaaaatgccagcaattttaatctagcagtgttgaagctgggaattttttggcgcaatccatgtagcagtgacccaggcttgggagccagaaacaagtgtgacctgggattttatttaacacaactgttgccaaagagttggctttgtttatttggttttggcggggagaggagtggtatttgatgctttctgtggacaatgtaaccctaaacacatcatgtattttaaatgccacctacataaataaaacataagcatattgaatacaaaaaaaaaaaaaaaaaaa

SEQ ID NO: 537 - DNA, 2054 bp, Homo sapiens
ccatagtcttagctactcaggaggctgaggagggaggattatctgagccctggcggttgaggctataatgagccatgattgtgccactgcactccagccttggcaacacagtgtgagaccctgtctcaaaaacaataaaaacccaaaacaaaagaaccaagaaattactggacctgaggcctggcctttagctgctgccctgcccttgtgacctggtcactcgggatcccctgggcctaaacacacagcctattgtctacctcaagaaggctccccactgcttggctggcaattggggtgggctttgcaggccccacctgtcctgtccccacggcgctggtgctgcaggcccccaccactgcttgttccgagctcccccagcctcctgcagagttgcctgcacctgatggcgatgaatcaggaaggcaggcgtgtcctgggccacagagcagtcatggctgtcagccaccagggggctccatttgcacctttggatgtggctttggcctctttgtccaaagtgaccttggggcccccagacaagagacagggagactggagcccagtcccaccctcccgcacatacctggcccatccctgccctatcctggaagatgggggccaccacacgtgcaagggacacgggataggaacctttggccttgttatcagacattttaaaactaagtgcaaacgtgattatcaggtgcagtttttacagcagcaagaaacctgtgcttacagaaagaaacacgtgctagcaacccacctatgcggaaagccacacagagccattgttttctgcactctcaggtgacggctcacatttgccccagggaaggtcacagctgcctgaacttttaaaactcccagacacgcactgcctgtgcaggatccggagcccagcagcactgccaggccttgaagtgcttcttcagagacctttcttcatagactacttttttttctttaagcagcaaaaggagaaaattgtcatcaaaggatattccagattcttgacagcattctcgtcatctctgaggacatcaccatcatctcaggatgaggggcatgaagctgctgggggcgctgctggcactggcggccctactgcagggggccgtgtccctgaagatcgcagccttcaacatccagacatttggggagaccaagatgtccaatgccaccctcgtcagctacattgtgcagatcctgagccgctatgacatcgccctggtccaggaggtcagagacagccacctgactgccgtggggaagctgctggacaacctcaatcaggatgcaccagacacctatcactacgtggtcagtgagccactgggacggaacagctataaggagcgctacctgttcgtgtacaggcctgaccaggtgtctgcggtggacagctactactacgatgatggctgcgagccctgcgggaacgacaccttcaaccgagagccagccattgtcaggttcttctcccggttcacagaggtcagggagtttgccattgttcccctgcatgcggccccgggggacgcagtagccgagatcgacgctctctatgacgtctacctggatgtccaagagaaatggggcttggaggacgtcatgttgatgggcgacttcaatgcgggctgcagctatgtgagaccctcccagtggtcatccatccgcctgtggacaagccccaccttccagtggctgatccccgacagcgctgacaccacagctacacccacgcactgtgcctatgacaggatcgtggttgcagggatgctgctccgaggcgccgttgttcccgactcggctcttccctttaacttccaggctgcctatggcctgagtgaccaactggcccaagccatcagtgaccactatccagtggaggtgatgctgaagtgagcagccccctccccacaccagttgaactgcaggaagagaggacccatcctgccacaggacccagaaaaaaagcccaacacacactcgggttaagaaatacctttaaatttaggtaaataaagctcaaggaggtggggctgtca

SEQ ID NO: 538 - DNA, 747 bp, Homo sapiens
ggcgggagcagggcggggcctgagcactaggcggcggcggctggcgtggggctgcttagatgcgccacggtttcggtagcgacggtatctctagccgggcctgagctgtgctagcacctcccccaggagaccgttgcagtcggccagcccccttctccacggccttgcccactaggtaaccatgtgcgaccgaaaggccgtgatcaaaaatgcggacatgtcggaagagatgcaacaggactcggtggagtgcgctactcaggcgctggagaaatacaacatagagaaggacattgcggctcatatcaagaaggaatttgacaagaagtacaatcccacctggcattgcatcgtggggaggaacttcggtagttatgtgacacatgaaaccaaacacttcatctacttctacctgggccaagtggccattcttctgttcaaatctggttaaaagcatggactgtgccacacacccagtgatccatccaaaaacaaggactgcagcctaaattccaaataccagagactgaaattttcagccttgctaagggaacatctcgatgtttgaacctttgttgtgttttgtacagggcattctctgtactagtttgtcgtggttataaaacaattagcagaatagcctacatttgtatttattttctattccatacttctgcccacgttgttttctctcaaaatccattcctttaaaaaataaatctgatgcagatgtgtaaaaaaaaaaaa

SEQ ID NO: 539 - DNA, 702 bp, Homo sapiens
cgcagaaaggcacaggactcgctaagtgttcgctacgcggggctaccggatcggtcggaaatggcagaggtggaggagacactgaagcgactgcagagccagaagggagtgcagggaatcatcgtcgtgaacacagaaggcattcccatcaagagcaccatggacaaccccaccaccacccagtatgccagcctcatgcacagcttcatcctgaaggcacggagcaccgtgcgtgacatcgacccccagaacgatctcaccttccttcgaattcgctccaagaaaaatgaaattatggttgcaccagataaagactatttcctgattgtgattcagaatccaaccgaataagccactctcttggctccctgtgtcattccttaatttaatgccccccaagaatgttaatgtcaatcatgtcagtggactagcacatggcagtcgcttggaacccactcacaccaatccagtgaccgtgtgtgggctggcggctcttctcccccaccaacggaacccctgtgtgcaccaaccttccccagagctccggagcgccctctcctcacttccaggttttggagcaagagcttgcaggaagcccgcacccagcttccttctgaccttcagttcactttgtcgcccttggagaaagctgtttttctttaactaaaaataaccaaaatgcttaaaaaaaaaaaaaaaaaa

SEQ ID NO: 540 - DNA, 4352 bp, Homo sapiens
gagggccctctttgtggctgcagttggcaagatggcgccggtgggggtggagaagaagctgctgctaggtcccaacgggcccgcggtggcggccgccggcgacctgaccagtgaggaggaggaaggccagagcctatggtcctccattctgagcgaagtgtccacccgcgccaggtccaagctgccgtccggcaagaacatcctggtcttcggtgaagatggttctggtaaaacaaccctcatgactaaactacaaggagctgagcatggcaaaaaaggaagaggcctagaatatctctacctcagtgtccatgatgaggaccgagatgatcacacgcgctgcaacgtgtggattctggatggagacttgtaccacaaaggcctgctgaaatttgcagtttctgctgaatccttgccagagaccctcgtcatttttgttgcagacatgtctagaccttggactgtgatggaatctctgcagaaatgggctagtgttttacgtgagcacattgataaaatgaaaattccaccagaaaaaatgagggagctggaacggaagtttgtgaaagattttcaagactatatggaacctgaagaaggttgtcaaggttccccacagagaagaggccctctgacctcaggctccgatgaagaaaatgttgccctgcctctgggtgacaatgtgctgactcataacctggggatcccggtgttggtggtgtgcacaaagtgtgatgcggtgagtgtcctggagaaggagcacgattacagggatgagcatttggactttatccagtcacacctgcggaggttctgccttcagtatggagctgccttgatttacacatcagtgaaagaagagaaaaacctcgacttgttgtataagtatattgttcataaaacatacggtttccacttcaccacacctgccttagttgtggaaaaggatgccgtttttatacctgcaggctgggacaatgaaaagaaaatagctattttacatgaaaattttacaaccgtgaagccggaagatgcatatgaagactttattgtgaaacctcccgtgagaaagctggtccacgacaaagagttggcagcagaagatgagcaggtgttcctaatgaagcaacagtcactccttgccaagcaaccagccactcccacgagagcttctgaatctcctgcaagaggaccctctggctctccaaggacccagggtcggggagggccagccagtgtgcctagctcctccccaggcacgtcagtaaaaaagccggacccaaacatcaaaaataatgcagcaagtgaaggggtgttggccagcttcttcaacagtctgttgagtaaaaagacaggctctcctggaagtcctggtgctggtggggtgcagagcacagccaagaagtcaggacaaaagactgtgttgtcaaatgttcaggaagaactggatagaatgactcgaaagccagactctatggtaacaaactcttcaacagaaaatgaagcctgaacctccttaaaaagtgcatatgtcgaatgaccaaataactatgtatattgatctgctaagaccaggatttttctgatatggcacatgctatcagttttttggggcaggggagatgaactttaaaaaaaaaaaaaaaacttcattggcttgtccgagtgtgaaatgcacatttaggaaggttacatgtcagaccctttgttaaggataacccttggactctggggcatgtggctcttttgtgggaggcaagcacatctgggcttcttgtggaggggaaggtagagtgaaagaaagagggcccactttctaacagggtggagcaaatgagaccaagaaatcattggtaagatgatggttagtctgaccagtttcatgttagtaaattcacttgttcttgggaagcagattaagtagcagaaagtccaggaaagaaagaccagaaggagtaatgagacaagtgatggtggggaagctgaatgttgagggaggtggaggaaggaggagatgagcagtgtcagtaaatactgtgcattcagtagaagttgaagaatcattgttagaagcatttccaaacaaaacactaagcaaaatgggaattaggcttattttgaatgcatctttaacttacgaaagatgtactaattgtgggggtgcctgagtcaggcggagctgacccaggggtgggaacgatggcagctgcccaggacccatgtgcttggcccaggctatgtcctcgtgagaggtactggggtccacggatatgtgttgtggggcagacagtcactgtgggatgtcttcaaagtcagcagttacagaattagtttactttgaattttgttgtctaaatagctcctgctttattttttaaattaaattttttgtttttactatcacaggctggcctaactaatacaaaataggtgatgaacctctggttttaccataatgcaatgtgccacggaaagtttgggggaggtttttaatgtaattgcactctggttaattggctcgtaccaagccctgccttatgacttgtggaaagcttcaaggagttccactgatgcaaaagggtcttttcctagcttcctggtctgatcagtgctatgagatggacagataagtgtgaatgttttatacagaaaatggaaatgatacatttctcttgttaggtgttttcataaaatgtagcattttttttcttatggaaataagagtttcaggtgtctccccacctagggcaaattcatgcacattgtcatgttataccaccattctggaaatgatttctgtggatttgaaattgcacttttaattttatatatgacagcatttaaatgcaaacactaccatgaatttaatgtataaaatgttgtcaaaccaagggaaaaaaccacagttcaccatgtggagtttactttttttatatgaatgtttgttgtactgtgtctaagcataacttccctaatgtcattacttttacataccagatttgactgaccactaatgtagtactggggataacttaatatcctatgttgtgtcaagactctttgaagactttcttgaattgctttcgtaaaggtctgaacactgttaaggagaaagctgagtatcaacttgcctttctgatagaaatgtttcttgtgccagttttattgttgagatatactatttttttccttttttaattcagttttttaaaaaaacaaatgtattgtggcttccagttaccaggttgtctaggtaatgacagtaaactgactgtagaatgataattgtggtatagtgaccaatagatgccaaacagcttgtggcctcactaaaggtggggtcgcttagtccccgggagtaaaatgagtgacctcagaaacaagaattcctggaaaggcacatgccgaagaggaatatggtataattttaaattttaatgcaaaattttaatttgtctttattttttatcatttgaactgataagcactttttgtgtcaatataaaatatactaaaactgatgaaatgctaagacatgtcttgtgaaggaaggtttcttggagaccacttttatttactcatgagaagtggaagctcctagtatcagaagaagctgatacatagtgtcatgtgctcagtggttgccaaagtctaccaactttggggagctgcagggttctttttgggaggtgggaggaagggagatgagttttgttattttggggttttcaagcattggaaccaaaggccaaataataaacagcctttagtttttaaagtaaaattcattttatttgcagagtacacttgtatggtagactgttaaagacaattttatgactatttatgcacattataatggttacatctgctttttgtctttaaaataaaaaaaaaaatcagagaaaagcccacctttgaatacgtggctgaagataacagccaagaattggtctttcctaaaaatgcaacagataatgctgctagattgttattttgtttgcacttttttttgattggcattttaaaatcggtatttaaactgaagacattgtcatgttttattaatttaacaaagttgaaagtgactgctctgtacatcatgaccttaacaatgttaatgctgtaagtgaaagttcactgtcgtctgtatactaaatttattggtgtttctaacttaaaagtaagactgcagattatcccccaccagccttagtccaggggtgtggctctgtccgggtgcagtatgcagtcatgtggaaccttgctttctagtcctgggaaaaaaagatgtctctaattactggcttcaataaacacgaatccagactgcttaaaaaaaaaaaaaaaaa

SEQ ID NO: 541 - DNA, 6050 bp, Homo sapiens
ggcttccccacgggaggacgcgaggccccggcccagccatggccccctggcgcaaagctgacaaggagcggcacggcgtggccatatacaacttccaaggcagcggagccccccagctctccctgcagatcggcgatgtggtgcgaatacaggagacgtgtggagactggtataggggatacctcataaagcacaaaatgttacagggcatttttcctaagtcatttatccacatcaaggaagtgacagttgagaaaagaagaaatactgagaacatcattcctgcagaaattcctctggcacaagaagtgacaacgacactttgggaatggggaagcatctggaaacaactctatgtggccagcaaaaaggagcgttttctccaggtgcagtccatgatgtacgatctgatggagtggaggtcccagcttctctcaggaaccttacccaaggatgagctgaaggaactgaagcagaaagtcacgtccaaaattgactatggcaacaaaatccttgagcttgatttgattgtcagagatgaagacggaaatatcttggaccctgataataccagtgtcatcagcttgttccatgcacatgaggaagcaactgataaaatcacagagcgtatcaaagaagaaatgtcaaaagaccagccagattatgcaatgtattcccggatctcctcatcccccacccatagcctctatgtgtttgtgagaaactttgtgtgcagaattggggaagatgctgagctcttcatgtctctctacgaccccaacaagcaaacggtcataagtgagaactacctagtgcgatggggcagccggggcttccctaaggagattgagatgctcaacaatctgaaggtggtcttcacggatcttggaaacaaagacctcaacagggataaaatttacttgatttgtcaaatagtccgggtcggcaagatggatcttaaggatactggtgcaaagaagtgcacgcagggactgaggaggccctttggggtggcagttatggatataacagacatcatcaaggggaaagcagagagtgatgaagaaaagcagcacttcattccttttcacccggttacagctgagaatgacttcctacacagcctgctgggcaaagtcatagcctccaagggggacagtggagggcaaggcctctgggtgaccatgaagatgctggtgggtgacatcattcagattcgcaaggactatccacacctggtggacaggaccaccgtggtggccaggaagctgggattcccagagatcatcatgccaggggatgtcaggaacgacatctacattactctcttacaaggtgactttgacaagtacaacaagaccacacagaggaatgtggaagtcatcatgtgtgtgtgcgcggaggatggcaaaacgctgcctaatgcaatttgcgtgggagcaggggacaagcccatgaatgagtatcgctccgttgtgtactatcaagtcaaacagccacgctggatggaaacagtcaaggtggctgtccctattgaagacatgcagaggatccatctgcgattcatgtttcgacatcggtcatctctggaatctaaagataaaggagaaaagaactttgccatgtcctatgtgaagctgatgaaagaagatgggactactctacacgatggattccatgacttagttgtcctcaagggggacagcaagaagatggaggatgccagcgcatacctgacccttccttcttatcgacaccatgtggaaaacaagggggccacgctgagcaggagctccagcagtgttggggggctttctgtcagctcccgggatgtgttctccatttccaccctggtgtgctccacaaagctcactcagaatgtgggcttgctgggtttgctgaagtggcgtatgaagcctcaactgctacaggagaatttagaaaagttgaagattgtggatggagaggaagtggtgaagtttctccaggatactctggatgccctcttcaacatcatgatggagcattctcaaagtgatgaatatgacatcctcgtctttgatgccttgatttacataataggactcattgcagaccggaaatttcagcatttcaacaccgttctggaggcttacatccaacagcatttcagtgcgaccttggcttacaagaaattgatgacagtgctgaagacttacttggatacctccagcagaggggagcaatgtgagccaatcctaagaacgctgaaggctttggaatatgtgttcaagttcattgttcggtcgaggacattattttcacagctttatgaaggcaaagaacagatggagtttgaagaatccatgagacggctctttgaatccatcaacaatctgatgaaaagtcaatacaaaactaccatccttttgcaggtggcggctttgaaatacatcccatctgtcctgcatgatgtagaaatggtctttgatgcgaagttactcagccaactcctgtatgagttctacacctgcatccctcctgtgaaactccagaagcagaaagtacagtctatgaatgagatagtccagagcaacctctttaaaaagcaagaatgccgggacattctgcttcctgtcatcaccaaagagctgaaggagctgctggagcagaaggatgacatgcaacaccaggtcctggagaggaagtactgcgttgaattgctcaacagcatcttggaagtccttagctaccaggatgcggccttcacctaccaccatatccaagagatcatggtccagctgctgcggacagtgaaccggacagtcatcaccatgggccgggatcacattctgattagtcactttgtggcatgtatgacagccatcttaaaccagatgggtgaccagcactactccttctacattgagaccttccagaccagctctgaacttgtggacttcttgatggagaccttcatcatgttcaaggacctcattggaaagaacgtgtaccctggagactggatggccatgagcatggttcaaaacagggtcttcctgagagctatcaacaagtttgcagaaaccatgaaccagaagttcctagaacacacgaactttgagttccagctgtggaacaactattttcatctggcagtggcttttatcacccaggattctctgcagctggagcagttctcacacgccaaatacaacaaaatcctgaataagtatggggacatgagacggctaattggcttctccatccgtgatatgtggtacaagcttggtcagaacaaaatctgcttcatcccaggcatggtaggacctatattagagatgacacttatccctgaggctgagctccggaaagccaccataccaatcttcttcgacatgatgctgtgtgaatatcaaagaagtggggatttcaaaaagtttgaaaacgaaatcatcctgaagctggaccacgaggtagaagggggccgaggcgacgagcagtacatgcagctgctggagtcaatcctgatggaatgtgctgcagagcacccaaccattgccaagtcggtggagaacttcgtgaacctggtcaaaggcctcctggagaagctgctggattaccggggtgtgatgacagatgagagcaaagacaaccgcatgagctgcactgtgaacctgctgaatttctacaaagataacaacagggaggagatgtacataaggtacctgtacaaactccgcgatcttcacctggactgtgacaattacacagaggctgcctacacgctccttctccacacctggcttctcaagtggtcggatgagcagtgtgcatcacaggtcatgcagacaggccagcagcacccccagacacaccggcagctcaaggagacgctctacgagaccatcataggctactttgacaaaggaaagatgtgggaagaggccataagtctgtgcaaggagctggcggaacagtacgagatggagatctttgactatgagctgctcagccagaacctgatccagcaggcaaaattctatgaaagcatcatgaaaatcctcaggcccaaaccagactactttgctgttggatactacggccagggattcccctccttcctgcggaacaaagtgttcatctaccgcgggaaggaatatgagcgaagagaagatttccagatgcagctgatgacccagttccccaatgcagagaagatgaacaccacctctgccccgggagatgatgtgaagaatgccccaggccagtatatccagtgcttcactgtccagcctgtcttggatgaacatcccaggttcaagaataagccagtgcctgaccagattataaacttctacaaatccaactacgtgcaaaggttccactactcccggcccgtgcgcagggggaccgtagacccagagaatgagtttgcttccatgtggattgagagaacctccttcgtgactgcatacaagctgccggggatcctgcgctggtttgaggtggtgcacatgtcgcagaccacaattagtcctctggagaatgccatagaaaccatgtccacggccaatgagaagatcctgatgatgataaaccagtaccagagtgatgagaccctccccatcaacccactctccatgctcctgaacgggattgtggaccctgctgtcatgggaggcttcgccaagtatgagaaggccttcttcactgaagagtatgtcagggaccaccctgaggaccaggacaagctgacccacctcaaggacctgattgcatggcagatccccttcttgggagctgggattaagatccatgagaaaagggtgtcagataacttgcgacccttccatgaccggatggaggaatgtttcaagaacctgaaaatgaaggtggagaaggagtacggtgtccgagagatgcctgactttgacgacaggagagtgggccgccccaggtctatgctgcgctcatacagacagatgtccatcatctctctggcttccatgaattctgactgcagcacccccagcaagcctacctcagagagctttgacctggaattagcatcacccaagacgccgagagtggagcaggaggaaccgatctccccggggagcaccctgcctgaggtcaagctgcggaggtccaagaagaggacaaagagaagcagcgtagtttttgcggatgagaaagcagctgcagagtcggacctgaagcggctttccaggaagcatgagttcatgagtgacaccaacctctcggagcatgcggccatccccctcaaggcgtctgtcctctctcaaatgagctttgccagccagtccatgcctaccatcccagccctggcgctctcagtggcaggcatccctgggttggatgaggccaacacatctccccgcctcagccagaccttcctccaactctcagatggtgacaagaagacactcacacggaagaaggtcaatcagttcttcaagacaatgctggccagcaaatcggctgaagaaggcaaacagatcccagactcgctgtccacggacctgtgagctgctgctgactagggctgcatgggagagccagggaggggagtttctggaagaggaaagccatgcgtggaacatcgaagcctcagagagtgggagactgtccccatcagttgtccttacttagaggagacagagaggccaatcaggtcccagagctggagtgctaacaagcccagcatcccctggggctgtgatcatggtggatgaggaagcctcaacgtagattcctgaactcaaggtaccagcaagaatgccttctcccagtgtgctctccccaacatcctaggcacagctttcataacccagtttcttaggtgtaagaaactgcttttatctcatttattaagtctcagaacttaacagaaaaggaagccttttaaatattctttttaattttattttagattaacagttttgtactttacatttttttatacaaccaaccagtttcttttctagccaatcatctctgaagagttgctgtttcttactgacaataaaaaatgttctcttggttcg

SEQ ID NO: 542 - DNA, 2774 bp, Homo sapiens
taggggtactatgttctcaaaggggcacaagaccagtctaccttctaaattgccttgtcaggaaagcctgggcaaaagtcactcttacggagcccagaacacagaccttgattttaaatgcaccacaagggactctgccaggcctgaagtttactgtaatgaacctccctggacagtgcagggtcagatcgggtgtcagcagccggggatggctaccaggagcctcagcctcttcctgtctttcagcttctacaaatccaactacgtgcaaaggttccactactcccggcccgtgcgcagggggaccgtagacccagagaatgagtttgctgtgagtatcttccctacccttgatcattccctggagccacctggaggaaccagagcatgcatcggccagcctcagaatgggaaggaacttgatagaaagccagagaaaataaagccaacctccatggataccatgacgtccgttccccaatctcttccattagggcctgtgtccttatttcttgagcctttttccccttaatacagaacccaggcctcatgtcagaggcactttttcaaccacagggcattcaggcattgccagcacgtagaaaccctcaggctaagaaggggtgttgataaaatcaaaccttccagcaaacaccagtaagaagccacagcaatgtagtcatcactgtcccctgagtgctagtctcctctgtgtgtgtccagctaggattcaaacaagactggattaaggaggtgtctccaagtctcagctctttggcctggacagtaattcttaatatttttggagccactgcctctttgagagtctaatgaacactgggaacccttccccgagaaaacaaatggacacattcaatattgcctaaaaattcagactgctaataaacccaggttagtacttacttggcctaagtccagggagagcttacacttaatgttgggaaagaattcttaagggtaaggtgagagcgtgtttctgggtcttgcaatatttattctgctttcgggtagatgggaggcccggggacctggctgggtttctgccaagcttctccgatacccaggtttcataaatgtgtttgttgctttcctgcccttgccacccctctgcccacggacagtccatgtggattgagagaacctccttcgtgactgcatacaagctgccggggatcctgcgctggtttgaggtggtgcacatgtcgcagaccacaattagtcctctggagaatgccatagaaaccatgtccacggccaatgagaaaatcctgatgatgataaaccagtaccagagtgatgagaccctccccatcaacccactctccatgctcctgaacgggattgtggaccctgctgtcatgggaggcttcgccaagtatgagaaggccttcttcactgaagagtatgtcagggaccaccctgaggaccaggacaagctgacccacctcaaggacctgattgcatggcagatccccttcttgggagctgggattaagatccatgagaaaagggtgtcagataacttgcgacccttccatgaccggatggaggaatgtttcaagaacctgaaaatgaaggtggagaaggagtacggtgtccgagagatgcctgactttgacgacaggagagtgggccgtcccaggtctatgctgcgctcatacagacagatgtccatcatctctctggcttccatgaattctgactgcagcacccccagcaagcctacctcagagagctttgacctggaattagcatcacccaagacgccgagagtggagcaggaggaaccgatctccccggggagcaccctgcctgaggtcaagctgcggaggtccaagaagaggacaaagagaagcagcgtagtttttgcggatgagaaagcagctgcagagtcggacctgaagcggctttccaggaagcatgagttcatgagtgacaccaacctctcggagcatgcggccatccccctcaaggcgtctgtcctctctcaaatgagctttgccagccagtccatgcctaccatcccagccctggcgctctcagtggcaggcatccctgggttggatgaggccaacacatctccctgcctcagccagaccttcctccaactctcagatggtgacaagaagacactcacacggaagaaggtcaatcagttcttcaagacaatgctggccagcaaatcggctgaagaaggcaaacagatcccagactcgctgtccacggacctgtgagctgctgctgactagggctgcatgggagagccagggaggggagtttctggaagaggaaagccatgcgtggaacatcgaagcctcagagagtgggagactgtccccatcagttgtccttacttagaggagacagagaggccaatcaggtccctgagcttgaatgctaacaagcccagcatcccctggggctgtgatcatggtggatgaggaagcctcaacgtagattcctgaactcaaggtaccagcaagaatgccttctcccagtgtgctctccccaacatcctaggcacagctttcataacccagtttcttaggtgtaagaaactgtttttatctcatttattaagtctcagaacttaacagaaaaggaagccttttaaatattctttttaattttattttagattaacagttttgtactttacatttttttatacaaccaaccagtttcttttctagccaatcatctctgaagagttgctgtttcttactgacaataaaaaatgttctcttggttcg

SEQ ID NO: 543 - DNA, 7063 bp, Homo sapiens
agccgccgccgccgtcgccgtcgccgcagcagccatggccgagcgccgcgccttcgcccagaagatcagcagaacggtggcagccgaagttaggaagcagatctccggacaatatagtggttctccccaactgctcaaaaaccttaatattgttggcaatatatcccatcacaccacagtgccccttaccgaagcagtagatccagtggatttggaagattacctcattactcatcctttggctgtggattctgggcctttacgggatttgattgaatttcctccagatgatattgaagttgtttatagtcctcgggactgcagaactcttgtttcagctgtacctgaagaaagtgaaatggatccacatgttagagactgtataagaagttatacagaagactgggcaattgtcatcagaaaatatcataaattgggaacaggatttaatcccaatacattagataaacagaaagaaaggcaaaaaggtttgccaaaacaagtttttgaatctgatgaagctccagatggcaacagctaccaggatgatcaagatgaccttaaaagacgttcaatgtcaatagatgataccccaaggggtagctgggcctgtagtatctttgacttgaaaaattcacttcctgatgctttgcttcccaatttacttgatcgaactccaaatgaagaaatagaccgtcagaatgatgaccaaaggaaatcaaaccgtcacaaagaactttttgctttgcatccatcaccagatgaggaagaaccaatagaacggcttagtgttcctgatatacccaaagaacattttggtcaaagacttcttgtaaaatgcttatcactcaagtttgaaattgaaattgaacccatttttgcaagtttggctttatatgatgtcaaggaaaagaaaaagatttcagaaaacttttattttgaccttaattctgagcagatgaaagggttgttacgtccacatgtaccacctgctgccattactaccctggcaagatcagcaattttttctatcacttatccttcccaagatgtttttcttgtaataaagctagaaaaagtcctacagcaaggagacattggagagtgtgcagaaccatatatgattttcaaagaagcagatgccaccaagaataaagaaaaactggagaaactgaagagtcaagcagatcagttttgccaaagacttgggaaatatcgcatgccttttgcttggactgcaatccatttaatgaatattgttagcagtgctgggagtttggaaagagattctacagaagtagaaatcagtactggagaacgaaaagggtcttggtcagagaggaggaattctagtattgttggcagacgatcacttgaaaggacaacaagtggagatgatgcttgtaacttgacgagctttcgaccagctactctcacagtgacaaatttttttaagcaggaaggagaccgcttaagtgatgaagatctctacaaattccttgctgatatgagaaggccatcttctgtcttacggcgactaagacctattacagctcagctcaagatagacatttctcccgcacctgaaaatccccattattgcctaactccggagctgcttcaagtgaagctttaccctgacagtagagttagacctaccagagaaatcttagagtttcccgcaagggatgtttatgttccaaacactacttacagaaatcttctctacatataccctcagagtcttaattttgccaatcgtcaaggttctgctagaaatataacagtgaaagtccagtttatgtatggagaggatccaagcaatgccatgccggtaatctttggtaaatctagctgttcagaattttcaaaggaagcctatacagccgtagtatatcataacaggtctcctgattttcatgaagaaatcaaggttaagcttcctgctactttaactgaccatcatcacttgctttttactttttatcatgttagttgtcaacaaaaacaaaatactcctcttgaaacaccagttggatatacatggataccaatgcttcagaatggacggttgaagactggccagttttgcttgccagtctcattggaaaaaccaccacaggcttattctgtactgtctcctgaggttcctctacctggcatgaaatgggtagataatcacaaaggtgtttttaatgttgaagttgttgctgtttcgtctatccatacacaagatccttatcttgacaaattttttgctctggtcaatgctctggatgaacacctgttcccagtccgaattggggacatgcgaatcatggaaaataacttagaaaatgaattgaagagcagtatttcagcactgaattcatcccagctggaaccagtggtccgatttcttcatcttctgctagataaactgatacttttagttattagacctcctgtcattgctggccaaatagttaacctaggtcaagcatcttttgaagccatggcatcaattataaatcgacttcacaaaaacttggaaggaaatcatgaccagcatggcagaaacagccttcttgcatcatatattcattatgttttccgcctaccaaatacttaccctaattcatcatcaccaggtcctgggggtttgggaggatcagtgcattatgccacaatggctagatctgcggtgagacctgcaagccttaatttaaatcgttctcgaagccttagtaatagcaatccagatatatctgggactcccacgtcaccagatgatgaagttcgatcaatcatcgggagtaaggctatggatcgaagttgtaatcgtatgtcttcgcacacagagacgtcaagtttcttacaaacattaacgggacgcttaccaactaaaaagctttttcacgaggagctggctttgcagtgggttgtttgcagtggcagcgttcgggaatcagctttgcaacaagcctggttcttttttgaattaatggtaaagagcatggtgcaccatttatactttaatgataaacttgaggctccaaggaaaagtcgttttccagaacgtttcatggatgacattgcagctcttgtcagcacgattgctagtgatatagtttcacgatttcagaaggacacagaaatggttgagagactcaatacaagccttgcattctttctcaatgatctgttgtctgttatggacagaggatttgtttttagccttataaagtcctgctataaacaggtgtcttcaaagctttactcattaccgaatcccagtgttctggtgtccttgaggctggattttctacgaatcatctgcagtcatgagcactatgttacattaaacttaccctgcagcttacttactccacctgcatctccatcaccttctgtttcttctgcaacatctcagagttctggattttctacgaatgtacaagaccaaaagattgcaaatatgtttgaattatccgtgcctttccgccaacagcattatttggcaggacttgtgttaacagagctggctgtcattttagaccctgatgctgaaggactgtttggattgcataagaaagtcatcaatatggtacacaatttactctccagtcacgactcagacccgcggtactctgaccctcagataaaggctcgagtggccatgttgtatctacctctgattggtattatcatggaaactgtacctcagctgtatgattttacagaaactcacaatcaacgaggaagaccaatttgtatagccactgatgattatgaaagtgagagcggaagtatgataagccagaccgttgccatggcaatcgcagggacatcggtccctcaactaacaaggcctggcagtttcctcctcacgtcaacgagtggcaggcaacacactaccttttcagcagaatcaagtcgaagccttttgatctgtctactttgggttctcaaaaatgcagatgaaacagttctacagaagtggtttacagatctctcagtcttgcagctaaaccggctattagatctgctttatctctgtgtgtcttgctttgagtataaagggaaaaaagtgtttgaacgaatgaatagcttgacctttaagaaatcaaaagacatgagagcaaagcttgaagaagctattcttgggagcataggtgccaggcaagaaatggtacggcgaagccgaggacagctcggtacgtacacaatagcttctcctcctgagagaagcccatctggaagtgcctttggaagtcaagaaaatttgaggtggaggaaagatatgactcactggcgtcaaaacacagagaagcttgacaaatcaagagcagagattgaacacgaagcactgattgatggaaacctggctacagaagcaaacctaatcattttagatacattagagattgttgttcagaccgtttctgtaacggaatccaaagagagcattcttggtggagtgctaaaagtgctactacacagcatggcctgtaaccaaagtgcagtttatctacaacactgttttgctacacagagagccttggtttcaaagtttcctgaactcttatttgaagaagagacagagcagtgtgctgatttatgcctcaggcttctccgacactgtagcagtagcatcggtacaatacggtcacacgccagtgcctccctttacctactaatgaggcaaaactttgagattgggaataactttgccagggttaaaatgcaggtaacaatgtcactatcctccttggtgggcacatctcagaattttaatgaagaattcttaagacgttctctaaagactatattgacatatgctgaagaagatctggaattgagggaaacaacatttcctgatcaggtccaggatctggttttcaatctccatatgattctttctgatactgtgaaaatgaaggaacaccaggaggatcctgaaatgttgattgatctaatgtacagaattgccaagggttaccagacctctccagatctgcgattgacctggttgcagaacatggcaggcaagcactcagaacgaagcaatcatgctgaagctgcacagtgtctagtccactcagcagcacttgttgctgaatatttgagcatgctggaggaccggaaatatcttcctgtgggatgtgtaacatttcagaatatttcatctaatgttttagaagaatctgcggtctcagatgatgtggtatctccagatgaagaaggtatctgctctggaaaatactttactgagtcaggacttgtgggattactggaacaagcagctgcttccttctctatggctggcatgtatgaagcagttaatgaagtttacaaagtacttattcctattcatgaagctaatcgggatgcaaagaaactatccacaattcatggtaaacttcaagaagcattcagcaaaattgttcatcagagtactggctgggagcggatgtttggcacctattttcgtgttggtttttatggaaccaagttcggggatttggatgaacaagaatttgtttacaaggagcctgcaataaccaaacttgcagagatatctcacagattggagggattttacggagaaagatttggagaggatgtggttgaagtaatcaaagactctaatcctgtagacaagtgtaaattagatcctaacaaggcatatattcagattacctatgtggagccatactttgacacatatgagatgaaggacagaatcacctatttcgacaaaaattacaatcttcgtcgattcatgtactgtacaccctttactttagatggccgtgcccatggggaacttcatgaacaattcaaaaggaagaccattctgactacgtctcatgcctttccttatattaaaacaagggtcaatgtcactcataaagaagagatcatcttaacaccaattgaagttgctattgaggacatgcagaaaaagacacaggagttggcatttgcaacacatcaggatcccgcagaccccaaaatgcttcagatggtactccagggatctgtaggcaccacagtgaatcaggggcctttggaagttgcccaggtttttctgtctgaaatacctagtgacccaaagctcttcagacatcataataaactgcgactctgctttaaagattttactaaaaggtgtgaagatgccttaagaaaaaataagagcttaattgggccggatcaaaaggagtatcaaagggaactggagagaaactatcatcgccttaaagaggccctacagccactgatcaacagaaagatccctcagttatacaaggcagtattgcctgtcacctgccacagagattccttcagtcgaatgagccttcgcaaaatggatctctaaactgaatgcacttgttttattcatctgcaaagagccatgtattcaacatcgagtgtgaaaagatctattggaaaacaacatggaatggaattctggaaattattattcattgaagaatgcagtggccaagaaaatatcaaatgtagattgttaacgcttgagaatcatggctatggtttctaatgttctggtaacaagctgttatcttttaagacattttaatgactcaaaggtacactatacatttaccattatttataccatagctaaggttaaaaatttattcactttaagttcgtattttttaatttatattaccatttatagattcattttggaaccattttaaatgtagtaatgcttattttaaaggtactattaaatatgtgaatgtttacactaattttaccgagtgggacttcaaaatttttattattgacaatggcagagaacaattaaagggttgactcaagaactagttccaaacctagcagaataaaaatcatagatagccccaaattaatgagtttggtaactgtttcaaagttattttccatttacatacccaaaacaggaatttagaattgcagaactttacttagtaaaacctttgtgtaaaataatttaaatacggggataactaataccagtgacaacaccttaacttgattaaatcttattacaccaaaaaaaaaaaaa

SEQ ID NO: 544 - DNA, 7522 bp, Homo sapiens
gcggccgggccgggccgcgggagcaggcggaggcggaggcggcgggggcaggaggatgtcgcagccgccgctgctccccgcctcggcggagactcggaagttcacccgggcgctgagtaagccgggcacggcggccgagctgcggcagagcgtgtctgaggtggtgcgcggctccgtgctcctggcaaagccaaagctaattgagccactcgactatgaaaatgtcatcgtccagaagaagactcagatcctgaacgactgtttacgggagatgctgctcttcccttacgatgactttcagacggccatcctgagacgacagggtcgatacatatgctcaacagtgcctgcgaaggcggaagaggaagcacagagcttgtttgttacagagtgcatcaaaacctataactctgactggcatcttgtgaactataaatatgaagattactcaggagagtttcgacagcttccgaacaaagtggtcaagttggataaacttccagttcatgtctatgaagttgacgaggaggtcgacaaagatgaggatgctgcctcccttggttcccagaagggtgggatcaccaagcatggctggctgtacaaaggcaacatgaacagtgccatcagcgtgaccatgaggtcatttaagagacgatttttccacctgattcaacttggcgatggatcctataatttgaatttttataaagatgaaaagatctccaaagaaccaaaaggatcaatatttctggattcctgtatgggtgtcgttcagaacaacaaagtcaggcgttttgcttttgagctcaagatgcaggacaaaagtagttatctcttggcagcagacagtgaagtggaaatggaagaatggatcacaattctaaataagatcctccagctcaactttgaagctgcaatgcaagaaaagcgaaatggcgactctcacgaagatgatgaacaaagcaaattggaaggttctggttccggtttagatagctacctgccggaacttgccaagagtgcaagagaagcagaaatcaaactgaaaagtgaaagcagagtcaaacttttttatttggacccagatgcccagaagcttgacttctcatcagctgagccagaagtgaagtcatttgaagagaagtttggaaaaaggatccttgtcaagtgcaatgatttatctttcaatttgcaatgctgtgttgccgaaaatgaagaaggacccactacaaatgttgaacctttctttgttactctatccctgtttgacataaaatacaaccggaagatttctgccgatttccacgtagacctgaaccatttctcagtgaggcaaatgctcgccaccacgtccccggcgctgatgaatggcagtgggcagagcccatctgtcctcaagggcatccttcatgaagccgccatgcagtatccgaagcagggaatattttcagtcacttgtcctcatccagatatatttcttgtggccagaattgaaaaagtccttcaggggagcatcacacattgcgctgagccatatatgaaaagttcagactcttctaaggtggcccagaaggtgctgaagaatgccaagcaggcatgccaaagactaggacagtatagaatgccatttgcttgggcagcaaggacattgtttaaggatgcatctggaaatcttgacaaaaatgccagattttctgccatctacaggcaagacagcaataagctatccaatgatgacatgctcaagttacttgcagactttcggaaacctgagaagatggctaagctcccagtgattttaggcaatctagacattacaattgataatgtttcctcagacttccctaattatgttaattcatcatacattcccacaaaacaatttgaaacctgcagtaaaactcccatcacgtttgaagtggaggaatttgtgccctgcataccaaaacacactcagccttacaccatctacaccaatcacctttacgtttatcctaagtacttgaaatacgacagtcagaagtcttttgccaaggctagaaatattgcgatttgcattgaattcaaagattcagatgaggaagactctcagccccttaagtgcatttatggcagacctggtgggccagttttcacaagaagcgcctttgctgcagttttacaccatcaccaaaacccagaattttatgatgagattaaaatagagttgcccactcagctgcatgaaaagcaccacctgttgctcacattcttccatgtcagctgtgacaactcaagtaaaggaagcacgaagaagagggatgtcgttgaaacccaagttggctactcctggcttcccctcctgaaagacggaagggtggtgacaagcgagcagcacatcccggtctcggcgaaccttccttcgggctatcttggctaccaggagcttgggatgggcaggcattatggtccggaaattaaatgggtagatggaggcaagccactgctgaaaatttccactcatctggtttctacagtgtatactcaggatcagcatttacataattttttccagtactgtcagaaaaccgaatctggagcccaagccttaggaaacgaacttgtaaagtaccttaagagtctgcatgcgatggaaggccacgtgatgatcgccttcttgcccactatcctaaaccagctgttccgagtcctcaccagagccacacaggaagaagtcgcggttaacgtgactcgggtcattattcatgtggttgcccagtgccatgaggaaggattggagagccacttgaggtcatatgttaagtacgcgtataaggctgagccatatgttgcctctgaatacaagacagtgcatgaagaactgaccaaatccatgaccacgattctcaagccttctgccgatttcctcaccagcaacaaactactgaagtactcatggtttttctttgatgtactgatcaaatctatggctcagcatttgatagagaactccaaagttaagttgctgcgaaaccagagatttcctgcatcctatcatcatgcagtggaaaccgttgtaaatatgctgatgccacacatcactcagaagtttcgagataatccagaggcatctaagaacgcgaatcatagccttgctgtcttcatcaagagatgtttcaccttcatggacaggggctttgtcttcaagcagatcaacaactacattagctgttttgctcctggagacccaaagaccctctttgaatacaagtttgaatttctccgtgtagtgtgcaaccatgaacattatattccgttgaacttaccaatgccatttggaaaaggcaggattcaaagataccaagacctccagcttgactactcattaacagatgagttctgcagaaaccacttcttggtgggactgttactgagggaggtggggacagccctccaggagttccgggaggtccgtctgatcgccatcagtgtgctcaagaacctgctgataaagcattcttttgatgacagatatgcttcaaggagccatcaggcaaggatagccaccctctacctgcctctgtttggtctgctgattgaaaacgtccagcggatcaatgtgagggatgtgtcacccttccctgtgaacgcgggcatgactgtgaaggatgaatccctggctctaccagctgtgaatccgctggtgacgccgcagaagggaagcaccctggacaacagcctgcacaaggacctgctgggcgccatctccggcattgcttctccatatacaacctcaactccaaacatcaacagtgtgagaaatgctgattcgagaggatctctcataagcacagattcgggtaacagccttccagaaaggaatagtgagaagagcaattccctggataagcaccaacaaagtagcacattgggaaattccgtggttcgctgtgataaacttgaccagtctgagattaagagcctactgatgtgtttcctctacatcttaaagagcatgtctgatgatgctttgtttacatattggaacaaggcttcaacatctgaacttatggatttttttacaatatctgaagtctgcctgcaccagttccagtacatggggaagcgatacatagccagaacaggaatgatgcatgccagattgcagcagctgggcagcctggataactctctcacttttaaccacagctatggccactcggacgcagatgttctgcaccagtcattacttgaagccaacattgctactgaggtttgcctgacagctctggacacgctttctctatttacattggcgtttaagaaccagctcctggccgaccatggacataatcctctcatgaaaaaagtttttgatgtctacctgtgttttcttcaaaaacatcagtctgaaacggctttaaaaaatgtcttcactgccttaaggtccttaatttataagtttccctcaacattctatgaagggagagcggacatgtgtgcggctctgtgttacgagattctcaagtgctgtaactccaagctgagctccatcaggacggaggcctcccagctgctctacttcctgatgaggaacaactttgattacactggaaagaagtcctttgtccggacacatttgcaagtcatcatatctgtcagccagctgatagcagacgttgttggcattgggggaaccagattccagcagtccctgtccatcatcaacaactgtgccaacagtgaccggcttattaagcacaccagcttctcctctgatgtgaaggacttaaccaaaaggatacgcacggtgctaatggccaccgcccagatgaaggagcatgagaacgacccagagatgctggtggacctccagtacagcctggccaaatcctatgccagcacgcccgagctcaggaagacgtggctcgacagcatggccaggatccatgtcaaaaatggcgatctctcagaggcagcaatgtgctatgtccacgtaacagccctagtggcagaatatctcacacggaaagaagcagtccagtgggagccgccccttctcccccacagccatagcgcctgcctgaggaggagccggggaggcgtgtttagacaaggatgcaccgccttcagggtcattaccccaaacatcgacgaggaggcctccatgatggaagacgtggggatgcaggatgtccatttcaacgaggatgtgctgatggagctccttgagcagtgcgcagatggactctggaaagccgagcgctacgagctcattgccgacatctacaaacttatcatccccatttatgagaagcggagggattttgagaggctggcccatctgtatgacacgctgcaccgggcctacagcaaagtgaccgaggtcatgcactcgggccgcaggcttctggggacctacttccgggtagccttcttcgggcaggcagcgcaataccagtttacagacagtgaaacagatgtggagggattctttgaagatgaagatggaaaggagtatatttacaaggaacccaaactcacaccgctgtcggaaatttctcagagactccttaaactgtactcggataaatttggttctgaaaatgtcaaaatgatacaggattctggcaaggtcaaccctaaggatctggattctaagtatgcctacatccaggtgactcacgtcatccccttctttgacgaaaaagagttgcaagaaaggaaaacagagtttgagagatcccacaacatccgccgcttcatgtttgagatgccatttacgcagaccgggaagaggcagggcggggtggaagagcagtgcaaacggcgcaccatcctgacagccatacactgcttcccttatgtgaagaagcgcatccctgtcatgtaccagcaccacactgacctgaaccccatcgaggtggccattgacgagatgagtaagaaggtggcggagctccggcagctgtgctcctcggccgaggtggacatgatcaaactgcagctcaaactccagggcagcgtgagtgttcaggtcaatgctggcccactagcatatgcgcgagctttcttagatgatacaaacacaaagcgatatcctgacaataaagtgaagctgcttaaggaagttttcaggcaatttgtggaagcttgcggtcaagccttagcggtaaacgaacgtctgattaaagaagaccagctcgagtatcaggaagaaatgaaagccaactacagggaaatggcgaaggagctttctgaaatcatgcatgagcagctgggatgatctgccccctggaggagaagacgagcgtcttaccgaattcccttcacatcttcaacgccatcagtgggactccaacaagcacaatggttcacgggatgaccagctcgtcttcggtcgtgtgattacatctcatggcccgtgtgtggggacttgctttgtcatttgcaaactcaggatgctttccaaagccaatcactggggagaccgagcacagggaggaccaggggaaggggagagaaaggaaataaagaacaacgttatttcttaacagactttctataggagttgtaagaaggtgcacatatttttttaaatctcactggcaatattcaaagttttcattgtgtcttaacaaaggtgtggtagacactcttgagctggacttagattttattcttccttgcagagtagtgttagaatagatggcctacagaaaaaaaaggttctgggatctacatggcagggagggctgcactgacattgatgcctgggggaccttttgcctcgaggctgagctggaaaatcttgaaaatattttttttttcctgtggcacattcaggttgaatacaagaactatttttgtgactagtttttgatgacctaagggaactgaccattgtaatttttgtaccagtgaaccaggagatttagtgcttttatattcatttccttgcatttaagaaaatatgaaagcttaaggaattatgtgagcttaaaactagtcaagcagtttagaaccaaaggcctatattaataaccgcaactatgctgaaaagtacaaagtagtacagtatattgttatgtacatatcattgttaatacagtcctggcattctgtacatatatgtattacatttctacatttttaatactcacatgggcttatgcattaagtttaattgtgataaatttgtgctgttccagtatatgcaatacactttaatgttttattcttgtacataaaaatgtgcaatatggagatgtatacagtctttactatattaggtttataaacagttttaagaatttcatccttttgccaaaatggtggagtatgtaattggtaaatcataaatcctgtggtgaatggtggtgtactttaaagctgtcaccatgttatattttcttttaagacattaatttagtaattttatatttgggaaaataaaggtttttaattttatttaactggaatcactgccctgctgtaattaaacattctgtaccacatctgtattaaaaagacattgctgacc

SEQ ID NO: 545 - DNA, 4889 bp, Homo sapiens
cccgcctagcatggtgcggcggccgcgcgcgcggacatgggggagaagctggagctgagactgaagtcgcccgtgggggctgagcccgccgtctacccgtggccgctgccggtctacgataaacatcacgatgctgctcatgaaatcatcgagaccatccgatgggtctgtgaagaaatcccggatctcaagctcgctatggagaattacgttttaattgactatgacaccaaaagcttcgagagcatgcagaggctctgcgacaagtacaaccgtgccatcgacagcatccaccagctgtggaagggcaccacgcagcccatgaagctgaacacgcggccgtccactggactcctgcgccatatcctgcagcaggtctacaaccactcggtgaccgaccccgagaagctcaacaactacgagcccttctcccccgaggtgtacggggagacctccttcgacctggtggcccagatgattgatgagatcaagatgaccgacgacgacctgtttgtggacttggggagcggtgtgggccaggtcgtgctccaggttgctgctgccaccaactgcaaacatcactatggcgtcgagaaagcagacatcccggccaagtatgcggagaccatggaccgcgagttcaggaagtggatgaaatggtatggaaaaaagcatgcagaatacacattggagagaggcgatttcctctcagaagagtggagggagcgaatcgccaacacgagtgttatatttgtgaataattttgcctttggtcctgaggtggatcaccagctgaaggagcggtttgcaaacatgaaggaaggtggcagaatcgtgtcctcgaaaccctttgcacctctgaacttcagaataaacagtagaaacttgagtgacatcggcaccatcatgcgcgtggtggagctctcgcccctgaagggctcggtgtcgtggacggggaagccagtctcctactacctgcacactatcgaccgcaccatacttgaaaactatttttctagtctgaaaaacccaaaactcagggaggaacaggaggcagcccggcgccgccagcagcgcgagagcaagagcaacgcggccacgcccactaagggcccagagggcaaggtggccggccccgccgacgcccccatggactctggtgctgaggaagagaaggcgggagcagccaccgtgaagaagccgtctccctccaaagcccgcaagaagaagctaaacaagaaggggaggaagatggctggccgcaagcgcgggcgccccaagaagatgaacactgcgaaccccgagcggaagcccaagaagaaccaaactgcactggatgccctgcacgctcagaccgtgtctcagacggcggcctcctcaccccaggatgcctacagatcccctcacagcccgttctaccagctacctccgagcgtgcagcggcactcccccaacccgctgctggtggcgcccaccccgcccgcgctgcagaagcttctagagtccttcaagatccagtacctgcagttcctggcatacacaaagaccccccagtacaaggccagcctgcaggagctgctgggccaggagaaggagaagaacgcccagctcctgggtgcggctcagcagctcctcagccactgccaggcccagaaggaggagatcaggaggctgtttcagcaaaaattggatgagctgggtgtgaaggcgctgacctacaacgacctgattcaagcgcagaaggagatctccgcccataaccagcagctgcgggagcagtcggagcagctggagcaggacaaccgcgcgctccgcggccagagcttgcagctgctcaaggctcgctgcgaggagctgcagctggactgggccacgctgtcgctggagaagctgttgaaggagaagcaggccctgaagagccagatctcggagaagcagaggcactgcctggagctgcagatcagcattgtggagctagagaagagccagcggcagcaggagctcctgcagctcaagtcctgtgtgccgcctgacgacgccctgtccctgcacctgcgtgggaagggcgccctgggccgcgagctggagcctgacgccagccggctgcacctggagctggactgcaccaagttctcgctgcctcacttgagcagcatgagcccggagctctccatgaacggccaggctgctggctatgagctctgcggtgtgctgagccggccttcgtcgaagcagaacacgccccagtacctggcctcacccctggaccaggaggtggtgccctgtacccctagccacgtcggccggccgcgcctggagaagctgtctggcctagccgcacccgactacactaggctgtccccggccaagattgtgctgaggcggcacctgagccaggaccacacggtgcccggcaggccggctgccagtgagctgcattcgagagctgagcacaccaaggagaacggccttccctaccagagccccagcgtgcctggcagcatgaagctgagccctcaggacccgcggcccctgtcccctggggccttgcagcttgctggagagaagagcagtgagaagggcctgagagagcgcgcctacggcagcagcggggagctcatcaccagcctgcccatcagcatcccgctcagcaccgtgcagcccaacaagctcccggtcagcattcccctggccagcgtggtgctgcccagccgcgccgagagggcgaggagcacccccagtcccgtgctgcagccccgtgacccctcgtccacacttgaaaagcagattggtgctaatgcccacggtgctgggagcagaagccttgccctggcccccgcaggcttctcctacgctggctcggtggccatcagcggggccttggcgggcagcccggcctctctcacacctggagccgagccggccaccttggatgagtcctccagctctgggagcctttttgccaccgtggggtcccgcagctccacgccacagcaccccctgctgctggcacagccccggaactcgcttcctgcctctcccgcccaccagctctcctccagtccccggcttggtggggccgcccagggcccgttgcccgaggccagcaagggagacctgccctccgattccggcttctcagatcctgagagtgaagccaagaggaggattgtgttcaccatcaccactggtgcgggcagtgccaagcagtcgccctccagcaagcacagccccctgaccgccagcgcccgtggggactgtgtgccgagccacgggcaggacagtcgcaggcgcggccggcggaagcgagcatctgcggggacgcccagcttgagcgcaggcgtgtcccccaagcgccgagccctgccgtccgtcgctggccttttcacacagccttcggggtctcccctcaacctcaactccatggtcagtaacatcaaccagcccctggagattacagccatctcgtccccggagacctccctgaagagctcccctgtgccctaccaggaccacgaccagccccccgtgctcaagaaggagcggcctctgagccagaccaatggggcacactactccccactcacctcagacgaggagccaggctctgaggacgagcccagcagtgctcgaattgagagaaaaattgcaacaatctccttagaaagcaaatctcccccgaaaaccttggaaaatggtggtggcttggcgggaaggaagcccgcgcccgccggcgagccagtcaatagcagcaagtggaagtccaccttctcgcccatctccgacatcggcctggccaagtcggcggacagcccgctgcaggccagctccgccctcagccagaactccctgttcacgttccggcccgccctggaggagccctctgccgatgccaagctggccgctcaccccaggaaaggctttcccggctccctgtcgggggctgacggactcagcccgggcaccaaccctgccaacggctgcaccttcggcgggggcctggccgcggacctgagtttacacagcttcagtgatggtgcttctcttccccacaagggccccgaggcggccggcctgagctccccgctgagcttcccctcgcagcgcggcaaggagggctcggacgccaaccctttcctgagcaagaggcagctggacggcctggctgggctgaagggcgagggcagccgcggcaaggaggcaggggagggcggcctaccgctgtgcgggcccacggacaagaccccactgctgagcggcaaggccgccaaggcccgggaccgcgaggtcgacctcaagaatggccacaacctcttcatctctgcggcggccgtgcctcccggaagcctcctcagcggccccggcctggccccggcggcgtcctccgcaggcggcgcggcgtcctccgcccagacgcaccggtccttcctgggccccttcccgccgggaccgcagttcgcgctcggccccatgtccctgcaggccaacctcggctccgtggccggctcctccgtgctgcagtcgctgttcagctctgtgccggccgccgcaggcctggtgcacgtgtcgtccgctgccaccagactgaccaactcgcacgccatgggcagcttttccggggtggcaggcggcacagttggaggtaactaggatttctacctcaaccgcgagacctatgcaaggacggtgtggaccaactcgcgcccgcggcatggtgcccgccggcctgccgggctcccacccctggacggcagaggcaaggacggacgggagctccactgtgaatcggcggcacgcgccgcaggaggctgggactggtccagtttgtactgtcgatagttttagataaagtatttatcattttttaaaaagtaaaaaaaaaaaaaaaa

SEQ ID NO: 546 - DNA, 1047 bp, Homo sapiens
atggcctccttggaagtcagtcgtagtcctcgcaggtctcggcgggagctggaagtgcgcagtccacgacagaacaaatattcggtgcttttacctacctacaacgagcgcgagaacctgccgctcatcgtgtggctgctggtgaaaagcttctccgagagtggaatcaactatgaaattataatcatagatgatggaagcccagatggaacaagggatgttgctgaacagttggagaagatctatgggtcagacagaattcttctaagaccacgagagaaaaagttgggactaggaactgcatatattcatggaatgaaacatgccacaggaaactacatcattattatggatgctgatctctcacaccatccaaaatttattcctgaatttattaggaagcaaaaggagggtaattttgatattgtctctggaactcgctacaaaggaaatggaggtgtatatggctgggatttgaaaagaaaaataatcagccgtggggccaattttttaactcagatcttgctgagaccaggagcatctgatttaacaggaagtttcagattataccgaaaagaagttctagagaaattaatagaaaaatgtgtttctaaaggctacgtcttccagatggagatgattgttcgggcaagacagttgaattatactattggcgaggttccaatatcatttgtggatcgtgtttatggtgaatccaagttgggaggaaatgaaatagtatctttcttgaaaggattattgactctttttgctactacataaaagaaagatactcatttatagttacgttcatttcaggttaaacatgaaagaagcctggttactgatttgtataaaatgtactcttaaagtataaaatataaggtaaggtaaatttcatgcatctttttatgaagaccacctattttatatttcaaattaaataattttaaagttgctggcctaatgagcaatgttctcaattttcgttttcattttgctgtattgagacctataaataaatgtatatttttttttgcataaagt

SEQ ID NO: 547 - DNA, 6935 bp, Homo sapiens
gaagttgctcccgggcaggcaagcctgagagaggccaaatacacttaaaaacaagcagcggcgagaaaagcacctcccgcgccctgcacctcggcaggtctcgctctcggcaccctcccggcgcccgcgttctcctggccctgcccggcatcccgatggccgccgctgggccccggcgctccgtgcgcggagccgtctgcctgcatctgctgctgaccctcgtgatcttcagtcgtgctggtgaagcctgcaaaaaggtgatacttaatgtaccttctaaactagaggcagacaaaataattggcagagttaatttggaagagtgcttcaggtctgcagacctcatccggtcaagtgatcctgatttcagagttctaaatgatgggtcagtgtacacagccagggctgttgcgctgtctgataagaaaagatcatttaccatatggctttctgacaaaaggaaacagacacagaaagaggttactgtgctgctagaacatcagaagaaggtatcgaagacaagacacactagagaaactgttctcaggcgtgccaagaggagatgggcacctattccttgctctatgcaagagaattccttgggccctttcccattgtttcttcaacaagttgaatctgatgcagcacagaactatactgtcttctactcaataagtggacgtggagttgataaagaacctttaaatttgttttatatagaaagagacactggaaatctattttgcactcggcctgtggatcgtgaagaatatgatgtttttgatttgattgcttatgcgtcaactgcagatggatattcagcagatctgcccctcccactacccatcagggtagaggatgaaaatgacaaccaccctgttttcacagaagcaatttataattttgaagttttggaaagtagtagacctggtactacagtgggggtggtttgtgccacagacagagatgaaccggacacaatgcatacgcgcctgaaatacagcattttgcagcagacaccaaggtcacctgggctcttttctgtgcatcccagcacaggcgtaatcaccacagtctctcattatttggacagagaggttgtagacaagtactcattgataatgaaagtacaagacatggatggccagttttttggattgataggcacatcaacttgtatcataacagtaacagattcaaatgataatgcacccactttcagacaaaatgcttatgaagcatttgtagaggaaaatgcattcaatgtggaaatcttacgaatacctatagaagataaggatttaattaacactgccaattggagagtcaattttaccattttaaagggaaatgaaaatggacatttcaaaatcagcacagacaaagaaactaatgaaggtgttctttctgttgtaaagccactgaattatgaagaaaaccgtcaagtgaacctggaaattggagtaaacaatgaagcgccatttgctagagatattcccagagtgacagccttgaacagagccttggttacagttcatgtgagggatctggatgaggggcctgaatgcactcctgcagcccaatatgtgcggattaaagaaaacttagcagtggggtcaaagatcaacggctataaggcatatgaccccgaaaatagaaatggcaatggtttaaggtacaaaaaattgcatgatcctaaaggttggatcaccattgatgaaatttcagggtcaatcataacttccaaaatcctggatagggaggttgaaactcccaaaaatgagttgtataatattacagtcctggcaatagacaaagatgatagatcatgtactggaacacttgctgtgaacattgaagatgtaaatgataatccaccagaaatacttcaagaatatgtagtcatttgcaaaccaaaaatggggtataccgacattttagctgttgatcctgatgaacctgtccatggagctccattttatttcagtttgcccaatacttctccagaaatcagtagactgtggagcctcaccaaagttaatgatacagctgcccgtctttcatatcagaaaaatgctggatttcaagaatataccattcctattactgtaaaagacagggccggccaagctgcaacaaaattattgagagttaatctgtgtgaatgtactcatccaactcagtgtcgtgcgacttcaaggagtacaggagtaatacttggaaaatgggcaatccttgcaatattactgggtatagcactgctcttttctgtattgctaactttagtatgtggagtttttggtgcaactaaagggaaacgttttcctgaagatttagcacagcaaaacttaattatatcaaacacagaagcacctggagacgatagagtgtgctctgccaatggatttatgacccaaactaccaacaactctagccaaggtttttgtggtactatgggatcaggaatgaaaaatggagggcaggaaaccattgaaatgatgaaaggaggaaaccagaccttggaatcctgccggggggctgggcatcatcataccctggactcctgcaggggaggacacacggaggtggacaactgcagatacacttactcggagtggcacagttttactcaaccccgtctcggtgaaaaattgcatcgatgtaatcagaatgaagaccgcatgccatcccaagattatgtcctcacttataactatgagggaagaggatctccagctggttctgtgggctgctgcagtgaaaagcaggaagaagatggccttgactttttaaataatttggaacccaaatttattacattagcagaagcatgcacaaagagataatgtcacagtgctacaattaggtctttgtcagacattctggaggtttccaaaaataatattgtaaagttcaatttcaacatgtatgtatatgatgatttttttctcaattttgaattatgctactcaccaatttatatttttaaagcaagttgttgcttatcttttccaaaaagtgaaaaatgttaaaacagacaactggtaaatctcaaactccagcactggaattaaggtctctaaagcatctgctcttttttttttttacggatattttagtaataaatatgctggataaatattagtccaacaatagctaagttatgctaatatcacattattatgtattcactttaagtgatagtttaaaaaataaacaagaaatattgagtatcactatgtgaagaaagttttggaaaagaaacaatgaagactgaattaaattaaaaatgttgcagctcataaagaattgggactcacccctactgcactaccaaattcatttgactttggaggcaaaatgtgttgaagtgccctatgaagtagcaattttctataggaatatagttggaaataaatgtgtgtgtgtatattattattaatcaatgcaatatttaaaatgaaatgagaacaaagaggaaaatggtaaaaacttgaaatgaggctggggtatagtttgtcctacaatagaaaaaagagagagcttcctaggcctgggctcttaaatgctgcattataactgagtctatgaggaaatagttcctgtccaatttgtgtaatttgtttaaaattgtaaataaattaaacttttctggtttctgtgggaaggaaatagggaatccaatggaacagtagctttgctttgcagtctgtttcaagatttctgcatccacaagttagtagcaaactggggaatactcgctgcagctggggttccctgctttttggtagcaagggtccagagatgaggtgtttttttcggggagctaataacaaaaacattttaaaacttacctttactgaagttaaatcctctattgctgtttctattctctcttatagtgaccaacatctttttaatttagatccaaataaccatgtcctcctagagtttagaggctagagggagctgaggggaggatcttactgaaagcaccctggggagattgattgtccttaaacctaagccccacaaacttgacacctgatcaggtctgggagctacaaaatttcatttttctcctcactgcccttcttctgagtggcattggcctgaatcaaggaaagccaggccttgtgggcccccttctttcggctttctgctaaagcaacacctccagcagagattcccttaagtgactccaggttttccaccatccttcagcgtgaattaatttttaatcagtttgctttctccagagaaattttaaaataatagaagaaatagaaattttgaatgtataaaagaaaaagatcaagttgtcattttagaacagagggaactttgggagaaagcagcccaagtaggttatttgtacagtcagagggcaacaggaagatgcaggccttcaagggcaaggagaggccacaaggaatatgggtgggagtaaaagcaacatcgtctgcttcatactttttcctaggcttggcactgccttttcctttctcaggccaatggcaactgccatttgagtccggtgagggatcagccaacctcttctctatggctcaccttatttggagtgagaaatcaaggagacagagctgactgcatgatgagtctgaaggcatttgcaggatgagcctgaactggttgtgcagaacaaacaaggcattcatgggaattgttgtattccttctgcagccctccttctgggcactaagaaggtctatgaattaaatgcctatctaaaattctgatttattcctacattttctgttttctaatttgaccctaaaatctatgtgttttagacttagactttttattgccccccccccccccttttttttttgagacggagtctcgctctgacgcacaggctggagtgcagtggctccgatctctgctcactgaaagctccgcctcccgggttcacgccattctcctgcctcagcctcctgagtagctgggactacaggcgcccaccaccacgcccggctaattttttgtatttttaatagagacggggtttcactgtgttagccaggatggtctcgatctcctgacctcgtgatccgcctgcctcggcctcccaaagtgctgggattacaggcatgacccaccgctcccggccttgttttccgtttaaagtcgtcttcttttaatgtaatcattttgaacatgtgtgaaagttgatcatacgaattggatcaatcttgaaatactcaaccaaaagacagtcgagaagccagggggagaaagaactcagggcacaaaatattggtctgagaatggaattctctgtaagcctagttgctgaaatttcctgctgtatccagaagccagttttatctaacggctactgaaacacccactgtgttttgctcactccctcactcaccgatcaaaacctgctacctccccaagactttactagtgccgataaactttctcaaagagcaaccagtatcacttccctgtttataaaacctctaaccatctctttgttctttgaacatgctgaaaaccacctggtctgcatgtatgcccgaatttgtaattcttttctctcaaatgaaaatttaattttagggattcatttctatattttcacatatgtagtattattatttccttatatgtgtaaggtgaaatttatggtatttgagtgtgcaagaaaatatatttttaaagctttcatttttcccccagtgaatgatttagaattttttatgtaaatatacagaatgttttttcttacttttataaggaagcagctgtctaaaatgcagtggggtttgttttgcaatgttttaaacagagttttagtattgctattaaaagaagttactttgcttttaaagaaacttggctgcttaaaataagcaaaaattggatgcgtaaagtaatatttacagatgtggggagatgtaataaaacaatattaacttggtttcttgtttttgctgtatttagagattaaataattctaagatgatcactttgcaaaattatgcttatggctggcatggaaatagaaataattatgtctttgttgtattaatggggaatattttggacaatgtttcattatcaaattgtcgacatcattaatatatattgtaatgttgggaagagatcactattttgaagcacagctttacagatgagtatctatgatacatatgtataataaattttgattgggtattaaaagtattagaaggtggttataattgcagagtattccatgaatagtacactgacacaggggttttactttgaggaccagtgtagtcaagggaaaacatgagttaaaaagaaaagcaggcgatattgcagtcttgattctgccacttacaggatagataacgcctgaactttaatgacaagatgatccaaccataaaggtgctctgtgcttcacagtgaatcttttccccatgcaggagtgtgctcccctacaaacgttaagactgatcatttcaaaaatctattagctatatcaaaagccttacattttaatataggttgaaccaaaatttcaattccagtaacttctattgtaaccattatttttgtgtatgtcttcaagaatgttcattggatttttgtttgtaatagtaaaataccggatacatttcacgtgtccttcagtattgatttggttgaatattgggtcataatggttgagaagcatggacactagagccagaatgcttggatatgaatcctggatctgtcacttacttctgtgtgacctttgaaaggctacttatttcctctcttagctttctcattaaaatcaatgaacaatgccagcctcatggggttgttgaatgattaaatgagttactatacctaaagtacatagaacactgcctgcacatagtaaaagaattataagtgtgaggtagttggtaaaattatgta

SEQ ID NO: 548 - DNA, 6978 bp, Homo sapiens
gaagttgctcccgggcaggcaagcctgagagaggccaaatacacttaaaaacaagcagcggcgagaaaagcacctcccgcgccctgcacctcggcaggtctcgctctcggcaccctcccggcgcccgcgttctcctggccctgcccggcatcccgatggccgccgctgggccccggcgctccgtgcgcggagccgtctgcctgcatctgctgctgaccctcgtgatcttcagtcgtgctggtgaagcctgcaaaaaggtgatacttaatgtaccttctaaactagaggcagacaaaataattggcagagttaatttggaagagtgcttcaggtctgcagacctcatccggtcaagtgatcctgatttcagagttctaaatgatgggtcagtgtacacagccagggctgttgcgctgtctgataagaaaagatcatttaccatatggctttctgacaaaaggaaacagacacagaaagaggttactgtgctgctagaacatcagaagaaggtatcgaagacaagacacactagagaaactgttctcaggcgtgccaagaggagatgggcacctattccttgctctatgcaagagaattccttgggccctttcccattgtttcttcaacaagttgaatctgatgcagcacagaactatactgtcttctactcaataagtggacgtggagttgataaagaacctttaaatttgttttatatagaaagagacactggaaatctattttgcactcggcctgtggatcgtgaagaatatgatgtttttgatttgattgcttatgcgtcaactgcagatggatattcagcagatctgcccctcccactacccatcagggtagaggatgaaaatgacaaccaccctgttttcacagaagcaatttataattttgaagttttggaaagtagtagacctggtactacagtgggggtggtttgtgccacagacagagatgaaccggacacaatgcatacgcgcctgaaatacagcattttgcagcagacaccaaggtcacctgggctcttttctgtgcatcccagcacaggcgtaatcaccacagtctctcattatttggacagagaggttgtagacaagtactcattgataatgaaagtacaagacatggatggccagttttttggattgataggcacatcaacttgtatcataacagtaacagattcaaatgataatgcacccactttcagacaaaatgcttatgaagcatttgtagaggaaaatgcattcaatgtggaaatcttacgaatacctatagaagataaggatttaattaacactgccaattggagagtcaattttaccattttaaagggaaatgaaaatggacatttcaaaatcagcacagacaaagaaactaatgaaggtgttctttctgttgtaaagccactgaattatgaagaaaaccgtcaagtgaacctggaaattggagtaaacaatgaagcgccatttgctagagatattcccagagtgacagccttgaacagagccttggttacagttcatgtgagggatctggatgaggggcctgaatgcactcctgcagcccaatatgtgcggattaaagaaaacttagcagtggggtcaaagatcaacggctataaggcatatgaccccgaaaatagaaatggcaatggtttaaggtacaaaaaattgcatgatcctaaaggttggatcaccattgatgaaatttcagggtcaatcataacttccaaaatcctggatagggaggttgaaactcccaaaaatgagttgtataatattacagtcctggcaatagacaaagatgatagatcatgtactggaacacttgctgtgaacattgaagatgtaaatgataatccaccagaaatacttcaagaatatgtagtcatttgcaaaccaaaaatggggtataccgacattttagctgttgatcctgatgaacctgtccatggagctccattttatttcagtttgcccaatacttctccagaaatcagtagactgtggagcctcaccaaagttaatgatacagctgcccgtctttcatatcagaaaaatgctggatttcaagaatataccattcctattactgtaaaagacagggccggccaagctgcaacaaaattattgagagttaatctgtgtgaatgtactcatccaactcagtgtcgtgcgacttcaaggagtacaggagtaatacttggaaaatgggcaatccttgcaatattactgggtatagcactgctcttttctgtattgctaactttagtatgtggagtttttggtgcaactaaagggaaacgttttcctgaagatttagcacagcaaaacttaattatatcaaacacagaagcacctggagacgatagagtgtgctctgccaatggatttatgacccaaactaccaacaactctagccaaggtttttgtggtactatgggatcaggaatgaaaaatggagggcaggaaaccattgaaatgatgaaaggaggaaaccagaccttggaatcctgccggggggctgggcatcatcataccctggactcctgcaggggaggacacacggaggtggacaactgcagatacacttactcggagtggcacagttttactcaaccccgtctcggtgaagaatccattagaggacacactggttaaaaattaaacataaaagaaattgcatcgatgtaatcagaatgaagaccgcatgccatcccaagattatgtcctcacttataactatgagggaagaggatctccagctggttctgtgggctgctgcagtgaaaagcaggaagaagatggccttgactttttaaataatttggaacccaaatttattacattagcagaagcatgcacaaagagataatgtcacagtgctacaattaggtctttgtcagacattctggaggtttccaaaaataatattgtaaagttcaatttcaacatgtatgtatatgatgatttttttctcaattttgaattatgctactcaccaatttatatttttaaagcaagttgttgcttatcttttccaaaaagtgaaaaatgttaaaacagacaactggtaaatctcaaactccagcactggaattaaggtctctaaagcatctgctcttttttttttttacggatattttagtaataaatatgctggataaatattagtccaacaatagctaagttatgctaatatcacattattatgtattcactttaagtgatagtttaaaaaataaacaagaaatattgagtatcactatgtgaagaaagttttggaaaagaaacaatgaagactgaattaaattaaaaatgttgcagctcataaagaattgggactcacccctactgcactaccaaattcatttgactttggaggcaaaatgtgttgaagtgccctatgaagtagcaattttctataggaatatagttggaaataaatgtgtgtgtgtatattattattaatcaatgcaatatttaaaatgaaatgagaacaaagaggaaaatggtaaaaacttgaaatgaggctggggtatagtttgtcctacaatagaaaaaagagagagcttcctaggcctgggctcttaaatgctgcattataactgagtctatgaggaaatagttcctgtccaatttgtgtaatttgtttaaaattgtaaataaattaaacttttctggtttctgtgggaaggaaatagggaatccaatggaacagtagctttgctttgcagtctgtttcaagatttctgcatccacaagttagtagcaaactggggaatactcgctgcagctggggttccctgctttttggtagcaagggtccagagatgaggtgtttttttcggggagctaataacaaaaacattttaaaacttacctttactgaagttaaatcctctattgctgtttctattctctcttatagtgaccaacatctttttaatttagatccaaataaccatgtcctcctagagtttagaggctagagggagctgaggggaggatcttactgaaagcaccctggggagattgattgtccttaaacctaagccccacaaacttgacacctgatcaggtctgggagctacaaaatttcatttttctcctcactgcccttcttctgagtggcattggcctgaatcaaggaaagccaggccttgtgggcccccttctttcggctttctgctaaagcaacacctccagcagagattcccttaagtgactccaggttttccaccatccttcagcgtgaattaatttttaatcagtttgctttctccagagaaattttaaaataatagaagaaatagaaattttgaatgtataaaagaaaaagatcaagttgtcattttagaacagagggaactttgggagaaagcagcccaagtaggttatttgtacagtcagagggcaacaggaagatgcaggccttcaagggcaaggagaggccacaaggaatatgggtgggagtaaaagcaacatcgtctgcttcatactttttcctaggcttggcactgccttttcctttctcaggccaatggcaactgccatttgagtccggtgagggatcagccaacctcttctctatggctcaccttatttggagtgagaaatcaaggagacagagctgactgcatgatgagtctgaaggcatttgcaggatgagcctgaactggttgtgcagaacaaacaaggcattcatgggaattgttgtattccttctgcagccctccttctgggcactaagaaggtctatgaattaaatgcctatctaaaattctgatttattcctacattttctgttttctaatttgaccctaaaatctatgtgttttagacttagactttttattgccccccccccccccttttttttttgagacggagtctcgctctgacgcacaggctggagtgcagtggctccgatctctgctcactgaaagctccgcctcccgggttcacgccattctcctgcctcagcctcctgagtagctgggactacaggcgcccaccaccacgcccggctaattttttgtatttttaatagagacggggtttcactgtgttagccaggatggtctcgatctcctgacctcgtgatccgcctgcctcggcctcccaaagtgctgggattacaggcatgacccaccgctcccggccttgttttccgtttaaagtcgtcttcttttaatgtaatcattttgaacatgtgtgaaagttgatcatacgaattggatcaatcttgaaatactcaaccaaaagacagtcgagaagccagggggagaaagaactcagggcacaaaatattggtctgagaatggaattctctgtaagcctagttgctgaaatttcctgctgtatccagaagccagttttatctaacggctactgaaacacccactgtgttttgctcactccctcactcaccgatcaaaacctgctacctccccaagactttactagtgccgataaactttctcaaagagcaaccagtatcacttccctgtttataaaacctctaaccatctctttgttctttgaacatgctgaaaaccacctggtctgcatgtatgcccgaatttgtaattcttttctctcaaatgaaaatttaattttagggattcatttctatattttcacatatgtagtattattatttccttatatgtgtaaggtgaaatttatggtatttgagtgtgcaagaaaatatatttttaaagctttcatttttcccccagtgaatgatttagaattttttatgtaaatatacagaatgttttttcttacttttataaggaagcagctgtctaaaatgcagtggggtttgttttgcaatgttttaaacagagttttagtattgctattaaaagaagttactttgcttttaaagaaacttggctgcttaaaataagcaaaaattggatgcgtaaagtaatatttacagatgtggggagatgtaataaaacaatattaacttggtttcttgtttttgctgtatttagagattaaataattctaagatgatcactttgcaaaattatgcttatggctggcatggaaatagaaataattatgtctttgttgtattaatggggaatattttggacaatgtttcattatcaaattgtcgacatcattaatatatattgtaatgttgggaagagatcactattttgaagcacagctttacagatgagtatctatgatacatatgtataataaattttgattgggtattaaaagtattagaaggtggttataattgcagagtattccatgaatagtacactgacacaggggttttactttgaggaccagtgtagtcaagggaaaacatgagttaaaaagaaaagcaggcgatattgcagtcttgattctgccacttacaggatagataacgcctgaactttaatgacaagatgatccaaccataaaggtgctctgtgcttcacagtgaatcttttccccatgcaggagtgtgctcccctacaaacgttaagactgatcatttcaaaaatctattagctatatcaaaagccttacattttaatataggttgaaccaaaatttcaattccagtaacttctattgtaaccattatttttgtgtatgtcttcaagaatgttcattggatttttgtttgtaatagtaaaataccggatacatttcacgtgtccttcagtattgatttggttgaatattgggtcataatggttgagaagcatggacactagagccagaatgcttggatatgaatcctggatctgtcacttacttctgtgtgacctttgaaaggctacttatttcctctcttagctttctcattaaaatcaatgaacaatgccagcctcatggggttgttgaatgattaaatgagttactatacctaaagtacatagaacactgcctgcacatagtaaaagaattataagtgtgaggtagttggtaaaattatgta

SEQ ID NO: 549 - DNA, 3252 bp, Homo sapiens
ggggtgaaccgtgacagcgcttcggcccgcactaaggccggctcttgtgccggaaggaggaaggcgtggggcattcgcccctcggagctagggagtgtgtgcgacgccgctgcgaggtcacgtgagccactgccggcagagagggaaaggggcggggcccagaacgaagcggggaggcgccccttgtttccctggggtcacgcgcagccggaagtggcggctgctgcggagaattggagatggggaccgccctggacatcaagattaaaagagcgaataaagtttatcacgccggggaagtgctctctggcgtggtggtcatatcgagtaaggattcagtccaacaccagggagtgtctttgaccatggaaggaactgtaaacctccagctcagtgccaaaagtgtgggtgtgtttgaagctttttataattctgttaagcctatccagattatcaacagcaccatagaaatggtgaagccggggaaatttcccagcggcaaaacagaaatcccttttgaatttcctctgcacttgaagggtaacaaagttctgtatgagacgtatcatggcgtgtttgtcaacattcagtatacactgcgctgtgacatgaagcggtctctgttggccaaggacttgacaaagacctgtgaatttatcgttcactccgctcctcagaaggggaagtttactcccagtcccgtggacttcacgattacacctgaaaccttacagaacgtcaaagagagagctttgcttcccaaatttctccttcgaggacatctcaactcaacaaactgtgtcatcacgcagccactaacgggagagctggtggtggagagctcggaagccgccatcagaagcgtggagctgcagctggtgcgcgtggagacgtgcgggtgtgcagaaggctatgcccgcgacgccacggagattcagaacattcagatcgccgacggggatgtgtgcaggggcctctctgtccccatctacatggtcttccctaggctgttcacctgccctacactggagaccaccaacttcaaagtggaatttgaggttaacatcgtggtgctgcttcaccctgaccacctcatcacggagaacttcccgctgaagctctgcaggatatagcccggaggagggaagcatagagaacgggagtggccatctggaaatccagctggttatccaaatcctaaggggagctacagccagcggcatatacttgtttttgtgattattctgtatcagaaatgaaacagaccctcaaattaactttccttcctcatttcttgaggcttctgcttccaacaggcacctctaatcagaccttttctttgaaattcaacaagatttcttaatgctatttgccaagaccatttcacagaaaacattgactgtggctcttgccttatctgttcctttttaggtacagtaaaacaattgtgacagcagtttgagcttgctggagagtggcatcatggggacaaaaggaaacctctgacttgctaatggatgtagccagggactccccatagcaaagggtctgtggccagttgacatccaggatggctgcaagcgcacttgatggtcaggaagtttgcagatactcgccaaggcagagcgcaaagtgctagccactggaaatgcatgacttccctccacccctactctattctgtagttttttggttttgtttctgagacggagtctcagtctgtcacccaggctggagtgatctcagctcactgcaacctccacctcccaggttcaagcgactctcctgcctcagcctcccgagtagttgggattacaggtgactgccaccgtgcccggctaatgtttgtatttttagtagagacggggcttcaccatcttggccaggctggtcttgaactcctgacctcgtgacccacccgccttggcctcccaaagtgctgggattacaggtgtgagccaccacacccagcctctgtagttctttttacaacatttttcattataactttaaattttttaagcaactggaaaagtgttccttgctctcttggggggatttggctggtgccgaagtgtttctgaagtctcaagaactgccataaaatctcacgctgccatttccctgaacagatacatacatagagagagacagttttccaaactgtgtcacgcaggctgagtgcactggcaggatcacagctcacggcagcctcaacctccctggctcaagcgatccctcccctcagcctcctgagtagctgagactacaggtgagtgccaccacactcagctaattttcaaattttttgtagacagggtctccctatgttgcccaggctggtcttgaactcctagactcaagtgatcctcctgtcttggcctcccaaagtgctgagattacaggtgtgagccactgtgcccagcagtttcccagaatatatttaaatgcaaagttacatgaggggaaaacatgtatgtttgctcctgttgttactgggtaggttctgaacagcagaaacccatgtgcagggtgggctggtgaaggcccctctccgcaaggtggtagcaggaaaaggtccttgacttgatgaatttggtctgcctctgagccactggaggaagctgttttgagccagggttttttggcctaaagccagcatttcctcagtctccctttgtggttcgaaggatatggactattgcaatacatttcttccttcaaatcctgccactgttttgttggcccacaactaataggacctcaaaataagccatgctgctttgcacacacactagccttcttttgtacttttcattctggatgggcttggccaaaacaggctcaggccaaagacctcccaagctgtatgtacttccagtatcctgaaacagtgtttggtgacataatgccaagggtaaacaagcctgatttaggcactgctttatccaggggcttcacccatgaaattaataaaacttatctgagtcacttgaaacttggttcccagaaaacacatttctggtttataatctccttttatgctcacctgacattaattatctatccttgatgatgtgtttaaactgagtagcagaaaacagaggccacactttctgggaaattttaaaggaagaaaccatttttaatgagatgaaaatatttaacgaatttaaaaagctaatgacaattttgagaaaaggtttgggatgtatattgctatgtaatttaataaactgattttatggatat

SEQ ID NO: 550 - DNA, 1353 bp, Homo sapiens
taatggcgggcgctgcagaagatgcgcgagctcttttccgggctggggtctgcgcggccctggaggcctggccggccttgcagatcgctgtggagaatggcttcgggggtgtgcacagccaggagaaggccaagtggctggggggtgcagtggaggattacttcatgcgcaatgctgacttggagctagatgaggtggaagacttccttggagagctgttgaccaacgagtttgatacagttgtggaagacgggagtctgccccaggtgagccagcaactgcagaccatgttccaccacttccagaggggtgatggggctgctctgagggagatggcctcctgcatcactcagagaaaatgcaaggtcacagccactgcacttaagacagctagagagactgatgaggatgaagatgatgtggacagtgtggaagagatggaggtcacagctacgaatgatggggctgctacagatggggtctgcccccagcctgaaccctctgatccagacgctcagactattaaggaagaggatatagtggaagatggctggaccattgtccggagaaaaaaatgagtggggatgattggaaatggctttgggcccttatttgctgttctaagagttgtctgtaggggttttttttttgaggattgcagacctgtggactggttaccccatctccaccctctcccctgttcctctgtctggctccctccagggcaaggaaaacctagggtccttggtcttgggggtggggggaccttttccagcatattcccctgggcctttagttaacatccgagtgacgaagccgggttccccagtacagtgtcttttgggtgcggtcattgtgaggaaggggatgagtgagtgtgggtgtggctggaggaggagctagatgccggtggacagtgggcaggtggatttggggaggagaggatcagcagcagcagcagtactcagtgatagggggctggctgggtcaggaatggtgagatgaacatgcaagtggaagagagaatagttgaaaatgtgaatgaaagtagctctggagcctctcccttaccccaccccacacacacgcaacagctctgtacccctgcccagaacttggaacctcccaggaatgctgccttccttcagcccagcctccagtcctgggttccctcaggaattcgaagaccttggctaggtggtgagcttggaagagctgggctttgttttctgtctcctctaacctctttccttactccttatcccatcccatttgagttcaggggtgaggcttaagatcttaataaataataccttactgcttaaaaaaaaaaaaaaaaaaaaaaaaaaaaaa

SEQ ID NO: 551 - DNA, 4221 bp, Homo sapiens
cgataacgatttgtgttgtgagaggcgcaagctgcgatttctgctgaacttggaggcatttctacgacttttctctcagctgaggcttttcctccgaccctgatgctcttcaattcggtgctccgccagccccagcttggcgtcctgagaaatggatggtcttcacaataccctcttcaatcccttctgactggttatcagtgcagtggtaatgatgaacacacttcttatggagaaacaggagtcccagttcctccttttggatgtaccttctcttctgctcccaatatggaacatgtactagcagttgccaatgaagaaggctttgttcgattgtataacacagaatcacaaagtttcagaaagaagtgcttcaaagaatggatggctcactggaatgccgtctttgacctggcctgggttcctggtgaacttaaacttgttacagcagcaggtgatcaaacagccaaattttgggacgtaaaagctggtgagctgattggaacatgcaaaggtcatcaatgcagcctcaagtcagttgccttttctaagtttgagaaagctgtattctgtacgggtggaagagatggcaacattatggtctgggataccaggtgcaacaaaaaagatgggttttataggcaagtgaatcaaatcagtggagctcacaatacctcagacaagcaaaccccttcaaaacccaagaagaaacagaattcaaaaggacttgctccttctgtggatttccagcaaagtgttactgtggtcctctttcaagacgagaataccttagtctcagcaggagctgtggatgggataatcaaagtatgggatttacgtaagaattatactgcttatcgacaagaacccatagcatccaagtctttcctgtacccaggtagcagcactcgaaaacttggatattcaagtctgattttggattccactggctctactttatttgctaattgcacagacgataacatctacatgtttaatatgactgggttgaagacttctccagtggctattttcaatggacaccagaactctaccttttatgtaaaatccagccttagtccagatgaccagtttttagtcagtggctcaagtgatgaagctgcctacatatggaaggtctccacaccctggcaacctcctactgtgctcctgggtcattctcaagaggtcacgtctgtgtgctggtgtccatctgacttcacaaagattgctacctgttctgatgacaatacactaaaaatctggcgcttgaatagaggcttagaggagaaaccaggaggtgataaactttccacggtgggttgggcctctcagaagaaaaaagagtcaagacctggcctagtaacagtaacgagtagccagagtactcctgccaaagcccccagggtaaagtgcaatccatccaattcttccccgtcatccgcagcttgtgccccaagctgtgctggagacctccctcttccttcaaatactcctacgttctctattaaaacctctcctgccaaggcccggtctcccatcaacagaagaggctctgtctcctccgtctctcccaagccaccttcatctttcaagatgtcgattagaaactgggtgacccgaacaccttcctcatcaccacccatcactccacctgcttcggagaccaagatcatgtctccgagaaaagcccttattcctgtgagccagaagtcatcccaagcagaggcttgctctgagtctagaaatagagtaaagaggaggctagactcaagctgtctggagagtgtgaaacaaaagtgtgtgaagagttgtaactgtgtgactgagcttgatggccaagttgaaaatcttcatttggatctgtgctgccttgctggtaaccaggaagaccttagtaaggactctctaggtcctaccaaatcaagcaaaattgaaggagctggtaccagtatctcagagcctccgtctcctatcagtccgtatgcttcagaaagctgtggaacgctacctcttcctttgagaccttgtggagaagggtctgaaatggtaggcaaagagaatagttccccagagaataaaaactggttgttggccatggcagccaaacggaaggctgagaatccatctccacgaagtccgtcatcccagacacccaattccaggagacagagcggaaagacattgccaagcccggtcaccatcacgcccagctccatgaggaaaatctgcacatacttccatagaaagtcccaggaggacttctgtggtcctgaacactcaacagaattatagattctaatctgagtgagttactgagctttggtccactaaaacaagctgagctttggtccactaaaacaagatgaaaaatacaagagtgactctataactctggtctttaagaaagctgccttttcatttttagacaaaatcttttcaacgctgaaatgtacctaatctggttctactaccataatgtatatgcagcttcccgaggatgaatgctgtgtttaaatttcataaagtaaatttgtcactctagcattttgaatgaatagtcttcactttttaaattattcatcttctctataataatgacatcccagttcatggaggcaaaaaacaagtttcttgttatcctgaaactttctatgctcagtggaaagtatctgccagccacagcatgaggcctgtgaaggctgactgagaaatcctctgctgaagacccctggttctgttctgcctccaacatgtataattttatttgaaatacataatcttttcactatgcttttgtggggttttttttaagtatgtgtaaaaatgtgatgctcagataagtacatttatatcagttcagtgttaaaatgcagtctcttgagttaaagtcatctttattttaaatgcagtgataaatgtcaactcttcggagaaactaggagaacaacaacagaaagctgtgtttgtcttttttctctcaaatatatctcccgtatgagatttcaggtccccatgttttcaccaagcaatctgctatgtcagccaacccaacatcactttctacaggaggttatgatttttgccatttactagaggaagatgttttatgaaatcaatttggggtttgaattcaggtgcagtcatcagttctttaggggctgcaatgttttaaaaaaaataagtcatcagattttaagaaaaaagtgatgatttcttattgatatttttgtaacagaatatagctcttaactgaaaatccagaaccagaaacataaatcttgagtttcttttcatgtacataaaaagcaatagccttttagtatagatagccctgagccaaaaagtaatagaattttctctagatatttaatacagagagtgtatagactgactctaagttaataatgtgcaaaatatcttaaacatccctccccttattcaacaattatgtatcagtgatcttgaaccattgttttatatttttcacctttgtaacctcatggaaagaggctttacatactttctatgtactatttacttagaagggagcccccttccagtcatgaaacttcatttgttttatccatatccctgaggactgtgtagactttatgtcagttctgtgtagactttatgtcagtttttgtcattatttgaaaatctattctgacaactttttaattcctttgatcttataagttaaagctgtaacaactgaaattgcatggatcaagtaagcatagttttatccagggagaaaaataaaaggaagccatagaattgctctggtcaaaaccaagcacaccatagccttaactgaatatttaggaaatctgcctaatctgcttatatttggtgtttgttttttgactgttgggctttgggaagatgttatttatgaccaatatctgccagtaacgctgtttatctcacttgctttgaaagccaatgggggaaaaaaatccatgaaaaaaaaaagattgataaagtagatgattttgtttgtatccctacccatctcctggcagccctactgagtgaaattgggatacatttggctgtcagaaattataccgagtctactgggtataacatgtctcacttggaaagctagtacttttaaatgggtgccaaaggtcaactgtaatgagataattatccctgcctgtgtccatgtcagactttgagctgatcctgaataataaagccttttacctt

SEQ ID NO: 552 - DNA, 2835 bp, Homo sapiens
agaaggccgcacgccccgggcatgcgcagcggctcgctcggaagctgcgacgccgagtttcactctggctgccttctcctgagagtcggagccacagccagagccctgcccaggccgagccggagctgcagcccgagcgcggtggtgccctcagccccgtcctcttgtcctcctcagcctcggtgccttggaatttgtgtcgctgagtcagcaagcctttcagatttgcccggtttttgttgtttgtggtttgtatcaagatgggaactcaaacaagtcattcctcctaaggagctggtgtcttcatccagaagggacagtttgtgccagctctccagagagaaaaggatctggtactgttctggagtggcctgtagcagacactgaaccaccagccagctgcatttgttgtcctggaagtcattgccaactctgccagtcacactggggtccccagagaagtcaagatctgccggaggcgctgggcaatgaccccgggactccaggccagaggggtctgaagctgtttgggaaagcagcgggactccttgggaagatggccatggccccaagcccttccctggtgcaggtgtacaccagccccgcggctgtggccgtgtgggaatggcaggacgggctgggcacctggcacccctacagtgccaccgtctgcagcttcatcgagcagcagtttgtccagcagaagggccaacgttttgggcttgggagcctggcccacagcatccccttgggccaggcagacccctcgctggccccttacattattgacctccccagctggacccagttccgccaggacaccggcaccatgcgggctgtgcggagacacctgttcccccagcactcagcccctggccgaggtgtcgtctgggagtggctgagcgacgatggctcctggactgcctatgaagccagcgtctgtgactatctggagcagcaggtggccaggggcaaccagctcgtggacttggcccccctggggtacaactacactgtcaactacaccacccacacgcagaccaacaagacttccagcttctgccgcagcgtgcggcgccaagcagggccgccttacccggtgaccaccatcatcgctccgccgggccacacaggcgtcgcctgctcttgccaccagtgcctcagtggcagcagaactggccccgtgtcaggccgctaccgccactccatgaccaacctccctgcataccccgtcccccagcaccccccacacaggaccgcttctgtgtttgggacccaccaggcctttgcaccgtacaacaaaccctcactctccggggcccggtctgcgcccaggctgaacaccaccaacgcctggggcgcagctcctccttccctggggagccagcccctctaccgctccagcctctcccacctgggaccgcagcacctgcccccaggatcctccacctccggtgcagtcagtgcctccctccccagcggtccctcaagcagcccagggagcgtccctgccactgtgcccatgcagatgccaaagcccagcagagtccagcaggcgctcgcaggcatgacgagtgttctgatgtcagccattggactccctgtgtgtcttagccgcgcaccccagcccaccagccctcccgcctcccgtctggcttccaaaagtcacggctcagttaagagattgaggaaaatgtccgtgaaaggagcgaccccgaagccagagccagagccagagcaggtcataaaaaactacacggaagagctgaaagtgcccccagatgaggactgcatcatctgcatggagaagctgtccacagcgtctggatacagcgatgtgactgacagcaaggcaatcgggtccctagctgtgggccacctcaccaagtgcagccatgccttccacctgctgtgcctcctggccatgtactgcaacggcaataaggatggaagtctgcagtgtccctcctgcaaaaccatctatggagagaagacggggacccagccccagggaaagatggaggtattacggttccagatgtcgctccccggccacgaggactgcgggaccatcctcatagtttacagcattccccatggtatccagggccctgagcaccccaatcccggaaagccgttcactgccagagggtttccccgccagtgctaccttccagacaacgcccagggccgcaaggtcctagagctcctgaaggtggcctggaagaggcggctcatcttcacagtgggcacgtccagcaccacgggtgagacggacaccgtggtatggaacgagatccaccacaagacagagatggaccgcaacattacgggccacggctatcccgaccccaactacctgcagaacgtgctggctgagctggctgcccagggggtgaccgaggactgcctggagcagcagtgacctcgcaccccagcacgcccgcctctggtggccaccccgctgccccatggctggctgggtggccaggcaggaagtgcccagcccgagaggctgggaggtttgttgagggtgtggggtgtgccccacctgaagccggggctccccctgcctgcctctctctcctcctcccctctgggaattgggcagccctgggcagttgtactcatgggggcttaggatgcagctacctcagtgcgcagggcccgtctgtcctctgggggctgcttcgggcccgcggtgctcggggcctggtgtggggcgagtagagacttccccagcctggacgggcgtgggttctgggtcagcttcttttacctcaattttgtttgcaataaatgctctatagccaaagccaaaaaaaaaaaaaaaaa

SEQ ID NO: 553 - DNA, 2715 bp, Homo sapiens
agaaggccgcacgccccgggcatgcgcagcggctcgctcggaagctgcgacgccgagtttcactctggctgccttctcctgagagtcggagccacagccagagccctgcccaggccgagccggagctgcagcccgagcgcggtggtgccctcagccccgtcctcttgtcctcctcagcctcggtgccttggaatttgtgtcgctgagtcagcaagcctttcagatttgcccggtttttgttgtttgtggtttgtatcaagatgggaactcaaacaagtcattcctcctaaggagctggtgtcttcatccagaagggacagtttgtgccagctctccagagagaaaagatctgccggaggcgctgggcaatgaccccgggactccaggccagaggggtctgaagctgtttgggaaagcagcgggactccttgggaagatggccatggccccaagcccttccctggtgcaggtgtacaccagccccgcggctgtggccgtgtgggaatggcaggacgggctgggcacctggcacccctacagtgccaccgtctgcagcttcatcgagcagcagtttgtccagcagaagggccaacgttttgggcttgggagcctggcccacagcatccccttgggccaggcagacccctcgctggccccttacattattgacctccccagctggacccagttccgccaggacaccggcaccatgcgggctgtgcggagacacctgttcccccagcactcagcccctggccgaggtgtcgtctgggagtggctgagcgacgatggctcctggactgcctatgaagccagcgtctgtgactatctggagcagcaggtggccaggggcaaccagctcgtggacttggcccccctggggtacaactacactgtcaactacaccacccacacgcagaccaacaagacttccagcttctgccgcagcgtgcggcgccaagcagggccgccttacccggtgaccaccatcatcgctccgccgggccacacaggcgtcgcctgctcttgccaccagtgcctcagtggcagcagaactggccccgtgtcaggccgctaccgccactccatgaccaacctccctgcataccccgtcccccagcaccccccacacaggaccgcttctgtgtttgggacccaccaggcctttgcaccgtacaacaaaccctcactctccggggcccggtctgcgcccaggctgaacaccaccaacgcctggggcgcagctcctccttccctggggagccagcccctctaccgctccagcctctcccacctgggaccgcagcacctgcccccaggatcctccacctccggtgcagtcagtgcctccctccccagcggtccctcaagcagcccagggagcgtccctgccactgtgcccatgcagatgccaaagcccagcagagtccagcaggcgctcgcaggcatgacgagtgttctgatgtcagccattggactccctgtgtgtcttagccgcgcaccccagcccaccagccctcccgcctcccgtctggcttccaaaagtcacggctcagttaagagattgaggaaaatgtccgtgaaaggagcgaccccgaagccagagccagagccagagcaggtcataaaaaactacacggaagagctgaaagtgcccccagatgaggactgcatcatctgcatggagaagctgtccacagcgtctggatacagcgatgtgactgacagcaaggcaatcgggtccctagctgtgggccacctcaccaagtgcagccatgccttccacctgctgtgcctcctggccatgtactgcaacggcaataaggatggaagtctgcagtgtccctcctgcaaaaccatctatggagagaagacggggacccagccccagggaaagatggaggtattacggttccagatgtcgctccccggccacgaggactgcgggaccatcctcatagtttacagcattccccatggtatccagggccctgagcaccccaatcccggaaagccgttcactgccagagggtttccccgccagtgctaccttccagacaacgcccagggccgcaaggtcctagagctcctgaaggtggcctggaagaggcggctcatcttcacagtgggcacgtccagcaccacgggtgagacggacaccgtggtatggaacgagatccaccacaagacagagatggaccgcaacattacgggccacggctatcccgaccccaactacctgcagaacgtgctggctgagctggctgcccagggggtgaccgaggactgcctggagcagcagtgacctcgcaccccagcacgcccgcctctggtggccaccccgctgccccatggctggctgggtggccaggcaggaagtgcccagcccgagaggctgggaggtttgttgagggtgtggggtgtgccccacctgaagccggggctccccctgcctgcctctctctcctcctcccctctgggaattgggcagccctgggcagttgtactcatgggggcttaggatgcagctacctcagtgcgcagggcccgtctgtcctctgggggctgcttcgggcccgcggtgctcggggcctggtgtggggcgagtagagacttccccagcctggacgggcgtgggttctgggtcagcttcttttacctcaattttgtttgcaataaatgctctatagccaaagccaaaaaaaaaaaaaaaaa

SEQ ID NO: 554 - DNA, 2550 bp, Homo sapiens
agaaggccgcacgccccgggcatgcgcagcggctcgctcggaagctgcgacgccgagtttcactctggctgccttctcctgagagtcggagccacagccagagccctgcccaggccgagccggagctgcagcccgagcgcggtggtgccctcagccccgtcctcttgtcctcctcagcctcgatctgccggaggcgctgggcaatgaccccgggactccaggccagaggggtctgaagctgtttgggaaagcagcgggactccttgggaagatggccatggccccaagcccttccctggtgcaggtgtacaccagccccgcggctgtggccgtgtgggaatggcaggacgggctgggcacctggcacccctacagtgccaccgtctgcagcttcatcgagcagcagtttgtccagcagaagggccaacgttttgggcttgggagcctggcccacagcatccccttgggccaggcagacccctcgctggccccttacattattgacctccccagctggacccagttccgccaggacaccggcaccatgcgggctgtgcggagacacctgttcccccagcactcagcccctggccgaggtgtcgtctgggagtggctgagcgacgatggctcctggactgcctatgaagccagcgtctgtgactatctggagcagcaggtggccaggggcaaccagctcgtggacttggcccccctggggtacaactacactgtcaactacaccacccacacgcagaccaacaagacttccagcttctgccgcagcgtgcggcgccaagcagggccgccttacccggtgaccaccatcatcgctccgccgggccacacaggcgtcgcctgctcttgccaccagtgcctcagtggcagcagaactggccccgtgtcaggccgctaccgccactccatgaccaacctccctgcataccccgtcccccagcaccccccacacaggaccgcttctgtgtttgggacccaccaggcctttgcaccgtacaacaaaccctcactctccggggcccggtctgcgcccaggctgaacaccaccaacgcctggggcgcagctcctccttccctggggagccagcccctctaccgctccagcctctcccacctgggaccgcagcacctgcccccaggatcctccacctccggtgcagtcagtgcctccctccccagcggtccctcaagcagcccagggagcgtccctgccactgtgcccatgcagatgccaaagcccagcagagtccagcaggcgctcgcaggcatgacgagtgttctgatgtcagccattggactccctgtgtgtcttagccgcgcaccccagcccaccagccctcccgcctcccgtctggcttccaaaagtcacggctcagttaagagattgaggaaaatgtccgtgaaaggagcgaccccgaagccagagccagagccagagcaggtcataaaaaactacacggaagagctgaaagtgcccccagatgaggactgcatcatctgcatggagaagctgtccacagcgtctggatacagcgatgtgactgacagcaaggcaatcgggtccctagctgtgggccacctcaccaagtgcagccatgccttccacctgctgtgcctcctggccatgtactgcaacggcaataaggatggaagtctgcagtgtccctcctgcaaaaccatctatggagagaagacggggacccagccccagggaaagatggaggtattacggttccagatgtcgctccccggccacgaggactgcgggaccatcctcatagtttacagcattccccatggtatccagggccctgagcaccccaatcccggaaagccgttcactgccagagggtttccccgccagtgctaccttccagacaacgcccagggccgcaaggtcctagagctcctgaaggtggcctggaagaggcggctcatcttcacagtgggcacgtccagcaccacgggtgagacggacaccgtggtatggaacgagatccaccacaagacagagatggaccgcaacattacgggccacggctatcccgaccccaactacctgcagaacgtgctggctgagctggctgcccagggggtgaccgaggactgcctggagcagcagtgacctcgcaccccagcacgcccgcctctggtggccaccccgctgccccatggctggctgggtggccaggcaggaagtgcccagcccgagaggctgggaggtttgttgagggtgtggggtgtgccccacctgaagccggggctccccctgcctgcctctctctcctcctcccctctgggaattgggcagccctgggcagttgtactcatgggggcttaggatgcagctacctcagtgcgcagggcccgtctgtcctctgggggctgcttcgggcccgcggtgctcggggcctggtgtggggcgagtagagacttccccagcctggacgggcgtgggttctgggtcagcttcttttacctcaattttgtttgcaataaatgctctatagccaaagccaaaaaaaaaaaaaaaaa

SEQ ID NO: 555 - DNA, 1271 bp, Homo sapiens
tgggcgcggccatgttggaggctccgggcccgagtgatggctgcgagctcagcaaccccagcgccagcagagtcagctgtgccgggcagatgctggaagtgcagccaggattgtatttcggtggggccgcggccgtcgcggagccagatcacctgagggaagcgggcatcacggccgtgctaacagtggactcggaggagcccagcttcaaggcggggcctggggtcgaggatctatggcgcctcttcgtgccagcgctggacaaacccgagacggacctactcagccatctggaccggtgcgtggccttcatcggtcaggcccgcgctgagggccgtgcggtgttggtgcactgtcatgcaggagtcagtcgaagtgtggccataataactgcttttctcatgaagactgaccaacttccctttgaaaaagcctatgaaaagctccagattctcaaaccagaggctaagatgaatgaggggtttgagtggcaactgaaattataccaggcaatgggatatgaagtggatacctctagtgcaatttataagcaatatcgtttacaaaaggttacagagaagtatccagaattgcagaatttacctcaagaactctttgctgttgacccaactaccgtttcacaaggattgaaagatgaggttctctacaagtgtagaaagtgcaggcgatcattatttcgaagttctagtattctggatcaccgtgaaggaagtggacctatagcctttgcccacaagagaatgacaccatcttccatgcttaccacagggaggcaagctcaatgtacatcttatttcattgaacctgtacagtggatggaatctgctttgttgggagtgatggatggacagcttctttgcccaaaatgcagtgccaagttgggttccttcaactggtatggtgaacagtgctcttgtggtaggtggataacacctgcttttcaaatacataagaatagagtggatgaaatgaaaatattgcctgttttgggatcacaaacaggaaaaatatgaacatgatattttatagcttgggaagaaacttgcagatgatatgtgctgcctttgcttcttatcattcatggcagattgttagtgctttcaacatttcatttgaaatgggagaagataaaatcacttgatgtaacctggaaactatgctttacatggcaatcaaagccttttgatcatgtacattttatttgatattaaaatcttttataaccagaaaaaaaaaaaaaaaaaaaaaaa

SEQ ID NO: 556 - DNA, 2453 bp, Homo sapiens
acatgcgcacagagcccgggcggctacggaagcggtgagactgtctctcggctgcagccctggtgcgacccggcccgttgccgtagagatgggcagggctggatggagtggggtgcggtgagctgagctgaccctgcttcgccacggggactgcagtgaccccggcttgccggcagggcgggtaacaggttgagccagggtggggctgctcaggggcgtggagccgaggccaggatttctctgaagacccggcacaggctattcctttctgcgacgagcccattgctatggaaaccaaagcgttaggccagcggggattgaggctgcgggatcatgacgggtctctctcccgaagaaccttgcctaaggcttccccaagcggctacttcctgagcgaacccgcccacccgcctgaaggagagagttttccatggacacagcctagcagaaagacgcagccttcgtgcttcgctgactgctgaccactgacccaccgccttgatgacagcaccctcgtgtgccttcccagttcagttccggcagccctcagtcagcggcctctcgcagataaccaaaagcctgtatatcagcaatggtgtggccgccaacaacaagctcatgctgtctagcaaccagatcaccatggtcatcaatgtctcagtggaggtagtgaacaccttgtatgaggatatccagtacatgcaggtacctgtggctgactcccctaactcacgtctctgtgacttctttgaccctattgctgaccatatccacagcgtggagatgaagcagggccgtactttgctgcactgtgctgctggtgtgagccgctcagctgccctgtgcctcgcctacctcatgaagtaccacgccatgtccctgctggacgcccacacgtggaccaagtcatgccggcccatcatccgacccaacagcggcttttgggagcagctcatccactatgagttccaattgtttggcaagaacactgtgcacatggtcagttccccagtgggaatgatccctgacatctatgagaaggaagtccgtttgatgattccactgtgagccatcccacgagcccctgcattggagtcagaggtacagatctattgttgatcttacaccaagatccaaacttgaacattctacttttgttgatacagaaaaaaacagatgatgccttttatgagcacaaaaaagagttgctgtagcttttaactttataatccattttttttaagattaaactaattgtgagatggtgaagataaattttctgccctgtgagtgacactggccaggggataggttgaggcagatggtgcccagaagaaagagggcagcacccattgcacatggcaggcctggaatcctgcagccctccccaaaaacagattgacccaggaatgaatctgctacaattccacctcattctttcacacccagagccagagccttaagcatcatggtacctcttgcgcttcttacagtgagtgccaatctactagataaatggccttcaggcagtgctccaggaatcctggggggtcccaggccacctctgcttccaccttcactataagtggcccagttctggttttctagattgtacttatgcataagatagtttttaaagaaagcattccactgtgtaaatttttttttgtctttttttgaaactgtcctgctctgtcacccatcctggagtgcagtagtgtgatcatggctcactgtagccacaacctctcaggctcaagtgatcctcttaccttagcctcctgcgtggctgggactacagatgtttgccaccatgcccgcctcattttttttctttttttatagagatgagattttactatgtcgcccagactggtctcaaactcctggcctcaagcaatcctcacgcctcagcctcccaaagtgttgatgagccactgtaccccgataccactgtataaaaaatttaaaaaaaattgtgagtgctattgtacatggcaaagtttcaaagagctcttggccatccctcaccaaactttggcaaaagatggtgttagtccccttctccagggcacatgagaaaaacaggcctaacatcaggtctcagcggttcctctcacaggccttggcttggaaggctggagcttcggaccaaggcccagccctgtcacctcctcttcatgtgatgtggacccctgggagcatcagtgtcctcatctgtccaatgacagcccttttctcacagagttattgtgaagattcaacaatttcttggcatagtgcctggcacatggtgtgtgcttagcgcaaatggcagctctcatcatgaatgatagactctttcaccctgctggtcccaggtcggcacacacatccccataatggcatttctcctttctgtgcacagcactttattgttacaaagtactcttccaaaaagttaccctgtgtgt

SEQ ID NO: 557 - DNA, 5183 bp, Homo sapiens
agcggggtgggataaacggagctggacgactcagtctcttggtctgtggctgctgcggttacctggatgggcgagcacctctgaggctggctttgttacctgggcaataagggactagcagttcagccgttttctatgcctgctggatttgtttgtatttgttcccagccactgctcatgtaatgtactcccttaaccaggaaattaaagcattctcccggaataatctcaggaagcaatgcaccagggtgacaacgctaactggaaagaaaattatagaaacatggaaagatgccagaattcatgttgtggaagaagtagagccgagcagtgggggtggttgtggttatgtgcaggaccttagctcggacctgcaagttggcgttattaagccatggttgctcctagggtcacaagatgctgctcatgatttggatacactgaaaaagaataaggtgactcatattcttaatgttgcatatggagttgaaaatgctttcctcagtgactttacatataagagcatttctatattggatctgcctgaaaccaacatcctgtcttattttccagaatgttttgaatttattgaagaagcaaaaagaaaagatggagtggttcttgttcattgtaatgcaggcgtttccagggctgctgcaattgtaataggtttcctgatgaattctgaacaaacctcatttaccagtgctttttctttggtgaaaaatgcaagaccttccatatgtccaaattctggcttcatggagcagcttcgtacatatcaagagggcaaagaaagcaataagtgtgacagaatacaggagaacagttcatgagttgcattgtagcagacaatggacaactgtagtttctgaattgacttctatagccatcttttcccttttttggagagtagactagcaaaactcccttttttctcttgccttttttatgcataaatggaggtcaatctgattgtcctgacctactgtataagtaaatttcaaatgtcattactttctctttgttattataatgtgtgattaaatgcttttttaaattgctaagggaaaataacaaagtgttagtaatcattgctttctgtagaagaaaaaggtttaaatttaaaatgtgtatttagagcatggagagaatcatttaatgaagcctatttttctgttccagcaactgtttttatgaaagaaaaacttgaaatgctacttaacttactatttcaaagggaagtatatttctttttaaagaatctttttaagattaaaaatgaataccttaaatctcccaaaagagataaccagtatctgaaggtttatacaatatttacacagtggctacaatattcacaaaattcttatgttctcttatgaaaaatatacacttttcattttgtcttcttcttttttttttttttttagatggagtttggctcttgtcacccaggctggagtgcagtggcgcaatctcggctcactgcagcctctgcctcccgggttcaagcgattctcctgctccagcctcccatatagctgggattataggtgcctgccaccatgcccggctaatttttgtgttttttagtagagatggagtctcaccacataggccaggcagtctcgaactcctgacctcaggtgatccacccaccttggcctctctaaatgctgggattgcaggcgtgagccactgcatccgacctcattttgtttttttcaattctgttatcggcatttctttctttttttttttaatgtataggtgttctgtcatacgttattgtgagctttggttctttgaacaggtgatctattctcttacattttgtgctttttatcttgggtgcctagcattctgtttttttgatcctatgtcataattttttgagaaaatgtttgatactgcaagatcattgtttagtggtctgttttctacttcagtattctaccagagaacatattttttaggggagaagggttatggttttgtaagaaactttaaatatacttttaggagacccacaatcatttacagttttatctttggcctttgaataggttcttttttctttaatgtctccgtatttgcagaactgagctctgtacgttataaatttgcttaaagattttgattttttcttcagaatatggtatacttaaaattaattaattaagacagtttcttttttcttttctttttttttttttcgagacagggtcttgctctgtcacctaggctagagtggagtggcatgaacacaacgcactgcagcctctacctcctgggctcaagcagtcctcccacctcagtctcctgagtagctgagactacagctgtgcgccaccacatctggctaattttatttttatttttgtagagacaggagtcttgccatgttgcccaggctgatctcaaactcctaggcttaagtgatcctcccgccttagcctcccaagtgctaggattacaggcatcagccaccacgcctggcctgatagtttccacatagtttttcatgacttagaagatatcattgccatgtaggttttatttttaaaagtcttgagctcttcttaaatatacattataaagagcaagcatagatggaaagtgcatattgaacacatctgtgcatttgagaaggcaggctttcatatgctgtcatgagcaaaaagtagaagtgataaatgcaagttatgttttgagattgcttacaccgtgacaagatgccatcacttgtgatgttatgaactgttataaactctttgcttctgctaagaagcagtctaaatataatcaacgtacagtgagctctttgaagccaaccaaggcaggcagaaccctcttaaatatgagactgatgtataggttctctctatggtcagtatcactggataagccttctcctttcataagaaaggatgtatttaaatacattttattttgctaaatcctgtttagttttcagccattaaatgtcacatgaagccttgatagaatttgttcataatggctcatgtattattattatttttgagatggagttttgctcttaatgatattattattatttgagacagagttttgctcttattgcccaggctggagtgcagtggcgtgatcttggctcactgcggcctctgcctcccggcttcaagcgattctcctgtatcggcctcccaggtagctgggattataggcgtgtgccaccatgcccagcaaattttgtatttttttttggtagagacagggttcaaccgtgttggtcaggctggtctcgaactcctgaccgcaagtgatccacacgccttggtctcccaaagtgctgggattacggtgttagccactacacctggcctggattgtgtattatttatgtctgtagtttatatgcttagttgttgcctatagtgatctgggtaagattcaaacatttatcttttgtatcttctacagaagtgctttgagcatcaaatttgttttaacgttaaattgtagtttgctgtattaaaatagatcaatgaatataattcagtcttttaggggcaccaagtaaagcataaggtcatatatactatacaatatgtttattgcacttcccatggggataaatcactctgtcattcctagttattttaaaaaaagaactttatgattacggtcctctttctcacatactgcaaacttaaaagatacatacaccaaatataggtctgttttaaaggagaggaaaaatagttcaaggagtttttgcctctttgtttttaaatagattattctgccattttttaaaggaaagggaaaatgaaaacagcatgtctttttaaacattgaaaagaaatatggaggctttaaaccgcaaactgaaaaagctgagtagaacaaaggcagtggagcatacaatacaattctatttatttgaggttaattgaagttaataatttttaaatttttttctaattttatgccttaaaataggtttctgattacataaaatttgaatagaacactcaagaagtatgtagatttttgaaaaacccaaacaatattcttcttagatttttggaggcaaaatttagaccagtatactaattcaaaagacaaatatttcagaggaagtggagtatagtatttaacattttgtttgcaattttactttttcttcccttcttccctattgaaccttgattaaaatgtatgaatacaatacttggatttttttttcagcttagactctgataatttcagtggtagtggggaaacctgaatttgtcagcatgattatttgtaactcagattgttcaaatgtatatagaaggtccccttcaagtgttgtttctccaagtagtcataaatgtagcaagtataaatcagaatatcatcttataatcttacagagttaacctaatgagtcaatacctttataagcaaaaccatgataaatttaaaaacaacagaaatgtggcatgattacttatttatttgttccaggtgactctaaatagttgatttttctgcctgaaggatcctgaacatatttagttaccctgtagttatttaggaatttaaaccagaagactttgaagttgtatattcttgcaatgcataaaatgacattataatcaacaaacttatggtttgtttcaattgatgcacacaaaaaataacttatagttagacttttctatttcaagtaaagctttgagttacttatttttatacatattcatcatgtaccctttattgtttctaggtgttgatatactttaataaaaatgatatgtttaatattttcccattaatatatttctttgaagctatttgttttaaaagatgtaacacttatttgctgtcaaattctgaattaaaaaatctgttggtggccgggcgcagtggctcatgcctgtggtcccaacattttgggaggccaaggagatggatcacttgaggccaggagttcgagaccagcctggccaacatggcaaaaccccatcactaaaaatacaaaaattacccgggcatggtggtgggtgcctgtaatcccagcttcttaggaggctgaggtaggagaattgcttgaccctgggaggtggaggtggcagtgagccgagatagcaccactgcacttctagttgacagagtgagactctgactcaaaaaaaaaaaaaaaa

SEQ ID NO: 558 - DNA, 2545 bp, Homo sapiens
actcattcacataaaacgctgcgcggccggcggaatccccggcttctagggcggcgagcggccgggctggctatcgagcgagcggggcgggaacgcggagttgcgccgccgctcgggcgccgggctccgtcgcggccgcagccccgcgggtcgccctcccgtgcctcgcccgcggacaccctggccgtggacaccctggccgtgggcacccgcggggcgcgcggcgcggggccgctggccggcggcggcggcggcatgaaggtcacgtcgctcgacgggcgccagctgcgcaagatgctccgcaaggaggcggcggcgcgctgcgtggtgctcgactgccggccctatctggccttcgctgcctcgaacgtgcgcggctcgctcaacgtcaacctcaactcggtggtgctgcggcgggcccggggcggcgcggtgtcggcgcgctacgtgctgcccgacgaggcggcgcgcgcgcggctcctgcaggagggcggcggcggcgtcgcggccgtggtggtgctggaccagggcagccgccactggcagaagctgcgagaggagagcgccgcgcgtgtcgtcctcacctcgctactcgcttgcctacccgccggcccgcgggtctacttcctcaaagggggatatgagactttctactcggaatatcctgagtgttgcgtggatgtaaaacccatttcacaagagaagattgagagtgagagagccctcatcagccagtgtggaaaaccagtggtaaatgtcagctacaggccagcttatgaccagggtggcccagttgaaatccttcccttcctctaccttggaagtgcctaccatgcatccaagtgcgagttcctcgccaacctgcacatcacagccctgctgaatgtctcccgacggacctccgaggcctgcgcgacccacctacactacaaatggatccctgtggaagacagccacacggctgacattagctcccactttcaagaagcaatagacttcattgactgtgtcagggaaaagggaggcaaggtcctggtccactgtgaggctgggatctcccgttcacccaccatctgcatggcttaccttatgaagaccaagcagttccgcctgaaggaggccttcgattacatcaagcagaggaggagcatggtctcgcccaactttggcttcatgggccagctcctgcagtacgaatctgagatcctgccctccacgcccaacccccagcctccctcctgccaaggggaggcagcaggctcttcactgataggccatttgcagacactgagccctgacatgcagggtgcctactgcacattccctgcctcggtgctggcaccggtgcctacccactcaacagtctcagagctcagcagaagccctgtggcaacggccacatcctgctaaaactgggatggaggaatcggcccagccccaagagcaactgtgatttttgtttttaagactcatggacatttcatacctgtgcaatactgaagacctcattctgtcatgctgccccagtgagatagtgagtggtcaccaggcttgcaaatgaacttcagacggacctcagggtaggttctcgggactgaaggaaggccaagccattacgggagcacagcatgtgctgactactgtacttccagacccctgccctcttgggactgcccagtccttgcacctcagagttcgccttttcatttcaagcataaggcaataaatacctgcagcaacgtgggagaaagaagttgctggaccaggagaaaaggcagttatgaagccaattcattttgaaggaagcacaatttccaccttattttttgaactttggcagtttcaatgtctgtctctgttgcttcggggcataagctgatcaccgtctagttgggaaagtaaccctacagggtttgtagggacatgatcagcatcctgatttgaaccctgaaatgttgtgtagacaccctcttgggtccaatgaggtagttggttgaagtagcaagatgttggcttttctggattttttttgccatgggttcttcactgaccttggactttggcatgattcttagtcatacttgaacttgtctcattccacctcttctcagagcaactcttcctttgggaaaagagttcttcagatcatagaccaaaaaagtcataccttcgaggtggtagcagtagattccaggaggagaagggtacttgctaggtatcctgggtcagtggcggtgcaaactggtttcctcagctgcctgtccttctgtgtgcttatgtctcttgtgacaattgttttcctccctgcccctggaggttgtcttcaagctgtggacttctgggatttgcagattttgcaacgtggtactactttttttttctttttgtctgttagttatttctccaggggaaaaggcaataattttctaagacccgtgtgaatgtgaagaaaagcagtatgttactggttgttgttgttgttcttgttttttatagtgtaaaataaaaatagtaaaaggagaaaagcaaaaaaaaaaaaaaaaaa

SEQ ID NO: 559 - DNA, 961 bp, Homo sapiens
ggcgaccacggtgtcttcaaaagccccgtcagggttggcttcctggggccggaccgactgtgggtcagtttgcaccagcgctctggaatcgagttacgcgcgaaagggcagagtttctggaggaaaccgcagcctctcaaccgctgaccgggtctcagaaggcccccggcagggccgcttggcgggaactgaccacgcgccagtcaggctctccagggacctgcgcaggcgcgtgtgggcggagtcgtgcgcagggggcggggcttcgggaaggagccacagagagggcggggcgtaggacctgcgcttcgggggtggagtcggagcggcgcggcggcggtcatgcgggacgcggatgcagacgcaggcggaggcgctgacggcggggatggccggggtggccacagctgccgcgggggcgtggacacagccgcagctccggccggtggagctcccccagcgcacgcgccaggtccgggcagagacgccgcgtctgcggccagggggtcacgaatgcggccgcacatattcaccctcagcgtgcctttcccgacccccttggaggcggaaatcgcccatgggtccctggcaccagatgccgagccccaccaaagggtggttgggaaggatctcacagtgagtggcaggatcctggtcgtccgctggaaagctgaagactgtcgcctgctccgaatttccgtcatcaactttcttgaccagctttccctggtggtgcggaccatgcagcgctttgggccccccgtttcccgctaagcctggcctgggcaaatggagcgaggtcccactttgcgtctccttgtaggcagtgcgtccatccttccctagggcaggaattcccacagttgctactttcctgggagggcctcatgttttatctggttcttaaatgtttgttactacagaaaataaaactgcgctactaaaaaaaaaaaaaaaaaaa

SEQ ID NO: 560 - DNA, 5088 bp, Homo sapiens
tgttatagttttgccgctggactcttccctcccttcccccaccccatcaggatgatatgagacttgaaagaagacgatgcatacaggaggagagacttcagcatgcaaaccttcatctgttcggcttgcaccgtcattttcattccatgctgctggccttcagatggctggacagatgccccattcacatcagtacagtgaccgtcgccagccaaacataagtgaccaacaggtttctgccttatcatattctgaccagattcagcaacctctaactaaccaggtgatgcctgatattgtcatgttacagaggcggatgccccaaaccttccgtgacccagcaactgctcccctgagaaaactttctgttgacttgatcaaaacatacaagcatattaatgaggtttactatgcaaaaaagaagcgaagacaccaacagggccagggagacgattctagtcataagaaggaacggaaggtttacaatgatggttatgatgatgataactatgattatattgtaaaaaacggagaaaagtggatggatcgttacgaaattgactccttgataggcaaaggttcctttggacaggttgtaaaggcatatgatcgtgtggagcaagaatgggttgccattaaaataataaagaacaagaaggcttttctgaatcaagcacagatagaagtgcgacttcttgagctcatgaacaaacatgacactgaaatgaaatactacatagtgcatttgaaacgccactttatgtttcgaaaccatctctgtttagtttttgaaatgctgtcctacaacctctatgacttgctgagaaacaccaatttccgaggggtctctttgaacctaacacgaaagtttgcgcaacagatgtgcactgcactgcttttccttgcgactccagaacttagtatcattcactgtgatctaaaacctgaaaatatccttctttgtaaccccaaacgcagtgcaatcaagatagttgactttggcagttcttgtcagttggggcagaggatataccagtatattcagagtcgcttttatcggtctccagaggtgctactgggaatgccttatgaccttgccattgatatgtggtccctcgggtgtattttggttgaaatgcacactggagaacctctgttcagtggtgccaatgaggtagatcagatgaataaaatagtggaagttctgggtattccacctgctcatattcttgaccaagcaccaaaagcaagaaagttctttgagaagttgccagatggcacttggaacttaaagaagaccaaagatggaaaacgggagtacaaaccaccaggaacccgtaaacttcataacattcttggagtggaaacaggaggacctggtgggcgacgtgctggggagtcaggtcatacggtcgctgactacttgaagttcaaagacctcattttaaggatgcttgattatgaccccaaaactcgaattcaaccttattatgctctgcagcacagtttcttcaagaaaacagctgatgaaggtacaaatacaagtaatagtgtatctacaagccccgccatggagcagtctcagtcttcgggcaccacctccagtacatcgtcaagctcaggtgcgtcagcaatttcctgctcctcttggttggtcaggcactgaagctcctacacaggtcactgttgaaactcatcctgttcaagaaacaacctttcatgtagcccctcaacagaatgcattgcatcatcaccatggtaacagttcccatcaccatcaccaccaccaccaccatcaccaccaccatggacaacaagccttgggtaaccggaccaggccaagggtctacaattctccaacgaatagctcctctacccaagattctatggaggttggccacagtcaccactccatgacatccctgtcttcctcaacgacttcttcctcgacatcttcctcctctactggtaaccaaggcaatcaggcctaccagaatcgcccagtggctgctaataccttggactttggacagaatggagctatggacgttaatttgaccgtctactccaatccccgccaagagactggcatagctggacatccaacataccaattttctgctaatacaggtcctgcacattacatgactgaaggacatctgacaatgaggcaaggggctgatagagaagagtcccccatgacaggagtttgtgtgcaacagagtcctgtagctagctcgtgactacattgaaacttgagtttgtttcttgtgtgtttttatagaagtggtgttttttttccaaaaacaaagtgcaaagctgcttgaatcaggaggagattaacacactgaaccgctacaagagggcaaagctgattttttttttaacttgaaaagattgcaaagggacattgaagtgtttaaaagagccatgtccaaacccatcttcatggatagctcagaggtatcctctttttgctcccccattttaacttgccacatcccagtcacagtggggtttttttgtctttctattcagcaaaagttaatattcagatgttggtcttggtcatttgccaactaattttaaagtaaaaggcactgcacataatttgcataaagggccccatgagggtgttttttttttttctttttgtcccccccatccccctttttttttgttttgttctgttttgttttgggtgggagggtgggaaatttgggtttttaagtcctctaaacacacttgggcacggaaatgcagtactgtaaggaagagggacctccagcttccacaaacaccatcttcagctgtatgaaagggacggttgtggtgaagtttgtcaggcacagtaagcatgctgagtggcggggatcagaactctcctatctgaacctactgaggagcaaagcagcaattacatgggatcctgtggctctcccgttgcagaggccacaggaagataggatggaacgtgactggtctcctaaccaaggtgcactgagaagcaatcaacgggtcggtcgtggccagtcctggggaggtctgagtggtggtctttgggataacctttggccttatggatttggactcgaaattagaagagcctaccatttcagatgcaatcacttttggacatgcttttgcagacagtccttaatgctgaaaacacagagaatgggtaattcaagaggcctttcttttaaaatagacttttgtgacccactaattgtaaggtattgcaaggtcactttgcgtgtgtcataaagttgacttccttattggttgaaggtcacagaagtagtggtttgctttgatggaaatagctacagctgtgtcccttcctgctttttactttttcttttgctttttctcggcacgtggtatctccaccatttcttctgcacaaagatgtcttctgttcatcctgaacatttttaaaaaatgcagaattttatgtgactgcttttttgcctcacaattatgctgtgaattttacaaaaatttattttcttttttgataatttattgtaccaaagctgtttttatagcacatagatgtctgtaaccaataatgtagcagttctgcactttgacacaaggtgtaactagaccatttttaaatgtcagttgaaaattatggctgtactattgcttaaacaaaactggaactgttgttgaatccatagccaatacatttacagcaatctgtgtactgaacatagtagattgacatctaattcaagattacaacatctgttacattctaagtgtgttcaggcttctgaaggtaaagggacactggatccagaagctatggaaccagcagttgattcttgtattcctgattaacctacttgtaaacttgaaagcaagaccttgattgcaccaacaggtccagagtatgagtgcaagcaaagcagaactctcatgcgtgacctgagcagacaggctggtatttaacaggtgcctcgtgttgagattacgctgccttaatgtaacacagtctggcagttgctaaatttgtgttcccattttaaattgaccaattttggggtgtgacacttttgagcggttgaattgggagaatgaagataagtaatttacctgtccaggatcaaaagaagcctagaaaagaagcagtaatctacctctgccgataacctgtttaagatgactcagcagaacaccgcgtttcattctattggtcaattccatgtggctgactaggtcaattttttttctgaacaaaagcaggtttttatatgtaaacagtgagaaaagaaaggctaaacactatgtaaatgtgaatggaaacttggaaatactcgtttttataaactacaaaaactttttgttgtttatcaggaaatccatatttattttgtaattaactgtcaagcctgtggatgatttttttgaacttggtagttcataaaggtttacagtgaataaaaggatatcatcttgagtatagcaatatcaaaaggaattcagtagttactgctgtttaggaatataaggttaagatatcatatgggtcaggtcattttttttttctgtgctggttgccacatcttagcaagcaccaaaaaactaaagcagtttttaaaccgatatttacgtaaagaaaatcataaaatccaatgcttctgcatactgtgttatgttacagtccagttttgtgtgctttactacacagtttggttacaggacttctgtgcattgtaaacataaacagcatggaaaaggttaaatacctgtgttcagattgtaagatctagtccggacttgctgtgtatattgtaacgttaaatgaaaaaagaacccccctttgtattatagtcatgcggtcttatgtatgataaacagttgaataatttgtcctcagactctttactatgcttttttaaaaattaatttaagaaaaatgtaaacatagtaaaaatcttcctatgcaattaaactggtccaggtctggtaggtatagtatcaaagttgagttaaatgtgtaaaaaggaaactatttgagatacattgacataggcatcagcaatctctgaaagtaaaaattggaggtttaacaga

SEQ ID NO: 561 - DNA, 5517 bp, Homo sapiens
gggagcgcggcgcgggagcccgaggctgagactcaccggaggaagcggcgcgagcgccccgccatcgtcccggctgaagtgcagtggcacgatcataggtggtcactacagtctcagattcctgggcttaagcagtcttcccacctcagcctccccagtagctgggattacagtgttatagttttgccgctggactcttccctcccttcccccaccccatcaggatgatatgagacttgaaagaagacgatgcatacaggaggagagacttcagcatgcaaaccttcatctgttcggcttgcaccgtcattttcattccatgctgctggccttcagatggctggacagatgccccattcacatcagtacagtgaccgtcgccagccaaacataagtgaccaacaggtttctgccttatcatattctgaccagattcagcaacctctaactaaccaggtgatgcctgatattgtcatgttacagaggcggatgccccaaaccttccgtgacccagcaactgctcccctgagaaaactttctgttgacttgatcaaaacatacaagcatattaatgaggtttactatgcaaaaaagaagcgaagacaccaacagggccagggagacgattctagtcataagaaggaacggaaggtttacaatgatggttatgatgatgataactatgattatattgtaaaaaacggagaaaagtggatggatcgttacgaaattgactccttgataggcaaaggttcctttggacaggttgtaaaggcatatgatcgtgtggagcaagaatgggttgccattaaaataataaagaacaagaaggcttttctgaatcaagcacagatagaagtgcgacttcttgagctcatgaacaaacatgacactgaaatgaaatactacatagtgcatttgaaacgccactttatgtttcgaaaccatctctgtttagtttttgaaatgctgtcctacaacctctatgacttgctgagaaacaccaatttccgaggggtctctttgaacctaacacgaaagtttgcgcaacagatgtgcactgcactgcttttccttgcgactccagaacttagtatcattcactgtgatctaaaacctgaaaatatccttctttgtaaccccaaacgcagtgcaatcaagatagttgactttggcagttcttgtcagttggggcagaggatataccagtatattcagagtcgcttttatcggtctccagaggtgctactgggaatgccttatgaccttgccattgatatgtggtccctcgggtgtattttggttgaaatgcacactggagaacctctgttcagtggtgccaatgaggtagatcagatgaataaaatagtggaagttctgggtattccacctgctcatattcttgaccaagcaccaaaagcaagaaagttctttgagaagttgccagatggcacttggaacttaaagaagaccaaagatggaaaacgggagtacaaaccaccaggaacccgtaaacttcataacattcttggagtggaaacaggaggacctggtgggcgacgtgctggggagtcaggtcatacggtcgctgactacttgaagttcaaagacctcattttaaggatgcttgattatgaccccaaaactcgaattcaaccttattatgctctgcagcacagtttcttcaagaaaacagctgatgaaggtacaaatacaagtaatagtgtatctacaagccccgccatggagcagtctcagtcttcgggcaccacctccagtacatcgtcaagctcaggtggctcatcggggacaagcaacagtgggagagcccggtcggatccgacgcaccagcatcggcacagtggtgggcacttcacagctgccgtgcaggccatggactgcgagacacacagtccccaggtgagctcgcacgtggttcatttgcttgtgtcacctgccattctcaggtggagcagcactggatgccaggtgcctttagaatgaccgtatcatttaccctagaggttcatgacgttcctgtctaaggaaatgtgcgtcagcaatttcctgctcctcttggttggtcaggcactgaagctcctacacaggtcactgttgaaactcatcctgttcaagaaacaacctttcatgtagcccctcaacagaatgcattgcatcatcaccatggtaacagttcccatcaccatcaccaccaccaccaccatcaccaccaccatggacaacaagccttgggtaaccggaccaggccaagggtctacaattctccaacgaatagctcctctacccaagattctatggaggttggccacagtcaccactccatgacatccctgtcttcctcaacgacttcttcctcgacatcttcctcctctactggtaaccaaggcaatcaggcctaccagaatcgcccagtggctgctaataccttggactttggacagaatggagctatggacgttaatttgaccgtctactccaatccccgccaagagactggcatagctggacatccaacataccaattttctgctaatacaggtcctgcacattacatgactgaaggacatctgacaatgaggcaaggggctgatagagaagagtcccccatgacaggagtttgtgtgcaacagagtcctgtagctagctcgtgactacattgaaacttgagtttgtttcttgtgtgtttttatagaagtggtgttttttttccaaaaacaaagtgcaaagctgcttgaatcaggaggagattaacacactgaaccgctacaagagggcaaagctgattttttttttaacttgaaaagattgcaaagggacattgaagtgtttaaaagagccatgtccaaacccatcttcatggatagctcagaggtatcctctttttgctcccccattttaacttgccacatcccagtcacagtggggtttttttgtctttctattcagcaaaagttaatattcagatgttggtcttggtcatttgccaactaattttaaagtaaaaggcactgcacataatttgcataaagggccccatgagggtgttttttttttttctttttgtcccccccatccccctttttttttgttttgttctgttttgttttgggtgggagggtgggaaatttgggtttttaagtcctctaaacacacttgggcacggaaatgcagtactgtaaggaagagggacctccagcttccacaaacaccatcttcagctgtatgaaagggacggttgtggtgaagtttgtcaggcacagtaagcatgctgagtggcggggatcagaactctcctatctgaacctactgaggagcaaagcagcaattacatgggatcctgtggctctcccgttgcagaggccacaggaagataggatggaacgtgactggtctcctaaccaaggtgcactgagaagcaatcaacgggtcggtcgtggccagtcctggggaggtctgagtggtggtctttgggataacctttggccttatggatttggactcgaaattagaagagcctaccatttcagatgcaatcacttttggacatgcttttgcagacagtccttaatgctgaaaacacagagaatgggtaattcaagaggcctttcttttaaaatagacttttgtgacccactaattgtaaggtattgcaaggtcactttgcgtgtgtcataaagttgacttccttattggttgaaggtcacagaagtagtggtttgctttgatggaaatagctacagctgtgtcccttcctgctttttactttttcttttgctttttctcggcacgtggtatctccaccatttcttctgcacaaagatgtcttctgttcatcctgaacatttttaaaaaatgcagaattttatgtgactgcttttttgcctcacaattatgctgtgaattttacaaaaatttattttcttttttgataatttattgtaccaaagctgtttttatagcacatagatgtctgtaaccaataatgtagcagttctgcactttgacacaaggtgtaactagaccatttttaaatgtcagttgaaaattatggctgtactattgcttaaacaaaactggaactgttgttgaatccatagccaatacatttacagcaatctgtgtactgaacatagtagattgacatctaattcaagattacaacatctgttacattctaagtgtgttcaggcttctgaaggtaaagggacactggatccagaagctatggaaccagcagttgattcttgtattcctgattaacctacttgtaaacttgaaagcaagaccttgattgcaccaacaggtccagagtatgagtgcaagcaaagcagaactctcatgcgtgacctgagcagacaggctggtatttaacaggtgcctcgtgttgagattacgctgccttaatgtaacacagtctggcagttgctaaatttgtgttcccattttaaattgaccaattttggggtgtgacacttttgagcggttgaattgggagaatgaagataagtaatttacctgtccaggatcaaaagaagcctagaaaagaagcagtaatctacctctgccgataacctgtttaagatgactcagcagaacaccgcgtttcattctattggtcaattccatgtggctgactaggtcaattttttttctgaacaaaagcaggtttttatatgtaaacagtgagaaaagaaaggctaaacactatgtaaatgtgaatggaaacttggaaatactcgtttttataaactacaaaaactttttgttgtttatcaggaaatccatatttattttgtaattaactgtcaagcctgtggatgatttttttgaacttggtagttcataaaggtttacagtgaataaaaggatatcatcttgagtatagcaatatcaaaaggaattcagtagttactgctgtttaggaatataaggttaagatatcatatgggtcaggtcattttttttttctgtgctggttgccacatcttagcaagcaccaaaaaactaaagcagtttttaaaccgatatttacgtaaagaaaatcataaaatccaatgcttctgcatactgtgttatgttacagtccagttttgtgtgctttactacacagtttggttacaggacttctgtgcattgtaaacataaacagcatggaaaaggttaaatacctgtgttcagattgtaagatctagtccggacttgctgtgtatattgtaacgttaaatgaaaaaagaacccccctttgtattatagtcatgcggtcttatgtatgataaacagttgaataatttgtcctcagactctttactatgcttttttaaaaattaatttaagaaaaatgtaaacatagtaaaaatcttcctatgcaattaaactggtccaggtctggtaggtatagtatcaaagttgagttaaatgtgtaaaaaggaaactatttgagatacattgacataggcatcagcaatctctgaaagtaaaaattggaggtttaacaga

SEQ ID NO: 562 - DNA, 6580 bp, Homo sapiens
aaaaataactcatattgtctctgaggttcttttccagtgaagtgtttagtattgctgctatttggagtacaaagttggagcttttaaagaacctgggagttcaaaagtataaggagaaataaatgaaaagcagaaatattttgaggcaataagtatagactcaaatctatattatgacccacttgtagcaccacttggaattctaccaataagagatttatttgggcaaactataatggttgttggaaattgcaaatcttagtgtgaattattttagtccagttggtttctttctttctcttacctgaaatgaactatactgaggcaataggagctttgtatagtaatttaggagtgtaaaacaacttagggaaaaggattattaagcaggatgattgggatgacatcatgtgaaatttaggaattggaggcattgggaattgagagggtgctaacaaaggaaaacagcttattttagaatttgtctggaggatgtagaattgaagaagttttggtatttcttctgcagcggccccagtgcccttgaccaggaacatctcttggagtcagtagttttcatgaggctgacctaggaacttggccaacatatgcaacattgttctatttaaaatattccttgaattaaattcgatagtatcaatttaaaacataaagttttcactcaactcctttagaagttagattttagcttgtacttgtctttacctcttctgctgattatcagttgacaacactgagattactttcattttcctgtaagtcattatgaatttttctggtcaaccatgagttatcagtggaagcaataagtaggaagtactgtaaaagaattacaataaaataagagaaaccacttggagagcaagagggcttgtggacttgggggagcggttgtgagaaatgtctcagaacttaatttacaaataacattggtagattgacatgttgtctttcctataaagtaactttacctctgtcttaatagtaaactactatgaaagtgaattcgtgttcctcttgatttgtgaactgatgaaaattacaaaatgtggagttttttccccagataaagtaaatggtggaatattcaggtttatttgatacctagaaaatacctgaaattttccgtggtaataggcacattttgaaactgttttttttttctctgacaattgaatatattttatatatagttgattttgattattgaagactaaggaaaatttaagtttgaatgttagaaaatgaattttgcaaatttgaagtaattttattctttatgttttgggattgtagttatgttagatattcctcagttggggtaattgtcttgcatcattatctcttatcataatctgtttttcttcacacagtgttatagttttgccgctggactcttccctcccttcccccaccccatcaggatgatatgagacttgaaagaagacgatgcatacaggaggagagacttcagcatgcaaaccttcatctgttcggcttgcaccgtcattttcattccatgctgctggccttcagatggctggacagatgccccattcacatcagtacagtgaccgtcgccagccaaacataagtgaccaacaggtttctgccttatcatattctgaccagattcagcaacctctaactaaccagaggcggatgccccaaaccttccgtgacccagcaactgctcccctgagaaaactttctgttgacttgatcaaaacatacaagcatattaatgaggtttactatgcaaaaaagaagcgaagacaccaacagggccagggagacgattctagtcataagaaggaacggaaggtttacaatgatggttatgatgatgataactatgattatattgtaaaaaacggagaaaagtggatggatcgttacgaaattgactccttgataggcaaaggttcctttggacaggttgtaaaggcatatgatcgtgtggagcaagaatgggttgccattaaaataataaagaacaagaaggcttttctgaatcaagcacagatagaagtgcgacttcttgagctcatgaacaaacatgacactgaaatgaaatactacatagtgcatttgaaacgccactttatgtttcgaaaccatctctgtttagtttttgaaatgctgtcctacaacctctatgacttgctgagaaacaccaatttccgaggggtctctttgaacctaacacgaaagtttgcgcaacagatgtgcactgcactgcttttccttgcgactccagaacttagtatcattcactgtgatctaaaacctgaaaatatccttctttgtaaccccaaacgcagtgcaatcaagatagttgactttggcagttcttgtcagttggggcagaggatataccagtatattcagagtcgcttttatcggtctccagaggtgctactgggaatgccttatgaccttgccattgatatgtggtccctcgggtgtattttggttgaaatgcacactggagaacctctgttcagtggtgccaatgaggtagatcagatgaataaaatagtggaagttctgggtattccacctgctcatattcttgaccaagcaccaaaagcaagaaagttctttgagaagttgccagatggcacttggaacttaaagaagaccaaagatggaaaacgggagtacaaaccaccaggaacccgtaaacttcataacattcttggagtggaaacaggaggacctggtgggcgacgtgctggggagtcaggtcatacggtcgctgactacttgaagttcaaagacctcattttaaggatgcttgattatgaccccaaaactcgaattcaaccttattatgctctgcagcacagtttcttcaagaaaacagctgatgaaggtacaaatacaagtaatagtgtatctacaagccccgccatggagcagtctcagtcttcgggcaccacctccagtacatcgtcaagctcaggtggctcatcggggacaagcaacagtgggagagcccggtcggatccgacgcaccagcatcggcacagtggtgggcacttcacagctgccgtgcaggccatggactgcgagacacacagtccccaggtgcgtcagcaatttcctgctcctcttggttggtcaggcactgaagctcctacacaggtcactgttgaaactcatcctgttcaagaaacaacctttcatgtagcccctcaacagaatgcattgcatcatcaccatggtaacagttcccatcaccatcaccaccaccaccaccatcaccaccaccatggacaacaagccttgggtaaccggaccaggccaagggtctacaattctccaacgaatagctcctctacccaagattctatggaggttggccacagtcaccactccatgacatccctgtcttcctcaacgacttcttcctcgacatcttcctcctctactggtaaccaaggcaatcaggcctaccagaatcgcccagtggctgctaataccttggactttggacagaatggagctatggacgttaatttgaccgtctactccaatccccgccaagagactggcatagctggacatccaacataccaattttctgctaatacaggtcctgcacattacatgactgaaggacatctgacaatgaggcaaggggctgatagagaagagtcccccatgacaggagtttgtgtgcaacagagtcctgtagctagctcgtgactacattgaaacttgagtttgtttcttgtgtgtttttatagaagtggtgttttttttccaaaaacaaagtgcaaagctgcttgaatcaggaggagattaacacactgaaccgctacaagagggcaaagctgattttttttttaacttgaaaagattgcaaagggacattgaagtgtttaaaagagccatgtccaaacccatcttcatggatagctcagaggtatcctctttttgctcccccattttaacttgccacatcccagtcacagtggggtttttttgtctttctattcagcaaaagttaatattcagatgttggtcttggtcatttgccaactaattttaaagtaaaaggcactgcacataatttgcataaagggccccatgagggtgttttttttttttctttttgtcccccccatccccctttttttttgttttgttctgttttgttttgggtgggagggtgggaaatttgggtttttaagtcctctaaacacacttgggcacggaaatgcagtactgtaaggaagagggacctccagcttccacaaacaccatcttcagctgtatgaaagggacggttgtggtgaagtttgtcaggcacagtaagcatgctgagtggcggggatcagaactctcctatctgaacctactgaggagcaaagcagcaattacatgggatcctgtggctctcccgttgcagaggccacaggaagataggatggaacgtgactggtctcctaaccaaggtgcactgagaagcaatcaacgggtcggtcgtggccagtcctggggaggtctgagtggtggtctttgggataacctttggccttatggatttggactcgaaattagaagagcctaccatttcagatgcaatcacttttggacatgcttttgcagacagtccttaatgctgaaaacacagagaatgggtaattcaagaggcctttcttttaaaatagacttttgtgacccactaattgtaaggtattgcaaggtcactttgcgtgtgtcataaagttgacttccttattggttgaaggtcacagaagtagtggtttgctttgatggaaatagctacagctgtgtcccttcctgctttttactttttcttttgctttttctcggcacgtggtatctccaccatttcttctgcacaaagatgtcttctgttcatcctgaacatttttaaaaaatgcagaattttatgtgactgcttttttgcctcacaattatgctgtgaattttacaaaaatttattttcttttttgataatttattgtaccaaagctgtttttatagcacatagatgtctgtaaccaataatgtagcagttctgcactttgacacaaggtgtaactagaccatttttaaatgtcagttgaaaattatggctgtactattgcttaaacaaaactggaactgttgttgaatccatagccaatacatttacagcaatctgtgtactgaacatagtagattgacatctaattcaagattacaacatctgttacattctaagtgtgttcaggcttctgaaggtaaagggacactggatccagaagctatggaaccagcagttgattcttgtattcctgattaacctacttgtaaacttgaaagcaagaccttgattgcaccaacaggtccagagtatgagtgcaagcaaagcagaactctcatgcgtgacctgagcagacaggctggtatttaacaggtgcctcgtgttgagattacgctgccttaatgtaacacagtctggcagttgctaaatttgtgttcccattttaaattgaccaattttggggtgtgacacttttgagcggttgaattgggagaatgaagataagtaatttacctgtccaggatcaaaagaagcctagaaaagaagcagtaatctacctctgccgataacctgtttaagatgactcagcagaacaccgcgtttcattctattggtcaattccatgtggctgactaggtcaattttttttctgaacaaaagcaggtttttatatgtaaacagtgagaaaagaaaggctaaacactatgtaaatgtgaatggaaacttggaaatactcgtttttataaactacaaaaactttttgttgtttatcaggaaatccatatttattttgtaattaactgtcaagcctgtggatgatttttttgaacttggtagttcataaaggtttacagtgaataaaaggatatcatcttgagtatagcaatatcaaaaggaattcagtagttactgctgtttaggaatataaggttaagatatcatatgggtcaggtcattttttttttctgtgctggttgccacatcttagcaagcaccaaaaaactaaagcagtttttaaaccgatatttacgtaaagaaaatcataaaatccaatgcttctgcatactgtgttatgttacagtccagttttgtgtgctttactacacagtttggttacaggacttctgtgcattgtaaacataaacagcatggaaaaggttaaatacctgtgttcagattgtaagatctagtccggacttgctgtgtatattgtaacgttaaatgaaaaaagaacccccctttgtattatagtcatgcggtcttatgtatgataaacagttgaataatttgtcctcagactctttactatgcttttttaaaaattaatttaagaaaaatgtaaacatagtaaaaatcttcctatgcaattaaactggtccaggtctggtaggtatagtatcaaagttgagttaaatgtgtaaaaaggaaactatttgagatacattgacataggcatcagcaatctctgaaagtaaaaattggaggtttaacaga

SEQ ID NO: 563 - DNA, 6010 bp, Homo sapiens
cgcgggggcgcgcgcgcgcgggcccgggagaggctcccgagccaggcggtcttcggtcctcgcagcgcttccagctccccgcgcccctatgtgagggagacggggaggcccgcggcgcgcaggggagggcgaggcatgtgcacgggccggagggtgctgcagccgcccgaggaagaggaggacggcggcgaggaggagagcggggggctcgcggcggcgggccccggccgaggggatgcagtggactgtgtgtgtctggctgtagcagacgcgaggcggcgacgaggcgccggggacccgcgcgaggggcggccgggaggcggcggcggcggccgccagaagtagcagcaggaccggcggcggcgacggcagccctgaaatgcattttcctctccagcggccatgttaaccaggaaaccttcggccgccgctcccgccgcctacccgaccgattggcggcagtaagcacacaatgaatgatcacctgcatgtcggcagccacgctcacggacagatccaggttcaacagttgtttgaggataacagtaacaagcggacagtgctcacgacacaaccaaatgggcttacaacagtgggcaaaacgggcttgccagtggtgccagagcggcagctggacagcattcatagacggcaggggagctccacctctctaaagtccatggaaggcatggggaaggtgaaagccacccccatgacacctgaacaagcaatgaagcaatacatgcaaaaactcacagccttcgaacaccatgagattttcagctaccctgaaatatatttcttgggtctaaatgctaagaagcgccagggcatgacaggtgggcccaacaatggtggctatgatgatgaccagggatcatatgtgcaggtgccccacgatcacgtggcttacaggtatgaggtcctcaaggtcattgggaaggggagctttgggcaggtggtcaaggcctacgatcacaaagtccaccagcacgtggccctaaagatggtgcggaatgagaagcgcttccaccggcaagcagcggaggagatccgaatcctggaacacctgcggaagcaggacaaggataacacaatgaatgtcatccatatgctggagaatttcaccttccgcaaccacatctgcatgacgtttgagctgctgagcatgaacctctatgagctcatcaagaagaataaattccagggcttcagtctgcctttggttcgcaagtttgcccactcgattctgcagtgcttggatgctttgcacaaaaacagaataattcactgtgaccttaagcccgagaacattttgttaaagcagcagggtagaagcggtattaaagtaattgattttggctccagttgttacgagcatcagcgtgtctacacgtacatccagtcgcgtttttaccgggctccagaagtgatccttggggccaggtatggcatgcccattgatatgtggagcctgggctgcattttagcagagctcctgacgggttaccccctcttgcctggggaagatgaaggggaccagctggcctgtatgattgaactgttgggcatgccctcacagaaactgctggatgcatccaaacgagccaaaaattttgtgagctccaagggttatccccgttactgcactgtcacgactctctcagatggctctgtggtcctaaacggaggccgttcccggagggggaaactgaggggcccaccggagagcagagagtgggggaacgcgctgaaggggtgtgatgatccccttttccttgacttcttaaaacagtgtttagagtgggatcctgcagtgcgcatgaccccaggccaggctttgcggcacccctggctgaggaggcggttgccaaagcctcccaccggggagaaaacgtcagtgaaaaggataactgagagcaccggtgctatcacatctatatccaagttacctccaccttctagctcagcttccaaactgaggactaatttggcgcagatgacagatgccaatgggaatattcagcagaggacagtgttgccaaaacttgttagctgagctcacgtcccctgatgctggtaacctgaaagatacgacattgctgagccttactgggttgaaaaggagtagctcagacctgtttttatttgctcaataactctactcatttgtatcttttcagcacttaattttaatgtaagaaagttgttcattttgtttttataaaatacatgaggacaatgctttaagtttttatactttcagaaactttttgtgttctaaaagtacaatgagccttactgtatttagtgtggcagaataataacatcagtggcaggccactgattacttcatgactgccacgcatttacagattggtgtcaaagacattcactatgtttttatggttcatgttatatcctccccagggtgacagccccttaaggccctccttttccctccatgctccaggtccatgcacaggtgtagcatgtcctgcttccgtttttcataaattaatctgggtgttgggggtagtgggaggagaacggtcagaatcaaagtgacattctaagaaaaactgtaccttagagattttcctctagtgctcaaacaaatacaaaataagatccccaaggtttaaactgcccagttagcattctgacattctaaaagccggcaaagcagcttttagtggataaatgggaatggaaacgtgtgtgttcctccaaattttctagtatgatcggtgagctgttttgtaaagaagcctcatattacagagttgcttttgcacctaaatttagaattgtattccatgaactgttcctcccttttctctgcttttctcctctctgttcctcttttaataccacacgtctgttgcttgcatttagtttgtcttcttccttcagctgtgtatcccagactgttaatacagaaaagagacatttcagctgtgattatgaccattgtttcatattccaattaaaaaaagaacagcagcctagctacttaaggtggggatttccatagttccaaagaagatttagcagattagagtgagttcacacttttcaggtgccactgtaaggttctctcagcctgggaaactatcaactctttctttaaaaagaaagagggttgaaaatcctctggacgaacagaagtcactttggctgttcagtaaggccaatgttaacaacacgtttagaggaggaaaagttcaacctcaagttaaatggtttgacttattcttcgtatcattagaagaaccccagagatagcattcctctattttattttactttcttttggattgcactgattgtttttgtgggaatgacactttatctggcaaagtaactgagagtttggtaaaagaatattttcttctctgaataataattattttcacagtgaaaatttcagtattttatcactaatgtatgagcaatgatctatatcaatttcaaggcacgtgaaaaaaattttttagtatgtgcaatttaatatagaaagatttctgcctgtttggacaataggttttgggtagtacagattaggataagtaagcttatatatgcacagagattattgtattacctgtaaattgatttacaagtacttaaaagcgtggtccccagtgaggccaagaaagtttccggttaagttctttaataataatcctacagtttatcttaagaaaaaaaaaaaggtttgaaaaaaacactttaatttaggcttcgttggttgatggtggaaaaaaatgctcaggaaatatttcagatatttgccaaaaaaccagtaataaggttaccttattaaaatagtgatatttgctttactatttaaggtgtcactgataaattaatttgtacttctgtgtttagaaattatagcttcttttcccttagtcaaattttttagcatattatacacatttctgtgtaatctgtggaagtgcaataatatgttagtaagttacattttaaataatgctcatgtgacaatactcccaatcaatggcttatagaatttaaagatctgtatattagattttggcttaaaggcatgagaagtataagacttggtttggtggctttgtaagaccaccagcctcttaatgatggttagcttctttaggtcattaaatcaataaaaacatataatgctgttttgctcttctaatgctcctcttccatttccagttatcttcacatttacatttaaatatacaaacctgagcctgccattattaatttccctataaaatgacgatacatgtgaacatttataaatggactaatactgcttgtctttcccccaccgcacaaaactggttcttaagatgccagcaatgaatttgagactatctttatttataaatggaaaccggaaacttttataccaaactataataatgtgcagcactgtagggcttttttttttttccctccaaatacagtgaaatttttttattcacaagagctgccacatctcagcatttagtaatagagctgctttaataaaattctagtttgattgtcatgtcaaaaaaagaaaaatgttgcatctttgtgattttaaaacataaattaatgaaggctctgataggctattaggagttggcttggaaacagtttttggtctcacaggttaccattgtttggggatgtctgagctgttttcagatctaggaatagcacagtgttgtcttgtctttggcagtctcatttggctctgtttcttgcaccaccagcgtgttcattaccacttaaatatattgctacagcagtggaacaacagagtggtgcaagacactgtagattaacggtagaggagaaattgtgcccttagtgttaacaatgtgccttttgttctgaatgccatgttgtagggcatgcattttttggcctctttaactcttcgaattctagtcagtaagaatggaacccatctctgcaaagatacatctgtcttaaatatctagttacaggccttaatagaaaccataaggcatgactcatcttcaggcactgaaaaaagataaccatcaggtagtgttacacaaggacttcctatatttaaggggttaaagatggtctttgttgtatcttaacatcagactgatttttacattttttttttgttatgctaacactagacaaaaatcaactgtatttgtaaaaatttacctcaaaccatttaattttatagtgtgattaatcccagggcatttggtatgaaccaaagtgcattccttttatatgtgcctggctctagtaaggatggccagggatttttacaatttgggtgcaaggcacttaagccacttttaaacttaatgggtggtttggggtcgtgttaaatgactccatcagaatgttagaaaacactttaggcatcagtagcattgggccatattggaatcctaaagtgtgaattattttaaggagagcattcatttttgtaatttttttcatcaaaaatatttctggtaagcagaagactttttaaaaaaactgatctggtctcggtaaaggttttaatattgcccaacataatgctgtaatagcattaaaaaaagtatttgtgaactctgtttcttaggggcttgtacatctctctgctatggacatacataaaattaattgtaattatactcagctcaactgctacagttctgtctaggcagtggcttgggtttttatcgagcaacaacttagacacgtgactgtaatatgctgcaactgtgtgtactgaaaatatgtgaaaatggttgaatgtggactgtgtatatatgtatgtaaaaatttctgtgagatgctgctgtcgccacttaacattaaatatgttctagtggattttaatcctagtggccagttctatgatactgtatgtattatacagctgatgacaggagtaagactgtttagtgaatatctgttaaattttattgttgtggccagagataatttcagaataaaattttaatgtcctacctta

SEQ ID NO: 564 - DNA, 6159 bp, Homo sapiens
cgcgggggcgcgcgcgcgcgggcccgggagaggctcccgagccaggcggtcttcggtcctcgcagcgcttccagctccccgcgcccctatgtgagggagacggggaggcccgcggcgcgcaggggagggcgaggcatgtgcacgggccggagggtgctgcagccgcccgaggaagaggaggacggcggcgaggaggagagcggggggctcgcggcggcgggccccggccgaggggatgcagtggactgtgtgtgtctggctgtagcagacgcgaggcggcgacgaggcgccggggacccgcgcgaggggcggccgggaggcggcggcggcggccgccagaagtagcagcaggaccggcggcggcgacggcagccctgaaatgcattttcctctccagcggccatgttaaccaggaaaccttcggccgccgctcccgccgcctacccgaccggccgaggtggggacagcgccgttcgtcagcttcaggcttccccggggctcggtgcaggggccacccggagcggagtggggactggcccgccctcccccatcgccctgccgcctctccgggccagcaacgctgccgccgcagcccacacgattggcggcagtaagcacacaatgaatgatcacctgcatgtcggcagccacgctcacggacagatccaggttcaacagttgtttgaggataacagtaacaagcggacagtgctcacgacacaaccaaatgggcttacaacagtgggcaaaacgggcttgccagtggtgccagagcggcagctggacagcattcatagacggcaggggagctccacctctctaaagtccatggaaggcatggggaaggtgaaagccacccccatgacacctgaacaagcaatgaagcaatacatgcaaaaactcacagccttcgaacaccatgagattttcagctaccctgaaatatatttcttgggtctaaatgctaagaagcgccagggcatgacaggtgggcccaacaatggtggctatgatgatgaccagggatcatatgtgcaggtgccccacgatcacgtggcttacaggtatgaggtcctcaaggtcattgggaaggggagctttgggcaggtggtcaaggcctacgatcacaaagtccaccagcacgtggccctaaagatggtgcggaatgagaagcgcttccaccggcaagcagcggaggagatccgaatcctggaacacctgcggaagcaggacaaggataacacaatgaatgtcatccatatgctggagaatttcaccttccgcaaccacatctgcatgacgtttgagctgctgagcatgaacctctatgagctcatcaagaagaataaattccagggcttcagtctgcctttggttcgcaagtttgcccactcgattctgcagtgcttggatgctttgcacaaaaacagaataattcactgtgaccttaagcccgagaacattttgttaaagcagcagggtagaagcggtattaaagtaattgattttggctccagttgttacgagcatcagcgtgtctacacgtacatccagtcgcgtttttaccgggctccagaagtgatccttggggccaggtatggcatgcccattgatatgtggagcctgggctgcattttagcagagctcctgacgggttaccccctcttgcctggggaagatgaaggggaccagctggcctgtatgattgaactgttgggcatgccctcacagaaactgctggatgcatccaaacgagccaaaaattttgtgagctccaagggttatccccgttactgcactgtcacgactctctcagatggctctgtggtcctaaacggaggccgttcccggagggggaaactgaggggcccaccggagagcagagagtgggggaacgcgctgaaggggtgtgatgatccccttttccttgacttcttaaaacagtgtttagagtgggatcctgcagtgcgcatgaccccaggccaggctttgcggcacccctggctgaggaggcggttgccaaagcctcccaccggggagaaaacgtcagtgaaaaggataactgagagcaccggtgctatcacatctatatccaagttacctccaccttctagctcagcttccaaactgaggactaatttggcgcagatgacagatgccaatgggaatattcagcagaggacagtgttgccaaaacttgttagctgagctcacgtcccctgatgctggtaacctgaaagatacgacattgctgagccttactgggttgaaaaggagtagctcagacctgtttttatttgctcaataactctactcatttgtatcttttcagcacttaattttaatgtaagaaagttgttcattttgtttttataaaatacatgaggacaatgctttaagtttttatactttcagaaactttttgtgttctaaaagtacaatgagccttactgtatttagtgtggcagaataataacatcagtggcaggccactgattacttcatgactgccacgcatttacagattggtgtcaaagacattcactatgtttttatggttcatgttatatcctccccagggtgacagccccttaaggccctccttttccctccatgctccaggtccatgcacaggtgtagcatgtcctgcttccgtttttcataaattaatctgggtgttgggggtagtgggaggagaacggtcagaatcaaagtgacattctaagaaaaactgtaccttagagattttcctctagtgctcaaacaaatacaaaataagatccccaaggtttaaactgcccagttagcattctgacattctaaaagccggcaaagcagcttttagtggataaatgggaatggaaacgtgtgtgttcctccaaattttctagtatgatcggtgagctgttttgtaaagaagcctcatattacagagttgcttttgcacctaaatttagaattgtattccatgaactgttcctcccttttctctgcttttctcctctctgttcctcttttaataccacacgtctgttgcttgcatttagtttgtcttcttccttcagctgtgtatcccagactgttaatacagaaaagagacatttcagctgtgattatgaccattgtttcatattccaattaaaaaaagaacagcagcctagctacttaaggtggggatttccatagttccaaagaagatttagcagattagagtgagttcacacttttcaggtgccactgtaaggttctctcagcctgggaaactatcaactctttctttaaaaagaaagagggttgaaaatcctctggacgaacagaagtcactttggctgttcagtaaggccaatgttaacaacacgtttagaggaggaaaagttcaacctcaagttaaatggtttgacttattcttcgtatcattagaagaaccccagagatagcattcctctattttattttactttcttttggattgcactgattgtttttgtgggaatgacactttatctggcaaagtaactgagagtttggtaaaagaatattttcttctctgaataataattattttcacagtgaaaatttcagtattttatcactaatgtatgagcaatgatctatatcaatttcaaggcacgtgaaaaaaattttttagtatgtgcaatttaatatagaaagatttctgcctgtttggacaataggttttgggtagtacagattaggataagtaagcttatatatgcacagagattattgtattacctgtaaattgatttacaagtacttaaaagcgtggtccccagtgaggccaagaaagtttccggttaagttctttaataataatcctacagtttatcttaagaaaaaaaaaaaggtttgaaaaaaacactttaatttaggcttcgttggttgatggtggaaaaaaatgctcaggaaatatttcagatatttgccaaaaaaccagtaataaggttaccttattaaaatagtgatatttgctttactatttaaggtgtcactgataaattaatttgtacttctgtgtttagaaattatagcttcttttcccttagtcaaattttttagcatattatacacatttctgtgtaatctgtggaagtgcaataatatgttagtaagttacattttaaataatgctcatgtgacaatactcccaatcaatggcttatagaatttaaagatctgtatattagattttggcttaaaggcatgagaagtataagacttggtttggtggctttgtaagaccaccagcctcttaatgatggttagcttctttaggtcattaaatcaataaaaacatataatgctgttttgctcttctaatgctcctcttccatttccagttatcttcacatttacatttaaatatacaaacctgagcctgccattattaatttccctataaaatgacgatacatgtgaacatttataaatggactaatactgcttgtctttcccccaccgcacaaaactggttcttaagatgccagcaatgaatttgagactatctttatttataaatggaaaccggaaacttttataccaaactataataatgtgcagcactgtagggcttttttttttttccctccaaatacagtgaaatttttttattcacaagagctgccacatctcagcatttagtaatagagctgctttaataaaattctagtttgattgtcatgtcaaaaaaagaaaaatgttgcatctttgtgattttaaaacataaattaatgaaggctctgataggctattaggagttggcttggaaacagtttttggtctcacaggttaccattgtttggggatgtctgagctgttttcagatctaggaatagcacagtgttgtcttgtctttggcagtctcatttggctctgtttcttgcaccaccagcgtgttcattaccacttaaatatattgctacagcagtggaacaacagagtggtgcaagacactgtagattaacggtagaggagaaattgtgcccttagtgttaacaatgtgccttttgttctgaatgccatgttgtagggcatgcattttttggcctctttaactcttcgaattctagtcagtaagaatggaacccatctctgcaaagatacatctgtcttaaatatctagttacaggccttaatagaaaccataaggcatgactcatcttcaggcactgaaaaaagataaccatcaggtagtgttacacaaggacttcctatatttaaggggttaaagatggtctttgttgtatcttaacatcagactgatttttacattttttttttgttatgctaacactagacaaaaatcaactgtatttgtaaaaatttacctcaaaccatttaattttatagtgtgattaatcccagggcatttggtatgaaccaaagtgcattccttttatatgtgcctggctctagtaaggatggccagggatttttacaatttgggtgcaaggcacttaagccacttttaaacttaatgggtggtttggggtcgtgttaaatgactccatcagaatgttagaaaacactttaggcatcagtagcattgggccatattggaatcctaaagtgtgaattattttaaggagagcattcatttttgtaatttttttcatcaaaaatatttctggtaagcagaagactttttaaaaaaactgatctggtctcggtaaaggttttaatattgcccaacataatgctgtaatagcattaaaaaaagtatttgtgaactctgtttcttaggggcttgtacatctctctgctatggacatacataaaattaattgtaattatactcagctcaactgctacagttctgtctaggcagtggcttgggtttttatcgagcaacaacttagacacgtgactgtaatatgctgcaactgtgtgtactgaaaatatgtgaaaatggttgaatgtggactgtgtatatatgtatgtaaaaatttctgtgagatgctgctgtcgccacttaacattaaatatgttctagtggattttaatcctagtggccagttctatgatactgtatgtattatacagctgatgacaggagtaagactgtttagtgaatatctgttaaattttattgttgtggccagagataatttcagaataaaattttaatgtcctacctta

SEQ ID NO: 565 - DNA, 2141 bp, Homo sapiens
cgggagcgaaagtgcgctgagctgcagtgtctggtcgagagtacccgtgggagcgtcgcgccgcggaggcagccgtcccggcgtaggtggcgtggccgaccggacccccaactggcgcctctccccgagcggggtcccgagctaggagatgggaggcacagctcgtgggcctgggcggaaggatgcggggccgcctggggccgggctcccgccccagcagcggagttgggggatggtgtctatgacaccttcatgatgatagatgaaaccaaatgtcccccctgttcaaatgtactctgcaatccttctgaaccacctccacccagaagactaaatatgaccgctgagcagtttacaggagatcatactcagcactttttggatggaggtgagatgaaggtagaacagctgtttcaagaatttggcaacagaaaatccaatactattcagtcagatggcatcagtgactctgaaaaatgctctcctactgtttctcagggtaaaagttcagattgcttgaatacagtaaaatccaacagttcatccaaggcacccaaagtggtgcctctgactccagaacaagccctgaagcaatataaacaccacctcactgcctatgagaaactggaaataattaattatccagaaatttactttgtaggtccaaatgccaagaaaagacatggagttattggtggtcccaataatggagggtatgatgatgcagatggggcctatattcatgtacctcgagaccatctagcttatcgatatgaggtgctgaaaattattggcaaggggagttttgggcaggtggccagggtctatgatcacaaacttcgacagtacgtggccctaaaaatggtgcgcaatgagaagcgctttcatcgtcaagcagctgaggagatccggattttggagcatcttaagaaacaggataaaactggtagtatgaacgttatccacatgctggaaagtttcacattccggaaccatgtttgcatggcctttgaattgctgagcatagacctttatgagctgattaaaaaaaataagtttcagggttttagcgtccagttggtacgcaagtttgcccagtccatcttgcaatctttggatgccctccacaaaaataagattattcactgcgatctgaagccagaaaacattctcctgaaacaccacgggcgcagttcaaccaaggtcattgactttgggtccagctgtttcgagtaccagaagctctacacatatatccagtctcggttctacagagctccagaaatcatcttaggaagccgctacagcacaccaattgacatatggagttttcgctgcatccttgcagaacttttaacaggacagcctctcttccctggagaggatgaaggagaccagttggcctgcatgatggagcttctagggatgccaccaccaaaacttctggagcaatccaaacgtgccaagtactttattaattccaagggcataccccgctactgctctgtgactacccaggcagatgggagggttgtgcttgtggggggtcgctcacgtaggggtaaaaagcggggtcccccaggcagcaaagactgggggacagcactgaaagggtgtgatgactacttgtttatagagttcttgaaaaggtgtcttcactgggacccctctgcccgcttgaccccagctcaagcattaagacacccttggattagcaagtctgtccccagacctctcaccaccatagacaaggtgtcagggaaacgggtagttaatcctgcaagtgctttccagggattgggttctaagctgcctccagttgttggaatagccaataagcttaaagctaacttaatgtcagaaaccaatggtagtatacccctatgcagtgtattgccaaaactgattagctagtggacagagatatgcccagagatgcatatgtgtatatttttatgatcttacaaacctgcaaatggaaaaaatgcaagcccattggtggatgtttttgttagagtagactttttttaaacaagacaaaacatttttatatgattataaaagaattcttcaagggctaattacctaaccagcttgtattggccatctggaatatgcattaaatgactttttataggtca

SEQ ID NO: 566 - DNA, 1860 bp, Homo sapiens
agtgtgagctgttgaaagcctgcagctaaacaccagtgttacttcactcccctttgtggacaccaaggggaagaagaatacggtaagcttcccacacattagcaagaaagtcctgctgaagtcatccctgctgtatcaggagaatcaagctcacaatcagatgccggcctcagagctcaaggcttcagaaatacctttccaccctagcattaaaacccaggatcccaaggcagaggagaagtcaccaaagaagcaaaaggtgactctgacagcggcagaggccctaaagctttttaagaaccagctgtctccatatgaacaaagtgaaatcctgggctacgcggagctgtggttcctgggtcttgaagccaagaagctcgacacggctcctgagaaatttagcaagacgagttttgatgatgagcatggcttctatctgaaggttctgcatgatcacattgcctaccgctatgaagttctggagacaatcgggaaggggtcctttggacaggtggccaagtgcttggatcacaaaaacaatgagctggtggccctgaaaatcatcaggaacaagaagaggtttcaccagcaggccctgatggagctgaagatcctggaagctctcagaaagaaggacaaagacaacacctacaatgtggtgcatatgaaggactttttctactttcgcaatcacttctgcatcacctttgagctcctgggaatcaacttgtatgagttgatgaagaataacaactttcaaggcttcagtctgtccatagttcggcgcttcactctctctgttttgaagtgcttgcagatgctttcggtagagaaaatcattcactgtgatctcaagcccgaaaatatagtgctataccaaaagggccaagcctctgttaaagtcattgactttggatcaagctgttatgaacaccagaaagtatacacgtacatccaaagccggttctaccgatccccagaagtgatcctgggccacccctacgacgtggccattgacatgtggagcctgggctgcatcacggcggagttgtacacgggctaccccctgttccccggggagaatgaggtggagcagctggcctgcatcatggaggtgctgggtctgccgccagccggcttcattcagacagcctccaggagacagacattctttgattccaaaggttttcctaaaaatataaccaacaacagggggaaaaaaagatacccagattccaaggacctcacgatggtgctgaaaacctatgacaccagcttcctggactttctcagaaggtgtttggtatgggaaccttctcttcgcatgaccccggaccaggccctcaagcatgcttggattcatcagtctcggaacctcaagccacagcccaggccccagaccctgaggaaatccaattcctttttcccctctgagacaaggaaggacaaggttcaaggctgtcatcactcgagcagaaaagcagatgagatcaccaaagagactacagagaaaacaaaagatagccccacgaagcatgttcagcattcaggtgatcagcaggactgtctccagcacggagctgacactgttcagctgcctcaactggtagacgctcccaagaagtcagaggcagctgtcggggcggaggtgtccatgacctccccaggacagagcaaaaacttctccctcaagaacacaaacgttttaccccctattgtatgacctttgctgagggtatgtcctgctcctttccaccagtgatttgtattaagacagcacttatattgtacaatacttcagactgttttttttaaatacataaaactttatgttaaaaaactctaaaaaaaaaaaaaaaa

SEQ ID NO: 567 - DNA, 6907 bp, Homo sapiens
ccgcccagccaggtgcaaaatgccgtgtcattgggagactccgcagccggagcattagattacagctcgacggagctcgggaagggcggcgggggtggaagatgagcagaagcccctgttctcggaacgccggctgacaagcggggtgagcgcagccggggcggggacccagcctagcccactggagcagccgggggtggcccgttcccctttaagagcaactgctctaagccaggagccagagattcgagccggcctcgcccagccagccctctccagcgaggggacccacaagcggcgcctcggccctcccgacctttccgagccctctttgcgccctgggcgcacggggccctacacgcgccaagcatgctgagggtcttcatcctctatgccgagaacgtccacacacccgacaccgacatcagcgatgcctactgctccgcggtgtttgcaggggtgaagaagagaaccaaagtcatcaagaacagcgtgaaccctgtatggaatgagggatttgaatgggacctcaagggcatccccctggaccagggctctgagcttcatgtggtggtcaaagaccatgagacgatggggaggaacaggttcctgggggaagccaaggtcccactccgagaggtcctcgccacccctagtctgtccgccagcttcaatgcccccctgctggacaccaagaagcagcccacaggggcctcgctggtcctgcaggtgtcctacacaccgctgcctggagctgtgcccctgttcccgccccctactcctctggagccctccccgactctgcctgacctggatgtagtggcagacacaggaggagaggaagacacagaggaccagggactcactggagatgaggcggagccattcctggatcaaagcggaggcccgggggctcccaccaccccaaggaaactaccttcacgtcctccgccccactaccccgggatcaaaagaaagcgaagtgcgcctacatctagaaagctgctgtcagacaaaccgcaggatttccagatcagggtccaggtgatcgaggggcgccagctgccgggggtgaacatcaagcctgtggtcaaggttaccgctgcagggcagaccaagcggacgcggatccacaagggaaacagcccactcttcaatgagactcttttcttcaacttgtttgactctcctggggagctgtttgatgagcccatctttatcacggtggtagactctcgttctctcaggacagatgctctcctcggggagttccggatggacgtgggcaccatttacagagagccccggcacgcctatctcaggaagtggctgctgctctcagaccctgatgacttctctgctggggccagaggctacctgaaaacaagcctttgtgtgctggggcctggggacgaagcgcctctggagagaaaagacccctctgaagacaaggaggacattgaaagcaacctgctccggcccacaggcgtagccctgcgaggagcccacttctgcctgaaggtcttccgggccgaggacttgccgcagatggacgatgccgtgatggacaacgtgaaacagatctttggcttcgagagtaacaagaagaacttggtggacccctttgtggaggtcagctttgcggggaaaatgctgtgcagcaagatcttggagaagacggccaaccctcagtggaaccagaacatcacactgcctgccatgtttccctccatgtgcgaaaaaatgaggattcgtatcatagactgggaccgcctgactcacaatgacatcgtggctaccacctacctgagtatgtcgaaaatctctgcccctggaggagaaatagaagaggagcctgcaggtgctgtcaagccttcgaaagcctcagacttggatgactacctgggcttcctccccacttttgggccctgctacatcaacctctatggcagtcccagagagttcacaggcttcccagacccctacacagagctcaacacaggcaagggggaaggtgtggcttatcgtggccggcttctgctctccctggagaccaagctggtggagcacagtgaacagaaggtggaggaccttcctgcggatgacatcctccgggtggagaagtaccttaggaggcgcaagtactccctgtttgcggccttctactcagccaccatgctgcaggatgtggatgatgccatccagtttgaggtcagcatcgggaactacgggaacaagttcgacatgacctgcctgccgctggcctccaccactcagtacagccgtgcagtctttgacgggtgccactactactacctaccctggggtaacgtgaaacctgtggtggtgctgtcatcctactgggaggacatcagccatagaatcgagactcagaaccagctgcttgggattgctgaccggctggaagctggcctggagcaggtccacctggccctgaaggcgcagtgctccacggaggacgtggactcgctggtggctcagctgacggatgagctcatcgcaggctgcagccagcctctgggtgacatccatgagacaccctctgccacccacctggaccagtacctgtaccagctgcgcacccatcacctgagccaaatcactgaggctgccctggccctgaagctcggccacagtgagctccctgcagctctggagcaggcggaggactggctcctgcgtctgcgtgccctggcagaggagccccagaacagcctgccggacatcgtcatctggatgctgcagggagacaagcgtgtggcataccagcgggtgcccgcccaccaagtcctcttctcccggcggggtgccaactactgtggcaagaattgtgggaagctacagacaatctttctgaaatatccgatggagaaggtgcctggcgcccggatgccagtgcagatacgggtcaagctgtggtttgggctctctgtggatgagaaggagttcaaccagtttgctgaggggaagctgtctgtctttgctgaaacctatgagaacgagactaagttggcccttgttgggaactggggcacaacgggcctcacctaccccaagttttctgacgtcacgggcaagatcaagctacccaaggacagcttccgcccctcggccggctggacctgggctggagattggttcgtgtgtccggagaagactctgctccatgacatggacgccggtcacctgagcttcgtggaagaggtgtttgagaaccagacccggcttcccggaggccagtggatctacatgagtgacaactacaccgatgtgaacggggagaaggtgcttcccaaggatgacattgagtgcccactgggctggaagtgggaagatgaggaatggtccacagacctcaaccgggctgtcgatgagcaaggctgggagtatagcatcaccatccccccggagcggaagccgaagcactgggtccctgctgagaagatgtactacacacaccgacggcggcgctgggtgcgcctgcgcaggagggatctcagccaaatggaagcactgaaaaggcacaggcaggcggaggcggagggcgagggctgggagtacgcctctctttttggctggaagttccacctcgagtaccgcaagacagatgccttccgccgccgccgctggcgccgtcgcatggagccactggagaagacggggcctgcagctgtgtttgcccttgagggggccctgggcggcgtgatggatgacaagagtgaagattccatgtccgtctccaccttgagcttcggtgtgaacagacccacgatttcctgcatattcgactatgggaaccgctaccatctacgctgctacatgtaccaggcccgggacctggctgcgatggacaaggactctttttctgatccctatgccatcgtctccttcctgcaccagagccagaagacggtggtggtgaagaacacccttaaccccacctgggaccagacgctcatcttctacgagatcgagatctttggcgagccggccacagttgctgagcaaccgcccagcattgtggtggagctgtacgaccatgacacttatggtgcagacgagtttatgggtcgctgcatctgtcaaccgagtctggaacggatgccacggctggcctggttcccactgacgaggggcagccagccgtcgggggagctgctggcctcttttgagctcatccagagagagaagccggccatccaccatattcctggttttgaggtgcaggagacatcaaggatcctggatgagtctgaggacacagacctgccctacccaccaccccagagggaggccaacatctacatggttcctcagaacatcaagccagcgctccagcgtaccgccatcgagatcctggcatggggcctgcggaacatgaagagttaccagctggccaacatctcctcccccagcctcgtggtagagtgtgggggccagacggtgcagtcctgtgtcatcaggaacctccggaagaaccccaactttgacatctgcaccctcttcatggaagtgatgctgcccagggaggagctctactgcccccccatcaccgtcaaggtcatcgataaccgccagtttggccgccggcctgtggtgggccagtgtaccatccgctccctggagagcttcctgtgtgacccctactcggcggagagtccatccccacagggtggcccagacgatgtgagcctactcagtcctggggaagacgtgctcatcgacattgatgacaaggagcccctcatccccatccaggaggaagagttcatcgattggtggagcaaattctttgcctccataggggagagggaaaagtgcggctcctacctggagaaggattttgacaccctgaaggtctatgacacacagctggagaatgtggaggcctttgagggcctgtctgacttttgtaacaccttcaagctgtaccggggcaagacgcaggaggagacagaagatccatctgtgattggtgaatttaagggcctcttcaaaatttatcccctcccagaagacccagccatccccatgcccccaagacagttccaccagctggccgcccagggaccccaggagtgcttggtccgtatctacattgtccgagcatttggcctgcagcccaaggaccccaatggaaagtgtgatccttacatcaagatctccatagggaagaaatcagtgagtgaccaggataactacatcccctgcacgctggagcccgtatttggaaagatgttcgagctgacctgcactctgcctctggagaaggacctaaagatcactctctatgactatgacctcctctccaaggacgaaaagatcggtgagacggtcgtcgacctggagaacaggctgctgtccaagtttggggctcgctgtggactcccacagacctactgtgtctctggaccgaaccagtggcgggaccagctccgcccctcccagctcctccacctcttctgccagcagcatagagtcaaggcacctgtgtaccggacagaccgtgtaatgtttcaggataaagaatattccattgaagagatagaggctggcaggatcccaaacccacacctgggcccagtggaggagcgtctggctctgcatgtgcttcagcagcagggcctggtcccggagcacgtggagtcacggcccctctacagccccctgcagccagacatcgagcaggggaagctgcagatgtgggtcgacctatttccgaaggccctggggcggcctggacctcccttcaacatcaccccacggagagccagaaggtttttcctgcgttgtattatctggaataccagagatgtgatcctggatgacctgagcctcacgggggagaagatgagcgacatttatgtgaaaggttggatgattggctttgaagaacacaagcaaaagacagacgtgcattatcgttccctgggaggtgaaggcaacttcaactggaggttcattttccccttcgactacctgccagctgagcaagtctgtaccattgccaagaaggatgccttctggaggctggacaagactgagagcaaaatcccagcacgagtggtgttccagatctgggacaatgacaagttctcctttgatgattttctgggctccctgcagctcgatctcaaccgcatgcccaagccagccaagacagccaagaagtgctccttggaccagctggatgatgctttccacccagaatggtttgtgtccctttttgagcagaaaacagtgaagggctggtggccctgtgtagcagaagagggtgagaagaaaatactggcgggcaagctggaaatgaccttggagattgtagcagagagtgagcatgaggagcggcctgctggccagggccgggatgagcccaacatgaaccctaagcttgaggacccaaggcgccccgacacctccttcctgtggtttacctccccatacaagaccatgaagttcatcctgtggcggcgtttccggtgggccatcatcctcttcatcatcctcttcatcctgctgctgttcctggccatcttcatctacgccttcccgaactatgctgccatgaagctggtgaagcccttcagctgaggactctcctgccctgtagaaggggccgtggggtcccctccagcatgggactggcctgcctcctccgcccagctcggcgagctcctccagacctcctaggcctgattgtcctgccagggtgggcagacagacagatggaccggcccacactcccagagttgctaacatggagctctgagatcaccccacttccatcatttccttctcccccaacccaacgcttttttggatcagctcagacatatttcagtataaaacagttggaaccacaaaaaaaaaaaaaaaaaaaaaaaaa

SEQ ID NO: 568 - DNA, 35994 bp, Human adenovirus E1A, E1B
catcatcaataatataccttattttttttgtgtgagttaatatgcaaataaggcgtgaaaatttggggatggggcgcgctgattggctgtgacagcggcgttcgttaggggcggggcaggtgacgttttgatgacgcgactatgaggaggagttagtttgcaagttctggtggggaaaagtgacgtcaaacgaggtgtggtttaaacacggaaatactcaattttcccacgctgtctaacaggaaatgaggtgtttttgggcggatgcaagtgaaaacggaccattttcgcgcgaaaactgaatgaggaagtgaaatctgagtaatttagtgtttatgacagggaggagtatttgccgagggccgagtagactttgaccgtttacgtgggggtttcgattaccgtgtttttcacctaaagttccgcgtacggtgtcaaagtccggtgtttttacgtaggtgtcagctgatcgtcagggtatttaaacctgcgctctgcagtcaagaggccactcttgagtgccagcgagaagagttttctcctccgcgccgcgagtcagatctacactttgaaatatgaggcacctaagagacctgcccgatgaggaaattatcatcgcttccgggagcgagattctggaactggtggtaaatgctatgatgggcgacgaccatccggaaccccccaccccatttgagacaccttcgctgcacgatttgtatgatctggaggtggatgtgcccgaggacgaccccaacgagaaggcggtaaatgatttatttagcgatgccgcgctgctagctgccgaggaggcttcaagccctagctcagacagcgactcttcactgcatacccctagacacgacagaggtgagaaagagatccccgggcttaaatgggaaaagatggacttgcgttgctatgaggaatgcctgcccccaagcgatgatgaggacgagcaggcgattcagaacgcagcgagccatggagtgcaagccgtcagcgagagctttgcactggactgcccgcctttgcccggacacggctgtaagtcttgtgaatttcatcgcatcaatactggagataaagctgtgttatgtgcactttgctatatgagagcgtacaaccattgtgtttacagtaagtgtgattaagtgaactttaaagggaggcaaagagtagggtgactgggtgatgactggtttatttatgtatatctgttttttatataggtcccgtttctgacgcagatgatgagacccccactacagagtccactttgtcaccccctgaaattggcacgtctccatctgacaatattgttagaccagttcctgtaagagccactgggaggagagcagctgtagaatgtttggatgatttgcttcagggtggagatgaacctttggacttgtgtacccggaaacgccccaggcattaagtgccacacatgtgtgtttacttgaggtgatgtcagtatttatagggtgtggagtgcaataaaatatgtgttgactttaagtgcgtggtttatgactcaggggaggggactttgggtatataagcaggtgcagacctgtgtggttagctcagagcggtatggagatttggacggttttggaagactttcacaagactaggcagctgctagagaacgcctcgaacggagtctcttacctgtggagattctgcttcggcggtgacctagctaagctagtctatagggccaaacaggattatagggaacaatttgaggatattttgagagagtgtcctggtctttttgacgctcttaacttgggccatcagtctcactttaaccagagaatttcaagagcccttgactttactactcctggcagaaccactgcagcagtagccttttttgcttttatttttgacaaatggagtcaagaaacccatttcagcagggattaccagctggatttcttagcagtagctttgtggagaacatggaagtgccagcgcctgaatgcaatctccggctacttgccggtacagccgctagacactctgaggatcctgagtctccagcagcaggaggatcaagaagagaatccgagagccggcctggaccctccggcggaggagtagctgacctgtttcctgaactgcaccgggtgctgactaggtcttcgagtggtcgggagaggggtattaagcgggagaggcatgatgagactaatcacagaattgaactgactgtgggtctgatgagccgcaagcgtccagaaacagtgtggtggtatgaggtgcagtcaactggcacagatgaggtgtcagtcatgcatgagagattttccctagaacaagtcaagacttgttggttggagcctgaggatgattgggaggtagccatcaggaattatgccaagctggctctgaggccagatagaaagtacaagattactaagctgataaatatcagaaatgcctgctacatctcagggaatggggctgaagtggagatctgtctccaggatagagtggctttcagatgctgcatgatgaatatgtacccgggagtggtggacatggatggggtcacctttatgaacatgaggttcaggggagatgggtataatgggacggtctttatggccaataccaagctgacagtgcatggatgctccttctttgggtttaataacacctgcatcgaggcttggggtcaggtcggtgttaaggggtgcagtttttcagccaactggatgggggtagtgggcaggaccaagagtatgctgtctgtgaagaaatgcttgtttgagaggtgccacctgggggtgatgagcgagggcgaagccagaatccgccactgtgcctctaccgagacgggctgttttgtgctgtgcaagggcaatgccaagatcaagcataatatgatctgtggagcctcggacgagcgcggctaccagatgctgacctgcgccggtgggaacagtcatatgctggccgccgtgcatgtggcttcccattcccgcaagccctggcctgagttcgagcacaatgtcatgaccaggtgcaatatgcatctgggggctcgccgaggcatgtttatgccctaccagtgcaacctgaattatgtaaaggtgctcctggagcccgatgtcatgtccagagtgagcctgacgggggtgtttgacatgaatgtggaagtgtggaagattctaagatatgatgaatacaagaccaggtgtcgagcctgcgagtgcggagggaagcatgccaggttccagcccgtgtgtgtggatgtgacggaggacctgcgacccgatcatttggtgttgtcctgcaccgggacggagttcggctccagtggggaagaatctgactagagtgagtagtgttttggggagggagaggacctgcataaggggcagaatgattaaaatctgtgcttttctgtgtgttgcagcagcatgagcggaaacggctcctttgagggaggggtattcagcccttatctgacggggcgtctcccctcctgggcgggagtgcgtcaaaatgtgatgggatccacggtggacggccggcccgtacagcccgcgaactcttcaaccctgacctatgcaaccctgagctcctcgtcggtggacgcagctgccgccgcagctgctgcttctgccgccagcgccgtgcgcggaatggccatgggcgccggctattacggcactctggtggccaactcgagttccactaataatcccgccagcctgaacgaggagaagctgctgctgttgatggcccagctcgaggccttgacccagcgcctgggcgagctgacccagcaggtggctcagctgcaggagcagacgcgggccgcggttgccacggtgaaatccaaataaaaaatgaatcaataaataaacggagacggttgttgattttaaaaatcagagtctgaatctttatttgatttttcgcgcacggtaggccctggaccaccggcctcgatcattgagcacccggtggatcttttccaagacccggtagaggtgggattggatattgaggtacatgggcatgagcccgtcccgggggtgaaggtagctccattgcagggcctcgtgctcgggggtggtgttgtaaatcacccagtcatagcagggacgcagggcgtggtgttgcacaatatctttgaggaggagactgatggccacgggcagccctttggtgtaggtgtttacaaacctgttgagctgggagggatgcatgcggggggagatgaggtgcatcttagcctggatcttcagattggcgatgttaccgcccagatcccgcctgggattcatgttgtgcaggaccaccagcacggtgtatccggtgcacttggggaatttgtcatgcaacttggaagggaaggcatgaaagaatttggagacgcccttgtggccgcccaggttttccatgcactcatccatgataatggctatgggcccgtgggcggcggcttgggcaaagacgtttcgggggtcggacacatcgtagttgtggtcctgggtgagatcttcataggccattttaatgaatttggggcggagggtgcccgattgggggacgaaggtaccctcaatcccgggggcgtagtttccctcacagatctgcatctcccaggccttaagctccgagggggggatcatgtccacctgcggggcgataaagaaaacggtttccggggcgggggagatgagctgggcggaaagcaggttgcggagtagctgggacttaccgcagccggtggggccgtagataaccccaatgaccggctgcaggtggtagttgagggagacacagctgccgtcctccctaagaaggggggccacctcgttcatcatttggcgcacgtgcatgttctcgcgcaccagttccgccaggagtcgctctccgcccagcgagaggagctcctggagcgaggcgaagtttttcagcggcttgagcccgtcggccatgggcattttggaaagggtctgttgcaggagttccaagcggtcccagagctcggtgatgtgctctacggcatctcgatccagcagacctcctcgtttcgcgggttggggcgactgcgggagtagggcgccagacgatgggcgtccagcgcggccagggtccggtccttccagggtcgcagcgtccgcgtcagggtggtctccgtcacggtaaaggggtgcgcgccgggctgggcgcttgcgagggtgcgcttcaggctcatccggctggtcgagaaccgctcccgatcggcgccctgtgcgtcggccaggtagcaattgaccatgagttcgtagttgagcgcctcggccgcgtggcctttggcgcggagcttacctttggaagtctgcccacaggcgggacagaggagggacttgagggcgtagagcttgggggcgaggaagacggactcgggggcgtaggcgtccgcgccgcagtgggcgcagacggtctcgcactccacgagccaggtgaggtcgggctgattgggatcaaaaaccagttttccgccgttctttttgatgcgtttcttacctctggtctccatgagctcgtgtccccgctgggtgacaaagaggctgtccgtgtccccgtaaaccgactttatgggtcggtcctcgagtgggacgccgcggtcctcgtcgtagaggaaacccgaccactctgagacgaaggcccgggtccaagccagcacgaaggaggccacgtgggagggatagcggtcgttatccaccagcgggtccaccttctccagtgtatgcaaacacatgtccccctcgtccacatccaggaaggtgattggcttgtaagtgtaggccacgtgaccgggggtcccggccgggggggtataaaagggggcgggccgctgctcgtcttcactgtcttccggatcgctgtccaggagcgccagctgttggggtaggtattccctctcaaaggcgggcatgacctccgcactcaggttgtcagtttctagaaacgaggaggatttgatattgacggtgccggcggagatgcctttcaagagcccctcgtccatctggtcagaaaagacaatctttttgttgtcgagtttggtggcgaaggagccgtagagggcgttggagaggagcttggcgatggagcgcatggtctggttcttttccttgtcggcgcgctccttggcggcgatgttgagctgcacgtactcgcgcgccacgcacttccattcggggaagacggtggttagctcgtctggcacgattctgacctgccagccccggttatgcagggtgatgaggtcaacgctggtggccacctcgccgcgcaggggctcgttggtccagcagaggcggccgcccttgcgcgagcagaaggggggcagggggtccagcataagctcgtcgggggggtcagcatcgatggtgaagatgcctggcaggaggtcggggtcgaagtagcttatgcaggtgcccagatcgtccagagaagcttgccattcgcgcacggccagcgcgcgctcgtagggactaaggggcgtgccccagggcatggggtgggtgagcgcggaggcgtacatgccgcagatgtcgtagacgtagaggggctcatcaaggatgccaatgtaggtggggtagcagcggcccccgcggatgctggcgcgcacgtagtcatacaactcgtgcgagggggcgaggagcccggctccgagattggcgcggctgggtttttcggcgcggtagacgatctgacggaagatggcgtgggagttggaggagatggtgggtctttggaagatgttgaagtgggcgtggggcaggccgaccgagtcgcggatgaagtgggcgtaggagtcttgcagcttggcgacaagctcggcggtgacgaggacgtccagggcgcagtagtcaagggtctcttggatgatgtcatacttgagctggcccttttgtttccacagctcgcggttgagaaggaactcttcgcggtccttccagtactcttcaagggggaacccgtcctggtcggcacggtaagagcctagcatgtagaactggttaacggccttgtaggcgcagcagcccttctccacggggagggcataggcctgggcggccttgcgcagggaggtgtgcgtgagggcgaaggtgtccctgaccatgacctttaggaactggtgcttgaagtcgatatcgtcgcagcccccctgctcccagagctggaagtccgtgcgcttcttgtaggcggggttgggcaaagcgaaagtaacatcgttgaagaggatcttgcccgcgcggggcataaagttgcgagtgatgcggaaaggctggggcacctcggcccggttgttgatgacctgggcggcgagcacgatctcgtcgaagccgttaatgttgtggcccacaatgtatagttccacgaaccgcgggcggcccttgacgtggggcagtttcttgagctcctcgtaggtgagctcgtcggggtcgctgagcccgtgctgctcgagggcccagtcggcgagatgggggttggcgcggaggaaggaagtccagagatccacggccagggcggtttgcagacgatcccggtactggcggaactgctgacccacggccattttttcgggggtgacgcagtagaaggtgcgggggtcgccgtgccaacggtcccattttagctggagggcgagatcaagggcgagctcaacgagccggtcgtccccggagagtttcatgaccagcatgaaggggacgagctgcttgccgaaggaccccatccaggtgtaggtttccacatcgtaggtgaggaagagcctttcggtgcgaggatgcgagccgatggggaagaactggatctcctgccaccagttggaggaatggctgttgatgtgatggaagtagaaatgccgacggcgcgccgaacattcgtgcttgtgtttatacaagcggccacagtgctcgcaacgctgcacgggatgcacgtgctgcacgagctgtacctgggttcctttgacgaggaatttcagtgggaagtggagtcgtggcgcctgcatctggtgctgtactacgtcgtggtggtcggcctggccctcttctgcctcgatggtggtcatgctgacgagcccgcgcgggaggcaggtccagacctcggcgcgaacgggtcggagagcgaggacgagggcgcgcaggccggagctgtccagggtcctgagacgctgcggagtcaggtcagtgggcagcggcggcgcgcggttgacttgcaggagtttttcaagggcgcgcgggaggtccagatggtacttgatctccaccgcgccgttggtggcgacgtcgatggcttgcagtgtcccgtgcccctggggagtgaccaccgtcccccgtttcttcttggcgggcggaagcggtttggcttccatggttaaaagcggcggcgaggacgcgcgccgggcggtaggggcggctcgggacccggaggcagtggtggcaggggcacgtcggcgccgcgcgcgggcaggttctggtactgcgcccggagaagactggcgtgagcgacgacgcgacggttgacgtcctggatctgacgcctctgggtgaaggccacgggacccgtgagtttgaacctgaaagacagttcgacagaatcaatctcggtatcattgacggcggcctgccgcagaatctcttgcacgtcgcccgagttgtcctggtaggcaatctcggtcatgaactgctcgatctcctcctcctgaaggtctccgcggccggcgcgctccacggtggccgcgaggtcgttggagatgcggcccatgagctgcgagaaggcgttcatgcccgcctcgttccagacgcggctgtaaaccacggcgccctcgggatcgcgggcgcgcatgaccacctgggcgaggttgagctccacgtggcgcgcaaaaaccgcgtagttgcagaggcgctggtagaggtagttgagcgtggtggcaatgtgctcagtgacaaagaagtacataatccagcggcggagcggcatttcgctgacgtcgcccagggcttccaagcgctccatggcctcgtaaaagtccacggcgaagttgaaaaactgggagttgcgtgcagatacggtcaagtcctcctccagaagacggatgagctcggcgatggtggcgcgcacctcgcgctcgaaggctcccgggagttcctccacttcctcctcttcatccactaacatctcttctacttcctcctcaggcggtggtggcgggggagggggcctgcgtcgccggcggcgcacgggcagacggtcgatgaaacgctcgatggtctcgccgcgccggcgtcgcatggtctcggtgacggcgcgcccgtcctcgcggggtcgcagcgtaaagacgccgccgcgcatctccaggtggcccggggggtccccgttgggcagggagagtgcgctgacgatgcatcttatcaattgccccgtagggactccgcgcaaggacctaagcgtctctagatccacgggatctgaaaaccgttgaacgaaggcttcgagccagtcgcagtcgcaaggtaggctgagcacggtttcttctggcggcggtggggtgtgggcgggggcgatgctgctggtgatgaagttgaaataggcggttctgagacggcggatggtggcgaggagcaccaggtctttgggcccggcttgctggatgcgcagacggtcggccatgccccaggcgtggtcctgacacctggccaggtccttgtagtagtcctgcatgagccgctccacgggcacctcctcctcgcccgcgcggccgtgcatacgcgtgagcccaaacccgcgctgcggctggacgagcgccaggtcagcgacgacgcgctcggcgaggatggcctgctggatctgggtgagggtggtctggaagtcgtcaaagtcgacgaagcggtggtaggctccggtgttaatggtgtaggagcagttggccatgacggaccagttgacagtctggtgaccgggccgcgcgagctcgtggtacttgaggcgcgagtaggcgcgcgagtcgaagatgtagtcgttgcaggtgcgcaccaggtactggtagccgatgaggaagtgcggcggcggctggcggtagagcggccatcgctcggtggcgggggcgccgggcgctaggtcctcgagcatggtgcggtggtagccgtagatgtaccttgacatccaggtgatgccggcggcggtggtggaggcgcgagggaactcgcggacgcggttccagatgttgcgcagcggcaggaagtagttcatggtgggcacggtctggcccgtgaggcgcgcgcagtcgttgatgctctagacatacgggcaaaaacgaaagcggtcagcggctcgactccgtggcctggaggctaagcgaacgggttgggctgcgcgtgtaccccggttcgaatctcgaatcaggctggagccgcagctaacgtggtactggcactcccgtctcgacccaggcctgcacaaaacctccaggatacggaggcgggtcgttttgcaaatttttggcggtcgaaaaaagctagtaagcgcggaaagcggccgaccgcaatggctcactgccgtagattggagaagaatcgccagggttgcgttgcggtgtgccccggttcgagaccgctcgggtcggccgaattccgcggctaacgagggcgtggctgccccgtcgtttccaagaccccataagccagccgacttctccagttacggagcgagcccctcttttgttttgttttttgccagatgcatcccgtactgcggcagatgcgcccccaccctccaccgcaacagcagccccctcctacgcaacagccggcgcttctgcctccgccccagcagcagcaacttccagccactaccgccgcggccgccgtgagcggggccgggcagagtcagtatgacctggctttggaagagggcgaggggctggcgcgcctgggggcgtcgtcgccggagcggcacccgcgcgtgcagatgaaaagggacgctcgcgaggcctacgtgcccaagcagaacctgttcagagacaggagcggcgaggagcccgaggagatgcgcgcagcccgtttccacgcggggcgggagctgcggcgcggcctggacagaaagagggtgctgagggacgaggatttcgaggcggacgagctgacggggatcagccctgcgcgcgcgcacgtggccgcggccaacctggtcacggcgtacgagcagaccgtgaaggaggagagcaacttccaaaaatccttcaacaaccacgtgcgcaccctgatcgcgcgcgaggaggtgaccctgggcctgatgcacctgtgggacctgctggaggccattgtgcagaaccccaccagcaaaccgctgacggcgcagctgttcctggtggtgcagcacagtcgggacaacgagacttttagggaggcgctgctgaatatcaccgagcccgagggccgctggcttctggacctggtgaatattctgcagagcatcgtggtgcaggagcgcgggctgccgctgtccgagaagctggcggccatcaacttttcggtgctgagtttgggcaagtactacgctaggaagatctacaagaccccgtacgtgcccatagacaaggaggtgaagatcgacgggttttacatgcgcatgaccctgaaagtgctgaccctgagcgacgatctgggggtgtaccgcaacgacaggatgcgccgcgcggtaagcgccagcaggcggcgcgagctgagcgatcaggagctgatgcacagcctgcagcgggccctgaccggggccgggaccgagggggagagctactttgacatgggcgcggacctgcactggcagcccagccgccgggtcttggaagccgcggcggtcccttacgtagaagaggtggacgatgaggatgagggcgagtacctggaagactgatggcgcgaccgtatttttgctagatgcagcaacagccacctcctgatcccgcaatgcgggcggcgctgcagagccagccgtccggcattaactcctcggacgattggacccaggccatgcaacgcatcatggcgctgacgacccgcaaccccgaagcctttagacagcagccccaggccaaccggctctcggccatcctggaggccgtggtgccctcgcgctccaaccccacgcacgagaaggtgctggccatcgtgaacgcgctggttgagaacaaggccattcgcggcgacgaggccgggctggtgtacaacgcactgctggagcgcgtggcccgctacaacagcaccaacgtgcagaccaacctggaccgcatggtgaccgacgtgcgcgaagccgtggcccagcgcgaacggttccaccgcgagtccaacctgggatccatggtggcactgaacgccttcctcagcacgcagcccgccaacgtgccccggggccaggaggactacaccaacttcattagcgccctgcggctaatggtgaccgaggtgccccagagcgaggtgtaccagtcgggcccggactacttcttccagaccagtcgccagggcttgcagaccgtgaacctgagtcaggctttcaagaacttgcagggactgtggggcgtgcaggctccggtcggggaccgcgcgacggtgtcgagcctgctgacgccgaactcgcgcctgctgctgctgctggtggcgcccttcacggacagcggtagtatcaaccgcaactcgtacctgggctacctgattaacctgtaccgcgaggccattggccaggcgcacgtggacgagcagacctaccaggagattacccacgtgagccgcgcccttggccaggacgacccgggcaatctggaagccaccctgaacttcttgctgaccaaccggtcgcagaagatcccgccccagtacgcgctgagcgccgaggaggagcgtatattgagatacgtgcagcaaagtgtgggactgttcctgatgcaggagggggccacccccagcgccgcgctcgacatgaccgcgcgcaacatggagcccagcatgtacgccagtaatcgcccgtttattaataagctgatggactacctgcatcgggcggccgccatgaactctgactatttcaccaacgccatcctgaacccccactggctcccgccgccggggttctacacgggcgagtacgacatgcccgaccccaatgacgggtttctgtgggacgacgtggacagcagcgtgttctccccccgaccgggtgctaacgagcgccccttgtggaagaaagagggcagcgaccggcgcccgtcctcggcgctgtccggccgcacgggtgctgccgcagcggtgcccgaggccgccagtccctttccgagcttgtcactgaacagcgtccgcagtagcgagctgggcaggatcacgcgcccgcgcttgctgggcgaggaggagtacttaaataactcgctgttgaggcccgagcgggagaagaacttccccaataacgggatagagagtctggtggataagatgagccgctggaagacgtacgcgcatgagcacagggacgatccccgggcaacgcagggggccaccagccggggcagtgccgcccgtaaacgccgctggcacgacaggcagcggggactgatgtgggacgatgaggattccgccgacgacagcagcgtgttggacttgggcgggagtggtggtggtaacccgttcgctcacctgcgcccccgcgtcgggcgcctgatgtaaaaagaaaccaaaaataaatggtactcaccaaggccatggcgaccagcgtgcgttcgtttcttctctgttgtatctagtatgatgaggcgtgcgtacccggagggtcctcctccctcgtacgagagcgtgatgcagcaggcaatggcggcggcggcggcgatgcagcccccgctggaggctccttacgtgccaccgcggtacctggcgcctacggaggggcgaaacagcattcgttactcggagctggcacccttgtacgataccacccggttgtacctggtggacaacaagtcggcggacatcgcctcgctgaactaccagaacgaccacagcaactttctgaccaccgtggtgcagaacaacgatttcacccccacggaggccagcacccagaccatcaactttgacgagcgctcgcggtggggcggtcagctgaaaaccatcatgcataccaacatgcccaacgtgaacgagttcatgtacagcaacaagttcaaggcgcgggtcatggtctcccgcaagacccccaacggggtgacagtaggggatgattatgatggtagtcaggatgagctgaaatacgagtgggtggagtttgagctgcccgaaggcaacttctcggtgaccatgaccattgacctgatgaacaacgccatcatcgacaattacttggcagtggggcggcagaacggggtgctggagagcgacatcggcgtgaagttcgacacccggaacttcaggctgggttgggaccccgtgaccgagctggtcatgcccggggtgtacaccaacgaggccttccaccccgacatcgtgctgttgcccggctgcggggtggactttaccgagagccgcctcagtaatatgctgggcatccgcaagaggcagcccttccaggagggtttccagatcatgtacgaggacctggatggaggtaacatccccgcgctcttggatgtcgaggcctatgagaaaagcaaggaggagagcgtcgccgcgtcaaccgcagccgtagccaccgcctctaccgaggtccggggcgataattttgctagcgccgcagcagtggcggcggccaaggctgatgaaaccgaaagtaagatagttattcagccggtggagaaggatagcaaggataggagctacaacgtgctctcggacaagaaaaacaccgcctaccgcagctggtacctggcctacaactatggcgaccacgagaagggcgtgcgctcctggacgctgctcaccacctcggacgtcacctgcggcgtggagcaagtctactggtcgctgcccgacatgatgcaagacccggtcaccttccgctccacgcgtcaagttagcaactacccggtggtgggcgccgagctcatgcccgtctactccaagagcttcttcaacgagcaggccgtctactcgcagcagctgcgcgccttcacctcgctcacgcacgtcttcaaccgcttccctgagaaccagatcctcgtccgcccgcccgcgcccaccattaccaccgtcagtgaaaacgttcctgctctcacagatcacgggaccctgccgctgcgcagcagtatccggggagtccagcgcgtgaccgttactgacgccagacgccgcacctgcccctacgtctacaaggccctgggcatagtcgcgccgcgcgtcctctcgagccgcaccttctaaaaaatgtccattctcatctcgcccagtaataacaccggttggggtctgcgcgcgcccagcaagatgtacggaggcgctcgccaacgctccacgcaacaccccgtgcgcgtgcgcgggcacttccgcgctccctggggcgccctcaagggccgcgtgcggtcgcgcaccaccgtcgacgacgtgatcgaccaggtggtggccgacgctcgcaactacacccccgccgccgcgcccgtctccaccgtggacgccgtcattgacagcgtggtgtccgacgcgcgccggtacgcccgcgccaagagccggcggcggcgcatcgcccggcggcaccgtagcaccaccgccatgcgtgcggcgcgagccttgctgcgcagggccaggcgcacgggacgcagggccatgctcagggcggccagacgcgcggcttcaggcgccagcgccggcaggactcggagacgcgcggccacggcggcggcagcggccatagccagcatgtcccgcccgcggcgagggaacgtgtactgggtgcgcgacgccgccaccggtgtgcgcgtgcccgtgcgcacccgcccccctcgcacttgaagatgttcacttcgcgatgttgatgtgtcccagcggcgaggagaaggatgtccaagcgcaaattcaaggaagagatgctccaggtcatcgcgcctgagatctacggccccgcggcggcggtgaaggatgaaagaaatccccgcaaaatcaagcgggtcaaaaaggacaaaaaggaagaagatgatgtggacgatatggtagagtttgtgcgcgagtttgccccccggaggcgcgtgcagtggcgcgggcggaaagtgcgtccggtgctgagacccggcaccacggtggttttcgcgcctggcgagcggtccggcacgacatccaagcgctcctacgatgaggtgtacggggacgaggatattctcgagcaggcggccgagcgcctgggcgagtttgcttacggcaagcgcaaccgccttgcgcccctgaaggaagaggtggtgtccatcccgctggaccacggcaaccccacgccgagtcttaagcccgtgaccctgcagcaggtgctgccgagcgcggcgccgcgtcggggcttgaagcgcgagggcgaggatgtgtaccccaccatgcagctgatggtgcccaagcgccagaagctggaagacgtgctggagaccatgaaggtggacccggacgtgcagcccgaggtcaaggtgaggcccatcaagcaggtggccccgggccttggcgtgcagaccgtggacatcaagatccccacggagcccatggaaacgcagaccgaggtcgtgaagcccatcaccagcaccatggaggtgcagacggatccttggatgccggcggcgccccgaaaaccccggcgcaagtacggcgcggccagcctgctgatgcccaactacgcgctgcatccttccatcatccccacgccgggctaccgcggcacgcgcttctaccacggctataccggctcccgccgccgcaagaccaccacccgccgccgtcgtcgccgcacagctgcaactcccgctgccgccctggtgcggagagtgtaccgccgcggccgcgcgcctctgaccctgccgcgggcgcgctaccacccgagcattaccatttaactttgccgtcgcctttgcagatatggctctcacatgccgcattcgcgtccccattacgggctaccgaggaagaaaaccgcgccgtagaaggctggcgggaagcgggatgcgccgccacccccaccggcggcggcgcgccatcagcaagcggttggggggaggcttcctgcccgcgctgatccccatcatcgccgcggcgatcggggcgatccccggcattgcttccgtggcggtgcaggcctctcagcgccactgagacacacacttggaaattgtaataaacccgaatggactctgacgctcctggtcctgtgatgtgtttttgtagacagatggaagacatcaatttttcgtccctggctccgcgacacggcacgcggccgtttatgggcacctggagcgacatcggcaccagccaactgaacgggggcgccttcaattggagcagtctctggagcgggcttaagaattttgggtccacgcttaaaacctatggcagcaaggcgtggaacagcaccacagggcaggcgctgagagataagctgaaagagcagaacttccagcagaaggtagtcgatggcctcgcctcaggcatcaacggggtggtggacctggccaatcaggccgtgcagcggcagatcaacagccgcctggacccggttccccccgccggctccgtggagatgccgcaggtggaggaggagctgcctcccctggacaagcggggcgacaagcgtccccgtcccgacgcggaggagacgctgctgacgcacacggacgaaccgcccccgtacgaggaggcggtgaaactgggcctgcccaccacgcgtcccattgcgcctctagctaccggggtgctgaaacccgagagtagtaagcccgcgaccttggacttgcctcctccgcccactccccgcccctccacagtggctaagcccctgccgccggtggccgtggcccgcgcgcgaccgggggctcgccctcaggcgaactggcagagcactctgaacagcatcgtgggtctgggagtgcagagtgtgaagcgccgccgctgttattaaaaaacactgtagcgcttaacttgcttgtctgtgtatatgtgtatgtccgccgccgctgctgtccagaaggaggagtgaagagaaaggcgcgtcgtcgagttgcaagatggccaccccatcgatgctgccccagtgggcgtacatgcacatcgccggacaggacgcttcggagtacctgagtccgggtctggtgcagttcgcccgcgccacagacacctacttcagtctggggaacaagtttaggaaccccacggtggcgcctacccacgatgtgaccaccgaccgcagccagcggctgacgctgcgctttgtgcccgtggaccgggaggacaacacctactcgtacaaagtgcgctacacgctggccgtgggcgacaaccgcgtgctggacatggccagcacctactttgacatccgcggcgtgctggatcggggccctagcttcaaaccctactccggcactgcctacaacagcctggctcccaagggagcgcccaacacctgccagtggaaggattctgacagcaaaatgcatacctttggggcagctgccatgcccggtgttactgggaaaaagatagaagctgatgggctgcctattagaatagattcaacttctggaactgacacagtaatttatgctgataaaactttccaaccagaaccacaagttggaaatgacagttgggttgacaccaatggtgcagaggaaaaatatggaggcagagctctaaaggacactacaaaaatgaaaccctgttatggttcattcgccaagcctaccaacaaagaaggtggtcaggctaacttaaaagattcagaacccgccgccaccactcctaactatgatatagacctggctttctttgacagcaaaactattgttgctaactacgatccagatattgtaatgtacacagaaaatgttgacttgcagactccagatactcatattgtatacaaacctggaacagaggacaccagctctgaatccaatttgggtcagcaggccatgcctaacagacccaactacattggcttcagagacaattttatcgggctcatgtactacaacagcactggcaatatgggggtgctggccggtcaggcctctcagctgaatgctgtggttgacttgcaagacagaaacactgaactgtcctaccagctcttgcttgactctctgggtgacagaacccggtatttcagtatgtggaatcaggcggtggacagctatgatcctgatgtgcgcattattgaaaaccatggtgtggaggatgaattgccaaactattgctttccgttgaatggtgtgggattgacagacacttaccagggtgttaaagttaaaacagatgcaggttctgaaaagtgggacaaagatgacaccacagttagtaatgctaatgaaatccatgtaggcaatccttttgccatggaaatcaacatccaagccaacctgtggaggaacttcctctatgccaatgttgccctctatttgcctgataaatacaaatacacaccggccaacatcaccctgcccaccaacaccaacacctacgagtacatgaacggccgggtggtggcgccctcgctggtggacgcctacattaacattggggcgcgctggtcgctggaccccatggacaacgtaaatcccttcaaccaccaccgcaatgcgggcttgcgctaccgctccatgctcctgggcaacgggcgctacgtgccattccacatccaggtgccccagaaattttttgccattaagagcctcctgctcctgcccgggtcctacacctacgagtggaacttccgcaaggacgtcaacatgatcctgcagagttcccttggcaacgacctgcgcacagacggggcctccatcaccttcaccagcattaacctctacgccaccttcttccccatggcgcacaacaccgcctccacgcttgaggccatgctgcgcaacgacaccaatgaccaatccttcaacgactacctctcggcggccaacatgctctatcccatcccggccaacgccaccaacgtgcccatctccatcccctcgcgcaactgggccgcctttcgcggctggtccttcacgcgtctcaagaccaaagagacgccctcgctgggctccgggttcgacccctacttcgtctactcgggctccatcccctacctcgacggcaccttctacctcaaccacaccttcaagaaggtctccatcaccttcgactcttccgtcagctggcccggcaacgaccggctcctgacgcccaacgagttcgaaatcaagcgcaccgtcgacggcgagggatacaacgtggcccagtgcaacatgaccaaggactggttcctggtccagatgctggcccactacaacatcggctaccagggcttctacgtgcccgagggctacaaggaccgcatgtactccttcttccgcaacttccagcccatgagccgccaggtggtggacgaggttaactacaaggactaccaggccgtcaccctggcctaccaacacaacaactcgggcttcgttggatacctcgcgcccactatgcgccagggccagccctaccccgccaactacccctacccgctcatcggcaagagcgccgttaccagcgtcacccagaaaaagttcatctgcgacagggtcatgtggcgcatccccttctccagcaacttcatgtccatgggcgcgctcaccgacctcggccagaacatgctctatgctaactccgcccacgcgctagacatgaatttcgaagtcgaccccatggatgagtccacccttctctatgttgtcttcgaagtcttcgacgtcgtccgagtgcaccagccccaccgcggcgtcattgaggccgtctacctgcgcacccccttctcagccggtaacgccaccacataaattcttgcttcttgcaagaagccatggccgcgggctccggcgagcaggagctcagggccatcatccgcgacctggggtgcgggccctacttcctgggcaccttcgataagcgattcccgggattcatggccccgcacaaggtggcctgcgccatcgtcaacacggccggccgcgagaccgggggcgagcattggctggccttcgcctggaacccgcgctcgaacacctgctacctcttcgaccccttcgggttctcggaccagcgcctcaagcaaatctaccagttcgagtacgagggactgctgcgccgcagcgccctggccaccaaggaccgctgcgttaccctggaaaagtccacccagaccgtgcagggtccgcgttcggccgcctgcgggcttttctgctgcatgttcctacacgccttcgtgcactggcccaaccgccccatggacaaaaatcccaccatgaacttgctgacgggggtgcccaacggcatgctccagtcgccccaggtggaacctaccctgcgccgcaaccaggaggcactctaccgcttcctcaactcccactctgcatactttcgctctcaccgcgcgcgcattgagaaggccaccgccttcgaccgcatgaatcaagacatgtaacagtgtgttttaaaatatgtttaataaacagcactttttatgtgacacatgcatttgagataattttattcttaaaaatcgaaggggttctgccgggaggtttcggcatggcccgcgggcagggacacgttgcggaactggtacttggccagccacttgaactcggggatcagcagtttcggcagcagggtgtcggggaacgagtcggtccacagcttccgcgtcagttgcagggcgcccagcaggtcgggcgcggagatcttgaaatcgcagttgggacccgcgttttgcgcgcgagagttgcggtacacagggttgcagcactggaacaccatcagggccggatgcttcacgctcgccagcaccgtagcgtcggtgatcccgtccacgtcgaggtcttcggcgttggccatcccgaagggggtcatcttgcaggtctgccggcccatggtgggcacgcagccgggcttgtggttgcaatcgcagtgcagggggatcagcatcatctgggcctggtcggcgttcatccccgggtacatggccttcatgaaagcctccagctgcttaaacgcctgctgggccttggctccctcggtgaagaagaccccgcaggacttgctagaaaactggttggtagcgcacccggcgtcgtgcacgcagcagcgcgcgtcgttgttggccagctgcaccacgctgcgcccccagcggttctgggtaatcttggcccggtcggggttctcctttagcgcgcgttgcccgttctcgcttgccacatccatctcgatcatgtgctccttctggatcatggtggtcccgtgcaggcaccgcagcttgccctcgacttcggtacagccgtgcagccacagcgcgcaccccgtgctctcccagttcttgtgggcgatctgggaatgcgcatgcacgaacccctgcaggaagcggcccatcatggtcgtcagggtcttgttactggtaaaggtcagcggaatgccgcggtgctcctcgttgatgtacaggtggcagatgcggcgatacacctcgccctgctcgggcatcagttggaagttggattttaggtcgctttccacacggtagcgctccatcagcatattcatgatttccatgcccttctcccaggccgatacaatgggcaggctcagggggttcgtcaccgccatcttagcgctagcagccttcgtcagcgggtcgttctcattgagagtctcaaagctccgcttgccgtccttctcggtgatccgcacgggggggtagctgaagcccacggccgccagctcctcctcggcctctctttcgtcctcgctgtcctggctgacgtcctgcaggggcacatgcttcgttttgcggggtttctttttgggcggctgctgcggcggcggtggttgttcctgaggcgagggggagcgcgagttctcgctcaccactactatctcttcttcttggtccgaggccacgcggcggtaggtatgtctcttcaggggcagaggcggaggcgacgggctctcgcggcccggcgggtggctggcagagccccttccgcgatcgggggtgcgctcccggcggcgctctaactgacttcctccgcggccggccattgtgttctcctagggaacaacaacaagcatggagactcagccatcgtcgccaacctcgccatctgcccccaccgccgacaagaagcagcagcagaatgagagcttaaccgccccgccgcccagccccgccacctttgtcgcggccccagacatgcaagagatggaggaatccattcagattgacctgggctatgtgacgcccgcggagcacgaggaggagcttgcagtgcgcttttcaacccaggaagagatacaccaagaacagccagagcaggaagcaaagagcgagcatgactacctccaccagagcgggggggaggacgccctcatcaagcatctggcccggcaggccatcatcgtcaaggacgcgctgcttgaccgcaccgaggtgcccctcagcgtggaggagctcagccgcgcctacgagctcaacctcttctcgccgcgcgtgccccccaagcgccagcccaacggcacctgcgagcccaacccacgcctcaacttctacccggtcttcgcggtgcccgaggccctggccacctaccacatctttttcaagaaccaaaggatccctgtctcctgtcgcgccaaccgcacccgcgccgactcccttttcaacctgggccccggtgcccgcctacctgatatcgcctccttggaagaggttcccaagatcttcgagggtctgggcagcgacgagactcgggccgcaaacgctctgcaaggagaaggaggagatcatgagcaccacagcgccctggtggagttggaaggcgacaacgcgcgtctggcggtgctcaagcgcacgatcgagctgacccatttcgcctacccggcgcttaacctgccccccaaagtcatgagcacggttatggatcaggtgctcatcaagcgcgcgtcgcccatctccaaggagatgcaagaccccgagagctccgaggagggcaagcccgtggtcagcgacgagcagctggcgcggtggctgggaccccaagctagtccccagagcttggaagagcggcgcaagctcataatggccgtggtcctggtgaccgcggagctggagtgtctgcgccgcttcttcgccgacgcagaaattctgcgcaaggtcgaggagaacctgcactacatcttcaggcacgggttcgtacgccaggcctgcaagatctccaacgtggagctgaccaacctggtctcctacatgggcatcttgcacgagaaccgcctggggcagaacgtgctgcacaccaccctgcgcggggaggcccgccgcgactacatccgcgactgcgtttacctctacctctgccacacctggcagacagccatgggcgtgtggcagcagtgtctggaggagcagaacctaaaagagctctgcaagctcctgcagaagaacctcaaggccctgtggaccgggttcgacgagcgcaccaccgcctcggacctggcagacctcattttccccgagcgtctcaggctgacgctgcgcaacggtttgcccgactttatgagtcaaagcatgttgcaaaactttcgctctttcatcctcgaacgctccgggatcctgccggccacctgctccgcgctgccctcggacttcgtgccgctgaccttccgcgagtgccccccgccgctgtggagccactgctacctgctgcgcttggccaactacctggcctaccactcggacgtgatcgaggacgtcagcagcgagggcctgctcgagtgccactgccgctgcaacctctgcacgccgcaccgctccctggcctgcaacccccagctgctgagcgagacccagatcatcggcaccttcgagttgcaagggcccggcgatgagggttctgccgccaaggggggtctgaaactcaccccggggctgtggacctcggcctacttgcgcaagttcgtgcccgaggactaccatcccttcgagatcaggttctacgaggaccaatcccagccgcccaaggccgagctgtcggcctgcgtcatcacccagggggcgatcctggcccaattgcaagctatccagaaatcccgccaagaattcttgctgaaaaagggccgcggggtctaccttgatccccagaccggtgaggagcttaaccccggcttcccccaggatgccccgaggaagcagcaagaagctgaaagtggagctgccgcccgtggaggatttggaggaagactgggagagcagtcaggcagaggaggaggagatggaagactgggacagcactcaggcagaggacagcctgcaagacagtctggaagacgaggaggaggcagaggaggtggaagaagtagccgccgccgccagaccgtcgtcctcggcggagaaagcaagcagcacggataccatctccgctccgggtcggggtcccgctcgaccccacagtagatgggacgagaccgggcgattcccgaaccccaccacccagaccggtaagaaggagcggcagggatacaagtcctggcgggggcacaaaaacgccatcgtctcctgcttgcaagcttgcgggggcaacatctcattcacccggcgctacctgctctttcaccgcggggtgaacttcccccgcaacatcttgcattactaccgtcacctccacagcccctactacttccaagaagaggcagaaaaagacaaaaccagcagctagaaaatccacagcggcggcggcggcaggtggactgaggatcgcggcgaacgagccggcgcagacccgggaactgaggaaccggatctttcccaccctctatgccatcttccagcagagtcgggggcaggagcaggaactgaaagtcaagaaccgttctctgcgctcgctcacccgcagttgtctgtatcacaagagcgaagaccaacttcagcgcacgcttgaggacgccgaggctctcttcaacaagtactgcgcactcactcttaaagagtagcccgcgcccgcccacacacggaaaaaggcgggaattacgtcacctgtgcacccccacccagcaccgctatgagcaaagaaattcccacgccttacatgtggagctaccagccccagatgggcctggccgccggcgccgcccaggactactccacccgcatgaattggctcagcgccgggcccgggatgatctcacgggtgaatgacatccgcgcccaccgaaaccagatactcctagaacagtcagcgctcaccgccacgccccgcaatcacctcaatccgcgtaattggcccgccgccctagtgtaccaggaaattccccagcccacgaccgtactacttccgcgagacgcccaggccgaagtccagctgactaactcaggtgtccagctggcgggcggcgccaccctgtgtcgtcaccaccccgctcagggtataaagcggctggtgatccggggcagaggcacacagctcaacgacgaggtggtgagctcttcactgggtttgcgacctgacggagtcttccaactcgccggatcgggaagatcttccttcacgcctcgtcaggccgtgctgactttggagagttcttcctcgcaacctcgctcgggcggcatcggcactctccagtttgtggaggagttcactccctcggtctacttcaaccccttctccggctcccccggccactatccggacgagttcatcccgaacttcgatgccatcagcgaatcggtagacggctacgattgaatgtcccatggtggcgcggctgacctagctcggcttcgacacctggaccactgccgccgctttcgctgcttcgctcgggacctcgccgagtttacctactttgagctgtccgaggagcaccctcagggcccggcccacggagtgcggatcgtcgtcgaagggggcctagactcccacctgcttcgtatcttcagccagcgcccgatcctggtccagcgccaacagggcaacaccctcctgaccctttactgcatctgcaaccaccccggcctgcatgaaagtctttgttgtctgctgtgtactgagtataataaaagctgagatcagcgactactccggactcgattgtgttcctgcatccctcaaccagtctctgaccttcaccgggaacgaaacagagctccatctccagtgtaagccccacaaaaagtacctcacctggctgcaccagggctccccaatcgccgttgttaaccactgcaacgacgacggagtcctgctgaacggccccgccaaccttactttttccacccgcagaagcaagctactgctcttccgacccttcctaccagggatctatcagtgcgtctcgggaccctgccatcacaccttccacctgatcccgaataccacctcttccccagcgccgctcctcactaacaaccaaactaaccaccaccaacgctaccgtcgagacctcgttgaatctaataccacccacaccggaggtgagctccgaggtcctcagtcatctgggatttattacggtccctgggaggtggtggggttaatagctttaggcttagtagcgggtgggcttttggctctttgctacctatacctcccttgcttttcctacttagtggtgctttgttgctggtttaagaaatggggaagatcaccctagtgtgcggtgtgctggtggcggtactttcgattttgggtctgggcagcgcggctgtagtgacggagaaggccgatccctgcttgacttttaaccccgacaaatgccagctgagttttcagccagatggcaatcggtgcgcggtgttgattaagtgcggatgggaatgccagagcgtggcgatccagtataaaaacaagacgcggaacaatactctcgcgtccacatggcagcccggggaccccgagtggtacaccgtctctgtccctggtgctgacggcttccttcgcacggtaaacaacacttttatttttgagcacatgtgcaataccgccatgttcatgagcaggcagtaccatatgtggcccccacggaaagagaatatcgtggtcttctccatcgcttacagcttgtgcacggtgctaatcaccgcgatcgtgtgcctgagcattcacatgctcatcgctattcgccccagaaataatgctgagaaagagaaacagccataacaccatttttttcacacacctttttcagaccatggcctctgttacagccattatttattttttgggtcttctgggatttatcaacagttttgaccataaaaacgtaactgcttatgttggttctaactgtgtactaactgggtaccagtcacaccaacgggtttcatggtactggtttgataaaaaaaacacagcttatacactttgcaaaggtaatcagcggcccacacagcgcagtggtctttattacagctgcactaataataatatcacactacttcaagtgactaaacaatattctgggacatactatggaaccaattttaacacggaacaggacacttactatagtgtcaaagtattggatccaactactcccagaactactaccaaacataccacaactaaaaagcccactatacctaaaaccactaaattaacaaccacaaccagcaccacacttgctgtgacctcacaggcaactactgaaaacgaattggttgccctgttgcagaatggggagaataatagcagcagtcctctgcctaccacccccagtgagcaaattcccagatccatgattggcattatcgctgctgtggtggtgtgtatggtcattatcatcttgtgcatgatgtactatgcctgctactacagaaaacacagactgaacaacaagctggacccctactgaattttgatttttaattacaaattaattgtggttgatcccactacacctccacccaccacaactaccacagacacacaagaacccactccagaggcagtagcagagttagcaaagcagatttatgaagattcctttgttgctaatactcccacacacctcggaccgcaatgtccagggttagtagtcagcggcatcgtcggtgtgctttgtgggttagcagttataatcatctgcatgttcatttttgcttgctgctacagaaggcttcaccgacagaaatcagacccactgctgaacctctatgtttaatttttgattttccagagccatgaaggcacttagcactttagtttttttgtccttgattggcattgtttttagtaatcctattcctagagttagctttattaaaccagttaatgttactgaagggagcaatgtgacactggtaggtgtagagggtgctaaaaacaccacctggacaaaatatcaccttaatgggtggaaagatatctgcaattggagtgtgacagtttatacatgcgagggagttaatcttaccattgtcaatgcaacctcagctcaaaatggtagaattcaagggcaaagtgttagtgattctgaggggtattatacccaacatacttttatctatgacattaaggtcataccattgccaacacccagcccacctagcactactcaaaccactacatcaactcagcccaccgccaccacaacagcagaggcatttttgttgctgccaccatctagcagtcccactgctagtaccaataagcagactactaaatttttgtccactactgaaagccacaccacagctaccttgagagccttctctagcaccgctaatcttacctcgctttcctatacattaatcagttctgttactacctctaccccagcttctcttcccactcccctgaagcaaaccgaaggcggtttgcaatggcagatcaccctactcattgtgatcggggtggtcatcctagcgatgctgctctacttcatcttctgccgccgcatccccaacgcgaaaccggtctacaagcccatcgttatcgggcagccggagccgcttcaggtggagggaggtctaaggaatcttctcttctcttttacagtatggtgatttgaactatgattcctagacagttctttatcattggtcttctctgcgcgctccaagtctgtgccaccctcgctctggtggctaatgcgagtccagactgcattggaccgttcgcctcctacgtgctctttgccttcatcacctgcatctgctgctgtagcatagtctgcctgcttattaccttcttccagttcgttgactgggtctttgtgcgcatcgcctacctgcgccaccacccccagtaccgcgaccaaagagtggcgcagctgctcaggctcatctgataagcatgcgggctttgctacttctcatgcttctactattgctagctcccctggtcgccccctttcccctcaaatcccccacccagtcccccaaagaggttcgaaactgtaaattccaagaaccctggaaattcctcaaatgctaccagctcaaatcagacatgcaccccagctggataattatcatgggaatcgtgaacatccttgcctgcaccttcttttcctttgtgatttacccccgctttgactttggttggaacgcacccgaggcgctctggctcccgcctgatcccgacacaccaccacagcagcagcaaaatcaggcacacgcaccaccaccacagcctaggccccaatacatgcccatcttaaactatgaggccgagccacaacgagccatgcttcctgctattagttacttcaatctaaccggtggagatgactgacccactcaacaacactgtcaacgacctcctggacatggacggccgcggctcggagcagcgtctcgcccaactccgcattcgccagcagcaggagagagccgtcaaggagctgcaggacgcagtggccatccaccagtgcaagaaaggcatcttctgcctggtgaagcaggccaagatctccttcgaggtcacttccaccgaccatcgcctctcctacgagctcctgcagcagcgccagaagttcacctgcctggtcggagtcaaccccatcgtcatcacccagcagtctggcgataccaagggttgcatccactgctcctgcgactcccccgagtgcgttcacaccctgatcaagaccctatgcggcctccgcgacctcctccccatgaactaatcaactaaccccttaccccattacccatccagtaaaaaaaataaagattaaagagacgatgattttgaattgatcaataaagaatcacttacttgaaatctgaaaccaggtctctgtccatgttttctgtcagcagcacttcgctcccctcttcccagctctggtactgcaggccccggcgggctgcaaacttcctccacactctgaaggggatgtcaaattcctcctgtccctcaatcttcattttttatttctattagatgtccaaaaagcgcgcgcgggtggatgatggcttcgaccccgtgtatccctacgatgcagacaacgcaccgaccgtgcccttcatcaaccctcccttcgtctcttcagatggattccaagaaaagcccctgggggtgttgtcccttaggctggccgaccctgtcaccaccaagaatggggaaattaccctcaagctgggggagggggtggaccttgacgactcgggaaaactcattgcaaacacagtaaacaaggccattgcccctctcagtttttccaacaacaccatttcccttaacatggatacccctttatacaccaaagatggaaaactatccttacaagtttctccaccattaagtatattaaaatcaacaattttgaatacattagctctagcttttggctcaggtttaggactcagtggcagcgccctggcagtacagttagcctctccacttacatttgatgataaagggaatataaagattaccctaaacaggggattgcatgttacaacaggagatgcaattgaaagcaacatcagttgggctaaaggtataaaatttgaagatggtgccatagctacaaacattggtaaggggctagagttcggaaccagtagtacagaaacaggagttaataatgcttatccaatccaagttaaacttggctctggtctcagctttgacagcacaggagccataatggctggcaataaagactatgataaattaactttgtggacaacgcctgacccatcaccaaactgtcaaatacttgcagaaaatgatgcaaaactaacactttgcttaactaagtgtgacagtcaaatactggccactgtatcagttttggttgttagaagtggaaacttaaacccaattactggcacagtaagcagtgctcaagtttttctacgttttgatgcaaatggtgttcttttaacagaacactctacactaaaaaaatactggggctacaagcaaggagatagcatagatggcactccatacaccaatgctgttggttttatgccaaattcaacagcttatccaaagacccaaagttctactactaaaaataatatagtgggtcaagtatacatgaatggagatgtttcaaaacccatgcttcttactataactcttaatggtactgatgacaccaccagtgcatactcaatgtcattttcatacacctggactaacggaagctatatcggagcaacatttggagctaactcatacaccttctcctacatagcccaacaataatcccaccctgcatgccaacccaccttttccctctatttataaatggaaactgaaacaaaaataaagttcaagtgttttattgattcaacagtttttcacaggattcgagtagttattttccctccaccctcccatctcatggaatacactatcctctccccacgcacagccttaaacatctgaatgctattggtaatggacatggttttgatctccacattccacacagtttcagagcgagacagtctcgggtcggtcaaggagatgaaaccctccgggcactcctgcatctgcacctcacagttcaacagctgagggctgtcctcggtgattggaatcacagttatctggaataagagcgatgagaatcataatccgcaaacgggatcgggcggttgtggcgcatcaggccccgcagcagtcgctgtctgcgccgctccgtcaagctgctactcaaggggtccgggtccagggactccctgcgcatgatgccaatggccctgagcatcagtcgcctggtacggcgggcgcagcagcggatgcggatctcactcaggtcggagcagtacgtgcagcacagcaccaccaagttgttcaacagtccatagttcaacgtgctccagccaaaactcatttgtggaactatgctgcccacatgtccatcgtaccagatcctgatgtaaatcaggtggcgtcccctccagaacacactgcccatgtacatgatctccttgggcatgtgcaggttcaccacctcccggtaccacatcacccgctggttgaacatgcagccctggataattctgcggaaccagatggcaagtaccgtcccgcccgccatgcagcgcagggaccccgggttctggcaatggcagtggatcacccaccgctcgcgaccgtggatcaactgggaactaaacaagtctatgttggcacagcacaggcacacgctcatgcatgtcttcagcactctcaattcctcgggggtcaggaccatatcccagggcacagggaactcttgcaggacagtgaacccggccgaacagggcaatcctcgcacggaacttacattgtgcatggacagggtatcgcaatcaggcagcaccggatgatcctccaccagagaagcgcggctctcggtctcctcacagcgaggtaaggtggccggcggttggtacggatgatggcgagataacgctaatcgtgttctggatcgtgtcatgatggagctgtttccggacattttcgtatttcacaaagcagaacctggtccgggcactgcacaccgctcgtcggcgacggtctcggcgcttcgagcgctcaatgttgaagttatagaacagccactccctcagaacgtgcagtatctcctgagcctcttgggtgatgaaaatcccatccgccctgatggctctgattacatcaaccacggtggaatgggccaaacccagccagatgatgcaattttgttgggtttcggtgacggcgggggagggaagaacaggaagaaccatgattaactttattccaaacggtctcggaacacttcaaaatgcaggtcccggaggtggcacctctcgcccccactgtgttggtggaaaataacagccaggtcaaaggtaacacggttctcgagatgttccacggtggcttccagcaaagcctccacgcgcacatccagaaacaagaggacagcgaaagcgggagcgttttctaattcctcaatcatcatattacactcctgcaccatgcctagataattttcatttttccagccttgaatgattcgtattagttcctgaggtaaatccaagccagccatgataaaaagctcgcgcagagcgccctccaccggcattcttaagcacaccctcataattccaacagattctgctcctggttcacctgtagtagattaacaagtggaatatcaattgctctgccgcaatccctaagctcctcccttagcagtaactgtatgtactcattcatatcttctccgaaatttttagccataggaccaccaggaacaagagaagggcaagccacattacagataaagcgaagtcctccccagtgagcattgccaaatgtaagattgaaataagcatgctggctagacccggtgatatcttccagataactggacagaaaatcaggcaagcaatttttaagaaaattaacaaaagaaaagtcgtctaggtgcacgtttagagcctcaggaacaacgatggaataagtgcaaggagtacgttccagcatggttagtgtttttggtgatctgtagaacaaaaaataaacatgcaatattaaaccatgctagcctggcgaacaggtggataaatcactctttccaacaccaggcaggctacagggtctccggcgcgaccattgtagaagctgacattatgattaaaaagcatcaccgacagaccttcccggtggccggcatggatgattcgagaagaagcatacactccgggaacattggcgtccgtgagtgaaaaaaagcgacctataaagccttgaggcactacaatgcttaatcttaattccagcaaagcgaccccatgcggatgaagcacaaaattggcaggtgcgtaaaaaatgtaattactccccttctgcacaggcagcaaagcccccgctccctccagaaacacatacaaaacctgagcgtccatagcttaccgagcacggcaggcgcaagagtcagagaaaaagctgagctctaacctaactgcccgcttctgtactcaatatatagccctaacctcactgacgtaaaggccaaggtctaaaaatacccgccaacacgcccagaaaccggtgacacactaaaaaaatacgtgcacttcctcaaacgcccaaactggcgtcatttccggtttcccacgctacgtcacctctcaacgactttcaaattccgtcgaccgttaaacacatcagttaccccgcccctaacgaacgccgctgtcacagccaatcagcgcgccccatccccaaattttcacgccttatttgcatattaactcacacaaaaaaaataaggtatattattgatgatg

SEQ ID NO: 569 - DNA, 2722 bp, Homo sapiens
ttggcgcgtaaaagtggccgggactttgcaggcagcggcggccgggggcggagcgggatcgagccctcgccgaggcctgccgccatgggcccgcgccgccgccgccgcctgtcacccgggccgcgcgggccgtgagcgtcatggccttggccggggcccctgcgggcggcccatgcgcgccggcgctggaggccctgctcggggccggcgcgctgcggctgctcgactcctcgcagatcgtcatcatctccgccgcgcaggacgccagcgccccgccggctcccaccggccccgcggcgcccgccgccggcccctgcgaccctgacctgctgctcttcgccacaccgcaggcgccccggcccacacccagtgcgccgcggcccgcgctcggccgcccgccggtgaagcggaggctggacctggaaactgaccatcagtacctggccgagagcagtgggccagctcggggcagaggccgccatccaggaaaaggtgtgaaatccccgggggagaagtcacgctatgagacctcactgaatctgaccaccaagcgcttcctggagctgctgagccactcggctgacggtgtcgtcgacctgaactgggctgccgaggtgctgaaggtgcagaagcggcgcatctatgacatcaccaacgtccttgagggcatccagctcattgccaagaagtccaagaaccacatccagtggctgggcagccacaccacagtgggcgtcggcggacggcttgaggggttgacccaggacctccgacagctgcaggagagcgagcagcagctggaccacctgatgaatatctgtactacgcagctgcgcctgctctccgaggacactgacagccagcgcctggcctacgtgacgtgtcaggaccttcgtagcattgcagaccctgcagagcagatggttatggtgatcaaagcccctcctgagacccagctccaagccgtggactcttcggagaactttcagatctcccttaagagcaaacaaggcccgatcgatgttttcctgtgccctgaggagaccgtaggtgggatcagccctgggaagaccccatcccaggaggtcacttctgaggaggagaacagggccactgactctgccaccatagtgtcaccaccaccatcatctcccccctcatccctcaccacagatcccagccagtctctactcagcctggagcaagaaccgctgttgtcccggatgggcagcctgcgggctcccgtggacgaggaccgcctgtccccgctggtggcggccgactcgctcctggagcatgtgcgggaggacttctccggcctcctccctgaggagttcatcagcctttccccaccccacgaggccctcgactaccacttcggcctcgaggagggcgagggcatcagagacctcttcgactgtgactttggggacctcacccccctggatttctgacagggcttggagggaccagggtttccagagatgctcaccttgtctctgcagccctggagccccctgtccctggccgtcctcccagcctgtttggaaacatttaatttatacccctctcctctgtctccagaagcttctagctctggggtctggctaccgctaggaggctgagcaagccaggaagggaaggagtctgtgtggtgtgtatgtgcatgcagcctacacccacacgtgtgtaccgggggtgaatgtgtgtgagcatgtgtgtgtgcatgtaccggggaatgaaggtgaacatacacctctgtgtgtgcactgcagacacgccccagtgtgtccacatgtgtgtgcatgagtccatgtgtgcgcgtgggggggctctaactgcactttcggcccttttgctctgggggtcccacaaggcccagggcagtgcctgctcccagaatctggtgctctgaccaggccaggtggggaggctttggctggctgggcgtgtaggacggtgagagcacttctgtcttaaaggttttttctgattgaagctttaatggagcgttatttatttatcgaggcctctttggtgagcctggggaatcagcaaaggggaggaggggtgtggggttgataccccaactccctctacccttgagcaagggcaggggtccctgagctgttcttctgccccatactgaaggaactgaggcctgggtgatttatttattgggaaagtgagggagggagacagactgactgacagccatgggtggtcagatggtggggtgggccctctccagggggccagttcagggccccagctgccccccaggatggatatgagatgggagaggtgagtgggggaccttcactgatgtgggcaggaggggtggtgaaggcctcccccagcccagaccctgtggtccctcctgcagtgtctgaagcgcctgcctccccactgctctgccccaccctccaatctgcactttgatttgcttcctaacagctctgttccctcctgctttggttttaataaatattttgatgacgtttgggccgggttttgggactctgttgggaacatttcggggcgggagaggccaaggttgctggggaaatgcccattctccacttcccttctccctgtccgtgcccgatttgatttgagcctcataactcgaagaaaggtcagcttcctcgctgttttggtcctaactcaaaagcagatccagtaaaggtttttgttgtaaaaaaaaaaaaaaaaaaaaaaa

SEQ ID NO: 570 - DNA, 7904 bp, Human papillomavirus type 16
actacaataattcatgtataaaactaagggcgtaaccgaaatcggttgaaccgaaaccggttagtataaaagcagacattttatgcaccaaaagagaactgcaatgtttcaggacccacaggagcgacccagaaagttaccacagttatgcacagagctgcaaacaactatacatgatataatattagaatgtgtgtactgcaagcaacagttactgcgacgtgaggtatatgactttgcttttcgggatttatgcatagtatatagagatgggaatccatatgctgtatgtgataaatgtttaaagttttattctaaaattagtgagtatagacattattgttatagtttgtatggaacaacattagaacagcaatacaacaaaccgttgtgtgatttgttaattaggtgtattaactgtcaaaagccactgtgtcctgaagaaaagcaaagacatctggacaaaaagcaaagattccataatataaggggtcggtggaccggtcgatgtatgtcttgttgcagatcatcaagaacacgtagagaaacccagctgtaatcatgcatggagatacacctacattgcatgaatatatgttagatttgcaaccagagacaactgatctctactgttatgagcaattaaatgacagctcagaggaggaggatgaaatagatggtccagctggacaagcagaaccggacagagcccattacaatattgtaaccttttgttgcaagtgtgactctacgcttcggttgtgcgtacaaagcacacacgtagacattcgtactttggaagacctgttaatgggcacactaggaattgtgtgccccatctgttctcagaaaccataatctaccatggctgatcctgcaggtaccaatggggaagagggtacgggatgtaatggatggttttatgtagaggctgtagtggaaaaaaaaacaggggatgctatatcagatgacgagaacgaaaatgacagtgatacaggtgaagatttggtagattttatagtaaatgataatgattatttaacacaggcagaaacagagacagcacatgcgttgtttactgcacaggaagcaaaacaacatagagatgcagtacaggttctaaaacgaaagtatttggtagtccacttagtgatattagtggatgtgtagacaataatattagtcctagattaaaagctatatgtatagaaaaacaaagtagagctgcaaaaaggagattatttgaaagcgaagacagcgggtatggcaatactgaagtggaaactcagcagatgttacaggtagaagggcgccatgagactgaaacaccatgtagtcagtatagtggtggaagtgggggtggttgcagtcagtacagtagtggaagtgggggagagggtgttagtgaaagacacactatatgccaaacaccacttacaaatattttaaatgtactaaaaactagtaatgcaaaggcagcaatgttagcaaaatttaaagagttatacggggtgagtttttcagaattagtaagaccatttaaaagtaataaatcaacgtgttgcgattggtgtattgctgcatttggacttacacccagtatagctgacagtataaaaacactattacaacaatattgtttatatttacacattcaaagtttagcatgttcatggggaatggttgtgttactattagtaagatataaatgtggaaaaaatagagaaacaattgaaaaattgctgtctaaactattatgtgtgtctccaatgtgtatgatgatagagcctccaaaattgcgtagtacagcagcagcattatattggtataaaacaggtatatcaaatattagtgaagtgtatggagacacgccagaatggatacaaagacaaacagtattacaacatagttttaatgattgtacatttgaattatcacagatggtacaatgggcctacgataatgacatagtagacgatagtgaaattgcatataaatatgcacaattggcagacactaatagtaatgcaagtgcctttctaaaaagtaattcacaggcaaaaattgtaaaggattgtgcaacaatgtgtagacattataaacgagcagaaaaaaaacaaatgagtatgagtcaatggataaaatatagatgtgatagggtagatgatggaggtgattggaagcaaattgttatgtttttaaggtatcaaggtgtagagtttatgtcatttttaactgcattaaaaagatttttgcaaggcatacctaaaaaaaattgcatattactatatggtgcagctaacacaggtaaatcattatttggtatgagtttaatgaaatttctgcaagggtctgtaatatgttttgtaaattctaaaagccatttttggttacaaccattagcagatgccaaaataggtatgttagatgatgctacagtgccctgttggaactacatagatgacaatttaagaaatgcattggatggaaatttagtttctatggatgtaaagcatagaccattggtacaactaaaatgccctccattattaattacatctaacattaatgctggtacagattctaggtggccttatttacataatagattggtggtgtttacatttcctaatgagtttccatttgacgaaaacggaaatccagtgtatgagcttaatgataagaactggaaatcctttttctcaaggacgtggtccagattaagtttgcacgaggacgaggacaaggaaaacgatggagactctttgccaacgtttaaatgtgtgtcaggacaaaatactaacacattatgaaaatgatagtacagacctacgtgaccatatagactattggaaacacatgcgcctagaatgtgctatttattacaaggccagagaaatgggatttaaacatattaaccaccaagtggtgccaacactggctgtatcaaagaataaagcattacaagcaattgaactgcaactaacgttagaaacaatatataactcacaatatagtaatgaaaagtggacattacaagacgttagccttgaagtgtatttaactgcaccaacaggatgtataaaaaaacatggatatacagtggaagtgcagtttgatggagacatatgcaatacaatgcattatacaaactggacacatatatatatttgtgaagaagcatcagtaactgtggtagagggtcaagttgactattatggtttatattatgttcatgaaggaatacgaacatattttgtgcagtttaaagatgatgcagaaaaatatagtaaaaataaagtatgggaagttcatgcgggtggtcaggtaatattatgtcctacatctgtgtttagcagcaacgaagtatcctctcctgaaattattaggcagcacttggccaaccaccccgccgcgacccataccaaagccgtcgccttgggcaccgaagaaacacagacgactatccagcgaccaagatcagagccagacaccggaaacccctgccacaccactaagttgttgcacagagactcagtggacagtgctccaatcctcactgcatttaacagctcacacaaaggacggattaactgtaatagtaacactacacccatagtacatttaaaaggtgatgctaatactttaaaatgtttaagatatagatttaaaaagcattgtacattgtatactgcagtgtcgtctacatggcattggacaggacataatgtaaaacataaaagtgcaattgttacacttacatatgatagtgaatggcaacgtgaccaatttttgtctcaagttaaaataccaaaaactattacagtgtctactggatttatgtctatatgacaaatcttgatactgcatccacaacattactggcgtgctttttgctttgctttgtgtgcttttgtgtgtctgcctattaatacgtccgctgcttttgtctgtgtctacatacacatcattaataatattggtattactattgtggataacagcagcctctgcgtttaggtgttttattgtatatattatatttgtttatataccattatttttaatacatacacatgcacgctttttaattacataatgtatatgtacataatgtaattgttacatataattgttgtataccataacttactattttttcttttttattttcatatataatttttttttttgtttgtttgtttgttttttaataaactgttattacttaacaatgcgacacaaacgttctgcaaaacgcacaaaacgtgcatcggctacccaactttataaaacatgcaaacaggcaggtacatgtccacctgacattatacctaaggttgaaggcaaaactattgctgaacaaatattacaatatggaagtatgggtgtattttttggtgggttaggaattggaacagggtcgggtacaggcggacgcactgggtatattccattgggaacaaggcctcccacagctacagatacacttgctcctgtaagaccccctttaacagtagatcctgtgggcccttctgatccttctatagtttctttagtggaagaaactagttttattgatgctggtgcaccaacatctgtaccttccattcccccagatgtatcaggatttagtattactacttcaactgataccacacctgctatattagatattaataatactgttactactgttactacacataataatcccactttcactgacccatctgtattgcagcctccaacacctgcagaaactggagggcattttacactttcatcatccactattagtacacataattatgaagaaattcctatggatacatttattgttagcacaaaccctaacacagtaactagtagcacacccataccagggtctcgcccagtggcacgcctaggattatatagtcgcacaacacaacaggttaaagttgtagaccctgcttttgtaaccactcccactaaacttattacatatgataatcctgcatatgaaggtatagatgtggataatacattatatttttctagtaatgataatagtattaatatagctccagatcctgactttttggatatagttgctttacataggccagcattaacctctaggcgtactggcattaggtacagtagaattggtaataaacaaacactacgtactcgtagtggaaaatctataggtgctaaggtacattattattatgatttaagtactattgatcctgcagaagaaatagaattacaaactataacaccttctacatatactaccacttcacatgcagcctcacctacttctattaataatggattatatgatatttatgcagatgactttattacagatacttctacaaccccggtaccatctgtaccctctacatctttatcaggttatattcctgcaaatacaacaattccttttggtggtgcatacaatattcctttagtatcaggtcctgatatacccattaatataactgaccaagctccttcattaattcctatagttccagggtctccacaatatacaattattgctgatgcaggtgacttttatttacatcctagttattacatgttacgaaaacgacgtaaacgtttaccatattttttttcagatgtctctttggctgcctagtgaggccactgtctacttgcctcctgtcccagtatctaaggttgtaagcacggatgaatatgttgcacgcacaaacatatattatcatgcaggaacatccagactacttgcagttggacatccctattttcctattaaaaaacctaacaataacaaaatattagttcctaaagtatcaggattacaatacagggtatttagaatacatttacctgaccccaataagtttggttttcctgacacctcattttataatccagatacacagcggctggtttgggcctgtgtaggtgttgaggtaggtcgtggtcagccattaggtgtgggcattagtggccatcctttattaaataaattggatgacacagaaaatgctagtgcttatgcagcaaatgcaggtgtggataatagagaatgtatatctatggattacaaacaaacacaattgtgtttaattggttgcaaaccacctataggggaacactggggcaaaggatccccatgtaccaatgttgcagtaaatccaggtgattgtccaccattagagttaataaacacagttattcaggatggtgatatggttcatactggctttggtgctatggactttactacattacaggctaacaaaagtgaagttccactggatatttgtacatctatttgcaaatatccagattatattaaaatggtgtcagaaccatatggcgacagcttatttttttatttacgaagggaacaaatgtttgttagacatttatttaatagggctggtactgttggtgaaaatgtaccagacgatttatacattaaaggctctgggtctactgcaaatttagccagttcaaattattttcctacacctagtggttctatggttacctctgatgcccaaatattcaataaaccttattggttacaacgagcacagggccacaataatggcatttgttggggtaaccaactatttgttactgttgttgatactacacgcagtacaaatatgtcattatgtgctgccatatctacttcagaaactacatataaaaatactaactttaaggagtacctacgacatggggaggaatatgatttacagtttatttttcaactgtgcaaaataaccttaactgcagacgttatgacatacatacattctatgaattccactattttggaggactggaattttggtctacaacctcccccaggaggcacactagaagatacttataggtttgtaacccaggcaattgcttgtcaaaaacatacacctccagcacctaaagaagatgatccccttaaaaaatacactttttgggaagtaaatttaaaggaaaagttttctgcagacctagatcagtttcctttaggacgcaaatttttactacaagcaggattgaaggccaaaccaaaatttacattaggaaaacgaaaagctacacccaccacctcatctacctctacaactgctaaacgcaaaaaacgtaagctgtaagtattgtatgtatgttgaattagtgttgtttgttgtgtatatgtttgtatgtgcttgtatgtgcttgtaaatattaagttgtatgtgtgtttgtatgtatggtataataaacacgtgtgtatgtgtttttaaatgcttgtgtaactattgtgtcatgcaacataaataaacttattgtttcaacacctactaattgtgttgtggttattcattgtatataaactatatttgctacatcctgtttttgttttatatatactatattttgtagcgccaggcccattttgtagcttcaaccgaattcggttgcatgctttttggcacaaaatgtgtttttttaaatagttctatgtcagcaactatggtttaaacttgtacgtttcctgcttgccatgcgtgccaaatccctgttttcctgacctgcactgcttgccaaccattccattgttttttacactgcactatgtgcaactactgaatcactatgtacattgtgtcatataaaataaatcactatgcgccaacgccttacataccgctgttaggcacatatttttggcttgttttaactaacctaattgcatatttggcataaggtttaaacttctaaggccaactaaatgtcaccctagttcatacatgaactgtgtaaaggttagtcatacattgttcatttgtaaaactgcacatgggtgtgtgcaaaccgattttgggttacacatttacaagcaacttatataataatactaa

SEQ ID NO: 571 - DNA, 3342 bp, Homo sapiens
ggagaatattccgcgcggggggacgaccatgaaggaggagccgctgggcagcggcatgaacccggtgcgctcgtggatgcacacggcgggcgtggtggacgccaacacggccgcccagagcggcgtggggctggcgcgggcgcacttcgagaagcagccgccttccaacctccggaaatccaatttcttccacttcgtgctggcgctctacgataggcaggggcagccggtggagattgaaaggaccgcttttgtggactttgtggagaaagagaaagagccaaacaacgagaaaaccaacaacggcatccactataaactccagttattgtacagcaacggagtcagaacagagcaagatctgtatgttcgcctcatagattcaatgaccaaacaggccatcgtctacgagggccaggacaagaacccggagatgtgccgtgtgctgctgacccacgagatcatgtgcagccggtgctgtgacaagaaaagttgtggcaatagaaacgaaacgccctcagaccctgtaatcattgacagattctttctaaagtttttcctcaagtgcaatcagaactgtttgaagaatgcaggcaaccctcgagatatgcggagattccaggttgttgtatcgacaacagtcaacgtggacggccacgtgctggccgtgtcagacaacatgtttgtgcacaacaattccaaacacgggaggcgggcccgccgcctagacccgtcagaagccactccgtgcatcaaggccatcagtcccagtgaaggctggaccacggggggtgccaccgtcatcataattggcgacaacttctttgacgggctgcaagttgtattcggaactatgttggtgtggagcgagctgataactccccatgccatccgagtccagaccccgccgaggcacattcctggcgtcgtcgaagtgaccctctcctacaaatccaagcagttctgcaaaggtgctcctgggcgctttgtctacaccgcccttaatgaaccaaccatagattacggctttcagaggttgcagaaagtgatcccaagacatccgggtgatcccgaaaggttacccaaggaggtgttactgaagcgggcggcggacctggtggaagccttatacggaatgcctcacaacaaccaggagatcatcttgaagcgagcggcggacatcgccgaggcgctgtacagcgttccccgcaatcacaaccagatccccaccctgggcaacaaccctgcacacacgggcatgatgggcgtcaactccttcagcagccagctagccgtcaacgtgtcagagacgtcacaagccaacgaccaagtcggctacagtcgcaatacaagcagcgtgtccccgcgaggctacgtccccagcagtactccccagcagtccaattacaacacagtcagcactagcatgaatggatatggaagtggcgccatggccagtctaggggtccctggctcgcctggatttcttaatggctcctccgctaactctccctacggcatagtgccgtccagccccaccatggcagcctcttcggtcaccctcccttcaaactgtagcagcacacacggcattttctcattctcacctgccaatgtcatctccgcagtgaaacagaagagcgccttcgcgcccgtggtccggccccaagcctctcctcctccttcctgcaccagcgccaacgggaatggactgcaaggctctctgctgggtgctgaggacgtagccgcggagaagacaaactggcccttttgtgaagtcggtggcatatttcactttgatgaactaatgctcaaaaaaggaactggaaagctatgtctgggctggtagtcccgccaatgtgagggacttctgtttaccttccgcagcacccagcatcaaaggacggacttcaggggacacgtttagtatattaagacatgctgatggaaacagtatcttcaaaaaaatcagcagcaattgaaatgctacaaaagactttgtttaaagattttatttaaactattaagaatcaacatgcaaacagcctacttcttcatgaacaattccattttattgactgaacttttctcatattttcacatttctcagtcctgaagaataaggaaaacaaagcgacgcctattttgtataaagtttccgactccgtcttggccatgtctagtaattgctatgtgttgggagaaactttgtgaatgcaccattttgatgatcatgaaacgctgatgaaaaatgcctccaaacatttttctgtactcatacttagattcacaatggttgtgtatctctataatgtgaaatatttttttgtggtgataaaaagagggccaaggaggtatgagccatcagactggaaaaaaggatgactatatgatgaggagaaactggggtggcagggagggagggagggtttatcactgcttaacttcatcttcatgaaatgaaactttgtaacttattgtagttagaaattgtaactttgatattgaattctcttgccttcaacaagcacactgacagagaaaaaatgctactgtctgttggttccaatattctcccactgctagagcttcctgttaagcaagtgtgatctgcaacattttttcaacttttgctagcactgtatactattgcattcttaggctactgtgaggtctatgtttcttgtaccagaaattgtccttttgacttctagatccttcttccctaatgtgttttgtatgtggttataaaattgtagacttttgtgattttgccaaagttgtagctaaatatttatacacttgtcttgaatttttttcagatccacttaaaatatttagaaaaacaagttttattccttatgtgtcttataaggaataaaatggtcttcatttgacacttactttcccatgaacacttgcagttgctaagggactttattttgtaacatatcaattataaatattgtatttatctttgaaattttgtacattgcttttcccaccttttcctttttcttctttcttgtctgtattggtttttgatcacggcctggtgttgtgatactgggaagagcattagccaagaacttgtctctttgatctgtttcgttaagctgaaccagtgtctttacatttcatttgtacttcaaaaaatatgctattgtttagactttccatcctttttttttttattttgaggaaaagtcaaattcattgtttatttttatattatttttaagttatctgaacaaatacttttgaaaaaaaagtttgttgtatagtcaaaacaaatcggtgccacccggccgtgacaaatcctagtagattctgtgcatgtgg

SEQ ID NO: 572 - DNA, 557 bp, Epstein-Barr virus nuclear antigen (EBNA1) mRNA
ttagagagtggctgctacgcattagagaccactttgagccacccacagtaaccacccagcgccaatctgtctacatagaagaagaagaggatgaagactaagtcacaggcttagccagtaacccagcactggcgtgtgacgtggtgtaaagttttgcctgaacctgtggttgggcaggtaacttaggaagcgtttcttgagcttccctgggatgagcgtttgggagagctgattctgcagcccagagagtagtctcagggcatcctctggagcctgacctgtgatcgtcgcatcatagaccgccagtagacctgggagcagattcaccgccgcggccgtctcctttaagtgtgaatcatgtctgacgaggggccaggtacaggacctggaaatggcctaggagagaagggagacacatctggaccagaaggctccggcggcagtggacctcaaagaagagggggtgataaccatggacgaggacggggaagaggacgaggacgaggaggcggaagaccaggagccccgggcggctcaggatcagggccaagacatag

SEQ ID NO: 573 - DNA, 714 bp, Human herpesvirus 4 EBNA1 mRNA
cctgtagggcaagccgattattttgaataccaccaagaaggtggcccagatggtgagcctgacatgcccccgggagcgatagagcagggccccgcagatgacccaggagaaggcccaagcactggaccccggggtcagggtgatggaggcaggcgcaaaaaaggagggtggtttggaaagcatcgtggtcaaggaggttccaaccagaaatttgagaacattgcagacggtttaagaactctcctggctaggtgtcacgtagaaaggactaccgatgaaggaacttgggtcgccggtgtgttcgtatatggaggtagtaagacctccctttacaacctcaggcgaggaatttcccttgctattccacaatgtcgtcttacaccattgagtcgtctcccctttggaatggcccctggacccggcccacaacctggcccactaagggagtccattgtctgttatttcattgtctttttacaaactcatatatttgctgagggtttgaaggatgcgattaaggaccttgttatgccaaagcccgctcctacctgcaatatcaaggcgactgtgtgcagctttgacgatggagtagatttgcctccctggtttccacctatggtggaaggggctgccgcggagggtgatgacggagatgacggagatgacggagatgaaggaggtgatggagatgagggtgaggaagggcaggagtga

SEQ ID NO: 574 - DNA, 930 bp, Homo sapiens
tgctttcctctgccgcatggtcctgggccgttggcgtcggaagcctgaagcatgggcgctgagtgggagctgggggccgaggctggcggttcgctgctgctgtgcgccgcgctgctggcggcgggctgcgccctgggcctgcgcctgggccgcgggcagggggcggcggaccgcggggcgctcatctggctctgctacgacgcgctggtgcacttcgcgctggaaggcccttttgtctacttgtctttagtaggaaacgttgcaaattccgatggcttgattgcttctttatggaaagaatatggcaaagctgatgcaagatgggtttattttgatccaaccattgtgtctgtggaaattctgaccgtcgccctggatgggtctctggcattgttcctcatttatgccatagtcaaagaaaaatattaccggcatttcctgcagatcaccctgtgcgtgtgcgagctgtatggctgctggatgaccttcctcccagagtggctcaccagaagccccaacctcaacaccagcaactggctgtactgttggctttacctgtttttttttaacggtgtgtgggttctgatcccaggactgctactgtggcagtcatggctagaactcaagaaaatgcatcagaaagaaaccagttcagtgaagaagtttcagtgaactttcaaaaccataaacaccattatctaacttcatgaaccagaatgaatcaaatctttttgtttggccaaaatgtaatacattccagtctacactttgtttttgtattgttgctcctgaacaacctgtttcaaattggttttaaggcgaccagttttcgttgtattgttgttcaattaaatggtgatatagggaaaagagaacaaatttgaatttgtaataataaaatgtttaattatacaaaaaaaaaaaaaaaaa

SEQ ID NO: 575 - DNA, 1276 bp, Homo sapiens
gctcaacatggcggccttctgtgcccgccccctccgctaacgggcacgttactccgtccgaacgcagtagacgaaggcggcggcgatggcggcggggatagtggcttctcgcagactccgcgacctactgacccggcgactgacaggctccaactacccgggactcagtattagccttcgcctcactggctcctctgcacaagaggaggcttccggagtagccctcggtgaagccccagaccacagctatgagtcccttcgtgtgacgtctgcgcagaaacatgttctgcatgtccagctcaaccggcccaacaagaggaatgccatgaacaaggtcttctggagagagatggtagagtgcttcaacaagatttcgagagacgctgactgtcgggcggtggtgatctctggtgcaggaaaaatgttcactgcaggtattgacctgatggacatggcttcggacatcctgcagcccaaaggagatgatgtggcccggatcagctggtacctccgtgacatcatcactcgataccaggagaccttcaacgtcatcgagaggtgccccaagcccgtgattgctgccgtccatgggggctgcattggcggaggtgtggaccttgtcaccgcctgtgacatccggtactgtgcccaggatgctttcttccaggtgaaggaggtggacgtgggtttggctgccgatgtaggaacactgcagcgcctgcccaaggtcatcgggaaccagagcctggtcaacgagctggccttcaccgcccgcaagatgatggctgacgaggccctgggcagtgggctggtcagccgggtgttcccagacaaagaggtcatgctggatgctgccttagcgctggcggccgagatttccagcaagagccccgtggcggtgcagagcaccaaggtcaacctgctgtattcccgcgaccattcggtggccgagagcctcaactacgtggcgtcctggaacatgagcatgctgcagacccaagacctcgtgaagtcggtccaggccacgactgagaacaaggaactgaaaaccgtcaccttctccaagctctgagagccctcgcgtcccaggccccagccagggggccggccttgtcccgcctcatccacagaaagggaggatgggcgatgacagttgtttctatgccttctgacccagtttcccagtttataactttatgacaatgagtttctcaagcccaaggccttatcttcaccccacaaacaataaagcaaagtaaagaaaaaaaaaaaaaaa

SEQ ID NO: 576 - DNA, 3916 bp, Homo sapiens
agagtgctgatttagaagaatacaaatcatggctgaaaatagtgtattaacatccactactgggaggactagcttggcagactcttccatttttgattctaaagttactgagatttccaaggaaaacttacttattggatctacttcatatgtagaagaagagatgcctcagattgaaacaagagtgatattggttcaagaagctggaaaacaagaagaacttataaaagccttaaaggacattaaagtgggctttgtaaagatggagtcagtggaagaatttgaaggtttggattctccggaatttgaaaatgtatttgtagtcacggactttcaggattctgtctttaatgacctctacaaggctgattgtagagttattggaccaccagttgtattaaattgttcacaaaaaggagagcctttgccattttcatgtcgcccgttgtattgtacaagtatgatgaatctagtactatgctttactggatttaggaaaaaagaagaactagtcaggttggtgacattggtccatcacatgggtggagttattcgaaaagactttaattcaaaagttacacatttggtggcaaattgtacacaaggagaaaaattcagggttgctgtgagtctaggtactccaattatgaagccagaatggatttataaagcttgggaaaggcggaatgaacaggatttctatgcagcagttgatgactttagaaatgaatttaaagttcctccatttcaagattgtattttaagtttcctgggattttcagatgaagagaaaaccaatatggaagaaatgactgaaatgcaaggaggtaaatatttaccgcttggagatgaaagatgcactcaccttgtagttgaagagaatatagtaaaagatcttccctttgaaccttcaaagaaactttatgttgtcaagcaagagtggttctggggaagcattcaaatggatgcccgagctggagaaactatgtatttatatgaaaaggcaaatactcctgagctcaagaaatcagtgtcaatgctttctctaaatacccctaacagcaatcgcaaacgacgtcgtttaaaagaaacacttgctcagctttcaagagagacagacgtgtcaccatttccaccccgtaagcgcccatcagctgagcattccctttccatagggtcactcctagatatctccaacacaccagagtctagcattaactatggagacaccccaaagtcttgtactaagtcttctaaaagctccactccagttccttcaaagcagtcagcaaggtggcaagttgcaaaagagctttatcaaactgaaagtaattatgttaatatattggcaacaattattcagttatttcaagtaccattggaagaggaaggacaacgtggtggacctatccttgcaccagaggagattaagactatttttggtagcatcccagatatctttgatgtacacactaagataaaggatgatcttgaagaccttatagttaattgggatgagagcaaaagcattggtgacatttttctgaaatattcaaaagatttggtaaaaacctaccctccctttgtaaacttctttgaaatgagcaaggaaacaattattaaatgtgaaaaacagaaaccaagatttcatgcttttctcaagataaaccaagcaaaaccagaatgtggacggcagagccttgttgaacttcttatccgaccagtacagaggttacccagtgttgcattacttttaaatgatcttaagaagcatacagctgatgaaaatccagacaaaagcactttagaaaaagctattggatcactgaaggaagtaatgacgcatattaatgaggataagagaaaaacagaagctcaaaagcaaatttttgatgttgtttatgaagtagatggatgcccagctaatcttttatcttctcaccgaagcttagtacagcgggttgaaacaatttctctaggtgagcacccctgtgacagaggagaacaagtaactctcttcctcttcaatgattgcctagagatagcaagaaaacggcacaaggttattggcacttttaggagtcctcatggccaaacccgacccccagcttctcttaagcatattcacctaatgcctctttctcagattaagaaggtattggacataagagagacagaagattgccataatgcttttgccttgcttgtgaggccaccaacagagcaggcaaatgtgctactcagtttccagatgacatcagatgaacttccaaaagaaaactggctaaagatgctgtgtcgacatgtagctaacaccatttgtaaagcagatgctgagaatcttatttatactgctgatccagaatcctttgaagtaaatacaaaagatatggacagtacattgagtagagcatcaagagcaataaaaaagacttcaaaaaaggttacaagagcattctctttctccaaaactccaaaaagagctcttcgaagggctcttatgacatcccacggctcagtggagggaagaagtccttccagcaatgataagcatgtaatgagtcgtctttctagcacatcatcattagcaggtatcccttctccctcccttgtcagccttccttccttctttgaaaggagaagtcatacgttaagtagatctacaactcatttgatatgaagcgttaccaaaatcttaaattatagaaatgtatagacacctcatactcaaataagaaactgacttaaatggtacttgtaattagcacttggtgaaagctggaaggaagataaataacactaaactatgctatttgatttttcttcttgaaagagtaaggtttacctgttacattttcaagttaattcatgtaaaaaatgatagtgattttgatgtaatttatctcttgtttgaatctgtcattcaaaggccaataatttaagttgctatcagctgatattagtagctttgcaaccctgatagagtaaataaattttatgggcgggtgccaaatactgctgtgaatctatttgtatagtatccatgaatgaatttatggaaatagatatttgtgcagctcaatttatgcagagattaaatgacatcataatactggatgaaaacttgcatagaattctgattaaatagtgggtctgtttcacatgtgcagtttgaagtatttaaataaccactcctttcacagtttattttcttctcaagcgttttcaagatctagcatgtggattttaaaagatttgccctcattaacaagaataacatttaaaggagattgtttcaaaatatttttgcaaattgagataaggacagaaagattgagaaacattgtatattttgcaaaaacaagatgtttgtagctgtttcagagagagtacggtatatttatggtaattttatccactagcaaatcttgatttagtttgatagtgtgtggaattttattttgaaggataagaccatgggaaaattgtggtaaagactgtttgtacccttcatgaaataattctgaagttgccatcagttttactaatcttctgtgaaatgcatagatatgcgcatgttcaactttttattgtggtcttataattaaatgtaaaattgaaaattcatttgctgtttcaaagtgtgatatctttcacaatagcctttttatagtcagtaattcagaataatcaagttcatatggataaatgcatttttatttcctatttctttagggagtgctacaaatgtttgtcacttaaatttcaagtttctgttttaatagttaactgactatagattgttttctatgccatgtatgtgccacttctgagagtagtaaatgactctttgctacattttaaaagcaattgtattagtaagaactttgtaaataaatacctaaaacccaagtgt

SEQ ID NO: 577 - DNA, 3385 bp, Homo sapiens
gccttcccaccatggattgccaagaaaatgagtactgggaccaatggggacggtgtgtcacctgccaacggtgtggtcctggacaggagctatccaaggattgtggttatggagagggtggagatgcctactgcacagcctgccctcctcgcaggtacaaaagcagctggggccaccacagatgtcagagttgcatcacctgtgctgtcatcaatcgtgttcagaaggtcaactgcacagctacctctaatgctgtctgtggggactgtttgcccaggttctaccgaaagacacgcattggaggcctgcaggaccaagagtgcatcccgtgcacgaagcagacccccacctctgaggttcaatgtgccttccagttgagcttagtggaggcagatgcacccacagtgccccctcaggaggccacacttgttgcactggtgagcagcctgctagtggtgtttaccctggccttcctggggctcttcttcctctactgcaagcagttcttcaacagacattgccagcgtggaggtttgctgcagtttgaggctgataaaacagcaaaggaggaatctctcttccccgtgccacccagcaaggagaccagtgctgagtcccaagtgagtgagaacatctttcagacccagccacttaaccctatcctcgaggacgactgcagctcgactagtggcttccccacacaggagtcctttaccatggcctcctgcacctcagagagccactcccactgggtccacagccccatcgaatgcacagagctggacctgcaaaagttttccagctctgcctcctatactggagctgagaccttggggggaaacacagtcgaaagcactggagacaggctggagctcaatgtgccctttgaagttcccagcccttaactctaatgaggtctcttgggcccctggcagccttgcccagttgttctctctggactctgttcctataccacaacagcagcaggggcctgaaatgtgatgtccacaagagctaataccctacagatggggcatatcctatcccatcccaccagaggattgattctccatttcacaaggactgatctggagcatttcttgcttcccttttgtagtctggggagccagattccacattcatgggactaccagacatgttcctagctcaacttgattatagagaagaggagagaggacagtgaatggggtagggttttcatgtctgcatttttggtcaggtaagcctctcaaaattgtgttggcacatctacctagcactttagggacaaaatcaaacccttctccccttttagctcctccacactgtctccctcctcaacacacacacacacacatacacacacatatacatagacacacaaacacacacacacacattaatatctatcttgggggaggcctcgtgccataattcccaagttcatgtctcagactgctgcattgcagcatgaggcagggcaaacactttccctctagatccctggggcctcaccctgtatttgaggttctcaccaccctcagcagggagaagggctgaagttcgccattttggaaccttacagaacatttctgagccaaagtaatcttccttctggggcctgagttccccaaactaccccacagcagtccctcaaagacagccctcaatccatgtagggacatctgagtatgcctctttctattgaaatgtcaattcaatcccagctttctcaccaccgttcccctttgattctttctcaattgtctttttgcctttagctcccacctatacatctcatgctcagagaaaaacaagttccttagaggttgtattctttattctccaagaatctgtctgaaacttgtacagctagttcctgtcccacaactattaagtggtttattaagtacattaggcagaatgtgcacttcatcaccaggttctagctctggcaaaggagtgctgtctacagcaagatttttgcttttagaattttattaactacatcttttgggttcatccatctacaaacactgattaagggcccctggggcaaccaattgatcagattactaaaaggacttgggaaaaagcaaaaaggtcccattgtactggactgaggattagaagcaattgaaatacaagcctgtaccaagcaagcagcctggccccacacaggtattagcaaatatgtggtaaccaaggttttaggccttggcctttaggtttcctgttttttttttgtttttgtttttgtttttgtttttctgcaacaggttattcttatctcactggctttcactgatcatgtttagaccttctggtagaagaaataatatccagacaggggatgatttggcttcagcaggctgcaggtgttcaaaggttgccatgtggctggcagtggttcaagcccacatttgacactgctgctctagaggaaagataatgatggtaacacagtaataataataataataacaaaaatatgataaagtgaaagagtaagacttcttcagtgtgcttgctcatggcatgaatgctatgtggacagcccaagccatacccagaatcaccttaattccaactttttgaggttcagcaattggaggtggcaattggctttgcattttaaagtatttcgggtaaaggtgaagtgaaggattttcgtctttataatttctgtttggccatggcaaataccatagttgagtatttgcttcaggagagttctttttacagttttacttttcaatgctgaggcatatttctttgagcactgtgcttttatgtgtctttctacaaaggggttattggtcagtggaagaacaaagtacacttgataaaaacattttcaacatacattgagcctaaacagcagttaagttgtctctaaatgaactagcaaaaaaaaaaaatgtagtttttgtttgtaaggaaggggaggtatttcctgagaatgaatttttttttttttggattactgtttttctctccatataccttgacttggattttgacaggagggagcctgggaaaataattttttcctccaagattctcagatccaggttaggaaaggattcagcactacagcatacccctctacaacatacagccctgtcacattgagatcataatccctcctgtcccactcctctctaccaaccccaccctactagctaggtcttcagtgttttacattgaatattggtacattttaattattttttctcataaatgggttatttatagaaattttgttaactcttgagccatatgcatgtgtagatactggcagggctatgtttgtttatgatgctctgcaaacatttcatattggccaataaacagaaatatatccaaaaaaaaaaaaaaaaaa

SEQ ID NO: 578 - DNA, 4234 bp, Homo sapiens
ggggcagacggccgaagagccaggtgtgccagggacctatggcagcagggctgaacgtgcccgctccagcctctccagtgctgggagagacctctagatggtgcaggtgagtttgcaatgagggaaagcccctcggcaaggactgagtttccaaacttgcagacagggcagggagcggtcaaggaagagttcccgggaagccctttaaacggaaaggaagcggggctagtgtcagagaggtgtgccaggtcccaggcagccctgctgacccctaaggacatagagtacctgcttctgagagggctgccacggtggccacctgtgaagcctgtcacccagaactggatggtacctgactttcttcatagacccatcttctgctgggactgaagctgacctccaacagaagccaggtgagcccttgggagaggatggcccatgtgggggactgcacgcagacgccctggctccccgtcctggtggtgtctctgatgtgctcagcccgagcggaatactcaaactgcggtgagaacgagtactacaaccagactacggggctgtgccaggagtgccccccgtgtgggccgggagaggagccctacctgtcctgtggctacggcaccaaagacgaggactacggctgcgtcccctgcccggcggagaagttttccaaaggaggctaccagatatgcaggcgtcacaaagactgtgagggcttcttccgggccaccgtgctgacaccaggggacatggagaatgacgctgagtgtggcccttgcctccctggctactacatgctggagaacagaccgaggaacatctatggcatggtctgctactcctgcctcctggcaccccccaacaccaaggaatgtgtgggagccacttcaggagcttctgccaacttccctggcacctcgggcagcagcaccctgtctcccttccagcacgcccacaaagaactctcaggccaaggacacctggccactgccctgatcattgcaatgtccaccatcttcatcatggccatcgccatcgtcctcatcatcatgttctacatcctgaagacaaagccctctgccccagcctgttgcaccagccacccggggaagagcgtggaggcccaagtgagcaaggacgaggagaagaaagaggccccagacaacgtggtgatgttctccgagaaggatgaatttgagaagctgacagcaactccagcaaagcccaccaagagcgagaacgatgcctcatccgagaatgagcagctgctgagccggagcgtcgacagtgatgaggagcccgcccctgacaagcagggctccccggagctgtgcctgctgtcgctggttcacctggccagggagaagtctgccaccagcaacaagtcagccgggattcaaagccggaggaaaaagatcctcgatgtgtatgccaacgtgtgtggagtcgtggaaggtcttagccccacggagctgccatttgattgcctcgagaagactagccgaatgctcagctccacgtacaactctgagaaggctgttgtgaaaacgtggcgccacctcgccgagagcttcggcctgaagagggatgagattgggggcatgacagacggcatgcaactctttgaccgcatcagcacggcaggctacagcatccctgagctactcacaaaactggtgcagattgagcggctggatgctgtggagtccttgtgtgcagacatactggagtgggcgggggttgtgccacctgcctcccagccacatgctgcatcctgaaaagcatgcctgtgggctgtcctcccaggacaagccaaggatccaacgagggctctggagctgtgagtggtgccaaaagactgccaagaatcaaggcttttgtgatatgtcaccgtatgccttaggatgttcaaggagccagacgaaataaggcctgtcttccaatttaaccaaagataaaggactagagccgggatactttcagatgctcgcctgtacctcaccaggcagagtaaatatctactcactcatacagccagcccaccagcccaccattaactcactgaacaatgagacaatgttgaggactcaaatgaatcaaaccccgtgggaatgacagaagtgaagaatctggtccctgtctttaaggagtttgcactccagtagaagacagaaggaacgtatgtttacaaaccacttcactggaagacgtcaaacaagctgaatgaaggggcgcttagaaaacgttaatagaagttctaagcgggagatgactccctactgggatgatgaaggatggcatcctagtgaagaagcagctcaaacattttgataaaatggcaacaaaatgcagacaccctgctccaggtattatttcaggtttagtacaagtctgttaataccctatgtggtttcattaggataactttttacctatccttgaggtcatccatattcttacaggccttccagtcaataatggaagagctcactctatacaaaaccaatatgcaaggcatgtgtttgtccaagcaattggatgtgtgcagtagccaatttcatttactgcattactctttggcctgggaaccctgtggtctgcactacatgtgaatggccttccacttcagtcttaggcagatttgaccttttaggggcagcaatgctgaaggacacagcaatttaaattataatgtgtcaggctgtgttttcacttcaaacatgtatgagtagtcagctgtaattagagaaatgatgacttcctaagagttcagccacgcataattctagatttcaagagcatctaagacttgtggattagcctcatggcatgagagtttcagactcagccttctgagccagtcagggaaagtggagttctgcagcgcaaatgagagcctgggcttggtgtcgagggagctggcttctagttgtgccaccttgggccttgtcttttcctctctctgcctcagtttctcgtctgccaatgagatgttagttagtgattctataattggggcaggtagggttcaggtgagcaaaaagaaagtggagctataggaaatgccaggcctttgaggtgctctatggaagtcaacacagtgtggtttgtccatttaaatgggaataaaaacagaaaaactcagacttggcattttcacaataactgcaatggtttgacataacatttataggcagaaagttaataaactggcattgttcttggcatattattgtactatccctgtaactgccaagagctcaggagccaggctagtgatcacaccaggggttagagttcactgctgaactccctgatggcaggtctgtgtttattactacattaaaacaaagtctctgacttataaagcgaggtcgtaaaaattacaagttgcatgactgaaaaaatgctttagggggaaaatcagtcatatctttaacaccaacaagcaatttcccaccaacgaatgtagtacatactgtgagaggatcataatgaggtcctgaatatttaatatcatcatttactgtgtctgtttgctgctgtttttcgaacctatttggtttaccctgcaagctaaatactccacggcagagcttaattatccttttaattcctctttgaaatcctgtggtgcccccttccccctgccttgtgatgatgatgagtgagtctccccttaattagactgcaaatgtcacttgtgatgagtgtgccattccaggataacagcttgcaccctcctcagaatgttttcagcgaaagagtggggtggctgttctctgctcctggtgctttggcctcatttcacactattagaattctggggctgtaaggccagccagtgtcagctcatgttccattggctctccacctgccatttttagggagctattccttatatagttacaaattcccttgtcatttacttatttggaaacatgggatttactctgacaagctttagcctatgttatgggattcagaacaatgagatcataataattctcactgaccaaagctgggactccatcctgccatttttgtgtggagatattcataattctgcaatactttaaaacatttagaaaacaccccagggtaggtctgtggcccttagacagtgaagtcttaattgtcaatattatttttgtctaattctgtatatatataacttattatattttataatctcaataaacacattaataaaaaaaaaaaaaaaaaaaaaaaa

SEQ ID NO: 579 - DNA, 2544 bp, Homo sapiens
aagaaaaacagctgagagggcatcaggaaggagtttcgacccgcgctggcgagtcatgagcgccaagtttcccactggcgcgcaaacttgagttacttttgagcgtggatactggcgaagaggctgcgggcggtattagcgtttgcagcgacttggctcgggcagctgacccaagtgtcctgtcttccttcctctgcttgtctctaggctctgaaactgcggagcggccaccggacgccttctggagcaggtagcagcatgcagccgcctccaagtctgtgcggacgcgccctggttgcgctggttcttgcctgcggcctgtcgcggatctggggagaggagagaggcttcccgcctgacagggccactccgcttttgcaaaccgcagagataatgacgccacccactaagaccttatggcccaagggttccaacgccagtctggcgcggtcgttggcacctgcggaggtgcctaaaggagacaggacggcaggatctccgccacgcaccatctcccctcccccgtgccaaggacccatcgagatcaaggagactttcaaatacatcaacacggttgtgtcctgccttgtgttcgtgctggggatcatcgggaactccacacttctgagaattatctacaagaacaagtgcatgcgaaacggtcccaatatcttgatcgccagcttggctctgggagacctgctgcacatcgtcattgacatccctatcaatgtctacaagctgctggcagaggactggccatttggagctgagatgtgtaagctggtgcctttcatacagaaagcctccgtgggaatcactgtgctgagtctatgtgctctgagtattgacagatatcgagctgttgcttcttggagtagaattaaaggaattggggttccaaaatggacagcagtagaaattgttttgatttgggtggtctctgtggttctggctgtccctgaagccataggttttgatataattacgatggactacaaaggaagttatctgcgaatctgcttgcttcatcccgttcagaagacagctttcatgcagttttacaagacagcaaaagattggtggctattcagtttctatttctgcttgccattggccatcactgcatttttttatacactaatgacctgtgaaatgttgagaaagaaaagtggcatgcagattgctttaaatgatcacctaaagcagagacgggaagtggccaaaaccgtcttttgcctggtccttgtctttgccctctgctggcttccccttcacctcagcaggattctgaagctcactctttataatcagaatgatcccaatagatgtgaacttttgagctttctgttggtattggactatattggtatcaacatggcttcactgaattcctgcattaacccaattgctctgtatttggtgagcaaaagattcaaaaactgctttaaggctgggccacatgttggaaataagctagtaatgttgttttctgtcaatattgaatgtgatggtacagtaaaccaaaacccaacaatgtggccagaaagaaagagcaataataattaattcacacaccatatggattctatttataaatcacccacaaacttgttctttaatttcatcccaatcactttttcagaggcctgttatcatagaagtcattttagactctcaattttaaattaattttgaatcactaatattttcacagtttattaatatatttaatttctatttaaattttagattatttttattaccatgtactgaatttttacatcctgataccatttccttctccatgtcagtatcatgttctctaattatcttgccaaattttgaaactacacacaaaaagcatacttgcattatttataataaaattgcattcagtggctttttaaaaaaatgtttgattcaaaactttaacatactgataagtaagaaacaattataatttctttacatactcaaaaccaagatagaaaaaggtgctatcgttcaacttcaaaacatgtttcctagtattaaggactttaatatagcaacagacaaaattattgttaacatggatgttacagctcaaaagatttataaaagattttaacctattttctcccttattatccactgctaatgtggatgtatgttcaaacaccttttagtattgatagcttacatatggccaaaggaatacagtttatagcaaaacatgggtatgctgtagctaactttataaaagtgtaatataacaatgtaaaaaattatatatctgggaggattttttggttgcctaaagtggctatagttactgattttttattatgtaagcaaaaccaataaaaatttaagtttttttaacaactaccttatttttcactgtacagacactaattcattaaatactaattgattgtttaaaagaaatataaatgtgacaagtggacattatttatgttaaatatacaattatcaagcaagtatgaagttattcaattaaaatgccacatttctggtctctgggaaaaaaaaaaaaaa

SEQ ID NO: 580 - DNA, 8019 bp, Homo sapiens
atctgtcagttacgggggctgcccggcgggcgggctggaggcgctcgcaggctgcctagtcgttcgctcgctctctctcgcgtgctccctctcgccgcctgtggggaagtcggggccgcccgagcggccgtcgccaccgcctcgccccgacctccttcccggtcccctcccggcccagtccctcccgcccgcgcaccccgagtagtgagtggccccgcgcagggtctggagagtcaccgcggcggcgccgggtggtggttaaaccatgttaaggaggattttacagaggactcctgggagagttggctctcaaggttctgatttagattcatcagcaactcctataaacacagtggacgtcaataatgaaagctcttcagagggtttcatatgtccccagtgtatgaaatctcttggatctgctgatgaacttttcaaacattatgaagctgttcatgatgctggtaatgactcaggtcatggaggagagtctaatcttgctttgaagcgagatgatgtaacactgctcagacaagaggtccaagacctacaggcttcacttaaggaagaaaaatggtactcggaagaattaaagaaggaattagaaaaatatcaagggctgcagcagcaagaggccaaacctgatgggttggtgactgattcatcagcagaactacagtctttggaacagcaattagaagaagcccaaacagaaaattttaatattaagcaaatgaaagacttatttgaacagaaagcagcccaacttgctactgaaattgcagatataaagtcaaagtatgatgaagaaaggagtcttcgagaagctgctgaacaaaaagtgacacgtctgacagaagaattaaacaaagaggcaactgtaattcaagatctgaagacggaactgcttcagagacctggtatagaagatgttgccgtgctaaagaaagaactggtccaagttcaaacactaatggataacatgaccttggaacgtgagcgagaatctgaaaaactcaaagatgaatgcaaaaaattgcagtcacaatatgctagctcagaggccacaataagccagctaaggagtgaacttgccaaaggcccccaggaagttgctgtatatgtacaggaactacaaaaactgaaaagttcagttaatgaattaacacaaaaaaatcagaccttgacagaaaacttgctgaaaaaagaacaagactatactaagttagaggagaaacataatgaagaatctgtgagtaaaaagaatattcaggcaacccttcatcaaaaagacctagattgtcaacagcttcagtcaagattgtctgcatctgaaacctcactgcatagaatacatgtagaactaagtgaaaaaggagaagctactcaaaagctcaaagaagaattatctgaggtagagaccaagtaccagcatctaaaggcggagtttaagcagctacaacaacagagagaagaaaaggagcagcatgggttacaactccaaagtgaaattaatcaattacatagcaaacttctggagacagagcgccaactaggggaagctcatggtaggctgaaggaacagagacagctttcaagtgaaaagttgatggataaagaacaacaagtggctgatttacaactcaaactttctcggttagaagagcagttgaaggaaaaagttacaaattctacagaattgcagcatcaattagataaaacaaagcaacagcatcaagaacaacaggctcttcagcaaagcaccacggcaaaacttcgagaagctcagaatgatttggaacaagttctacgtcaaattggcgataaggaccaaaagatccagaaccttgaagctttattacagaagagtaaagaaaatatttcattactagaaaaagaaagagaagatctttatgcaaaaattcaggctggtgaaggagagactgctgttcttaaccagttacaagaaaaaaaccatacactacaggagcaagtaactcaactaacagagaagctgaagaatcagtcagaaagtcataaacaagcccaggagaatttgcatgaccaggtacaagagcagaaggcacatcttagagctgcacaagaccgtgtcctttccctagaaactagtgtcaatgaattaaatagtcaattaaatgaaagcaaggagaaggtctcccagcttgacatacagattaaagccaaaaccgaactattactatcagcagaagcagcaaaaactgctcaaagagctgatcttcagaatcatttggacacagctcaaaatgcattacaagataaacagcaggagttaaataagattactactcagttggatcaggtcactgcaaagttacaagacaagcaagaacattgcagtcagctggaaagtcatcttaaagaatataaagagaaatacctctctttagaacagaaaaccgaagagctagaaggtcaaattaagaaactagaagctgatagtcttgaagttaaagcaagcaaggagcaggctttgcaagatctacaacagcaaagacagctgaacacagatttagagctcagagccacagaattgagtaaacaacttgaaatggagaaggaaatagtatccagtacaagattggatctacagaaaaaatctgaagcccttgaaagtatcaagcaaaagcttaccaagcaagaggaagaaaaacaaatcctgaaacaagattttgaaactttaagtcaagaaacaaagattcagcatgaggaattgaataacagaattcaaacaacagtaacagaactacaaaaagtgaaaatggagaaagaagctttaatgacagagctttctacagtaaaggacaaactatcaaaagtttctgattctttgaaaaactctaaaagtgaatttgaaaaggagaatcagaaaggaaaagccgctatattagacttggaaaaaacttgcaaagaattaaagcatcaacttcaagtgcagatggaaaacacacttaaggaacagaaggaactgaaaaagtcacttgaaaaagagaaggaggcttctcatcagttgaaattggaactcaattcaatgcaggaacaacttatacaggcccagaatactttaaaacaaaatgaaaaagaagagcaacaacttcaggggaacataaatgagctaaagcaatcaagtgaacagaagaaaaaacaaattgaagcactccaaggagagcttaaaattgctgttttacagaagacagagcttgagaataaactacagcagcagttaacacaggcagcccaggaacttgcagcagagaaagagaaaatatcagtattacaaaacaactatgaaaaaagtcaggaaactttcaaacagcttcaatctgatttctatgggagggaatctgaacttctagccaccaggcaagatcttaagtctgtagaagagaagctttctctagcacaggaggacttgatttcaaacagaaatcaaattggaaatcaaaataaattgattcaagaactgaagactgccaaggctacattggagcaggattcagcaaagaaagaacagcaattgcaggagcgatgtaaagcactacaagacattcagaaagaaaagtcactgaaagaaaaagaactggtaaatgagaagtctaaattggcagagatagaagaaattaaatgtagacaagaaaaagaaatcactaaactaaacgaagaactcaagtcccacaaactagaaagcataaaggagataacaaatcttaaagatgctaaacagcttctaattcagcagaaattagaacttcaaggaaaagcggactccctgaaggcagctgttgaacaggagaagagaaatcagcagatactaaaagaccaggtgaaaaaggaagaagaggagctgaagaaagaatttattgagaaagaagctaagttgcattccgaaataaaagaaaaggaagtaggaatgaagaagcatgaagaaaatgaggctaaacttaccatgcagattacagcattaaatgaaaacttaggcactgtgaagaaggagtggcaatctagtcaacggagagttagtgagcttgagaaacaaacggatgacttacggggtgaaattgcagtattagaagcaacggttcagaataatcaagatgaaaggagagcactactggaaagatgtcttaaaggagaaggtgaaatagaaaagcttcaaaccaaagtattagaattgcaaagaaagctggataatacaactgcagcagtgcaggagctgggcagagaaaaccaatcacttcagatcaaacatacacaagcgttgaatagaaagtgggccgaagacaatgaagtacaaaactgtatggcctgtgggaaaggcttttcagtaacagtgagacggcatcactgccgacagtgtggaaatatcttctgtgctgaatgttcagccaaaaatgccttaactccttcctccaagaagcctgttcgtgtctgtgatgcatgtttcaatgacttgcaaggataatgggttatcacaacttcagagtaatattacactaacattagatttttaataaatgtacttaatagaggtcttggactactatttggtttggacactggttgcaatactagaccaaataggaattagtatattttggaatgttatggatatcaagtaaaactcttctatttttgtgagacttgggcttatcatctttcattacttttttcccatttagcccctggaatagctttcatgccaagtttagaattagccaatgaaatgtaaataaactttggacagaaaatagcaatgtatttttttaatataatttcattattcacaaatgaagaatgcaattccatagcttacttctttctcctaaatttaatgtacaaaaatgtacatggatgatattatcacttgttgctgtttttgttgcacaatagcacattaattatattaaatattctctttgtgaagttatgcacagaactgtaacactttcctctgcctttttctcttatatgtgggttcatggttcagttgcattgttatgttatgaatttactacttgggtgttctaaatacagtttatcttaaaatatgtagtaatatgaattcaaaaatggtttttgttttaacaatattaattaaattttcttgggtggattttataaaaacctctgtaaaatcaatttgtttacttatagttatctggggttgtattgcaaagaatagggttaatttttctttttgtctttttctgtctctttcttaaactcccacgcattgtccatttagaatcttagaaagcttcttaccctcgctgtcagttggaggatgaataataaacattgtataatgttcttattctcggtttcttgtaagtgggaagtcttttgagatcagccttcatatcatacccttattttgtctctctagcatcttcaggaacctgagtttgctttttacatagatctgattttttcctttatttggtttaacattttcaagcatagatcagcttcatgtatttgttttataattttgcatcttaaagctagtaactaatattgctgtggtcttattggtgaaaacaaaatataaaatgataagaagacattaaatattttactttctatttcttaccctattgggaagaatttttaaaagttgtaaaattgacttaaagttaaaatggttctgaatttggtgttccatgtcaactgttcccagttttaattttaactttgcaaaaataatgttgtgaaattccctttaagtaactaacacctagaaatagagtatcaccaaaaacaaatgtatttaggaatcccagttacaataaaaactgaaacagcatggctaagcatcttaaggataattaagaaattagcttatttgtatgctgaacaatggaatcgaactttaatttagcatagtcttattaatttggaaaattgtaaaacatctcaagagagaagttattaatattggtttattaatctttctagagaagaagtgtagttatacattcattcagtgcaatcattttataacagtagttaatatttcatttataatagttcttaatatacatttgctttcaaatattctgaaatgaaattatattcatgctatacctacagtgtatgtaaactaaagagatcactacatatttgtttaattatttaaaaaaaaatttaagtaaaccctgttgtcattagctattaagaacattgattaagtccctggacttggataaacatatatccttgaacatatataatgaagaaatacagtggctctttattaaaaataatagttggataatataaactgaactatttatgcatttttatatacttataaatccttccaaatagttttaattctatccttttacatataaataacttaataagtgtgctggaaaaacacagatattcacagcaccactgttttttttttttttttgagataataaattccatgagaaatctgggtttgaatatttgtttactttgtctcctaattgaacaccactccaggccttctgtctgtctcccctttacccccaaaatactcacaaaaaaattttaagacaacaagtaaccatatataggtgtttgaatgattttctcatttttatctaatttcatttcataagtcccgagtaatttacctaccataggctactatactgataatataaatgaaaccgaacattttttgctactaactctccccaatttaatgtgttttcgaaataaaaatttaaatttttttccttttaattaaaaagtcatctttgaagtccttattggctgtacattttacatgtttgctggtactattattttgtcagtcagttaaagctggcatgtacagctcttggctttaatgaaaagcacattgacataatgttagtaaattccaaaccccggcacagaatgtgagttaaaattaagtcttgctgggttagtgtacaataaactatacctacagacttttttttaatagaaagaagacaaagctgctggtataggatttgttcctttgaagaaaaaatgagggaaacaaacacaaaaacctcaatgcagtgtataaataacattttgttcaactacctcttaatgtggaattatctactttaatagtttcctgacagtaatgttaaatagtaactgccaaatttgttattttcccatctctcttaaaaaagtctttatgattattttatatagttttgagaactttaaagccacttttttttaaccttacatttgcataaaaatgtttagcttttaagtagagagcaaattatgatcatatattttgatattcatgacctgtttgactataggagtttttttaaaaaaatgcactttggctataaaaccatggatgatttgatccataagatttaaatgtgccaccattatagtattcctagacatgagcttgatgaatggtattctgtaattataacgtgccacacattattgtgtcttaattgcccttagcctgaattttaatgatcaatttgttattgttgcagatgtgaatattgtgcataaacttactaaatttatgtaaaattgtataaaatagaattagaagtcactaagttctttctgtgtagaagtaataaatttattgtaacacaatgcagttgtgtatatgacattctgtaattccttgaactggatcatatattcataagttctgtagatacttatgcatgaacattttctcatttagtttttgggttcattatttgtattgtgtttactacttgtgatcatgtagttgtgccttactttgtgagaaaggttagctcagtaaatactgcaatttctaaactcagtgattggaaggttattaattataaatgtaactgataaagtacgtgacagcatttaaatctgtataaagaacaatggaaggatccttattgaattgttgcttttttttaatatgtttaaatattatattaaaaacatttctttctaaactaaaaaaaaaaaaaaaaa

SEQ ID NO: 581 - DNA, 3528 bp, Homo sapiens
ctttttcgcaacgggtttgccgccagaacacaggtgtcgtgaaaactacccctaaaagccaaaatgggaaaggaaaagactcatatcaacattgtcgtcattggacacgtagattcgggcaagtccaccactactggccatctgatctataaatgcggtggcatcgacaaaagaaccattgaaaaatttgagaaggaggctgctgagatgggaaagggctccttcaagtatgcctgggtcttggataaactgaaagctgagcgtgaacgtggtatcaccattgatatctccttgtggaaatttgagaccagcaagtactatgtgactatcattgatgccccaggacacagagactttatcaaaaacatgattacagggacatctcaggctgactgtgctgtcctgattgttgctgctggtgttggtgaatttgaagctggtatctccaagaatgggcagacccgagagcatgcccttctggcttacacactgggtgtgaaacaactaattgtcggtgttaacaaaatggattccactgagccaccctacagccagaagagatatgaggaaattgttaaggaagtcagcacttacattaagaaaattggctacaaccccgacacagtagcatttgtgccaatttctggttggaatggtgacaacatgctggagccaagtgctaacatgccttggttcaagggatggaaagtcacccgtaaggatggcaatgccagtggaaccacgctgcttgaggctctggactgcatcctaccaccaactcgtccaactgacaagcccttgcgcctgcctctccaggatgtctacaaaattggtggtattggtactgttcctgttggccgagtggagactggtgttctcaaacccggtatggtggtcacctttgctccagtcaacgttacaacggaagtaaaatctgtcgaaatgcaccatgaagctttgagtgaagctcttcctggggacaatgtgggcttcaatgtcaagaatgtgtctgtcaaggatgttcgtcgtggcaacgttgctggtgacagcaaaaatgacccaccaatggaagcagctggcttcactgctcaggtgattatcctgaaccatccaggccaaataagcgccggctatgcccctgtattggattgccacacggctcacattgcatgcaagtttgctgagctgaaggaaaagattgatcgccgttctggtaaaaagctggaagatggccctaaattcttgaagtctggtgatgctgccattgttgatatggttcctggcaagcccatgtgtgttgagagcttctcagactatccacctttgggtcgctttgctgttcgtgatatgagacagacagttgcggtgggtgtcatcaaagcagtggacaagaaggctgctggagctggcaaggtcaccaagtctgcccagaaagctcagaaggctaaatgaatattatccctaatacctgccaccccactcttaatcagtggtggaagaacggtctcagaactgtttgtttcaattggccatttaagtttagtagtaaaagactggttaatgataacaatgcatcgtaaaaccttcagaaggaaaggagaatgttttgtggaccactttggttttcttttttgcgtgtggcagttttaagttattagtttttaaaatcagtactttttaatggaaacaacttgaccaaaaatttgtcacagaattttgagacccattaaaaaagttaaatgagaaacctgtgtgttcctttggtcaacaccgagacatttaggtgaaagacatctaattctggttttacgaatctggaaacttcttgaaaatgtaattcttgagttaacacttctgggtggagaatagggttgttttccccccacataattggaaggggaaggaatatcatttaaagctatgggagggttgctttgattacaacactggagagaaatgcagcatgttgctgattgcctgtcactaaaacaggccaaaaactgagtccttgtgttgcatagaaagcttcatgttgctaaaccaatgttaagtgaatctttggaaacaaaatgtttccaaattactgggatgtgcatgttgaaacgtgggttaaaatgactgggcagtgaaagttgactatttgccatgacataagaaataagtgtagtggctagtgtacaccctatgagtggaagggtccattttgaagtcagtggagtaagctttatgccagtttgatggtttcacaagttctattgagtgctattcagaataggaacaaggttctaatagaaaaagatggcaatttgaagtagctataaaattagactaatctacattgcttttctcctgcagagtctaataccttttatgctttgataattagcagtttgtctacttggtcactaggaatgaaactacatggtaataggcttaacaggtgtaatagcccacttactcctgaatctttaagcatttgtgcatttgaaaaatgcttttcgcgatcttcctgctgggattacaggcatgagccactgtgcctgacctcccatatgtaaaagtgtctaaaggtttttttttggttataaaaggaaaatttttgcttaagtttgaaggataggtaaaattaaaggacatgctttctgtttgtgtgatggtttttaaaaattttttttaagatggagttcttgttgcccaggctagaatgcaatggcaaaatctcactgcaatctcctcctcctgggttcaagcaattctcctacttcagcctcccaagtagctgggattacaggcatgtgctaatttggtgtttttaatagagatgaggtttttccatgttggtcaggctggtctcaaactcctgaccttaggtgatcgcctcggcctcctaaagtgctggaattacaggcatgagccaccatgcctggccaggacatgtgttcttaaggacatgctaagcaggagttaaagcagcccaagagataaggcctcttaaagtgactggcaatgtgtattgctcaagattcaaaggtacttgaattggccatagacaagtctgtaatgaagtgttatcgttttccctcatctgagtctgaattagataaaatgccttcccatcagccagtgctctgaggtatcaagtctaaattgaactagagatttttgtccttagtttctttgctatctaatgtttacacaagtaaatagtctaagatttgctggatgacagaaaaaacaggtaaggcctttaatagatggccaatagatgccctgataatgaaagttgacacctgtaagatttaccagtagagaattcttgacatgcaaggaagcaagatttaactgaaaaattgttcccactggaagcaggaatgagtcagtttacttgcatatactgagattgagattaacttcctgtgaaacccagtgtcttagacaactgtggcttgagcaccacctgctggtattcattacaaacttgctcactacaataaatgaattttaagctttaaaaaaaaaaaaaaaaaa

SEQ ID NO: 582 - DNA, 2700 bp, Homo sapiens
ggacttcgccagatcagacccacggggctgccctcccctgcgcactcccctcgctgcccgggcccggagcgcagcgcggccgcacagattcacaatgttgaaagcccttttcctaactatgctgactctggcgctggtcaagtcacaggacaccgaagaaaccatcacgtacacgcaatgcactgacggatatgagtgggatcctgtgagacagcaatgcaaagatattgatgaatgtgacattgtcccagacgcttgtaaaggtggaatgaagtgtgtcaaccactatggaggatacctctgccttccgaaaacagcccagattattgtcaataatgaacagcctcagcaggaaacacaaccagcagaaggaacctcaggggcaaccaccggggttgtagctgccagcagcatggcaaccagtggagtgttgcccgggggtggttttgtggccagtgctgctgcagtcgcaggccctgaaatgcagactggccgaaataactttgtcatccggcggaacccagctgaccctcagcgcattccctccaacccttcccaccgtatccagtgtgcagcaggctacgagcaaagtgaacacaacgtgtgccaagacatagacgagtgcactgcagggacgcacaactgtagagcagaccaagtgtgcatcaatttacggggatcctttgcatgtcagtgccctcctggatatcagaagcgaggggagcagtgcgtagacatagatgaatgtaccatccctccatattgccaccaaagatgcgtgaatacaccaggctcattttattgccagtgcagtcctgggtttcaattggcagcaaacaactatacctgcgtagatataaatgaatgtgatgccagcaatcaatgtgctcagcagtgctacaacattcttggttcattcatctgtcagtgcaatcaaggatatgagctaagcagtgacaggctcaactgtgaagacattgatgaatgcagaacctcaagctacctgtgtcaatatcaatgtgtcaatgaacctgggaaattctcatgtatgtgcccccagggataccaagtggtgagaagtagaacatgtcaagatataaatgagtgtgagaccacaaatgaatgccgggaggatgaaatgtgttggaattatcatggcggcttccgttgttatccacgaaatccttgtcaagatccctacattctaacaccagagaaccgatgtgtttgcccagtctcaaatgccatgtgccgagaactgccccagtcaatagtctacaaatacatgagcatccgatctgataggtctgtgccatcagacatcttccagatacaggccacaactatttatgccaacaccatcaatacttttcggattaaatctggaaatgaaaatggagagttctacctacgacaaacaagtcctgtaagtgcaatgcttgtgctcgtgaagtcattatcaggaccaagagaacatatcgtggacctggagatgctgacagtcagcagtatagggaccttccgcacaagctctgtgttaagattgacaataatagtggggccattttcattttagtcttttctaagagtcaaccacaggcatttaagtcagccaaagaatattgttaccttaaagcactattttatttatagatatatctagtgcatctacatctctatactgtacactcacccataattcaaacaattacaccatggtataaagtgggcatttaatatgtaaagattcaaagtttgtctttattactatatgtaaattagacattaatccactaaactggtcttcttcaagagagctaagtatacactatctggtgaaacttggattctttcctataaaagtgggaccaagcaatgatgatcttctgtggtgcttaaggaaacttactagagctccactaacagtctcataaggaggcagccatcataaccattgaatagcatgcaagggtaagaatgagtttttaactgctttgtaagaaaatggaaaaggtcaataaagatatatttctttagaaaatggggatctgccatatttgtgttggtttttattttcatatccagcctaaaggtggttgtttattatatagtaataaatcattgctgtacaatatgctggtttctgtagggtatttttaattttgtcagaaattttagattgtgaatattttgtaaaaaacagtaagcaaaattttccagaattcccaaaatgaaccagatatcccctagaaaattatactattgagaaatctatggggaggatatgagaaaataaattccttctaaaccacattggaactgacctgaagaagcaaactcggaaaatataataacatccctgaattcaggacttccacaagatgcagaacaaaatggataaaaggtatttcactggagaagttttaatttctaagtaaaatttaaatcctaacacttcactaatttataactaaaatttctcatcttcgtacttgatgctcacagaggaagaaaatgatgatggtttttattcctggcatccagagtgacagtgaacttaagcaaattaccctcctacccaattctatggaatattttatacgtctccttgtttaaaatgtcactgctttactttgatgtatcatatttttaaataaaaataaatattcctttagaagatcaaaaaaaaaaaaaaaaaaa

SEQ ID NO: 583 - DNA, 3685 bp, Homo sapiens
agagacgtgcgggtgaaaggtcgagcgacagccggccccgccccctggcgcgcgggcgtgtcggacccgcagagctctcggactttcggaagctctcggtgtgggtgcgacccgagagaaggagcggggctggtggggctgctgcagccgtcacaggaaataagtaatcatggtgctcaacagtttggataagatgattcaactccagaaaaacactgccaacatcaggaatatttgtgttttggctcatgttgaccatggaaaaactactctggctgactgtcttatatctagcaatggaatcatctccagccgcctagcaggcaagttaaggtacatggacagcagagaagatgaacagatccgagggatcactatgaaatccagtgccatttccctacattatgcaacaggtaatgaggagtacctgatcaatctgatagactctccaggacacgtggacttttcctcagaagtatcaaccgctgttcgcatttgtgatggatgcatcattgtggtagatgctgtggaaggagtctgtccacagacacaggcagttctgcgacaagcttggcttgaaaacatccgtccggttttagtgattaataagattgatcgcttgatagtggaactgaaattcaccccacaagaggcctattctcacctcaagaatattttagaacagattaatgcgctcacagggactctttttacttctaaagtcctagaagaaagagcagagagggagactgaatcccaagtgaatccaaattctgaacaaggagagcaagtatatgactggagcactggcttggaggacacagatgattctcacctttacttctctccagaacagggaaatgtggtgtttaccagtgcaatagatgggtggggctttggaattgagcacttcgccagaatctacagtcaaaaaattggcatcaaaaaggaagttcttatgaaaaccttgtggggagattactatataaatatgaaggctaaaaagatcatgaagggtgatcaggccaaaggaaagaaacctttatttgtacagttgatcctggaaaatatatggagtttgtatgatgctgttttgaaaaaggacaaagacaaaattgataaaatagtgacttctttaggattaaaaattggagcccgggaggcacgacattcagaccctaaagttcagatcaacgccatttgcagtcagtggctacccatatcccatgctgttcttgctatggtgtgtcagaaacttcctagtccccttgatattacagctgagagagtggagagactgatgtgcacaggatcacaaacttttgactcttttccaccagaaactcaagcactgaaagcagcttttatgaaatgtggaagtgaggacactgctccagttattatatttgtttccaaaatgtttgcagttgatgctaaggccttgcctcagaataagccaaggcctctcactcaagaagaaattgctcagagacgtgagcgtgcaagacaaaggcatgcagagaagcttgcagcagcacagggacaggcacccttggagcccacccaagatgggagtgccattgaaacatgtccaaaaggagaggagccaagaggtgacgagcaacaggtggaaagtatgacccctaaacctgtgctccaggaagaaaacaaccaagagtcttttattgcatttgctcgggtgttcagtggtgtggctcgaagaggaaagaaaatttttgtcttggggcccaaatacagtcctcttgagtttttacgaagggtaccattaggcttctcagctccaccagatggcctcccccaagtcccccacatggcatactgtgctctggaaaacctgtatcttctgatgggaagggaactggaatatctagaggaggtacctccaggaaatgtgctaggaataggaggccttcaagattttgtgctgaaatctgcaacactgtgtagcctgccatcctgcccaccatttataccactcaacttcgaagccactcctattgtgagagttgctgttgaaccaaaacatccaagtgaaatgcctcagctcgtaaaaggaatgaaactgttaaaccaggctgatccctgtgtccagattttaattcaggaaacgggagagcacgttttagtcacagcaggagaagtccaccttcagcgatgcctggatgacttaaaagaaaggtttgcaaagattcatatcagtgtatctgaacctattattccattcagagaaacaatcacaaaacccccaaaagttgacatggtcaatgaagaaataggcaaacagcaaaaagttgcagtcatacaccaaatgaaagaagatcaaagcaaaatccctgaaggaatccaagttgactctgacgggctaatcaccataacaactcccaataaacttgccacgctcagtgttcgagccatgccccttccagaagaagtcacccagattctggaagaaaatagtgatttgattcgttctatggagcagttgacatcctctttgaatgagggtgaaaatactcacatgattcatcagaagacccaagagaaaatttgggaattcaaaggaaaactggagcaacacctaacagggagaagatggaggaacattgttgaccaaatctggtcatttggcccaagaaaatgtgggcccaacatactagtcaataaaagtgaagattttcagaactcagtatggacaggtccagctgacaaagcttcaaaagaagccagtagataccgagatttgggcaatagcattgtgagtggcttccaactagcaaccctctctggccccatgtgtgaggagcctctcatgggtgtctgttttgttctggaaaaatgggacctaagtaaatttgaggaacaaggagcaagtgatctggcaaaagagggacaggaggaaaatgaaacctgttctggtggaaatgaaaaccaagagctacaagatggctgctctgaggcctttgagaagaggacatcacagaaaggagaatctccactcactgactgctatggacctttctcaggacagctaattgccaccatgaaagaagcatgtcgctatgcactgcaagtgaaacctcagcgcctgatggcagctatgtacacatgtgacatcatggccactggtgatgttctcggtcgagtctatgctgtcttgtcaaagagagaaggtcgggtacttcaagaagaaatgaaagaagggacagacatgttcatcatcaaggctgtgctgcctgttgctgaaagctttggttttgctgatgaaatcaggaagaggacaagtggcctggccagcccacaactagtattcagccattgggagatcattcccagtgaccccttctgggtgccaactactgaggaggaatacttgcactttggggagaaggctgactctgagaaccaagcccggaagtacatgaacgcagtacgaaagcggaaggggctttatgtggaagaaaagattgtggagcatgcagaaaagcagaggacactcagcaaaaataagtagctacctactactggtggattcttttccttatagtgaatttaaaagtatcatcaagggtttaatattgggaaaatttctttttgccacattatctctgtttattcactttcaataaagttgatccatataaatattttaaagaggatgttagag

SEQ ID NO: 584 - DNA, 3532 bp, Homo sapiens
agagacgtgcgggtgaaaggtcgagcgacagccggccccgccccctggcgcgcgggcgtgtcggacccgcagagctctcggactttcggaagctctcggtgtgggtgcgacccgagagaaggagcggggctggtggggctgctgcagccgtcacaggaaataagtaatcatggtgctcaacagtttggataagatgattcaactccagaaaaacactgccaacatcaggaatatttgtgttttggctcatgttgaccatggtaatgaggagtacctgatcaatctgatagactctccaggacacgtggacttttcctcagaagtatcaaccgctgttcgcatttgtgatggatgcatcattgtggtagatgctgtggaaggagtctgtccacagacacaggcagttctgcgacaagcttggcttgaaaacatccgtccggttttagtgattaataagattgatcgcttgatagtggaactgaaattcaccccacaagaggcctattctcacctcaagaatattttagaacagattaatgcgctcacagggactctttttacttctaaagtcctagaagaaagagcagagagggagactgaatcccaagtgaatccaaattctgaacaaggagagcaagtatatgactggagcactggcttggaggacacagatgattctcacctttacttctctccagaacagggaaatgtggtgtttaccagtgcaatagatgggtggggctttggaattgagcacttcgccagaatctacagtcaaaaaattggcatcaaaaaggaagttcttatgaaaaccttgtggggagattactatataaatatgaaggctaaaaagatcatgaagggtgatcaggccaaaggaaagaaacctttatttgtacagttgatcctggaaaatatatggagtttgtatgatgctgttttgaaaaaggacaaagacaaaattgataaaatagtgacttctttaggattaaaaattggagcccgggaggcacgacattcagaccctaaagttcagatcaacgccatttgcagtcagtggctacccatatcccatgctgttcttgctatggtgtgtcagaaacttcctagtccccttgatattacagctgagagagtggagagactgatgtgcacaggatcacaaacttttgactcttttccaccagaaactcaagcactgaaagcagcttttatgaaatgtggaagtgaggacactgctccagttattatatttgtttccaaaatgtttgcagttgatgctaaggccttgcctcagaataagccaaggcctctcactcaagaagaaattgctcagagacgtgagcgtgcaagacaaaggcatgcagagaagcttgcagcagcacagggacaggcacccttggagcccacccaagatgggagtgccattgaaacatgtccaaaaggagaggagccaagaggtgacgagcaacaggtggaaagtatgacccctaaacctgtgctccaggaagaaaacaaccaagagtcttttattgcatttgctcgggtgttcagtggtgtggctcgaagaggaaagaaaatttttgtcttggggcccaaatacagtcctcttgagtttttacgaagggtaccattaggcttctcagctccaccagatggcctcccccaagtcccccacatggcatactgtgctctggaaaacctgtatcttctgatgggaagggaactggaatatctagaggaggtacctccaggaaatgtgctaggaataggaggccttcaagattttgtgctgaaatctgcaacactgtgtagcctgccatcctgcccaccatttataccactcaacttcgaagccactcctattgtgagagttgctgttgaaccaaaacatccaagtgaaatgcctcagctcgtaaaaggaatgaaactgttaaaccaggctgatccctgtgtccagattttaattcaggaaacgggagagcacgttttagtcacagcaggagaagtccaccttcagcgatgcctggatgacttaaaagaaaggtttgcaaagattcatatcagtgtatctgaacctattattccattcagagaaacaatcacaaaacccccaaaagttgacatggtcaatgaagaaataggcaaacagcaaaaagttgcagtcatacaccaaatgaaagaagatcaaagcaaaatccctgaaggaatccaagttgactctgacgggctaatcaccataacaactcccaataaacttgccacgctcagtgttcgagccatgccccttccagaagaagtcacccagattctggaagaaaatagtgatttgattcgttctatggagcagttgacatcctctttgaatgagggtgaaaatactcacatgattcatcagaagacccaagagaaaatttgggaattcaaaggaaaactggagcaacacctaacagggagaagatggaggaacattgttgaccaaatctggtcatttggcccaagaaaatgtgggcccaacatactagtcaataaaagtgaagattttcagaactcagtatggacaggtccagctgacaaagcttcaaaagaagccagtagataccgagatttgggcaatagcattgtgagtggcttccaactagcaaccctctctggccccatgtgtgaggagcctctcatgggtgtctgttttgttctggaaaaatgggacctaagtaaatttgaggaacaaggagcaagtgatctggcaaaagagggacaggaggaaaatgaaacctgttctggtggaaatgaaaaccaagagctacaagatggctgctctgaggcctttgagaagaggacatcacagaaaggagaatctccactcactgactgctatggacctttctcaggacagctaattgccaccatgaaagaagcatgtcgctatgcactgcaagtgaaacctcagcgcctgatggcagctatgtacacatgtgacatcatggccactggtgatgttctcggtcgagtctatgctgtcttgtcaaagagagaaggtcgggtacttcaagaagaaatgaaagaagggacagacatgttcatcatcaaggctgtgctgcctgttgctgaaagctttggttttgctgatgaaatcaggaagaggacaagtggcctggccagcccacaactagtattcagccattgggagatcattcccagtgaccccttctgggtgccaactactgaggaggaatacttgcactttggggagaaggctgactctgagaaccaagcccggaagtacatgaacgcagtacgaaagcggaaggggctttatgtggaagaaaagattgtggagcatgcagaaaagcagaggacactcagcaaaaataagtagctacctactactggtggattcttttccttatagtgaatttaaaagtatcatcaagggtttaatattgggaaaatttctttttgccacattatctctgtttattcactttcaataaagttgatccatataaatattttaaagaggatgttagag

SEQ ID NO: 585 - DNA, 2239 bp, Homo sapiens
ccccggcgcagcgcggccgcagcagcctccgccccccgcacggtgtgagcgcccgacgcggccgaggcggccggagtcccgagctagccccggcggccgccgccgcccagaccggacgacaggccacctcgtcggcgtccgcccgagtccccgcctcgccgccaacgccacaaccaccgcgcacggccccctgactccgtccagtattgatcgggagagccggagcgagctcttcggggagcagcgatgcgaccctccgggacggccggggcagcgctcctggcgctgctggctgcgctctgcccggcgagtcgggctctggaggaaaagaaagtttgccaaggcacgagtaacaagctcacgcagttgggcacttttgaagatcattttctcagcctccagaggatgttcaataactgtgaggtggtccttgggaatttggaaattacctatgtgcagaggaattatgatctttccttcttaaagaccatccaggaggtggctggttatgtcctcattgccctcaacacagtggagcgaattcctttggaaaacctgcagatcatcagaggaaatatgtactacgaaaattcctatgccttagcagtcttatctaactatgatgcaaataaaaccggactgaaggagctgcccatgagaaatttacaggaaatcctgcatggcgccgtgcggttcagcaacaaccctgccctgtgcaacgtggagagcatccagtggcgggacatagtcagcagtgactttctcagcaacatgtcgatggacttccagaaccacctgggcagctgccaaaagtgtgatccaagctgtcccaatgggagctgctggggtgcaggagaggagaactgccagaaactgaccaaaatcatctgtgcccagcagtgctccgggcgctgccgtggcaagtcccccagtgactgctgccacaaccagtgtgctgcaggctgcacaggcccccgggagagcgactgcctggtctgccgcaaattccgagacgaagccacgtgcaaggacacctgccccccactcatgctctacaaccccaccacgtaccagatggatgtgaaccccgagggcaaatacagctttggtgccacctgcgtgaagaagtgtccccgtaattatgtggtgacagatcacggctcgtgcgtccgagcctgtggggccgacagctatgagatggaggaagacggcgtccgcaagtgtaagaagtgcgaagggccttgccgcaaagtgtgtaacggaataggtattggtgaatttaaagactcactctccataaatgctacgaatattaaacacttcaaaaactgcacctccatcagtggcgatctccacatcctgccggtggcatttaggggtgactccttcacacatactcctcctctggatccacaggaactggatattctgaaaaccgtaaaggaaatcacagggtttttgctgattcaggcttggcctgaaaacaggacggacctccatgcctttgagaacctagaaatcatacgcggcaggaccaagcaacatggtcagttttctcttgcagtcgtcagcctgaacataacatccttgggattacgctccctcaaggagataagtgatggagatgtgataatttcaggaaacaaaaatttgtgctatgcaaatacaataaactggaaaaaactgtttgggacctccggtcagaaaaccaaaattataagcaacagaggtgaaaacagctgcaaggccacaggccaggtctgccatgccttgtgctcccccgagggctgctggggcccggagcccagggactgcgtctcttgccggaatgtcagccgaggcagggaatgcgtggacaagtgcaaccttctggagggtgagccaagggagtttgtggagaactctgagtgcatacagtgccacccagagtgcctgcctcaggccatgaacatcacctgcacaggacggggaccagacaactgtatccagtgtgcccactacattgacggcccccactgcgtcaagacctgcccggcaggagtcatgggagaaaacaacaccctggtctggaagtacgcagacgccggccatgtgtgccacctgtgccatccaaactgcacctacgggtcctaataaatcttcactgtctgactttagtctcccactaaaactgcatttcctttctacaatttcaatttctccctttgcttcaaataaagtcctgacactattcatttga

SEQ ID NO: 586 - DNA, 1595 bp, Homo sapiens
ccccggcgcagcgcggccgcagcagcctccgccccccgcacggtgtgagcgcccgacgcggccgaggcggccggagtcccgagctagccccggcggccgccgccgcccagaccggacgacaggccacctcgtcggcgtccgcccgagtccccgcctcgccgccaacgccacaaccaccgcgcacggccccctgactccgtccagtattgatcgggagagccggagcgagctcttcggggagcagcgatgcgaccctccgggacggccggggcagcgctcctggcgctgctggctgcgctctgcccggcgagtcgggctctggaggaaaagaaagtttgccaaggcacgagtaacaagctcacgcagttgggcacttttgaagatcattttctcagcctccagaggatgttcaataactgtgaggtggtccttgggaatttggaaattacctatgtgcagaggaattatgatctttccttcttaaagaccatccaggaggtggctggttatgtcctcattgccctcaacacagtggagcgaattcctttggaaaacctgcagatcatcagaggaaatatgtactacgaaaattcctatgccttagcagtcttatctaactatgatgcaaataaaaccggactgaaggagctgcccatgagaaatttacaggaaatcctgcatggcgccgtgcggttcagcaacaaccctgccctgtgcaacgtggagagcatccagtggcgggacatagtcagcagtgactttctcagcaacatgtcgatggacttccagaaccacctgggcagctgccaaaagtgtgatccaagctgtcccaatgggagctgctggggtgcaggagaggagaactgccagaaactgaccaaaatcatctgtgcccagcagtgctccgggcgctgccgtggcaagtcccccagtgactgctgccacaaccagtgtgctgcaggctgcacaggcccccgggagagcgactgcctggtctgccgcaaattccgagacgaagccacgtgcaaggacacctgccccccactcatgctctacaaccccaccacgtaccagatggatgtgaaccccgagggcaaatacagctttggtgccacctgcgtgaagaagtgtccccgtaattatgtggtgacagatcacggctcgtgcgtccgagcctgtggggccgacagctatgagatggaggaagacggcgtccgcaagtgtaagaagtgcgaagggccttgccgcaaagtgtgtaacggaataggtattggtgaatttaaagactcactctccataaatgctacgaatattaaacacttcaaaaactgcacctccatcagtggcgatctccacatcctgccggtggcatttaggggtgactccttcacacatactcctcctctggatccacaggaactggatattctgaaaaccgtaaaggaaatcacaggtttgagctgaattatcacatgaatataaatgggaaatcagtgttttagagagagaacttttcgacatatttcctgttcccttggaataaaaacatttcttctgaaattttaccgttaaaaaaaaaaaaaaaaaaaaaaaaa

SEQ ID NO: 587 - DNA, 2865 bp, Homo sapiens
ccccggcgcagcgcggccgcagcagcctccgccccccgcacggtgtgagcgcccgacgcggccgaggcggccggagtcccgagctagccccggcggccgccgccgcccagaccggacgacaggccacctcgtcggcgtccgcccgagtccccgcctcgccgccaacgccacaaccaccgcgcacggccccctgactccgtccagtattgatcgggagagccggagcgagctcttcggggagcagcgatgcgaccctccgggacggccggggcagcgctcctggcgctgctggctgcgctctgcccggcgagtcgggctctggaggaaaagaaagtttgccaaggcacgagtaacaagctcacgcagttgggcacttttgaagatcattttctcagcctccagaggatgttcaataactgtgaggtggtccttgggaatttggaaattacctatgtgcagaggaattatgatctttccttcttaaagaccatccaggaggtggctggttatgtcctcattgccctcaacacagtggagcgaattcctttggaaaacctgcagatcatcagaggaaatatgtactacgaaaattcctatgccttagcagtcttatctaactatgatgcaaataaaaccggactgaaggagctgcccatgagaaatttacaggaaatcctgcatggcgccgtgcggttcagcaacaaccctgccctgtgcaacgtggagagcatccagtggcgggacatagtcagcagtgactttctcagcaacatgtcgatggacttccagaaccacctgggcagctgccaaaagtgtgatccaagctgtcccaatgggagctgctggggtgcaggagaggagaactgccagaaactgaccaaaatcatctgtgcccagcagtgctccgggcgctgccgtggcaagtcccccagtgactgctgccacaaccagtgtgctgcaggctgcacaggcccccgggagagcgactgcctggtctgccgcaaattccgagacgaagccacgtgcaaggacacctgccccccactcatgctctacaaccccaccacgtaccagatggatgtgaaccccgagggcaaatacagctttggtgccacctgcgtgaagaagtgtccccgtaattatgtggtgacagatcacggctcgtgcgtccgagcctgtggggccgacagctatgagatggaggaagacggcgtccgcaagtgtaagaagtgcgaagggccttgccgcaaagtgtgtaacggaataggtattggtgaatttaaagactcactctccataaatgctacgaatattaaacacttcaaaaactgcacctccatcagtggcgatctccacatcctgccggtggcatttaggggtgactccttcacacatactcctcctctggatccacaggaactggatattctgaaaaccgtaaaggaaatcacagggtttttgctgattcaggcttggcctgaaaacaggacggacctccatgcctttgagaacctagaaatcatacgcggcaggaccaagcaacatggtcagttttctcttgcagtcgtcagcctgaacataacatccttgggattacgctccctcaaggagataagtgatggagatgtgataatttcaggaaacaaaaatttgtgctatgcaaatacaataaactggaaaaaactgtttgggacctccggtcagaaaaccaaaattataagcaacagaggtgaaaacagctgcaaggccacaggccaggtctgccatgccttgtgctcccccgagggctgctggggcccggagcccagggactgcgtctcttgccggaatgtcagccgaggcagggaatgcgtggacaagtgcaaccttctggagggtgagccaagggagtttgtggagaactctgagtgcatacagtgccacccagagtgcctgcctcaggccatgaacatcacctgcacaggacggggaccagacaactgtatccagtgtgcccactacattgacggcccccactgcgtcaagacctgcccggcaggagtcatgggagaaaacaacaccctggtctggaagtacgcagacgccggccatgtgtgccacctgtgccatccaaactgcacctacgggccaggaaatgagagtctcaaagccatgttattctgcctttttaaactatcatcctgtaatcaaagtaatgatggcagcgtgtcccaccagagcgggagcccagctgctcaggagtcatgcttaggatggatcccttctcttctgccgtcagagtttcagctgggttggggtggatgcagccacctccatgcctggccttctgcatctgtgatcatcacggcctcctcctgccactgagcctcatgccttcacgtgtctgttccccccgcttttcctttctgccacccctgcacgtgggccgccaggttcccaagagtatcctacccatttccttccttccactccctttgccagtgcctctcaccccaactagtagctaaccatcacccccaggactgacctcttcctcctcgctgccagatgattgttcaaagcacagaatttgtcagaaacctgcagggactccatgctgccagccttctccgtaattagcatggccccagtccatgcttctagccttggttccttctgcccctctgtttgaaattctagagccagctgtgggacaattatctgtgtcaaaagccagatgtgaaaacatctcaataacaaactggctgctttgttcaatgctagaacaacgcctgtcacagagtagaaactcaaaaatatttgctgagtgaatgaacaaatgaataaatgcataataaataattaaccaccaatccaacatccaga

SEQ ID NO: 588 - DNA, 5616 bp, Homo sapiens
ccccggcgcagcgcggccgcagcagcctccgccccccgcacggtgtgagcgcccgacgcggccgaggcggccggagtcccgagctagccccggcggccgccgccgcccagaccggacgacaggccacctcgtcggcgtccgcccgagtccccgcctcgccgccaacgccacaaccaccgcgcacggccccctgactccgtccagtattgatcgggagagccggagcgagctcttcggggagcagcgatgcgaccctccgggacggccggggcagcgctcctggcgctgctggctgcgctctgcccggcgagtcgggctctggaggaaaagaaagtttgccaaggcacgagtaacaagctcacgcagttgggcacttttgaagatcattttctcagcctccagaggatgttcaataactgtgaggtggtccttgggaatttggaaattacctatgtgcagaggaattatgatctttccttcttaaagaccatccaggaggtggctggttatgtcctcattgccctcaacacagtggagcgaattcctttggaaaacctgcagatcatcagaggaaatatgtactacgaaaattcctatgccttagcagtcttatctaactatgatgcaaataaaaccggactgaaggagctgcccatgagaaatttacaggaaatcctgcatggcgccgtgcggttcagcaacaaccctgccctgtgcaacgtggagagcatccagtggcgggacatagtcagcagtgactttctcagcaacatgtcgatggacttccagaaccacctgggcagctgccaaaagtgtgatccaagctgtcccaatgggagctgctggggtgcaggagaggagaactgccagaaactgaccaaaatcatctgtgcccagcagtgctccgggcgctgccgtggcaagtcccccagtgactgctgccacaaccagtgtgctgcaggctgcacaggcccccgggagagcgactgcctggtctgccgcaaattccgagacgaagccacgtgcaaggacacctgccccccactcatgctctacaaccccaccacgtaccagatggatgtgaaccccgagggcaaatacagctttggtgccacctgcgtgaagaagtgtccccgtaattatgtggtgacagatcacggctcgtgcgtccgagcctgtggggccgacagctatgagatggaggaagacggcgtccgcaagtgtaagaagtgcgaagggccttgccgcaaagtgtgtaacggaataggtattggtgaatttaaagactcactctccataaatgctacgaatattaaacacttcaaaaactgcacctccatcagtggcgatctccacatcctgccggtggcatttaggggtgactccttcacacatactcctcctctggatccacaggaactggatattctgaaaaccgtaaaggaaatcacagggtttttgctgattcaggcttggcctgaaaacaggacggacctccatgcctttgagaacctagaaatcatacgcggcaggaccaagcaacatggtcagttttctcttgcagtcgtcagcctgaacataacatccttgggattacgctccctcaaggagataagtgatggagatgtgataatttcaggaaacaaaaatttgtgctatgcaaatacaataaactggaaaaaactgtttgggacctccggtcagaaaaccaaaattataagcaacagaggtgaaaacagctgcaaggccacaggccaggtctgccatgccttgtgctcccccgagggctgctggggcccggagcccagggactgcgtctcttgccggaatgtcagccgaggcagggaatgcgtggacaagtgcaaccttctggagggtgagccaagggagtttgtggagaactctgagtgcatacagtgccacccagagtgcctgcctcaggccatgaacatcacctgcacaggacggggaccagacaactgtatccagtgtgcccactacattgacggcccccactgcgtcaagacctgcccggcaggagtcatgggagaaaacaacaccctggtctggaagtacgcagacgccggccatgtgtgccacctgtgccatccaaactgcacctacggatgcactgggccaggtcttgaaggctgtccaacgaatgggcctaagatcccgtccatcgccactgggatggtgggggccctcctcttgctgctggtggtggccctggggatcggcctcttcatgcgaaggcgccacatcgttcggaagcgcacgctgcggaggctgctgcaggagagggagcttgtggagcctcttacacccagtggagaagctcccaaccaagctctcttgaggatcttgaaggaaactgaattcaaaaagatcaaagtgctgggctccggtgcgttcggcacggtgtataagggactctggatcccagaaggtgagaaagttaaaattcccgtcgctatcaaggaattaagagaagcaacatctccgaaagccaacaaggaaatcctcgatgaagcctacgtgatggccagcgtggacaacccccacgtgtgccgcctgctgggcatctgcctcacctccaccgtgcagctcatcacgcagctcatgcccttcggctgcctcctggactatgtccgggaacacaaagacaatattggctcccagtacctgctcaactggtgtgtgcagatcgcaaagggcatgaactacttggaggaccgtcgcttggtgcaccgcgacctggcagccaggaacgtactggtgaaaacaccgcagcatgtcaagatcacagattttgggctggccaaactgctgggtgcggaagagaaagaataccatgcagaaggaggcaaagtgcctatcaagtggatggcattggaatcaattttacacagaatctatacccaccagagtgatgtctggagctacggggtgaccgtttgggagttgatgacctttggatccaagccatatgacggaatccctgccagcgagatctcctccatcctggagaaaggagaacgcctccctcagccacccatatgtaccatcgatgtctacatgatcatggtcaagtgctggatgatagacgcagatagtcgcccaaagttccgtgagttgatcatcgaattctccaaaatggcccgagacccccagcgctaccttgtcattcagggggatgaaagaatgcatttgccaagtcctacagactccaacttctaccgtgccctgatggatgaagaagacatggacgacgtggtggatgccgacgagtacctcatcccacagcagggcttcttcagcagcccctccacgtcacggactcccctcctgagctctctgagtgcaaccagcaacaattccaccgtggcttgcattgatagaaatgggctgcaaagctgtcccatcaaggaagacagcttcttgcagcgatacagctcagaccccacaggcgccttgactgaggacagcatagacgacaccttcctcccagtgcctgaatacataaaccagtccgttcccaaaaggcccgctggctctgtgcagaatcctgtctatcacaatcagcctctgaaccccgcgcccagcagagacccacactaccaggacccccacagcactgcagtgggcaaccccgagtatctcaacactgtccagcccacctgtgtcaacagcacattcgacagccctgcccactgggcccagaaaggcagccaccaaattagcctggacaaccctgactaccagcaggacttctttcccaaggaagccaagccaaatggcatctttaagggctccacagctgaaaatgcagaatacctaagggtcgcgccacaaagcagtgaatttattggagcatgaccacggaggatagtatgagccctaaaaatccagactctttcgatacccaggaccaagccacagcaggtcctccatcccaacagccatgcccgcattagctcttagacccacagactggttttgcaacgtttacaccgactagccaggaagtacttccacctcgggcacattttgggaagttgcattcctttgtcttcaaactgtgaagcatttacagaaacgcatccagcaagaatattgtccctttgagcagaaatttatctttcaaagaggtatatttgaaaaaaaaaaaaagtatatgtgaggatttttattgattggggatcttggagtttttcattgtcgctattgatttttacttcaatgggctcttccaacaaggaagaagcttgctggtagcacttgctaccctgagttcatccaggcccaactgtgagcaaggagcacaagccacaagtcttccagaggatgcttgattccagtggttctgcttcaaggcttccactgcaaaacactaaagatccaagaaggccttcatggccccagcaggccggatcggtactgtatcaagtcatggcaggtacagtaggataagccactctgtcccttcctgggcaaagaagaaacggaggggatggaattcttccttagacttacttttgtaaaaatgtccccacggtacttactccccactgatggaccagtggtttccagtcatgagcgttagactgacttgtttgtcttccattccattgttttgaaactcagtatgctgcccctgtcttgctgtcatgaaatcagcaagagaggatgacacatcaaataataactcggattccagcccacattggattcatcagcatttggaccaatagcccacagctgagaatgtggaatacctaaggatagcaccgcttttgttctcgcaaaaacgtatctcctaatttgaggctcagatgaaatgcatcaggtcctttggggcatagatcagaagactacaaaaatgaagctgctctgaaatctcctttagccatcaccccaaccccccaaaattagtttgtgttacttatggaagatagttttctccttttacttcacttcaaaagctttttactcaaagagtatatgttccctccaggtcagctgcccccaaaccccctccttacgctttgtcacacaaaaagtgtctctgccttgagtcatctattcaagcacttacagctctggccacaacagggcattttacaggtgcgaatgacagtagcattatgagtagtgtggaattcaggtagtaaatatgaaactagggtttgaaattgataatgctttcacaacatttgcagatgttttagaaggaaaaaagttccttcctaaaataatttctctacaattggaagattggaagattcagctagttaggagcccaccttttttcctaatctgtgtgtgccctgtaacctgactggttaacagcagtcctttgtaaacagtgttttaaactctcctagtcaatatccaccccatccaatttatcaaggaagaaatggttcagaaaatattttcagcctacagttatgttcagtcacacacacatacaaaatgttccttttgcttttaaagtaatttttgactcccagatcagtcagagcccctacagcattgttaagaaagtatttgatttttgtctcaatgaaaataaaactatattcatttccactctaaaaaaaaaaaaaaaaa

SEQ ID NO: 589 - DNA, 5163 bp, Homo sapiens
ttaggggcagaaaaacatttgtaataattaatggctttgagagacacaaggctttgtttgccccagagtattagttaacccacctagtgctcctaatcatacaatattaaggattgggagggacattcattgcctcactctctatttgtttcaccttctgtaaaattggtagaataatagtacccacttcatagcattgtatgatgattaaattggttaatatttttaaaatgcttagaacacagattgggcacataacagcaagcaccacatgtgtttataagataaattcctttgtgttgccttccgttaaagtttaaataagtaaataaataaataaatacttgcatgacattttgaagtctctctataacatctgagtaagtggcggctgcgacaatgctactggagttccagaatcgtgttggtgacaagattgttcaccagcatatggtgtggtgaaaactcactaatttggaattagttcagattattaagcctgaataggtgaaaatcctgaaatcaaggatctttggaactatttgaaatcagtattttatattttcctgttgtattcattaaagtgttgcaagtgttctatttgatggattaagtatatttaggatatacatgttcaatttgtgattttgtatacttaattggaacaagaaagctaataaaggttttgatatggacatctattcttttaagtaaacttcaatgaaaatatatgagtagagcatatagagatgtaaataatttgtggacacaccacagactgaaatagcaaatttaaaagaaattgttggaagaatcaagtgtttgtggaatgagtcctcctagtaaagttcctgctcttgtgaataattaagcctcatgtataattactatagcaaaaggaagcctaagaagtattagactctacttgtatttaaattacattttacataatttatgtgtatgaaaaatgttttaaatgcttattttcgtaagccatgagatagctcctttatattttaagaatttctgaattaatttgcttggattttattagtgcaaatggcagagctagcaattcctttttctgtgttcccattccatcctattcatccctcttttaggaaactctgaactctggattgtccttgtttacatacctgcctcctgcattggactatgtgtctctgagtgtagtatgactaattcatttgtttgtcaaggactctcaatgcatttgttgaacagcctaattagtaatgtctgcaacaatgacattttactgtatttaataaagctctgggaaagtaggatacacataagacaggtctaggtctaaattctttacagaaacttggatttttagttcggtttgaaatttgaagatgtgagtatatttatctcagtttcccaaaggacaagctaattggaattatcatcctctttcacttgattggatccccagaatgccatttacgcatgcagcaggattttataacagttttaaattctgtatatttgatgaagaggttttatatttttggattcaagcctctttttaaacttctacaatatggtttacaataattccttatatcctgcttttgaaatacatattacaactttttaagtttggaaggctatatttcaaggactgaagttacagtatactcaagtgatacacaagcctagcaccccactttccacatagtgttcgataaagattgataaactcgaaatcacagaccttttaattcttaagacaaatagcagcagaaagaaacatctttggcttatttctggtaaggtttttatgctctgtaaaacaaagaattgtattcatccgcgcagcacagattctattaaaaataaatgtgagagtcgttaatgtagtactgctcatttaccatcaaaattcacttttcaggaataatcccatcagtttaaattggatattggaatgagcattgattacatttaacttggtagcccaaaatttcttcatggggttttgaactcggcgggatttcaaaggttttaaaaatgagtttttgattttttttaaaaccctcaaatttcattacctttaaactaggtcgaaacggggcgcaagagattggattaacaccatagtaatacttattttgttcttaaccatttcagggcttcttgaaatagaggctgtatggtgtaatggaaaaaacagccttggaatctgggagcctgattcctggattcagtcccagttttgcgtgaccttgggcaagttactttacttctctgaatttccgtttcctcctctgcaaaatgaggatcgcaatagccaccttgcaaccttgactggagcgagcctcgcacaccccgcgccggcctggaggaagagcagccatgattacgccgccttcgctccgctacccgcttgcggctggcgccctcctccagcaggtgtaggcgctgccgcgctgccccacgcctttccgccgctcgcgggcctgcgcctcggcgtccccgaggaggccgctgcgggctgaggtagcgcaccggcctctcggcgtcccagtccggtcccgggcggagggaaagcgggcgacccacctccgaggcagaagccgaggcccggccccgccgagtgcggaggagcgcaggcagcccccgcccctcggccctccccccggccctcccggccctccctccgccccctccgccctcgcgcgccgcccgcccgggtcgccgcggggccgtggtgtacgtgcagagcgcgcagagcgagtggcgcccgtatgccctgcgctcctccacagcctgggccgggccgcccgggacgctgaggcggcggcggcggccgagggggccggtcttgcgctccccaggcccgcgcgcctgagcccaggttgccattcgccgcacaggccctattctctcagccctcggcggcgatgaggcgctgaggcggctgccggcgctgcgccggagcttaggactcggaagcggccgggccgagggcgtggggtgccggcctccctgaggcgagggtagcgggtgcatggcgcagtaacggcccctatctctctccccgctccccagcctcgggcgaggccgtccggccgctacccctcctgctcggccgccgcagtcgccgtcgccgccgccgccgccgccatggccaatgacagcggcgggcccggcgggccgagcccgagcgagcgagaccggcagtactgcgagctgtgcgggaagatggagaacctgctgcgctgcagccgctgccgcagctccttctactgctgcaaggagcaccagcgtcaggactggaagaagcacaagctcgtgtgccagggcagcgagggcgccctcggccacggagtgggcccacaccagcattccggccccgcgccgccggctgcagtgccgccgcccagggccggggcccgggagcccaggaaggcagcggcgcgccgggacaacgcctccggggacgcggccaagggaaaagtaaaggccaagcccccggccgacccagcggcggccgcgtcgccgtgtcgtgcggccgccggcggccagggctcggcggtggctgccgaagccgagcccggcaaggaggagccgccggcccgctcatcgctgttccaggagaaggcgaacctgtaccccccaagcaacacgcccggggatgcgctgagccccggcggcggcctgcggcccaacgggcagacgaagcccctgccggcgctgaagctggcgctcgagtacatcgtgccgtgcatgaacaagcacggcatctgtgtggtggacgacttcctcggcaaggagaccggacagcagatcggcgacgaggtgcgcgccctgcacgacaccgggaagttcacggacgggcagctggtcagccagaagagtgactcgtccaaggacatccgaggcgataagatcacctggatcgagggcaaggagcccggctgcgaaaccattgggctgctcatgagcagcatggacgacctgatacgccactgtaacgggaagctgggcagctacaaaatcaatggccggacgaaagccatggttgcttgttatccgggcaatggaacgggttatgtacgtcatgttgataatccaaatggagatggaagatgtgtgacatgtatatattatcttaataaagactgggatgccaaggtaagtggaggtatacttcgaatttttccagaaggcaaagcccagtttgctgacattgaacccaaatttgatagactgctgtttttctggtctgaccgtcgcaaccctcatgaagtacaaccagcatatgctacaaggtacgcaataactgtttggtattttgatgcagatgagagagcacgagctaaagtaaaatatctaacaggtgaaaaaggtgtgagggttgaactcaataaaccttcagattcggtcggtaaagacgtcttctagagcctttgatccagcaataccccacttcacctacaatattgttaactatttgttaacttgtgaatacgaataaatgggataaagaaaaatagacaaccagttcgcattttaataaggaaacagaaacaactttttgtgttgcatcaaacagaagattttgactgctgtgactttgtactgcatgatcaacttcaaatctgtgattgcttacaggaggaagataagctactaattgaaaatggtttttacatctggatatgaaataagtgccctgtgtagaatttttttcattcttatattttgccagatctgttatctagctgagttcatttcatctctcccttttttatatcaagtttgaatttgggataatttttctatattaggtacaatttatctaaactgaattgagaaaaaattacagtattattcctcaaaataacatcaatctatttttgtaaacctgttcatactattaaattttgccctaaaagacctcttaataatgattgttgccagtgactgatgattaattttattttacttaaaataagaaaaggagcactttaattacaactgaaaaatcagattgttttgcagtccttccttacactaatttgaactcttaaagattgctgctttttttttgacattgtcaataacgaaacctaattgtaaaacagtcaccatttactaccaataacttttagttaatgttttacaagg

SEQ ID NO: 590 - DNA, 2722 bp, Homo sapiens
gagtctggccgcagtcgcggcagtggtggcttcccatccccaaaaggcgccctccgactccttgcgccgcactgctcgccgggccagtccggaaacgggtcgtggagctccgcaccactcccgctggttcccgaaggcagatcccttctcccgagagttgcgagaaactttcccttgtccccgacgctgcagcggctcgggtaccgtggcagccgcaggtttctgaaccccgggccacgctccccgcgcctcggcttcgcgctcgtgtagatcgttccctctctggttgcacgctggggatcccggacctcgattctgcgggcgagatgcccctgggacacatcatgaggctggacctggagaaaattgccctggagtacatcgtgccctgtctgcacgaggtgggcttctgctacctggacaacttcctgggcgaggtggtgggcgactgcgtcctggagcgcgtcaagcagctgcactgcaccggggccctgcgggacggccagctggcggggccgcgcgccggcgtctccaagcgacacctgcggggcgaccagatcacgtggatcgggggcaacgaggagggctgcgaggccatcagcttcctcctgtccctcatcgacaggctggtcctctactgcgggagccggctgggcaaatactacgtcaaggagaggtctaaggcaatggtggcttgctatccgggaaatggaacaggttatgttcgccacgtggacaaccccaacggtgatggtcgctgcatcacctgcatctactatctgaacaagaattgggatgccaagctacatggtgggatcctgcggatatttccagaggggaaatcattcatagcagatgtggagcccatttttgacagactcctgttcttctggtcagatcgtaggaacccacacgaagtgcagccctcttacgcaaccagatatgctatgactgtctggtactttgatgctgaagaaagggcagaagccaaaaagaaattcaggaatttaactaggaaaactgaatctgccctcactgaagactgaccgtgctctgaaatctgctggccttgttcattttagtaacggttcctgaattctcttaaattctttgagatccaaagatggcctcttcagtgacaacaatctccctgctacttcttgcatccttcacatccctgtcttgtgtgtggtacttcatgttttcttgccaagactgtgttgatcttcagatactctctttgccagatgaagttacttgctaactccagaaattcctgcagacatcctactcggccagcggtttacctgatagattcggtaatactatcaagagaagagcctaggagcacagcgagggaatgaaccttacttgcactttatgtatacttcctgatttgaaaggaggaggtttgaaaagaaaaaaatggaggtggtagatgccacagagaggcatcacggaagccttaacagcaggaaacagagaaatttgtgtcatctgaacaatttccagatgttcttaatccagggctgttggggtttctggagaattatcacaacctaatgacattaatacctctagaaagggctgctgtcatagtgaacaatttataagtgtcccatggggcagacactccttttttcccagtcctgcaacctggattttctgcctcagccccattttgctgaaaataatgactttctgaataaagatggcaacacaattttttctccattttcagttcttacctgggaacctaattccccagaagctaaaaaactagacattagttgttttggttgctttgttggaatggaatttaaatttaaatgaaaggaaaaatatatccctggtagttttgtgttaaccactgataactgtggaaagagctaggtctactgatatacaataaacatgtgtgcatcttgaacaatttgagaggggaggtggagttggaaatgtgggtgttcctgttttttttttttttttttttttagttttcctttttaatgagctcaccctttaacacaaaaaaagcaaggtgatgtattttaaaaaaggaagtggaaataaaaaaatctcaaagctatttgagttctcgtctgtccctagcagtctttcttcagctcacttggctctctagatccactgtggttggcagtatgaccagaatcatggaatttgctagaactgtggaagcttctactcctgcagtaagcacagatcgcactgcctcaataacttggtattgagcacgtattttgcaaaagctacttttcctagttttcagtattactttcatgttttaaaaatccctttaatttcttgcttgaaaatcccatgaacattaaagagccagaaatattttcctttgttatgtacggatatatatatatatagtcttccaagatagaagtttactttttcctcttctggttttggaaaatttccagataagacatgtcaccattaattctcaacgactgctctattttgttgtacggtaatagttatcaccttctaaattactatgtaatttattcacttattatgtttattgtcttgtatcctttctctggagtgtaagcacaatgaagacaggaattttgtatatttttaaccaatgcaacatactctcagcacctaaaatagtgccgggaacatagtaagggctcagtaaatacttgttgaataaactcagtctcctacattagcattctaa

SEQ ID NO: 591 - DNA, 1399 bp, Homo sapiens
agagagtgcgcgtcagcagtttattagagagctctgtagccagcctcttctgcgcacccacctgctgcatcttagttcagtcggctcttagagtagtaaccgccagaaaggagtcggaagaggtctcacgaggctgtcatcaccgccatgcccaagaataaaggtaaaggaggtaaaaacaggcgcaggggtaaaaatgagaatgaatctgaaaaaagagagttggtgtttaaagaggatggacaagagtatgctcaggtaatcaaaatgttgggaaatggacgattggaagcattgtgttttgatggtgtaaagaggttatgccatatcagagggaaattgagaaaaaaggtttggataaatacatcagacattatattggttggtctacgggactatcaggataacaaagctgatgtaattttaaagtacaatgcagatgaagctagaagcctgaaggcatatggcgagcttccagaacatgctaaaatcaatgaaacagacacatttggtcctggagatgatgatgaaatccagtttgacgatattggagatgatgatgaagacattgatgatatctaaattgaaccaagtgtttttacatgacaagttctctgaggatggttctacagttgggattttggccatcatcaaccaagaagagaaattcatttagtgtgtagtttctgaaagcaaactgatttattttcattgttttaaagtatttatttctttaaaagctgaggacactgaattaccttaagttaaatgttaatactttattgttttgatgtaatggaacttaaggataaaagaccataatatttgctgttaaaataaataaacgagtgcctttcctactgtgataacgtcaagtaattggatattttgaatacatttctgcctgataatcatgctgggttctaataagccctacttccacctaatctgtttacagtcttttggtatgtttcagttacttagatggtctcataaggtttctgatacaatttgaagacagaaatctgcatttagaatcagaaaacatggacatatttttcatatttatctagtcatatgtaattttatgctaacattgatagtttataaatccttttcatcctttgtgcctcggttattaaggaaaaaaaaatgtccaacatacagtttttaaagtgtggcagttttgagtagtaacttagaatgtataagattaagagttaaagaaaccgaacaataagtggcaaccaattatcttaacattggaaatactggggtgccattttgttttcaaaagttattcattgtaatccactgttttggctttcatgaacaagtaaattacagtgtataaatgaaaagcaatttcataataaattctataaactgaaaaaaaaaa

SEQ ID NO: 592 - DNA, 2813 bp, Homo sapiens
atcggagtgtggcagtgctgggctggccggcgggctgggctgcggcccgcgcgcggccggcgatgcaggggggcaactccggggtccgcaagcgcgaagaggagggcgacggggctggggctgtggctgcgccgccggccatcgactttcccgccgagggcccggaccccgaatatgacgaatctgatgttccagcagaaatccaggtgttaaaagaacccctacaacagccaaccttcccttttgcagttgcaaaccaactcttgctggtttctttgctggagcacttgagccacgtgcatgaaccaaacccacttcgttcaagacaggtgtttaagctactttgccagacgtttatcaaaatggggctgctgtcttctttcacttgtagtgacgagtttagctcattgagactacatcacaacagagctattactcacttaatgaggtctgctaaagagagagttcgtcaggatccttgtgaggatatttctcgtatccagaaaatcagatcaagggaagtagccttggaagcacaaacttcacgttacttaaatgaatttgaagaacttgccatcttaggaaaaggtggatacggaagagtatacaaggtcaggaataaattagatggtcagtattatgcaataaaaaaaatcctgattaagggtgcaactaaaacagtttgcatgaaggtcctacgggaagtgaaggtgctggcaggtcttcagcaccccaatattgttggctatcacaccgcgtggatagaacatgttcatgtgattcagccacgagcagacagagctgccattgagttgccatctctggaagtgctctccgaccaggaagaggacagagagcaatgtggtgttaaaaatgatgaaagtagcagctcatccattatctttgctgagcccaccccagaaaaagaaaaacgctttggagaatctgacactgaaaatcagaataacaagtcggtgaagtacaccaccaatttagtcataagagaatctggtgaacttgagtcgaccctggagctccaggaaaatggcttggctggtttgtctgccagttcaattgtggaacagcagctgccactcaggcgtaattcccacctagaggagagtttcacatccaccgaagaatcttccgaagaaaatgtcaactttttgggtcagacagaggcacagtaccacctgatgctgcacatccagatgcagctgtgtgagctctcgctgtgggattggatagtcgagagaaacaagcggggccgggagtatgtggacgagtctgcctgtccttatgttatggccaatgttgcaacaaaaatttttcaagaattggtagaaggtgtgttttacatacataacatgggaattgtgcaccgagatctgaagccaagaaatatttttcttcatggccctgatcagcaagtaaaaataggagactttggtctggcctgcacagacatcctacagaagaacacagactggaccaacagaaacgggaagagaacaccaacacatacgtccagagtgggtacttgtctgtacgcttcacccgaacagttggaaggatctgagtatgatgccaagtcagatatgtacagcttgggtgtggtcctgctagagctctttcagccgtttggaacagaaatggagcgagcagaagttctaacaggtttaagaactggtcagttgccggaatccctccgtaaaaggtgtccagtgcaagccaagtatatccagcacttaacgagaaggaactcatcgcagagaccatctgccattcagctgctgcagagtgaacttttccaaaattctggaaatgttaacctcaccctacagatgaagataatagagcaagaaaaagaaattgcagaactaaagaagcagctaaacctcctttctcaagacaaaggggtgagggatgacggaaaggatgggggcgtgggatgaaagtggacttaacttttaaggtagttaactggaatgtaaatttttaatctttattagggtatagttggtacaatgcttcgttgtatttagtaagcctttacaagacttgttaaagatgtcagagtgccccaagctgccgttccttcccttcctgccccacaagctccttttcctgaatttcctacctaaatattaaccatatgcctagtctctgaaactaaaaacttggacctcatcctcaattattttctcctttcaactctgttgaccctctgtctggtcttcctctagaaggttctaccgcagaaattgatgtgtgctccctgccctcgtcactgcccaagcccgggcctgcacatactcactggactgttccagttttgacagctgccagtcttcctgcccctttcacactgcagctgaagttcattacctgaaggacgcctcatcatttcattccttggctccaaaccttctgctgcctctaagataaaagctcaacttcttaacagtgtacagtgtgcaacttccaacctttttatctgttctctccaccttcagtttagcgtcattccaaaaccacacccttgcaaagctttgtactccgcaccccagatgatctccaggcagctcagatctctttcctgcctttgccctgcactgttccccggtacttcctcctttattgtagcactcagctccccagccaatctgtacatccctcagaggcagcgatctgatgaattggtttttgaatcccagaaagggtctgccatggagttggcagtcatcacggtagatggcgtatgattttgctgaattttaaataaaatgaaaaccataaaaaaaaaaaaaaaa

SEQ ID NO: 593 - DNA, 1794 bp, Homo sapiens
aggggtacggaagtgcgccggaagtggggtgcggaggtgtgcagcgcgctgtcagactggctcgcaggcggcgcggccggcggacccgttcgagacagcgcgggcggctcgggtcccctggggctccgcagcaggaggacgccatggacgacaaggagttaattgaatactttaagtctcagatgaaagaagatcctgacatggcctcagcagtggctgccatccggacgttgctggagttcttgaagagagataaaggggagacaatccagggtctgagggcgaatctcaccagtgccatagaaaccctgtgtggtgtggactcctctgtggcagtgtcctctggcggggagctcttcctccgcttcatcagtcttgcctccctggaatactccgattactccaaatgtaaaaagatcatgattgagcggggagaactttttctcaggagaatatcactgtcaagaaacaaaattgcagatctgtgccatactttcatcaaagatggagcgacaatattgactcacgcctactccagagtggtcctgagagtcctggaagcagccgtggcggccaagaagcgatttagtgtatacgtcacagagtcacagcctgatttgtcaggtaagaaaatggccaaagccctctgccacctcaacgtccctgtcactgtggtgctagatgctgctgtcggctacatcatggagaaagcagatcttgtcatagttggtgctgaaggagttgttgaaaacggaggaattattaacaagattggaaccaaccagatggctgtgtgtgccaaagcacagaacaaacctttctatgtggttgcagaaagtttcaagtttgtccggctctttccactaaaccagcaagacgtcccagataagtttaagtataaggcagacactctcaaggtcgcgcagactggacaagacctcaaagaggagcatccgtgggtcgactacactgccccttccttaatcactctgctgtttacagacctgggcgtgctgacaccctcagcagtcagcgatgagctcatcaagctctatctgtaacctgtgagccctttcctgccaaggtgcagcttacgtagttgaggcagggtgagtagctgcttgacaccccagtgagtcaggccaaaactgagatgtgtttaatgaagatttatggagtaaggacttaaaatcatacatcttggagaacctttcttactcatttcagtcccatctaaaaatgtgtcagctattctaaatcccaacttaaattgttcttacggtttctagaaactttccttttcagtttccagaaatacaagttagataattggctacttaactgatgaaagatgagcccaagtccacctgtcttcatcctcccctgcactccagactgatctgcctaaagcacgcgagatgcaggcgaaaagcagccacacccctctgccacaaatgaccaacagctggtcaggacgttacacgcggtgccttgtaagaggcaagaaacacttgctgaatctgcatctggcttccagtggtaagcacattcctcagcaggatcaagccaaacagtaaaaactaccaagagaacacgaggaaggcagaaacgatgtttagcaacagtattctgcatggttcactgcttaagaaaatgccttctggaatatttgtaaactgaaattctgtatgtgtaagagatgtttaaatatgtttgggtcctaaacagctttttaaaattatacttgggaataaattcagcatcttttcaaataaactctatgaaagacgctga

SEQ ID NO: 594 - DNA, 3486 bp, Homo sapiens
tttccttcctcttttggcaacatggcgggcggagaagctggagtgactctagggcagccgcatctttcgcgtcaggatctcaccaccttggatgttaccaagttgacgccactttcacacgaagttatcagcagacaagccacaattaacataggtacaattggtcatgtagctcatgggaaatccacagtcgtcaaagctatttctggagttcatactgtcaggttcaaaaatgaactagaaagaaatattacaatcaagcttggatatgctaatgctaagatttataagcttgatgacccaagttgccctcggccagaatgttatagatcttgtgggagcagtacacctgacgagtttcctacggacattccagggaccaaagggaacttcaaattagtcagacatgtttcctttgttgactgtcctggccacgatattttgatggctactatgctgaacggtgcagcagtgatggatgcagctcttctgttgatagctggtaatgaatcttgccctcagcctcagacatcggaacacctggctgctatagagatcatgaaactgaagcatattttgattctacaaaataaaattgatttggtaaaagaaagtcaggctaaagaacaatacgagcagatccttgcatttgtccaaggtacagtagcagagggagctcccattattccaatttcagctcagctgaaatacaatattgaagttgtttgtgagtacatagtaaagaaaattccagtacccccaagagactttacttcagagccccggcttattgttattagatcttttgatgtcaacaaacctggctgtgaagttgatgaccttaagggaggtgtagctggtggtagtatcctaaaaggagtattaaaggtgggccaggagatagaagtaagacctggtattgtttccaaagatagtgaaggaaaactcatgtgtaaaccaatcttttccaaaattgtatcactttttgcggagcataatgatctgcaatatgctgctccaggcggtcttattggagttggaacaaaaattgaccccactttgtgccgggctgacagaatggtggggcaagtacttggtgcagtcggagctttacctgagatattcacagaattggaaatttcctatttcctgcttagacggcttctaggtgtacgcactgaaggagacaagaaagcagcaaaggttcaaaagctgtctaagaatgaagtgctcatggtgaacataggatccctgtcaacaggagggagagttagtgctgtcaaggccgatttgggtaaaattgttttgaccaatccagtgtgcacagaggtaggagaaaaaattgcccttagccgaagagttgaaaaacactggcgtttaattggttggggtcagataagaagaggagtgacaatcaagccaacagtagatgatgactgaagaataccagttaaataatacattcggatggatttggaagttggaattcctcttaacaaccaaggggtttattttcaaagcaatattggggaattgatttcacagttcgttaccttagtaggtaacggtaaggttattctctttttttttttttttttttttggttatgaaaacttagggactaaaattaatataaaaattggcataatgttggattgaatctacattttggcagaagttaaacattcccacataatgtcaaaattatacatcatgcagttctgtttttttgtttgttttattttgttttgtttttgagtctggctctgtcacccaggctggagtgcagtggcgtgatctgcaacctctgccccccgggttcaagcgattctcctgcctcagcctcccgagtagctgagattacaggtgcgcgccaccacacttggctaatttttgtattattagtagagacggggtttcagcatgttggctaggccggtctctcctgacctcagggtgatcagcccacctcggcctcacaaagtgctgggattacaggcgtgagccaccttgcccagcccacatcatacagtttgaaatgaaactttgccacaaccagcctttgctgtagcacacacatatatcactgaacctgtttgaaataaagttttttttctttttcatgattcgtctttgagtacctccaggctgaaagactgttgtaccagtaaaaacttaaaggcacaaattctccttgaagaccttctcccttttatgtggccccatattttatgttgctttatctttgaaattttgcatgaaaaggaaatgaatggattcgaatgaaattgtcctttagagcatgattacttgttcccatggacaaatatttttctccccttgctcttcctggcctgaaacacgggaaaccagagtcaaaagttatctccctctccctgtgatgccttgagatttttttctgcgttgtttaatgcctgaaatccaagtcttcctccatgggaaaatactgttataccaaataattctagatgagtaacaaagatctttttaggccttcattttatgttttttcttaactgttatattatgattgtgacatagattatactactactaatttttggatgtttcaaaaggtcaagaagtaaaagatgttagaaagcaatgagtgagtccttttgatttttaacttattccccatgtccctatacttcgtgtgcttttcctttttttttttgagacggaggctcactccgtcacctaggctagagtacagtggcacgatcttggctcgctgcaacctctgcctccctgattcaagtgattctcgtgcttcagcctcccatgtagctgatattacaggcacttgccaccatacccggctaatttttgtatttttagtagagatggggtttcaccatgttgcccaggctggtcttgaactcctaacctcaggtgatccgcccgcctctgccttccaaagtgctgggattacaggcgtgagccactctgcccggcttatttttctttatgtttttgcttcgtaagaggttctgttgagcagtgatttgcaactcttgctgacgttgctggggaagctttaaaaaaaaaaaagatgccccacagagattctgattttaattgttctgatttaattggcttggagtagaattcaggcattgatatctttaaaaactccccagtgttgagaaacaaatttagagagttgagaagtaggtatattaaattacagaatcttactgagttttggtagactgataatacaatttgctttgcttttcttaaatttgcattgagatgggatttgaagcatattgtgctcttgtgaatgttgaagttgcattgtagaagtttagaagctctggctatgggttgcctaaattgatgttttgaggaagcatattaatgttataaacttcgctgactttgaaggttgtgttgtagcatgaggaacacaaataaaacaattctaaatcaaactaaaaaaaaaaaaaaaaaaaaaaa

SEQ ID NO: 595 - DNA, 5305 bp, Homo sapiens
tccttcctttccgtctctggccggctgggcgcgggcgactgctggcgaggcgcgtgggaccttacgctggttccccttcgtctcctctcccggcccgggccactagagagttcgctgacgccgggtgagctgagcctgccgccaagatgccggcctattttcagaggccggaaaatgccctcaaacgcgccaacgaatttcttgaggttggcaaaaagcagcctgctctggatgttctttatgatgttatgaaaagtaaaaaacatagaacatggcaaaagatacacgaaccaattatgttgaaatacttggaactttgcgtggatcttcgcaagagccacttggcaaaggaggggttataccagtataagaacatttgtcaacaggtgaacataaaatctctggaggatgttgttagggcatatttgaaaatggcagaggaaaaaactgaagctgctaaagaagaatctcagcagatggtcttagatatagaggatctagataatattcaaactcctgagagtgttctcctaagtgctgtaagtggtgaagacactcaggatcgtactgacagattacttttaactccatgggttaaattcctgtgggagtcttacaggcagtgtttggaccttcttagaaacaattctagagtagagcgcctgtaccatgatattgcccagcaagctttcaaattctgcctccaatacacgcgtaaggctgaattccgtaaactgtgtgacaatttgagaatgcacttatcgcagattcagcgccaccataaccaaagtacggcaatcaatcttaataatccagagagccagtccatgcatttggaaaccagacttgttcagctggacagtgctatcagcatggaattgtggcaggaagcattcaaagctgtggaagatattcacgggctattctccttgtctaaaaaaccacctaaacctcagttgatggcaaattactataacaaagtctcaactgtgttttggaaatctggaaatgctctttttcatgcatctacactccatcgtctttaccatctctctagagaaatgagaaagaatctcacacaagatgagatgcaaagaatgtctactagagtccttttagccactctttccatccctattactcctgagcgtacggatattgctcgacttctggatatggatggcattatagttgaaaaacagcgtcgccttgcaacactactaggtcttcaagccccaccgacacgaattggccttattaatgatatggtcagatttaatgtactacaatatgttgtcccagaagtgaaagacctttacaattggcttgaagtagaatttaacccattaaaactctgtgagcgagtcacaaaggttctaaattgggttagggaacaacctgaaaaggaaccggaattgcagcagtatgtgccacaactgcaaaacaacaccatcctccgccttctgcagcaggtgtcacagatttatcagagcattgagttttctcgtttgacttctttggttccttttgttgatgctttccaactggaacgggccatagtagatgcagccaggcattgcgacttgcaggttcgtattgatcacacttctcggaccctgagttttggatctgatttgaattatgctactcgagaagatgctccgattggtcctcatttgcaaagcatgccttcagagcagataagaaaccagctgacagccatgtcctcagtacttgcaaaagcacttgaagtcattaaaccagctcatatactgcaagagaaagaagaacagcatcagttggctgtcactgcataccttaaaaattcacgaaaagagcaccagcggatcctggctcgccgccagacaattgaggagagaaaagagcgccttgagagtctgaatattcagcgtgagaaagaagaattggaacagagggaagctgaactccagaaagtgcggaaggctgaggaagagaggctgcgccaggaagcaaaggagagagagaaggagcgtatcttacaggaacatgaacaaatcaaaaagaaaactgtccgagagcgtttggagcagatcaagaaaacagaactgggtgccaaagcattcaaagatattgatattgaagaccttgaggaattggatccagattttatcatggctaaacaggttgaacaactggagaaagaaaagaaagaacttcaagaacgcctaaagaatcaagaaaagaagattgactattttgaaagagccaaacgtttggaagaaattcctttgataaagagcgcttacgaggaacagagaattaaagacatggatctgtgggagcaacaagaggaagaaagaattactacaatgcagctagaacgtgaaaaggctcttgaacataagaatcgaatgtcacgaatgcttgaagacagagatttattcgtaatgcgactcaaagctgcacggcagtctgtttatgaggaaaaacttaaacagtttgaagagcgattagcagaagaaaggcataatcgattggaagaacggaaaaggcagcgtaaagaagaacgcaggataacatactatagagaaaaagaagaggaggagcagagaagggcagaagaacaaatgctaaaagagcgggaagagagagagcgcgccgaacgagcaaaacgcgaggaagagctacgagagtatcaggagcgggtgaagaaattagaagaagtggaaaggaaaaaacgccaaagggagttggaaattgaagaacgagaacggcgtagagaggaagagagaagacttggcgatagttccctttctagaaaggactctcgttggggagatagagattcagaaggcacctggagaaaaggacctgaagcagattctgagtggagaagaggcccgccagagaaggagtggagacgtggagaagggcgagatgaggacaggtctcatagaagagatgaagagcggccccggcgtctgggggatgatgaagatagagagccctctcttagaccagacgatgatcgggttccccggcgtggcatggatgatgacagaggccctagacgtggtcctgaggaagataggttctctcgtcgtggggcagacgatgaccggccttcctggcgtaacacagatgatgacaggcctcccagacgaattgccgatgaagacaggggaaactggcgtcatgcggatgatgacagaccacctagacgaggactggatgaggacagaggaagctggcgaacagctgatgaggacagaggaccaagacgtgggatggatgatgaccgggggccgaggcgaggaggcgctgatgatgagcgatcatcctggcgtaatgctgatgatgaccggggtcccaggcgagggttggatgatgatcggggtcccaggcgaggcatggatgatgaccggggtcccaggcgaggcatggatgatgaccggggtcccaggcgaggcatggatgatgaccggggtcccaggcgagggttggatgatgatcgaggaccttggaggaacgccgatgatgacagaattcccaggcgtggtgcagaggatgacaggggcccttggagaaacatggatgatgatcgcctttcaagacgtgctgatgatgatcggtttcccagacggggtgatgactcaagacctggtccttggagaccattagtcaagccaggtggatggagagagaaagaaaaagccagagaggagagctggggtccacctcgagaatcaaggccatcagaagaacgtgaatgggacagagaaaaagaaagggacagagataatcaagatcgggaggagaatgacaaggaccctgagagagaaagggacagagagagagatgtggatcgagaggatcgcttcagaagacctagggatgaaggtggctggagaagaggaccagctgaggaatcttcaagctggagagactcaagtcgccgggacgatagggatagggatgaccgtcgccgtgagagggatgaccggcgtgatctaagagaaagacgagatctaagagacgacagggaccgaagaggacctccactcagatcagaacgtgaagaagtaagttcttggagacgtgctgatgacaggaaagatgaccgggtggaagagcgggaccctcctcgtcgagttcctcccccagctctttcaagagaccgagaaagagaccgagaccgagaaagagaaggtgaaaaagagaaggcctcatggagagctgagaaagatagggaatctctccgtcgtactaaaaatgagactgatgaagatggatggaccacagtacgacgttaagtctcaagataatggatttaaactggtgtcttaaataggtttgatcacattcaaggattattatacttgtgcttcaaccaatctaaattggattctttaatgttgtttcaccataacacaaaaagcatgaacttgtattaatcctatataatagattgatcatgcaccatatccacaggaggttggaaaaaccatgccattttctggaatttaagggtgttgcattatttcatcaatcatttgttgacaaaaaagaaaaactaaaaaataaatttaaaatgtgacccttcaggtattgagtaacacctttatcttggtatagaactgatactttttttttgattttgaaatatctgataataatttggaatgaagtaaggttctgttaaaatatatttgaagaccctttaaagcagtgaatctgaaacaattttcacacccttaagtggttgatacgtacctattttaggtattttgaggtatttaccataaactaaatttagaaattttttagattcacttgaagtaaacattacaaacattggatacggtggggttttctttagattttacttgagagaaggtgagtacaaagcaatttgcagttgttgtaatgacaagattactgcgcaagtgtgaatccaaacagtatagcttttaaattttaaagcatttggtaaattatcgctgagtttttttctgttgccaatagcaaactgcttttccattaatggagaattcatgcctttcaagcattttaaatatgacaatatttataaatgtatggtttggaggaatcgtttaaattctctttcctaattttctttcttttgaagatagattctttcaacaagtaatttgtagtaatgactgtgttgacttcaattttggagcgcagtagctatgttaaagatgaactatttggtctcattgaagccaacacagaacttgctgctgtgttttttcttcagtgataaataaaatacttacagaatttgttttagtgttga

SEQ ID NO: 596 - DNA, 5305 bp, Homo sapiens; identical to SEQ ID NO: 595

SEQ ID NO: 597 - DNA, 1458 bp, Homo sapiens
ataatccggaagtgacctcgaaaccttttccggtcttactcacgttgcggccttcctcgcgtcacagccgggatgaagccgatcctactgcagggccatgagcggtccattacgcagattaagtataaccgcgaaggagacctcctctttactgtggccaaggaccctatcgtcaatgtatggtactctgtgaatggtgagaggctgggcacctacatgggccataccggagctgtgtggtgtgtggacgctgactgggacaccaagcatgtcctcactggctcagctgacaacagctgtcgtctctgggactgtgaaacaggaaagcagctggcccttctcaagaccaattcggctgtccggacctgcggttttgactttgggggcaacatcatcatgttctccacggacaagcagatgggctaccagtgctttgtgagcttttttgacctgcgggatccgagccagattgacaacaatgagccctacatgaagatcccttgcaatgactctaaaatcaccagtgctgtttggggacccctgggggagtgcatcatcgctggccatgagagtggagagctcaaccagtatagtgccaagtctggagaggtgttggtgaatgttaaggagcactcccggcagatcaacgacatccagttatccagggacatgaccatgtttgtgaccgcgtccaaggacaacacagccaagctttttgactccacaactcttgaacatcagaagactttccggacagaacgtcctgtcaactcagctgccctctcccccaactatgaccatgtggtcctgggcggtggtcaggaagccatggatgtaaccacaacctccaccaggattggcaagtttgaggccaggttcttccatttggcctttgaagaagagtttggaagagtcaagggtcactttggacctatcaacagtgttgccttccatcctgatggcaagagctacagcagcggcggcgaagatggttacgtccgtatccattacttcgacccacagtacttcgaatttgagtttgaggcttaagaagctggatctcctgccgggcgtggtggctcatgcctgtaatcccaccactttttttttaaggcaggcggatcacctgaggtcaggagtttaagaccagcctgaccaacatggagaaacctcgtctctactaaaaatacaaaaattagccaggcatggtggcacacgcctatagtcccagctactcaggaggctgaggcaggagaatcacttgaacccaggaggcagaggttgcagtgagctgagatcacgtcattgcactccatcctgagccacaagagcaaaactccgtctcaaaaaaaaaaaagaagaaggtggatctccaaccaggccagagaagattctcacagaaggttttgaactctaagaaataaattggtttggtaataaatggcttctggtcagata

SEQ ID NO: 598 - DNA, 1286 bp, Homo sapiens
ctctttcttcctgtctgcttggaaagatggcgtcccgcaaggaaggtaccggctctactgccacctcttccagctccaccgccggcgcagcagggaaaggcaaaggcaaaggcggctcgggagattcagccgtgaagcaagtgcagatagatggccttgtggtattaaagataatcaaacattatcaagaagaaggacaaggaactgaagttgttcaaggagtgcttttgggtctggttgtagaagatcggcttgaaattaccaactgctttcctttccctcagcacacagaggatgatgctgactttgatgaagtccaatatcagatggaaatgatgcggagccttcgccatgtaaacattgatcatcttcacgtgggctggtatcagtccacatactatggctcattcgttacccgggcactcctggactctcagtttagttaccagcatgccattgaagaatctgtcgttctcatttatgatcccataaaaactgcccaaggatctctctcactaaaggcatacagactgactcctaaactgatggaagtttgtaaagaaaaggatttttcccctgaagcattgaaaaaagcaaatatcacctttgagtacatgtttgaagaagtgccgattgtaattaaaaattcacatctgatcaatgtcctaatgtgggaacttgaaaagaagtcagctgttgcagataaacatgaattgctcagccttgccagcagcaatcatttggggaagaatctacagttgctgatggacagagtggatgaaatgagccaagatatagttaaatacaacacatacatgaggaatactagtaaacaacagcagcagaaacatcagtatcagcagcgtcgccagcaggagaatatgcagcgccagagccgaggagaacccccgctccctgaggaggacctgtccaaactcttcaaaccaccacagccgcctgccaggatggactcgctgctcattgcaggccagataaacacttactgccagaacatcaaggagttcactgcccaaaacttaggcaagctcttcatggcccaggctcttcaagaatacaacaactaagaaaaggaagtttccagaaaagaagttaacatgaactcttgaagtcacaccagggcaactcttggaagaaatatatttgcatattgaaaagcacagaggatttctttagtgtcattgccgattttggctataacagtgtctttctagccataataaaataaaacaaaatcttgactgcttgctcatttgaaaaaaaaaaaa

SEQ ID NO: 599 - DNA, 1127 bp, Homo sapiens
gtctcgttttcgcccgcttccgctctctggccgggcttgggctgcgtggagaatactttttgcgatgcctactggagactttgattcgaagcccagttgggccgaccaggtggaggaggagggggaggacgacaaatgtgtcaccagcgagctcctcaaggggatccctctggccacaggtgacaccagcccagagccagagctactgccgggagctccactgccgcctcccaaggaggtcatcaacggaaacataaagacagtgacagagtacaagatagatgaggatggcaagaagttcaagattgtccgcaccttcaggattgagacccggaaggcttcaaaggctgtcgcaaggaggaagaactggaagaagttcgggaactcagagtttgacccccccggacccaatgtggccaccaccactgtcagtgacgatgtctctatgacgttcatcaccagcaaagaggacctgaactgccaggaggaggaggaccctatgaacaaactcaagggccagaagatcgtgtcctgccgcatctgcaagggcgaccactggaccacccgctgcccctacaaggatacgctggggcccatgcagaaggagctggccgagcagctgggcctgtctactggcgagaaggagaagctgccgggagagctagagccggtgcaggccacgcagaacaagacagggaagtatgtgccgccgagcctgcgcgacggggccagccgccgcggggagtccatgcagcccaaccgcagagccgacgacaacgccaccatccgtgtcaccaacttgtcagaggacacgcgtgagaccgacctgcaggagctcttccggcctttcggctccatctcccgcatctacctggctaaggacaagaccactggccaatccaagggctttgccttcatcagcttccaccgccgcgaggatgctgcgcgtgccattgccggggtgtccggctttggctacgaccacctcatcctcaacgtcgagtgggccaagccgtccaccaactaagccagctgccactgtgtactcggtccgggacccttggcgacagaagacagcctccgagagcgcgggctccaagggcaataaagcagctccactctctcta

SEQ ID NO: 600 - DNA, 1274 bp, Homo sapiens
atttccgcttccgcctccttctttctcgacaagatggccacaccggcggtaccagtaagtgctcctccggccacgccaaccccagtcccggcggcggccccagcctcagttccagcgccaacgccagcaccggctgcggctccggttcccgctgcggctccagcctcatcctcagaccctgcggcagcagcggctgcaactgcggctcctggccagaccccggcctcagcgcaagctccagcgcagaccccagcgcccgctctgcctggtcctgctcttccagggcccttccccggcggccgcgtggtcaggctgcacccagtcattttggcctccattgtggacagctacgagagacgcaacgagggtgctgcccgagttatcgggaccctgttgggaactgtcgacaaacactcagtggaggtcaccaattgcttttcagtgccgcacaatgagtcagaagatgaagtggctgttgacatggaatttgctaagaatatgtatgaactgcataaaaaagtttctccaaatgagctcatcctgggctggtacgctacgggccatgacatcacagagcactctgtgctgatccacgagtactacagccgagaggcccccaaccccatccacctcactgtggacacaagtctccagaacggccgcatgagcatcaaagcctacgtcagcactttaatgggagtccctgggaggaccatgggagtgatgttcacgcctctgacagtgaaatacgcgtactacgacactgaacgcatcggagttgacctgatcatgaagacctgctttagccccaacagagtgattggactctcaagtgacttgcagcaagtaggaggggcatcagctcgcatccaggatgccctgagtacagtgttgcaatatgcagaggatgtactgtctggaaaggtgtcagctgacaatactgtgggccgcttcctgatgagcctggttaaccaagtaccgaaaatagttcccgatgactttgagaccatgctcaacagcaacatcaatgaccttttgatggtgacctacctggccaacctcacacagtcacagattgcactcaatgaaaaacttgtaaacctgtgaatggaccccaagcagtacacttgctggtctaggtattaaccccaggactcagaagtgaaggagaaatgggttttttgtggtcttgagtcacactgagatagtcagttgtgtgtgactctaataaacggagcctaccttttgtaaattaaaaaaaaaaaaaaaaaaaa

SEQ ID NO: 601 - DNA, 1516 bp, Homo sapiens
gagcacagactcccttttctttggcaagatggcggagtacgacttgactactcgcatcgcgcactttttggatcggcatctagtctttccgcttcttgaatttctctctgtaaaggagatatataatgaaaaggaattattacaaggtaaattggaccttcttagtgataccaacatggtagactttgctatggatgtatacaaaaacctttattctgatgatattcctcatgctttgagagagaaaagaaccacagtggttgcacaactgaaacagcttcaggcagaaacagaaccaattgtgaagatgtttgaagatccagaaactacaaggcaaatgcagtcaaccagggatggtaggatgctctttgactacctggcggacaagcatggttttaggcaggaatatttagatacactctacagatatgcaaaattccagtacgaatgtgggaattactcaggagcagcagaatatctttatttttttagagtgctggttccagcaacagatagaaatgctttaagttcactctggggaaagctggcctctgaaatcttaatgcagaattgggatgcagccatggaagaccttacacggttaaaagagaccatagataataattctgtgagttctccacttcagtctcttcagcagagaacatggctcattcactggtctctgtttgttttcttcaatcaccccaaaggtcgcgataatattattgacctcttcctttatcagccacaatatcttaatgcaattcagacaatgtgtccacacattcttcgctatttgactacagcagtcataacaaacaaggatgttcgaaaacgtcggcaggttctaaaagatctagttaaagttattcaacaggagtcttacacatataaagacccaattacagaatttgttgaatgtttatatgttaactttgactttgatggggctcagaaaaagctgagggaatgtgaatcagtgcttgtgaatgacttcttcttggtggcttgtcttgaggatttcattgaaaatgcccgtctcttcatatttgagactttctgtcgcatccaccagtgtatcagcattaacatgttggcagataaattgaacatgactccagaagaagctgaaaggtggattgtaaatttgattagaaatgcaagactggatgccaagattgattctaaattaggtcatgtggttatgggtaacaatgcagtctcaccctatcagcaagtgattgaaaagaccaaaagcctttcctttagaagccagatgttggccatgaatattgagaagaaacttaatcagaatagcaggtcagaggctcctaactgggcaactcaagattctggcttctactgaagaaccataaagaaaagatgaaaaaaaaaactatcaaagaaagatgaaataataaaactattatataaagggtgacttacattttggaaacaacatattacgtataaattttgaagaattggaataaaattgattcattttaaaaaaaaa

SEQ ID NO: 602 - DNA, 1901 bp, Homo sapiens
gtctttccggcggtgctcgcaagcgaggcagccatgtcttatcccgctgatgattatgagtctgaggcggcttatgacccctacgcttatcccagcgactatgatatgcacacaggagatccaaagcaggaccttgcttatgaacgtcagtatgaacagcaaacctatcaggtgatccctgaggtgatcaaaaacttcatccagtatttccacaaaactgtctcagatttgattgaccagaaagtgtatgagctacaggccagtcgtgtctccagtgatgtcattgaccagaaggtgtatgagatccaggacatctatgagaacagctggaccaagctgactgaaagattcttcaagaatacaccttggcccgaggctgaagccattgctccacaggttggcaatgatgctgtcttcctgattttatacaaagaattatactacaggcacatatatgccaaagtcagtgggggaccttccttggagcagaggtttgaatcctattacaactactgcaatctcttcaactacattcttaatgccgatggtcctgctccccttgaactacccaaccagtggctctgggatattatcgatgagttcatctaccagtttcagtcattcagtcagtaccgctgtaagactgccaagaagtcagaggaggagattgactttcttcgttccaatcccaaaatctggaatgttcatagtgtcctcaatgtccttcattccctggtagacaaatccaacatcaaccgacagttggaggtatacacaagcggaggtgaccctgagagtgtggctggggagtatgggcggcactccctctacaaaatgcttggttacttcagcctggtcgggcttctccgcctgcactccctgttaggagattactaccaggccatcaaggtgctggagaacatcgaactgaacaagaagagtatgtattcccgtgtgccagagtgccaggtcaccacatactattatgttgggtttgcatatttgatgatgcgtcgttaccaggatgccatccgggtcttcgccaacatcctcctctacatccagaggaccaagagcatgttccagaggaccacgtacaagtatgagatgattaacaagcagaatgagcagatgcatgcgctgctggccattgccctcacgatgtaccccatgcgtatcgatgagagcattcacctccagctgcgggagaaatatggggacaagatgttgcgcatgcagaaaggtgacccacaagtctatgaagaacttttcagttactcctgccccaagttcctgtcgcctgtagtgcccaactatgataatgtgcaccccaactaccacaaagagcccttcctgcagcagctgaaggtgttttctgatgaagtacagcagcaggcccagctttcaaccatccgcagcttcctgaagctctacaccaccatgcctgtggccaagctggctggcttcctggacctcacagagcaggagttccggatccagcttcttgtcttcaaacacaagatgaagaacctcgtgtggaccagcggtatctcagccctggatggtgaatttcagtcagcctcagaggttgacttctacattgataaggacatgatccacatcgcggacaccaaggtcgccaggcgttatggggatttcttcatccgtcagatccacaaatttgaggagcttaatcgaaccctgaagaagatgggacagagaccttgatgatattcacacacattcaggaacctgttttgatgtattataggcaggaagtgtttttgctaccgtgaaacctttacctagatcagccatcagcctgtcaactcagttaacaagttaaggaccgaagtgtttcaagtggatctcagtaaaggatctttggagccagaaaaaaa

SEQ ID NO: 603 - DNA, 1949 bp, Homo sapiens
gggagagcagtttacgacagcgccggtcgtgtttacggcggcgcccgctgcgcgcgcatgtttcctcttttcctggtttctcaagagtgctgctgctaacgcggtccccggcacgcaccatctgttgccatcccggccggccgaggccattgcagattttggaagatggcaaagttcatgacacccgtgatccaggacaacccctcaggctggggtccctgtgcggttcccgagcagtttcgggatatgccctaccagccgttcagcaaaggagatcggctaggaaaggttgcagactggacaggagccacataccaagataagaggtacacaaataagtactcctctcagtttggtggtggaagtcaatatgcttatttccatgaggaggatgaaagtagcttccagctggtggatacagcgcgcacacagaagacggcctaccagcggaatcgaatgagatttgcccagaggaacctccgcagagacaaagatcgtcggaacatgttgcagttcaacctgcagatcctgcctaagagtgccaaacagaaagagagagaacgcattcgactgcagaaaaagttccagaaacaatttggggttaggcagaaatgggatcagaaatcacagaaaccccgagactcttcagttgaagttcgtagtgattgggaagtgaaagaggaaatggattttcctcagttgatgaagatgcgctacttggaagtatcagagccacaggacattgagtgttgtggggccctagaatactacgacaaagcctttgaccgcatcaccacgaggagtgagaagccactgcggagcatcaagcgcatcttccacactgtcaccaccacagacgaccctgtcatccgcaagctggcaaaaactcaggggaatgtgtttgccactgatgccatcctggccacgctgatgagctgtacccgctcagtgtattcctgggatattgtcgtccagagagttgggtccaaactcttctttgacaagagagacaactctgactttgacctcctgacagtgagtgagactgccaatgagccccctcaagatgaaggtaattccttcaattcaccccgcaacctggccatggaggcaacctacatcaaccacaatttctcccagcagtgcttgagaatggggaaggaaagatacaacttccccaacccaaacccgtttgtggaggacgacatggataagaatgaaatcgcctctgttgcgtaccgttaccgcaggtggaagcttggagatgatattgaccttattgtccgttgtgagcacgatggcgtcatgactggagccaacggggaagtgtccttcatcaacatcaagacactcaatgagtgggattccaggcactgtaatggcgttgactggcgtcagaagctggactctcagcgaggggctgtcattgccacggagctgaagaacaacagctacaagttggcccggtggacctgctgtgctttgctggctggatctgagtacctcaagcttggttatgtgtctcggtaccacgtgaaagactcctcacgccacgtcatcctaggcacccagcagttcaagcctaatgagtttgccagccagatcaacctgagcgtggagaatgcctggggcattttacgctgcgtcattgacatctgcatgaagctggaggagggcaaatacctcatcctcaaggaccccaacaagcaggtcatccgtgtctacagcctccctgatggcaccttcagctctgatgaagatgaggaggaagaggaggaggaagaagaggaagaagaagaggaagaaacttaaaccagtgatgtggagctggagtttgtccttccaccgagactacgagggcctttgatgcttagtggaatgtgtgtctaacttgctctctgacatttagcagatgaaataaaatatatatctgtttagtctttccctca

SEQ ID NO: 604 - DNA, 3111 bp, Homo sapiens
cttctctctcggcgtttccgctgtcagggccctgcggtgtgactcgcgggctcagctggttggtattttttgggcctcgtgcttcgtggtgggagacccaggtcgaggtccggccgtagcacctccgcgccgtcgccatgtcgcggtttttcaccaccggttcggacagcgagtccgagtcgtccttgtccggggaggagctcgtcaccaaacctgtcggaggcaactatggcaaacagccattgttgctgagcgaggatgaagaagataccaagagagttgtccgcagtgccaaggacaagaggtttgaggagctgaccaaccttatccggaccatccgtaatgccatgaagattcgtgatgtcaccaagtgcctggaagagtttgagctcctgggaaaagcatatgggaaggccaaaagcattgtggacaaagaaggtgtcccccggttctatatccgcatcctggctgacctagaggactatcttaatgagctttgggaagataaggaagggaagaagaagatgaacaagaacaatgccaaggctctgagcaccttgcgtcagaagatccgaaaatacaaccgtgatttcgagtcccatatcacaagctacaagcagaaccccgagcagtctgcggatgaagatgctgagaaaaatgaggaggattcagaaggctcttcagatgaggatgaggatgaggacggagtcagtgctgcaactttcttgaagaagaaatcagaagctccttctggggagagtcgcaagttcctcaaaaagatggatgatgaagatgaggactcagaagattccgaagatgatgaagactgggacacaggttccacatcttccgattccgactcagaggaggaagaagggaaacaaaccgcgctggcctcaagatttcttaaaaaggcacccaccacagatgaggacaagaaggcagccgagaagaaacgggaggacaaagctaagaagaagcacgacaggaaatccaagcgcctggatgaggaggaggaggacaatgaaggcggggagtgggaaagggtccggggcggagtgccgttggttaaggagaagccaaaaatgtttgccaagggaactgagatcacccatgctgttgttatcaagaaactgaatgagatcctacaggcacgaggcaagaagggaactgatcgtgctgcccagattgagctgctgcaactgctggttcagattgcagcggaaaacaacctgggagagggcgtcattgtcaagatcaagttcaatatcatcgcctctctctatgactacaaccccaacctggcaacctacatgaagccagagatgtgggggaagtgcctggactgcatcaatgagctgatggatatcctgtttgcaaatcccaacatttttgttggagagaatattctggaagagagtgagaacctgcacaacgctgaccagccactgcgtgtccgtggctgcatcctaactctggtggaacgaatggatgaagaatttaccaaaataatgcaaaatactgaccctcactcccaagagtacgtggagcacttgaaggatgaggcccaggtgtgtgccatcatcgagcgtgtgcagcgctacctggaggagaagggcactaccgaggaggtctgccgcatctacctgctgcgcatcctgcacacctactacaagtttgattacaaggcccatcagcgacagctgaccccgcctgagggctcctcaaagtctgagcaagaccaggcagaaaatgagggcgaggactcggctgtgttgatggagagactgtgcaagtacatctacgccaaggaccgcacagaccggatccgcacatgtgccatcctctgccacatctaccaccatgctctgcactcgcgctggtaccaggcccgcgacctcatgctcatgagccacttgcaggacaacattcagcatgcagacccgccagtgcagatcctttacaaccgcaccatggtgcagctgggcatctgtgccttccgccaaggcctgaccaaggacgcacacaacgccctgctggacatccagtcgagtggccgagccaaggagcttctgggccagggcctgctgctgcgcagcctgcaggagcgcaaccaggagcaggagaaggtggagcggcgccgtcaggtccccttccacctgcacatcaacctggagctgctggagtgtgtctacctggtgtctgccatgctcctggagatcccctacatggccgcccatgagagcgatgcccgccgacgcatgatcagcaagcagttccaccaccagctgcgcgtgggcgagcgacagcccctgctgggtccccctgagtccatgcgggaacatgtggtcgctgcctccaaggccatgaagatgggtgactggaagacctgtcacagttttatcatcaatgagaagatgaatgggaaagtgtgggaccttttccccgaggctgacaaagtccgcaccatgctggttaggaagatccaggaagagtcactgaggacctacctcttcacctacagcagtgtctatgactccatcagcatggagacgctgtcagacatgtttgagctggatctgcccactgtgcactccatcatcagcaaaatgatcattaatgaggagctgatggcctccctggaccagccaacacagacagtggtgatgcaccgcactgagcccactgcccagcagaacctggctctgcagctggccgagaagctgggcagcctggtggagaacaacgaacgggtgtttgaccacaagcagggcacctacgggggctacttccgagaccagaaggacggctaccgcaaaaacgagggctacatgcgccgcggtggctaccgccagcagcagtctcagacggcctactgagctctccactctgtttcccgcctgggccatccaaccttgaagtcctaaaccacacctcagtcactaaaggtctgtttaaagttgttctggttgattgcttgttgccacaaaggtgtgttgagcccattcatttgctgattatatttctgagctgctaccacatgacagacacaaggctcagatgaagaggtgaattgaacacgttcctgacctcaaaaaaaaaaaaaaaaaa

SEQ ID NO: 605 - DNA, 1383 bp, Homo sapiens
ctagtttctaaggatcatgtctgcgagccaggattcccgatccagagacaatggccccgatgggatggagcccgaaggcgtcatcgagagtaactggaatgagattgttgacagctttgatgacatgaacctctcggagtcccttctccgtggcatctacgcctatggttttgagaagccctctgccatccagcagcgagccattctaccttgtatcaagggttatgatgtgattgctcaagcccaatctgggactgggaaaacggccacatttgccatatcgattctgcagcagattgaattagatctaaaagccacccaggccttggtcctagcacccactcgagaattggctcagcagatacagaaggtggtcatggcactaggagactacatgggcgcctcctgtcacgcctgtatcgggggcaccaacgtgcgtgctgaggtgcagaaactgcagatggaagctccccacatcatcgtgggtacccctggccgtgtgtttgatatgcttaaccggagatacctgtcccccaaatacatcaagatgtttgtactggatgaagctgacgaaatgttaagccgtggattcaaggaccagatctatgacatattccaaaagctcaacagcaacacccaggtagttttgctgtcagccacaatgccttctgatgtgcttgaggtgaccaagaagttcatgagggaccccattcggattcttgtcaagaaggaagagttgaccctggagggtatccgccagttctacatcaacgtggaacgagaggagtggaagctggacacactatgtgacttgtatgaaaccctgaccatcacccaggcagtcatcttcatcaacacccggaggaaggtggactggctcaccgagaagatgcatgctcgagatttcactgtatccgccatgcatggagatatggaccaaaaggaacgagacgtgattatgagggagtttcgttctggctctagcagagttttgattaccactgacctgctggccagaggcattgatgtgcagcaggtttctttagtcatcaactatgaccttcccaccaacagggaaaactatatccacagaatcggtcgaggtggacggtttggccgtaaaggtgtggctattaacatggtgacagaagaagacaagaggactcttcgagacattgagaccttctacaacacctccattgaggaaatgcccctcaatgttgctgacctcatctgaggggctgtcctgccacccagccccagccagggctcaatctctgggggctgaggagcagcaggaggggggagggaagggagccaagggatggacatcttgtcattttttttctttgaataaatgtcactttttgaggcaaaagaagg

SEQ ID NO: 606 - DNA, 1661 bp, Homo sapiens
gaccgagatcgatctaagatggcgaccgtcgaaccggaaaccacccctactcctaatcccccgactacagaaaaggagaaaacggaatctaatcaggaggttgctaacccagaacactatattaaacatcccctacagaacagatgggcactctggttttttaaaaatgataaaagcaaaacttggcaagcaaacttgtggctgatctccaagtttgatactgttgaagacttttgggctctgtacaaccatatccagttgtctagtaatttaatgcctggctgtgactactcactttttaaggatggtattgagcctatgtgggaagatgagaaaaacaaacggggaggacgatggctaattacattgaacaaacagcagagacgaagtgacctcgatcgcttttggctagagacacttctgtgccttattggagaatcttttgatgactacagtgatgatgtatgtggcgctgttgttaatgttagagctaaaggtgataagatagcaatatggactactgaatgtgaaaacagagaagctgttacacatatagggagggtatacaaggaaaggttaggacttcctccaaagatagtgattggttatcagtcccacgcagacacagctactaagagcggctccaccactaaaaataggtttgttgtttaagaagacaccttctgagtattctcataggagactgcgtcaagcaatcgagatttgggagctgaaccaaagcctcttcaaaaagcagagtggactgcatttaaatttgatttccatctaaatgttactcagatataagagaagtctcattcgcctttgtcttgtacttctgtgttcttttttttttttttttttttttttttttggctagagtttacactatcccaatcaaagaattacagtacacatctccagaatccataaatgtgttcctggcccactctgtaatagttcagtagaattaccattaattacatacagattttacctatccacaatagtcagaaaacaacttggcatttctatactttacaggaaaaaaaattctgttgttccattttatgcagaagcatattttgctggtttgaaagattatgatgcatacagttttctagcaattttctttgtttctttttacagcattgtctttgctgtactcttgctgatggctgctagattttaatttatttgtttccctacttgataatattagtgattctgatttcagtttttcatttgttttgcttttgtttttttcctcatgtaacattggtgaaggatccaggaatatgacacaaaggtggaataaacattaattttgtgcattctttggtaattttttttgttttttgtaactacaaagctttgctacaaatttatgcatttcattcaaatcagtgatctatgtttgtgtgatttcctaaacataattgtggattataaaaaatgtaacatcataattacattcctaactagaattagtatgtctgtttttgtatctttatgctgtattttaacactttgtattacttaggttattttgctttggttaaaaatggctcaagtagaaaagcagtcccattcatattaaaacagtgtacaaaactgtaaataaaatgtgtacagtgaattgtctttaaaaaaaaaaaaga

SEQ ID NO: 607 - DNA, 1842 bp, Homo sapiens
cgatcagatcgatctaagatggcgactgtcgaaccggaaaccacccctactcctaatcccccgactacagaagaggagaaaacggaatctaatcaggaggttgctaacccagaacactatattaaacatcccctacagaacagatgggcactctggttttttaaaaatgataaaagcaaaacttggcaagcaaacctgcggctgatctccaagtttgatactgttgaagacttttgggctctgtacaaccatatccagttgtctagtaatttaatgcctggctgtgactactcactttttaaggatggtattgagcctatgtgggaagatgagaaaaacaaacggggaggacgatggctaattacattgaacaaacagcagagacgaagtgacctcgatcgcttttggctagagacacttctgtgccttattggagaatcttttgatgactacagtgatgatgtatgtggcgctgttgttaatgttagagctaaaggtgataagatagcaatatggactactgaatgtgaaaacagagaagctgttacacatatagggagggtatacaaggaaaggttaggacttcctccaaagatagtgattggttatcagtcccacgcagacacagctactaagagcggctccaccactaaaaataggtttgttgtttaagaagacaccttctgagtattctcataggagactgcgtcaagcaatcgagatttgggagctgaaccaaagcctcttcaaaaagcagagtggactgcatttaaatttgatttccatcttaatgttactcagatataagagaagtctcattcgcctttgtcttgtacttctgtgttcattttttttttttttttttggctagagtttccactatcccaatcaaagaattacagtacacatccccagaatccataaatgtgttcctggcccactctgtaatagttcagtagaattaccattaattacatacagattttacctatccacaatagtcagaaaacaacttggcatttctatactttacaggaaaaaaaattctgttgttccattttatgcagaagcatattttgctggtttgaaagattatgatgcatacagttttctagcaattttctttgtttctttttacagcattgtctttgctgtactcttgctgatggctgctagattttaatttatttgtttccctacttgataatattagtgattctgatttcagtttttcatttgttttgcttaaattttttttttttttttcctcatgtaacattggtgaaggatccaggaatatgacacaaaggtggaataaacattaattttgtgcattctttggtaattttttttgttttttgtaactacaaagctttgctacaaatttatgcatttcattcaaatcagtgatctatgtttgtgtgatttcctaaacataattgtggattataaaaaatgtaacatcataattacattcctaactagaattagtatgtctgtttttgtatctttatgctgtattttaacactttgtattacttaggttattttgctttggttaaaaatggctcaagtagaaaagcagtcccattcatattaagacagtgtacaaaactgtaaataaaatgtgtacagtgaattgtcttttagacaactagatttgtccttttatttctccatctttatagaaggaatttgtacttcttattgcaggcaagtctctatattatgtcctcttttgtggtgtcttccatgtgaacagcataagtttggagcactagtttgattattatgtttattacaatttttaataaattgaataggtagtatcatatatatgga

SEQ ID NO: 608 - DNA, 877 bp, Homo sapiens
ggggcgaggcggagcgaggctggaggcgcgggagggcagcgagaggttcgcgggtgcagcgcacaggagaccatgtccgggggcagcagctgcagccagaccccaagccgggccatccccgccactcgccgggtggtgctcggcgacggcgtgcagctcccgcccggggactacagcacgacccccggcggcacgctcttcagcaccaccccgggaggtaccaggatcatctatgaccggaaattcctgatggagtgtcggaactcacctgtgaccaaaacacccccaagggatctgcccaccattccgggggtcaccagcccttccagtgatgagccccccatggaagccagccagagccacctgcgcaatagcccagaagataagcgggcgggcggtgaagagtcacagtttgagatggacatttaaagcaccagccatcgtgtggagcactaccaaggggcccctcagggccttcctgggaggagtcccaccagccaggccttatgaaagtgatcatactgggcaggcgttggcgtggggtcggacaccccagccctttctccctcactcagggcacctgccccctcctcttcgtgaacaccagcagatacctccttgtgcctccactgatgcaggagctgccaccccaaggggagtgacccctgccagcacaccctgcagccaagggccaggaagtggacaagaacgaacccttccttccgaatgatcagcagttccagcccctcgctgctgggggcgcaaccaccccttccttaggttgatgtgcttgggaaagctccctccccctccttccccaagagaggaaataaaagccaccttcgccctagggccaagaaaaaaaaaaaaaaaaaaa

SEQ ID NO: 609 - DNA, 2782 bp, Homo sapiens
cgctgctgccgctgctgttgctcctgaggctgctggctgaggccggaggatcgagcggcggcggcggcggcggctgagagggcggcggcgggagcggagcgggacgagggaacgggaggaagcgagcgaggagcgcgcagagcgcgcttttccgtccgcctgaggagccgaagcagccccggccccgccgccgccgcctgcccgccggacaaagccgagagcccgcgcccacagccatgtcctcgtcagccggcagcggccaccagcccagccagagccgcgccatccccacccgcaccgtggccatcagcgacgccgcgcagctacctcatgactattgcaccacgcccggggggacgctcttctccaccacaccgggaggaactcgaatcatttatgacagaaagtttctgttggatcgtcgcaattctcccatggctcagaccccaccctgccacctgcccaatatcccaggagtcactagccctggcaccttaattgaagactccaaagtagaagtaaacaatttgaacaacttgaacaatcacgacaggaaacatgcagttggggatgatgctcagttcgagatggacatctgactctcctgcaaggattagaagaaaagcagcaacactgatacttgtgtgcacctgatttggccaataggatcaacagtgaaaagacagaagaggcaataccagcagtccccattacagtctccacctccccgtcttcctctgggtgccaaatgatgggaagatgagcttcatctgaccatttcttctccctgtctcctgttccccttcccagttaaacaggttagattgaaggcccttgctgtatttctgtagagctaagcagcccttagaggaaaacagttcaactctgactttcctagttgtttttttattgagagccaccctcataccctgtaattttgtcccaaatcaaatatcaacctaccaacaactgcctggctgggaagtctggggaagggatacagagcttggtgggcctaacaccattcatattccttaccctctgtctctcctccctgtatcccacctatggttcagtgttgcaagagtctgggcttggggtctttaaaaccagcagggggaaatgataaaaagagagctgctttcccttttaccttgaggtattcgtccctcgggacagagcacagcttgtgcaactctggtagcgttaccctgtgacactgttttgaggtccacttcctttctttcctctgggaggaatgtcttctgtctttggtattatagttcatcttcccattcttttacttagtgcatttgtgcagatatttttaactctgtacatcagaagagagcccttggtaaccagttttgctcttcttctgccactcctccctgcttgcatctcgttgctggcagagtcctcttgtacttcaagaaagcaaagtgattttgtctgctcctagagcaggtccataccaagtaatagaggcactttagcttccacttggtgggtaaggcctgatcatagtattctgtcagataatgcctaagaatgaccgctgaagaacgttgacccatttgagtacccggtctcagtcgtcatttttaagtccagtgagcattgtggtagttgttcttagattgcagtttcttatgttttgagtttgaagttgattttcagaatgttcttagaaaagaactgcatttttttcctttgtggatctgctttgtttggctgctgggatagataagcatgggcttaaaaaatgtgttcctcccagttttcttgcctttcctgttgtactctgaatttctctccctacctccctcactttcttcctctctccttcctttccttcctttttctctaccaggccatttttcaaatttacatcaaagatacctgaagtgttggtatctgagaatatctgtcactcctcttatctgagaagtgaccttttatttttaagatgactacagacctatttttagatatgttttcagtacaattttgaacagcaactttttaattaaacatcttccagtgttaggaagttgagaaacgttcataggcaagtctgctgttctatgtcaccatcttttgtctcccctagtcccccaggagctctttcctttcccctctagttttgggtgtgcatgtttggagtttgtagtgggtggtttgtaaaactggaccattctgccttgctatgggttgttcaagaaagcctcattcttttctgtgaccctttcgcttttgcattcaccctccttcccacctacctgtcctggggctgttgagcagcataataatcccgggagaatgattcccctcatagaaagacaaaagcatccatcccctcatagttaagtagccactggtgtcctgggaatttctggttggatttggtgccctgaacttttttattaagaaatcagatcccagggtgagagtaacaggccatttggccaagaaagaaacctgtttgtttttcttttgaactatgaaaagaccctgtttgtgaatatattttagaaagagaggaaggatgtctgcagaactttgttctgttttctgccacaaaaatgtgaatagttcagagtgaaaaccttttgtgatggttgatgtctcaggaataagctggatctccaatgttttggggatgctttgagtctcaaaaaaaattgataatcagaaaagtaatttttgtttgtttgtttaatgtatccctgttctgtttttaattaaactccaagtctcattttaaaaaaaaaaaaaaaaa

SEQ ID NO: 610 - DNA, 3521 bp, Homo sapiens
ggccgccgagcggcggaggcaccgagtgcagagcattgtagaccaaggagccatggataggagaagtatgggtgaaacagaaagtggagatgctttccttgacctgaagaagcctcctgcctccaaatgcccccatcgctatacaaaagaagaactcttggatataaaagaactcccccattccaaacagaggccttcatgcctttctgaaaaatatgacagtgatggtgtctgggaccctgagaagtggcatgcctctctctacccagcttcagggcggagctcaccagtggaaagtctgaagaaagagttggatacagaccggccttccctggtgcgcaggatagtagatccacgagagcgtgtgaaagaagatgacttagatgttgttttcagccctcagagacggagctttggagggggctgccacgtgacagccgctgttagctcccggcgctcaggaagtccattagagaaagatagtgatgggcttcgtctgcttggtggacgtaggattggcagtgggaggataatctctgcccggacctttgagaaggatcaccgtcttagcgataaggacctgcgggacttgagagacagagaccgagagagggacttcaaggacaagcgtttcaggagagagtttggagatagtaagcgtgtctttggtgagcgtagaagaaatgattcttacacagaagaagaaccagagtggttctctgctggacccacaagtcagtctgaaaccatcgaactgactggctttgatgataagatactagaagaagatcacaaagggagaaaaagaacaaggcgacggacagcctctgtgaaggaaggtatagtagagtgcaatggaggagtggccgaagaggatgaagtggaggtcatccttgcacaggagcctgcggctgatcaggaagtgccaagggatgctgtcttgcctgagcagtccccaggagactttgactttaatgagttctttaaccttgataaggtgccatgcttggcttcgatgatagaagatgttttgggagaagggtcagtctctgccagtcggttcagtaggtggttctctaacccgagcagatcaggaagccgatccagcagtcttgggtcaacaccacatgaagagctagagagacttgcaggtctggagcaagccatcctctctcctggacagaactcggggaattactttgctcctataccattggaagaccatgctgaaaataaagtggatattttagaaatgctacagaaagccaaagtggatttgaaacctcttctttccagcctttctgcaaataaagaaaaacttaaagaaagctcacattcaggggttgtgctttcagtggaggaggtagaagcaggtctgaagggcttgaaggttgaccagcaagtgaagaattcaactcccttcatggcagaacacctagaagagaccttgagtgccgtaaccaacaatcgacaactgaagaaagacggagacatgactgcgttcaacaagctagtgagcacaatgaaggcaagtgggactttgccttctcagcccaaagtcagccgaaaccttgaaagccatttgatgtcccctgctgagattccaggccagcctgtccctaagaacatcctgcaggaacttctgggtcaaccagttcagagacctgcttcttccaatcttctgagtggccttatggggagcttggagcctacaacatctttactgggccaaagagcaccctctcctcccttgtcacaggtgtttcaaactcgagcagcctcagctgactaccttcgcccaagaataccatcaccaattggtttcacaccaggaccacagcagctactcggagatccattccaaggcatgcgcaaacccatgagccccatcacagcccagatgagccagctggagttgcaacaggcagctttagaagggctggccttgccacatgaccttgctgtacaggcagcaaacttctaccagcctggttttggcaaaccacaggtggacagaaccagagatggattcagaaacaggcaacagcgagtgaccaagtcaccagcacccgtgcatcgagggaattcctcttcccctgcccctgctgcctccatcacaagcatgctttctccttcctttacccctacctcagtgattcgtaagatgtacgagagcaaagagaaaagcaaggaggagccagcatctggaaaagcagctcttggtgacagtaaagaggatactcagaaggccagtgaagaaaacctcctgtcatccagctctgtacccagtgccgatcgagactcttctcccactacaaattccaaactgtcagcattacagaggtcttcgtgttccaccccactgtcccaggccaaccgttacaccaaagaacaagattatcgacctaaagcaactgggagaaaaacacccaccttggcatccccagttcctacaacaccttttctccgccctgtccaccaagttccccttgtcccccatgtccctatggttaggcctgctcaccagcttcacccagggttggtacagaggatgctggcccagggagtacatccacagcatcttccaagtttgctccaaactggtgtgcttcctcctgggatggacttgagtcatttacagggaatatctggccccatcctgggtcagcccttttaccctttacctgctgctagtcaccctctcttaaaccctcgtcctggaacacctctgcatctggcaatggtgcaacagcagctacagcgctcagttctgcatcctccaggctctggttcccatgcagcagctgtcagcgttcagacaacccctcagaacgtgcccagccggtcaggcctgccccacatgcactcccagctggagcatcgccccagccagaggagcagctcccctgtgggccttgccaaatggtttggctcagatgtgctacagcaacccctgccctccatgcccgccaaagttatcagtgtagatgaattggaataccgacagtgagcagggcaggcagactcaactaagcccggacctgtggtggcacactgggcaggaccctgcttcatctcgggttggtttatgggcttttactttggagcactctgtgtgaagctgtttggtggaacccatgcatctggtgtggtccgcattatgatggaaggatcttaaccagtcgagtggagtgtacattgtctgaatacaggatgcacaatgttgtcaatcctggaaatggtctttcttttttgtaagatatgtgaatgaagtgttggtgtcctcaccaagaggtggcacctaagggttctgaggaaataaatgtatagacccttatgtacagacctgtgtataaacaacttttgtatatacatataggatagcttttttgaactatacagctgtacataaaagtagctgatattagttaggcctgtgtcaacagtttggatttttttcacttgtacatttgggattttcttttggttgattaaaattgcatatgctaagtgtgtgaatg

SEQ ID NO: 611 - DNA, 4888 bp, Homo sapiens
agatgggctgaaagtggaactcaaggggtttctggcacctacctacctgcttcccgctggggggtggggagttggcccagagtcttaagattggggcagggtggagaggtgggctcttcctgcttcccactcatcttatagctttctttccccagatccgaattcgagatccaaaccaaggaggaaaggatatcacagaggagatcatgtctggggcccgcactgcctccacacccacccctccccagacgggaggcggtctggagcctcaagctaatggggagacgccccaggttgctgtcattgtccggccagatgaccggtcacagggagcaatcattgctgaccggccagggctgcctggcccagagcatagcccttcagaatcccagccttcgtcgccttctccgaccccatcaccatccccagtcttggaaccggggtctgagcctaatctcgcagtcctctctattcctggggacactatgacaactatacaaatgtctgtagaagaatcaacccccatctcccgtgaaactggggagccatatcgcctctctccagaacccactcctctcgccgaacccatactggaagtagaagtgacacttagcaaaccggttccagaatctgagttttcttccagtcctctccaggctcccacccctttggcatctcacacagtggaaattcatgagcctaatggcatggtcccatctgaagatctggaaccagaggtggagtcaagcccagagcttgctcctcccccagcttgcccctccgaatcccctgtgcccattgctccaactgcccaacctgaggaactgctcaacggagccccctcgccaccagctgtggacttaagcccagtcagtgagccagaggagcaggccaaggaggtgacagcatcaatggcgccccccaccatcccctctgctactccagctacggctccttcagctacttccccagctcaggaggaggaaatggaagaagaagaagaagaggaagaaggagaagcaggagaagcaggagaagctgagagtgagaaaggaggagaggaactgctccccccagagagtacccctattccagccaacttgtctcagaatttggaggcagcagcagccactcaagtggcagtatctgtgccaaagaggagacggaaaattaaggagctaaataagaaggaggctgttggagaccttctggatgccttcaaggaggcgaacccggcagtaccagaggtggaaaatcagcctcctgcaggcagcaatccaggcccagagtctgagggcagtggtgtgcccccacgtcctgaggaagcagatgagacctgggactcaaaggaagacaaaattcacaatgctgagaacatccagcccggggaacagaagtatgaatataagtcagatcagtggaagcctctaaacctagaggagaaaaaacgttacgaccgtgagttcctgcttggttttcagttcatctttgccagtatgcagaagccagagggattgccacatatcagtgacgtggtgctggacaaggccaataaaacaccactgcggccactggatcccactagactacaaggcataaattgtggcccagacttcactccatcctttgccaaccttggccggacaacccttagcacccgtgggcccccaaggggtgggccaggtggggagctgccccgtgggccggctggcctgggaccccggcgctctcagcagggaccccgaaaagaaccacgcaagatcattgccacagtgttaatgaccgaagatataaaactgaacaaagcagagaaagcctggaaacccagcagcaagcggacggcggctgataaggatcgaggggaagaagatgctgatggcagcaaaacccaggacctattccgcagggtgcgctccatcctgaataaactgacaccccagatgttccagcagctgatgaagcaagtgacgcagctggccatcgacaccgaggaacgcctcaaaggggtcattgacctcatttttgagaaggccatttcagagcccaacttctctgtggcctatgccaacatgtgccgctgcctcatggcgctgaaagtgcccactacggaaaagccaacagtgactgtgaacttccgaaagctgttgttgaatcgatgtcagaaggagtttgagaaagacaaagatgatgatgaggtttttgagaagaagcaaaaagagatggatgaagctgctacggcagaggaacgaggacgcctgaaggaagagctggaagaggctcgggacatagcccggcggcgctctttagggaatatcaagtttattggagagttgttcaaactgaagatgttaacagaggcaataatgcatgactgtgtggtcaaactgcttaagaaccatgatgaagagtcccttgagtgcctttgtcgtctgctcaccaccattggcaaagacctggactttgaaaaagccaagccccgaatggatcagtatttcaaccagatggaaaaaatcattaaagaaaagaagacgtcatcccgcatccgctttatgctgcaggacgtgctggatctgcgagggagcaattgggtgccacgccgaggggatcagggtcccaagaccattgaccagatccataaggaggctgagatggaagaacatcgagagcacatcaaagtgcagcagctcatggccaagggcagtgacaagcgtcggggcggtcctccaggccctcccatcagccgtggacttccccttgtggatgatggtggctggaacacagttcccatcagcaaaggtagccgccccattgacacctcacgactcaccaagatcaccaagcctggctccatcgattctaacaaccagctctttgcacctggagggcgactgagctggggcaagggcagcagcggaggctcaggagccaagccctcagacgcagcatcagaagctgctcgcccagctactagtactttgaatcgcttctcagcccttcaacaagcggtacccacagaaagcacagataatagacgtgtggtgcagaggagtagcttgagccgagaacgaggcgagaaagctggagaccgaggagaccgcctagagcggagtgaacggggaggggaccgtggggaccggcttgatcgtgcgcggacacctgctaccaagcggagcttcagcaaggaagtggaggagcggagtagagaacggccctcccagcctgaggggctgcgcaaggcagctagcctcacggaggatcgggaccgtgggcgggatgccgtgaagcgagaagctgccctacccccagtgagccccctgaaggcggctctctctgaggaggagttagagaagaaatccaaggctatcattgaggaatatctccatctcaatgacatgaaagaggcagtccagtgcgtgcaggagctggcctcaccctccttgctcttcatctttgtacggcatggtgtcgagtctacgctggagcgcagtgccattgctcgtgagcatatggggcagctgctgcaccagctgctctgtgctgggcatctgtctactgctcagtactaccaagggttgtatgaaatcttggaattggctgaggacatggaaattgacatcccccacgtgtggctctacctagcggaactggtaacacccattctgcaggaaggtggggtgcccatgggggagctgttcagggagattacaaagcctctgagaccgttgggcaaagctgcttccctgttgctggagatcctgggcctcctgtgcaaaagcatgggtcctaaaaaggtggggacgctgtggcgagaagccgggcttagctggaaggaatttctacctgaaggccaggacattggtgcattcgtcgctgaacagaaggtggagtataccctgggagaggagtcggaagcccctggccagagggcactcccctccgaggagctgaacaggcagctggagaagctgctgaaggagggcagcagtaaccagcgggtgttcgactggatagaggccaacctgagtgagcagcagatagtatccaacacgttagttcgagccctcatgacggctgtctgctattctgcaattatttttgagactcccctccgagtggacgttgcagtgctgaaagcgcgagcgaagctgctgcagaaatacctgtgtgacgagcagaaggagctacaggcgctctacgccctccaggcccttgtagtgaccttagaacagcctcccaacctgctgcggatgttctttgacgcactgtatgacgaggacgtggtgaaggaggatgccttctacagttgggagagtagcaaggaccccgctgagcagcagggcaagggtgtggcccttaaatctgtcacagccttcttcaagtggctccgtgaagcagaggaggagtctgaccacaactgagggctggtggggccggggacctggagccccatggacacacagatggcccggctagccgcctggactgcaggggggcggcagcagcggcggtggcagtgggtgcctgtagtgtgatgtgtctgaactaataaagtggctgaagaggcaggatggcttggggctgcctgggcccccctccaggatgccgccaggtgtccctctcctccccctggggcacagagatatattatatataaagtcttgaaatttggtgtgtcttggggtggggaggggcaccaacgcctgcccctggggtccttttttttattttctgaaaatcactctcgggactgccgtcctcgctgctgggggcatatgccccagcccctgtaccacccctgctgttgcctgggcagggggaagggggggcacggtgcctgtaattattaaacatgaattcaattaagctcaaaaaaaaaaaaaaaaaaaaa

SEQ ID NO: 612 - DNA, 5048 bp, Homo sapiens
gaagcggtggccgccgagcgggatctgtgcggggagccggaaatggttgtggactacgtctgtgcggctgcgtggggctcggccgcgcggactgaaggagactgaaggggcgttccacatacgttgtcccgacacagcagtaccctgtgcagccaggagccccaggcttctatccaggtgcaagccctacagaatttgggacctacgctggcgcctactatccagcccaaggggtgcagcagtttcccactggcgtggcccccgccccagttttgatgaaccagccaccccagattgctcccaagagggagcgtaagacgatccgaattcgagatccaaaccaaggaggaaaggatatcacagaggagatcatgtctggggcccgcactgcctccacacccacccctccccagacgggaggcggtctggagcctcaagctaatggggagacgccccaggttgctgtcattgtccggccagatgaccggtcacagggagcaatcattgctgaccggccagggctgcctggcccagagcatagcccttcagaatcccagccttcgtcgccttctccgaccccatcaccatccccagtcttggaaccggggtctgagcctaatctcgcagtcctctctattcctggggacactatgacaactatacaaatgtctgtagaagaatcaacccccatctcccgtgaaactggggagccatatcgcctctctccagaacccactcctctcgccgaacccatactggaagtagaagtgacacttagcaaaccggttccagaatctgagttttcttccagtcctctccaggctcccacccctttggcatctcacacagtggaaattcatgagcctaatggcatggtcccatctgaagatctggaaccagaggtggagtcaagcccagagcttgctcctcccccagcttgcccctccgaatcccctgtgcccattgctccaactgcccaacctgaggaactgctcaacggagccccctcgccaccagctgtggacttaagcccagtcagtgagccagaggagcaggccaaggaggtgacagcatcaatggcgccccccaccatcccctctgctactccagctacggctccttcagctacttccccagctcaggaggaggaaatggaagaagaagaagaagaggaagaaggagaagcaggagaagcaggagaagctgagagtgagaaaggaggagaggaactgctccccccagagagtacccctattccagccaacttgtctcagaatttggaggcagcagcagccactcaagtggcagtatctgtgccaaagaggagacggaaaattaaggagctaaataagaaggaggctgttggagaccttctggatgccttcaaggaggcgaacccggcagtaccagaggtggaaaatcagcctcctgcaggcagcaatccaggcccagagtctgagggcagtggtgtgcccccacgtcctgaggaagcagatgagacctgggactcaaaggaagacaaaattcacaatgctgagaacatccagcccggggaacagaagtatgaatataagtcagatcagtggaagcctctaaacctagaggagaaaaaacgttacgaccgtgagttcctgcttggttttcagttcatctttgccagtatgcagaagccagagggattgccacatatcagtgacgtggtgctggacaaggccaataaaacaccactgcggccactggatcccactagactacaaggcataaattgtggcccagacttcactccatcctttgccaaccttggccggacaacccttagcacccgtgggcccccaaggggtgggccaggtggggagctgccccgtgggccggctggcctgggaccccggcgctctcagcagggaccccgaaaagaaccacgcaagatcattgccacagtgttaatgaccgaagatataaaactgaacaaagcagagaaagcctggaaacccagcagcaagcggacggcggctgataaggatcgaggggaagaagatgctgatggcagcaaaacccaggacctattccgcagggtgcgctccatcctgaataaactgacaccccagatgttccagcagctgatgaagcaagtgacgcagctggccatcgacaccgaggaacgcctcaaaggggtcattgacctcatttttgagaaggccatttcagagcccaacttctctgtggcctatgccaacatgtgccgctgcctcatggcgctgaaagtgcccactacggaaaagccaacagtgactgtgaacttccgaaagctgttgttgaatcgatgtcagaaggagtttgagaaagacaaagatgatgatgaggtttttgagaagaagcaaaaagagatggatgaagctgctacggcagaggaacgaggacgcctgaaggaagagctggaagaggctcgggacatagcccggcggcgctctttagggaatatcaagtttattggagagttgttcaaactgaagatgttaacagaggcaataatgcatgactgtgtggtcaaactgcttaagaaccatgatgaagagtcccttgagtgcctttgtcgtctgctcaccaccattggcaaagacctggactttgaaaaagccaagccccgaatggatcagtatttcaaccagatggaaaaaatcattaaagaaaagaagacgtcatcccgcatccgctttatgctgcaggacgtgctggatctgcgagggagcaattgggtgccacgccgaggggatcagggtcccaagaccattgaccagatccataaggaggctgagatggaagaacatcgagagcacatcaaagtgcagcagctcatggccaagggcagtgacaagcgtcggggcggtcctccaggccctcccatcagccgtggacttccccttgtggatgatggtggctggaacacagttcccatcagcaaaggtagccgccccattgacacctcacgactcaccaagatcaccaagcctggctccatcgattctaacaaccagctctttgcacctggagggcgactgagctggggcaagggcagcagcggaggctcaggagccaagccctcagacgcagcatcagaagctgctcgcccagctactagtactttgaatcgcttctcagcccttcaacaagcggtacccacagaaagcacagataatagacgtgtggtgcagaggagtagcttgagccgagaacgaggcgagaaagctggagaccgaggagaccgcctagagcggagtgaacggggaggggaccgtggggaccggcttgatcgtgcgcggacacctgctaccaagcggagcttcagcaaggaagtggaggagcggagtagagaacggccctcccagcctgaggggctgcgcaaggcagctagcctcacggaggatcgggaccgtgggcgggatgccgtgaagcgagaagctgccctacccccagtgagccccctgaaggcggctctctctgaggaggagttagagaagaaatccaaggctatcattgaggaatatctccatctcaatgacatgaaagaggcagtccagtgcgtgcaggagctggcctcaccctccttgctcttcatctttgtacggcatggtgtcgagtctacgctggagcgcagtgccattgctcgtgagcatatggggcagctgctgcaccagctgctctgtgctgggcatctgtctactgctcagtactaccaagggttgtatgaaatcttggaattggctgaggacatggaaattgacatcccccacgtgtggctctacctagcggaactggtaacacccattctgcaggaaggtggggtgcccatgggggagctgttcagggagattacaaagcctctgagaccgttgggcaaagctgcttccctgttgctggagatcctgggcctcctgtgcaaaagcatgggtcctaaaaaggtggggacgctgtggcgagaagccgggcttagctggaaggaatttctacctgaaggccaggacattggtgcattcgtcgctgaacagaaggtggagtataccctgggagaggagtcggaagcccctggccagagggcactcccctccgaggagctgaacaggcagctggagaagctgctgaaggagggcagcagtaaccagcgggtgttcgactggatagaggccaacctgagtgagcagcagatagtatccaacacgttagttcgagccctcatgacggctgtctgctattctgcaattatttttgagactcccctccgagtggacgttgcagtgctgaaagcgcgagcgaagctgctgcagaaatacctgtgtgacgagcagaaggagctacaggcgctctacgccctccaggcccttgtagtgaccttagaacagcctcccaacctgctgcggatgttctttgacgcactgtatgacgaggacgtggtgaaggaggatgccttctacagttgggagagtagcaaggaccccgctgagcagcagggcaagggtgtggcccttaaatctgtcacagccttcttcaagtggctccgtgaagcagaggaggagtctgaccacaactgagggctggtggggccggggacctggagccccatggacacacagatggcccggctagccgcctggactgcaggggggcggcagcagcggcggtggcagtgggtgcctgtagtgtgatgtgtctgaactaataaagtggctgaagaggcaggatggcttggggctgcctgggcccccctccaggatgccgccaggtgtccctctcctccccctggggcacagagatatattatatataaagtcttgaaatttggtgtgtcttggggtggggaggggcaccaacgcctgcccctggggtccttttttttattttctgaaaatcactctcgggactgccgtcctcgctgctgggggcatatgccccagcccctgtaccacccctgctgttgcctgggcagggggaagggggggcacggtgcctgtaattattaaacatgaattcaattaagctcaaaaaaaaaaaaaaaa

SEQ ID NO: 613 - DNA, 5662 bp, Homo sapiens
tcctcgacggccgccgcccgcctggccttttagggcctgactcccgcccttcctggcctacactcctgggcggcggcaggcctagcttctggcccagtgcgggttccccggcggcaggcgtatcctgtgtgcccctgggccaggcccgaacccggtgtccccgggtggggggtggggacgccacggccgaagcagctagctccgttcgtgatccgggagcctggtgccagcgagacctggaatttccggtctggttggtctggggccccgcggagccaggttgataccctcacctcccaaccccaggccctcggatgcccagaacctgtaggccgcaccgtggacttgttcttaatcgagggggtgctggggggaccctgatgtggcaccaaatgaaatgaacaaagctccacagtccacaggccccccacccgccccatcccccggactcccacagccagcgtttcccccggggcagacagcgccggtggtgttcagtacgccacaagcgacacaaatgaacacgccttctcagccccgccagcacttctaccctagccgggcccagcccccgagcagtgcagcctcccgagtgcagagtgcagcccctgcccgccctggcccagctgcccatgtctaccctgctggatcccaagtaatgatgatcccttcccagatctcctacccagcctcccagggggcctactacatccctggacaggggcgttccacatacgttgtcccgacacagcagtaccctgtgcagccaggagccccaggcttctatccaggtgcaagccctacagaatttgggacctacgctggcgcctactatccagcccaaggggtgcagcagtttcccactggcgtggcccccgccccagttttgatgaaccagccaccccagattgctcccaagagggagcgtaagacgatccgaattcgagatccaaaccaaggaggaaaggatatcacagaggagatcatgtctggggcccgcactgcctccacacccacccctccccagacgggaggcggtctggagcctcaagctaatggggagacgccccaggttgctgtcattgtccggccagatgaccggtcacagggagcaatcattgctgaccggccagggctgcctggcccagagcatagcccttcagaatcccagccttcgtcgccttctccgaccccatcaccatccccagtcttggaaccggggtctgagcctaatctcgcagtcctctctattcctggggacactatgacaactatacaaatgtctgtagaagaatcaacccccatctcccgtgaaactggggagccatatcgcctctctccagaacccactcctctcgccgaacccatactggaagtagaagtgacacttagcaaaccggttccagaatctgagttttcttccagtcctctccaggctcccacccctttggcatctcacacagtggaaattcatgagcctaatggcatggtcccatctgaagatctggaaccagaggtggagtcaagcccagagcttgctcctcccccagcttgcccctccgaatcccctgtgcccattgctccaactgcccaacctgaggaactgctcaacggagccccctcgccaccagctgtggacttaagcccagtcagtgagccagaggagcaggccaaggaggtgacagcatcaatggcgccccccaccatcccctctgctactccagctacggctccttcagctacttccccagctcaggaggaggaaatggaagaagaagaagaagaggaagaaggagaagcaggagaagcaggagaagctgagagtgagaaaggaggagaggaactgctccccccagagagtacccctattccagccaacttgtctcagaatttggaggcagcagcagccactcaagtggcagtatctgtgccaaagaggagacggaaaattaaggagctaaataagaaggaggctgttggagaccttctggatgccttcaaggaggcgaacccggcagtaccagaggtggaaaatcagcctcctgcaggcagcaatccaggcccagagtctgagggcagtggtgtgcccccacgtcctgaggaagcagatgagacctgggactcaaaggaagacaaaattcacaatgctgagaacatccagcccggggaacagaagtatgaatataagtcagatcagtggaagcctctaaacctagaggagaaaaaacgttacgaccgtgagttcctgcttggttttcagttcatctttgccagtatgcagaagccagagggattgccacatatcagtgacgtggtgctggacaaggccaataaaacaccactgcggccactggatcccactagactacaaggcataaattgtggcccagacttcactccatcctttgccaaccttggccggacaacccttagcacccgtgggcccccaaggggtgggccaggtggggagctgccccgtgggccggctggcctgggaccccggcgctctcagcagggaccccgaaaagaaccacgcaagatcattgccacagtgttaatgaccgaagatataaaactgaacaaagcagagaaagcctggaaacccagcagcaagcggacggcggctgataaggatcgaggggaagaagatgctgatggcagcaaaacccaggacctattccgcagggtgcgctccatcctgaataaactgacaccccagatgttccagcagctgatgaagcaagtgacgcagctggccatcgacaccgaggaacgcctcaaaggggtcattgacctcatttttgagaaggccatttcagagcccaacttctctgtggcctatgccaacatgtgccgctgcctcatggcgctgaaagtgcccactacggaaaagccaacagtgactgtgaacttccgaaagctgttgttgaatcgatgtcagaaggagtttgagaaagacaaagatgatgatgaggtttttgagaagaagcaaaaagagatggatgaagctgctacggcagaggaacgaggacgcctgaaggaagagctggaagaggctcgggacatagcccggcggcgctctttagggaatatcaagtttattggagagttgttcaaactgaagatgttaacagaggcaataatgcatgactgtgtggtcaaactgcttaagaaccatgatgaagagtcccttgagtgcctttgtcgtctgctcaccaccattggcaaagacctggactttgaaaaagccaagccccgaatggatcagtatttcaaccagatggaaaaaatcattaaagaaaagaagacgtcatcccgcatccgctttatgctgcaggacgtgctggatctgcgagggagcaattgggtgccacgccgaggggatcagggtcccaagaccattgaccagatccataaggaggctgagatggaagaacatcgagagcacatcaaagtgcagcagctcatggccaagggcagtgacaagcgtcggggcggtcctccaggccctcccatcagccgtggacttccccttgtggatgatggtggctggaacacagttcccatcagcaaaggtagccgccccattgacacctcacgactcaccaagatcaccaagcctggctccatcgattctaacaaccagctctttgcacctggagggcgactgagctggggcaagggcagcagcggaggctcaggagccaagccctcagacgcagcatcagaagctgctcgcccagctactagtactttgaatcgcttctcagcccttcaacaagcggtacccacagaaagcacagataatagacgtgtggtgcagaggagtagcttgagccgagaacgaggcgagaaagctggagaccgaggagaccgcctagagcggagtgaacggggaggggaccgtggggaccggcttgatcgtgcgcggacacctgctaccaagcggagcttcagcaaggaagtggaggagcggagtagagaacggccctcccagcctgaggggctgcgcaaggcagctagcctcacggaggatcgggaccgtgggcgggatgccgtgaagcgagaagctgccctacccccagtgagccccctgaaggcggctctctctgaggaggagttagagaagaaatccaaggctatcattgaggaatatctccatctcaatgacatgaaagaggcagtccagtgcgtgcaggagctggcctcaccctccttgctcttcatctttgtacggcatggtgtcgagtctacgctggagcgcagtgccattgctcgtgagcatatggggcagctgctgcaccagctgctctgtgctgggcatctgtctactgctcagtactaccaagggttgtatgaaatcttggaattggctgaggacatggaaattgacatcccccacgtgtggctctacctagcggaactggtaacacccattctgcaggaaggtggggtgcccatgggggagctgttcagggagattacaaagcctctgagaccgttgggcaaagctgcttccctgttgctggagatcctgggcctcctgtgcaaaagcatgggtcctaaaaaggtggggacgctgtggcgagaagccgggcttagctggaaggaatttctacctgaaggccaggacattggtgcattcgtcgctgaacagaaggtggagtataccctgggagaggagtcggaagcccctggccagagggcactcccctccgaggagctgaacaggcagctggagaagctgctgaaggagggcagcagtaaccagcgggtgttcgactggatagaggccaacctgagtgagcagcagatagtatccaacacgttagttcgagccctcatgacggctgtctgctattctgcaattatttttgagactcccctccgagtggacgttgcagtgctgaaagcgcgagcgaagctgctgcagaaatacctgtgtgacgagcagaaggagctacaggcgctctacgccctccaggcccttgtagtgaccttagaacagcctcccaacctgctgcggatgttctttgacgcactgtatgacgaggacgtggtgaaggaggatgccttctacagttgggagagtagcaaggaccccgctgagcagcagggcaagggtgtggcccttaaatctgtcacagccttcttcaagtggctccgtgaagcagaggaggagtctgaccacaactgagggctggtggggccggggacctggagccccatggacacacagatggcccggctagccgcctggactgcaggggggcggcagcagcggcggtggcagtgggtgcctgtagtgtgatgtgtctgaactaataaagtggctgaagaggcaggatggcttggggctgcctgggcccccctccaggatgccgccaggtgtccctctcctccccctggggcacagagatatattatatataaagtcttgaaatttggtgtgtcttggggtggggaggggcaccaacgcctgcccctggggtccttttttttattttctgaaaatcactctcgggactgccgtcctcgctgctgggggcatatgccccagcccctgtaccacccctgctgttgcctgggcagggggaagggggggcacggtgcctgtaattattaaacatgaattcaattaagctcaaaaaaaaaaaaaaaa

SEQ ID NO: 614 - DNA, 5782 bp, Homo sapiens
gcttcccggctgtgcaccctccggggccgccggctctcgggggacgcgctggggatggggccagacgccccggtcgcgcgcccccctccttcgcggagctgcccggttcgccagcccccgcggaaacgcctcggagcgcggtagccatggggaccagggcgaaggttaaccgagtatttgaatagcgaggaaaagggaggccggggcgagcctggcgttcgctcgcgctctcttgcttaatggcaaattgtgggcgagcgctgcgtttaaggaagtgctgctttgaaagctgttgcgcagccattggtacctgtattggggaaacatagcatacaagcaagaagcttacagcctcagtggcgaaaattttttcatgtcagagaccgagaactcttgcagtcgtttatgtcatcccttcttctccagacagaagataccaaaaagttgcaatcaaagatctcttcatcttattgataaagccactaataagccaaaatgtctgtcaatgtcaaccgcagcgtgtcagaccagttctatcgctacaagatgccccgtctgattgccaaggttgagggcaaaggcaatggaatcaagacagttatagtcaacatggttgacgttgcaaaggcgcttaatcggcctccaacgtatcccaccaaatattttggttgtgagctgggagcacagacccagtttgatgttaagaatgaccgttacattgtcaatggatctcatgaggcgaataagctgcaagacatgttggatggattcattaaaaaatttgttctctgtcctgaatgtgagaatcctgaaacagatttgcatgtcaatccaaagaagcaaacaataggtaattcttgtaaagcctgtggctatcgaggcatgcttgacacacatcataaactctgcacattcattctcaaaaacccacctgagaatagtgacagtggtacaggaaagaaagaaaaagaaaagaaaaacagaaagggcaaagacaaggaaaatggctccgtatccagcagtgagacaccaccaccaccaccaccaccaaatgaaattaatcctcctccacatacaatggaagaagaggaggatgatgactggggagaagatacaactgaggaagctcaaaggcgtcgaatggatgaaatcagtgaccatgcaaaagttctgacactcagtgatgatttggaaagaacaattgaggagagggtcaatatcctctttgattttgttaagaaaaagaaagaagagggtgttattgattcatctgacaaagaaatcgttgctgaagcagaaagactggatgtaaaagccatgggccctcttgttctaactgaagttctttttaatgagaagattagagaacagattaagaaatacaggcgccatttcctacgattttgtcacaacaacaaaaaagcccaacggtaccttcttcatggtttggagtgtgtggtagcaatgcatcaagctcagcttatctccaagattccacatatcttgaaggagatgtacgatgcagaccttttagaagaagaggtcatcatcagctggtcggaaaaggcctctaagaaatatgtctccaaagaacttgccaaagagattcgtgtcaaagcagaaccatttataaaatggttgaaggaggcagaggaagaatcttctggtggcgaagaagaagatgaagatgagaacattgaggtggtgtattcgaaggctgccagtgtaccgaaagttgagactgtaaagtcagacaacaaggatgacgacatcgatattgatgccatttaaagggatggatgcaacctagcttaacagtataatgctgcaaattttcctccattatcagccagaagtgcaacatgtatgtgcaaaagctaaaatggcttaacatcatgctacactttacactaaaaatctattactgtgagtggtctgttattaagcccaatgagacatctagggagtccatacacatcagtgagcagatgtagtttgcttatttatagcatgtttctttttgaaaaactagtggtggacacatttggatcacatttatacagttataaaaataaaggtttgattttggtcgttcttcagatgtttggctctgaatgacttaagctgaagtaactggctccttactttaaatgttctgccatcatttcacctgatgagcattcttggagcctgccagatattgttaggtcctggggctgcaaagaggtcctcaacaggatgtaaagcaaacttaattgtaattaatttattcagcccattaagaaagtactaaagttttatctctgtagttcctcaaattggcatctggtaatgtacattgtgaggtagactgataatgaaatgacagtgcaacatcttaaccaagaagtaaatatgacctcagtgtcctataaataatgtaagagcaggatttgaaacttggagagctgttttctcatttcatgtacacttgccccaaattgtctttgaagtcgtgtgcattgcacgttggatgagccagggaaattattacattaacaagcattttgtgtgtacgtagtagttactttgtactgagagaacttgctttggggtgcaattaataaactgattttatttgggagaaacaaggaagggtgcacttaactagcaacctaagcatgatttttcagcttttgcccttagggtttaaattacaattccaaaatgttagacatactgtattttttcgttcagtgtggctttaattttcccctcttgcagtttgttctgtaatgccttttacatttggacacatagtttatgctttttagattttggttgctttcttgccaaaataagtgttaactgtgtttcaaacttgattttctttcctttttcttttttttttcttccagaatgtcttatttaaaaagaaagctaaaagcatacttctaagtcagagcctctattttggtgtaagacttgggatattttttacttcacattgaatatagccaggcacccaagaagtctgatggccacctgagtgcaggtgacaaggacctgacagagcccatgcagggctttagatttggacacacaagagttgataacttcctcatgaactccttgcctgatctaaactcatattatgggttctgactgtttgagtaatcatcttcaaggttaaacctcttggcagttacccttttcacaaagtgcacagtgggaatcgagaatcgatagggttaattttggagcagtggcttataccattcacctctgtttttttgtgattatttcacagataatgagaccttaataacaaataggcgtaaaaaaattttcacattgaaatgatagaaacatttgatgtaataaaacttggttggcttgatattttaaggaattgaaacctagcaatcttattggagagacaagaattggtctccagctgcctttgatcaagattcgggtgcaagtggagcaggagccatatacctggagggaatgtgctttgtcacaccaaagaggatttttttttcttcaaacttgtatgttgcctaggtttcaaattctttgccgcaaggctgatctgctttcattaactggaattctgtaggagatactggtgacctaagctaagttgcactcagcatactcagtgtcaagctaatgaggttctattataaaggttctacttttaatctgagggaaaacatgttcagggcttctagaacactaaaaaatttggcttaaaccagtgttcagtctggtgccaaacttcgaatggaatacaaattcacataatctgaactttgttcacaggttatcctaatagagtaattcttcactttgctctattgaactgtcttaaggatttgtttaaacagctaagttacttgattaaaataatgataaaattgtattttgtctttgctttaatattaaagttaacaagttttcattttataatgagatcaaagcattggaatctgccctgttttgtagccgttgctttggatttgtgttggatgtatcctgcagttacacttgccagccccactcacaaaagttgttcatttcattgggtcactggctttatttgctagtcttgtctgtgaactgagcatctgcctcagttttattacttgaaatcttggcaggtgcttaatagggaacatacatacagctatgtaactgtgaataattgtatatatctctagttaagaatgagggaatggggaggtttgctttctaaacaagtgcattctgaaattgacttaaaaatttttagtgtgggtcctaaagtttagagatgggcaaggaggtctctaatccaccgcttcccgcttgagaagggaggggtatcaaaattgagccccaagctgtttgttccagtgtaccaagcactgactttatgcctttggcctggagatggcagaagtgaaagctggccatctgcaaaaagcagataagtgagtttgaaccttttgcattttgttagctcagtcagtcctcatcgtggtcctgaggcataggtactgttgtaccaaggtcacttatctaacaaaataacccttcatgtattttaaatttatttgacaagtctgcagacaatccttatctaaccagctattttcttaattgctacagcttgacctaccagtattccggagtaaccagcaaatgcaaagttaaccttgttcctgcatcatctttttgatggttcaaatttcagcctccctgactactacaaagccagagcagtcttagtaccagaaacagtgttgcactttcgttgcatgtgctgtgtgaccccaaggggacagggagtcactttggtcatctctgtccccagtacagatcttgattcatagtgacattccataagtggggtgacagcaaatgacttgcaggtagtctcattgtaggtttgtgcaccagagtgaccctgtgagcctttgttaataggttgggagctcagggtgtttatgtccacctgtctggtctagccaaacagtttttttctgggaatcaaatttctgtggtttttatggccagaaattttaaggacttgtgtgtgctgggatatgagaatagaagctacagagttcttttcttgggacctagactgggaggtgcaatgtcaggacctccaggtgaatggtaggatctgagttgaccctgcagttcggttatgcagtcaattatttctttttaagaggaggaggattcacttgggtgttgggatcaaatttggattctgtcccaggccttactgtaaaactaggggattgcctttccatatctgctgggggtggagacccttatgtgcagcactcaatcccactggaagcctaatgctgcagtcagaagcaatgcctggctggggcagtaggggaaattccacccaattttgctatgagcctaaaacctctttaaaaacggtcagttaactaaaaaataaaaatcaagtctttaggagagtagaaaacacaattaactaaaaagcagggacatctgaaagagacgtattaagttaacatttttaaaaatccaaatgaaagtaaatggaataaatgtatcaggtaaaggacaagttgtaagcttggatttttaggtctagcaatacactgtttacaagagcatcacctaaaatgtgacaaaagatgttgaaaggatgaaaaaaggtatagtagacatacactaaccaaaaatgtagctctttgaatctcagaaaaaagtagattttaataaagtgtgaaagttgtcaatcaaaaaaaaaaaaaaaaaaaaa

SEQ ID NO: 615 - DNA, 896 bp, Homo sapiens
cctatcatcgcaaaactcatgatgctccggctgctcagttccctcctccttgtggccgttgcctcaggctatggcccaccttcctctcgcccttccagccgcgttgtcaatggtgaggatgcggtcccctacagctggccctggcaggtttccctgcagtatgagaaaagcggaagcttctaccacacctgtggcggtagcctcatcgcccccgactgggttgtgactgccggccactgcatctcgagctcccggacctaccaggtggtgttgggcgagtacgaccgtgctgtgaaggagggccccgagcaggtgatccccatcaactctggggacctctttgtgcatccactctggaaccgctcgtgtgtggcctgtggcaatgacatcgccctcatcaagctctcacgcagcgcccagctgggagacgccgtccagctcgcctcactccctccggctggtgacatccttcccaacgagacaccctgctacatcaccggctggggccgtctctataccaacgggccactcccagacaagctgcaggaggccctgctgccggtggtggactatgaacactgctccaggtggaactggtggggttcctccgtgaagaagaccatggtgtgtgctggaggggacatccgctccggctgcaatggtgactctggaggacccctcaactgccccacagaggatggtggctggcaggtccatggcgtgaccagctttgtttctgcctttggctgcaacacccgcaggaagcccacggtgttcactcgagtctccgccttcattgactggattgaggagaccatagcaagccactagaaccaaggcccagctggcagtgctgatcgatcccacatcctgaataaagaadaaagatctctcag

SEQ ID NO: 616 - DNA, 2180 bp, Homo sapiens
gggcggaaaagcctgtttacacagactgcacaccgcctggggaataatgcagtaaaggaagtgagccggctcggcctgactgctccaacttcctgctctcacacacaccagaggggaaaaaaaaagaggagcgagagaaagaaaaaaagggggaaaaatcaggatctcattacaagagccacagaccgtctgcagacgcctgtcagcatggaaagtcgggggctttcgcccgggtcctcctagaaattccccccgaagaagactcccccacatctgggtatggagagtgcaatcacgctgtggcagttcctgttgcagttgctgctggatcagaaacatgagcatttgatctgctggacctcgaacgatggtgaattcaagctcctcaaagcagaagaagtggccaagctgtggggactccgaaaaaacaaaacaaatatgaactatgataagctgagcagagccctgcgatactattatgacaagaacatcatcaagaaggtgatcgggcagaagtttgtgtacaagtttgtctctttcccggagatcctgaagatggatcctcacgcggtggagatcagccgggagagccttctgctgcaggacagcgactgcaaggcgtctccggagggccgcgaggcccacaaacacggcctggccgccctcagaagcacgagccgcaacgaatacatccactcaggcctgtactcgtccttcaccattaattccctgcagaacccaccagacgccttcaaggccatcaagacggagaagctggaggagccgcccgaagacagcccccccgtggaagaagtcaggactgtgatcaggtttgtgaccaataaaaccgacaagcacgtcaccaggccggtggtgtccctgccttccacgtcagaggctgcggcggcgtccgccttcctggcctcgtccgtctcggccaagatctcctctttaatgttgccaaacgctgccagtatttcatccgcctcacccttctcatctcggtccccgtccctgtcccccaactcacccctcccttctgaacacagaagcctcttcctggaggccgcctgccatgactccgattccctggagcccttgaacctgtcatcgggctccaagaccaagtctccatctcttcccccaaaggccaaaaaacccaaaggcttggaaatctcagcgcccccgctggtgctctccggcaccgacatcggctccatcgccctcaacagcccagccctcccctcgggatccctcaccccagccttcttcaccgcacagacaccaaatggattgcttctgactccgagtccactgctctccagcatacatttctggagcagccttagtccagttgctccgctgagtcctgccaggctgcaagggccaagcacgctgttccagttccccacactgcttaatggccacatgccagtgccaatccccagtctggacagagctgcttctccagtactgctttcttcaaactctcagaaatcctgatgacgtctggccacaattaaggactcattaactgatgaaacaaatttgtccccacgggctagtttacctgtgtcgtgagaaggacattgtgaaactcttgttaatttggtttgcacttttcataacatggatagtctagatttatgttagcattttaaaaactgtttttgatatattcaagtatatatgaaaatctgtttggcattaagtgaattttaatgtttttgtttttatatccttttagctcttaagtgttgaacactgttgacagtgaagaacttttcttaatggttttcagtataactaataaggatgtgaagcttttttctctttagttctgagtatgctaaactgtgtgcttatatagactataaccagttgtgccttcctttgcatttaatgtaaatgaatgatttatatattttttagtattaagaggaaatgtttgaaagatgaaaattagtatcaaacagctctctagtagaatttcattatttttcaccagtgggcaatatgaaagcatatatcacgttttgttttactttcaattgtataagaattgccttagaacctcttttgaactgaaattcagtaaatgtccaagtaatgtttttataataaactaagccatatttagacaataaacatcgaaaaaaaaaaaaaaaaaaaaaaaaaaa

SEQ ID NO: 617 - DNA, 2304 bp, Homo sapiens
acttccgggccctgcgtggcagttgaaagagtggcgggagaagttgcagggaattatttgatagcacatactgatggctctaaagaagtcatcaccctcactggattctggtgatagtgactctgaggagttgccaacatttgcctttctgaagaaggaaccatcttcaacaaagaggagacagcctgaaagggaagagaagattgtagtggttgacatctcagattgtgaagcctcctgtcctccagcaccagagttattttcaccacctgtcccagacatagctgaaactgtcacacaaacacagccagtcaggttgctaagcagtgaaagtgaagatgaagaagaatttattcctctggctcaaaggcttacatgtaagtttctgacccacaagcaactgagccctgaggactctagctccccagttaaaagtgttttggatcatcaaaataatgaaggtgcatcatgtgactggaaaaagccctttccaaagatccctgaagttcccctccatgataccccagagaggagtgcagcagataacaaggacctgatcttagatccatgctgtcagcttccagcctacctgtctacctgccctggccagagcagcagcttggcagtaaccaaaacaaattctgacatccttccaccccagaagaaaaccaagccgagtcagaaggtccagggaagaggctcacacggatgccagcagcagagacaagcaaggcagaaggaaagcaccctgagaagacaggaaagaaagaatgcagcactggttaccaggatgaaagcccagaggccagaggaatgcttaaaacacatcattgtagtgctggatccagtgctcttacagatggaaggtgggggccagctcctaggagcactgcagaccatggagtgccgctgtgtgattgaggcgcaggctgtgccttgcagtgtcacttggaggagaagggctgggccgtctgaggacagagaggactgggtggaggagccaacagtactggtgttgctccgggcagaggcatttgtgtccatgatcgacaatggaaagcagggaagcctggacagcactatgaaagggaaggaaacgcttcagggctttgtaactgacatcacagcaaagacagcagggaaagctctgtcactggtgattgtggatcaggagaaatgcttcagtgctcagaatcctccaagaagagggaaacagggagcaaataaacagaccaagaagcagcagcagagacaaccagaggccagcatagggtccatggtatccagggtagacgctgaagaggcattggtggatctgcagctacacacagaagcccaggctcaaattgtgcagagctggaaagagctggccgacttcacatgcgcattcacaaaggctgtggctgaggcgcccttcaagaagctccgagatgaaactaccttctccttctgtctggagagtgactgggctggaggggtgaaggtggaccttgctggcaggggactcgcactagtctggaggagacagattcagcagctgaaccgagtcagcctggaaatggccagtgcagttgtgaatgcctatccctccccacagctcctggtacaggcttatcagcagtgtttttcggataaagaacgccagaatttgctcgcagacatacaggtgcgccgtggggaaggtgtgacatccacttctcgccgcattggaccagaactatccaggcgtatctaccttcagatgaccactttacagccacatctctctttagatagtgctgactgattctagccctcagggatgaggatgaaaagctggaaacttccacttccccaacctcagagcctgactgtaatgaagagactggcagcacctcctggaacacaagcctaggtgaggcccagtctttcttgggtcttattatttgtgaaggtctctctgcctgtcggctggggcagagactgaaatactgccacctacctttggcatttaatgttcctctcctggcaaaaattcactgccacagacaaaccacccccactcctacccagccagccctcaaaacacaaaggaacaaagacagtccactcagacacttatttaataactgtagaaatccaaaagaattagcatcaaatcttgaagtcgtgagtgaagctgcgggttggcttgactgggctcagccactgagctgcctcaaccggccaaggaacgggattatgatgactatgcggacttctatattgtcttcatctcattgtgtgtattatgtatttagtttcaataaagcatttgtaccaatg

SEQ ID NO: 618 - DNA, 13109 bp, Homo sapiens
gggttcctcgcggcgatcccgactctcctcccgcggctgcagcagctgccggttgcacacggcctcggcggcggcgcggcgagcgcgggcctgtggagcggcggccgggcgcgcggccccggcgggcacccctcagagggcggccgaggaagctccgggaggaggagcaggaccacgaggaggtgggaggcggcggccgcctggggaccagctccgcgcctcggcctctccgccccctccccagcctttctctcgccctcttctcccacactcccggccggcgcctcggctttgtgcgaggagatggtgtagccccctggccgccgaaggaggagccggacacttgtctcccgtctccgagctgctccccacccctggaggagagacccccccctcggctcggcgccttctgcgtctcccggctggtggggaagcctctgcgccgccggcaccatgagtgaacagagtatctgtcaggcaagagctgctgtgatggtttatgatgatgccaataagaagtgggtgccagctggtggctcaactggattcagcagagttcatatctatcaccatacaggcaacaacacattcagagtggtgggcaggaagattcaggaccatcaggtcgtgataaactgtgccattcctaaagggttgaagtacaatcaagctacacagaccttccaccagtggcgagatgctagacaggtgtatggtctcaactttggcagcaaagaggatgccaatgtcttcgcaagtgccatgatgcatgccttagaagtgttaaattcacaggaaacagggccaacattgcctagacaaaactcacaactacctgctcaagttcaaaatggcccatcccaagaagaattggaaattcaaagaagacaactacaagaacagcaacggcaaaaggagctggagcgggaaaggctggagcgagaaagaatggaaagagaaaggttggagagagagaggttagaaagggaaaggctggagagggagcgactggaacaagaacagctggagagagagagacaagaacgggaacggcaggaacgcctggagcggcaggaacgcctggagcggcaggaacgcctggagcggcaggaacgcctggatcgggagaggcaagaaagacaagaacgagagaggctggagagactggaacgggagaggcaagaaagggagcgacaagagcagttagaaagggaacagctggaatgggagagagagcgcagaatatcaagtgctgctgcccctgcctctgttgagactcctctaaactctgtgctgggagactcttctgcttctgagccaggcttgcaggcagcctctcagccggccgagactccatcccaacagggcattgtcttgggaccacttgcacctccacctcctccaccactcccaccagggcctgcacaggcttcagtagccctccctcctcccccagggccccctccacctcctccactcccatccaccgggcctccaccgccccctcctccccctcctctccctaatcaagtaccccctcctcctccaccacctcctgccccacccctccctgcatctggattctttttggcatccatgtcagaagacaatcgccctttaactggacttgcagctgcaattgccggagcaaaacttaggaaagtgtcacggatggaggatacctctttcccaagtggagggaatgctattggtgtgaactccgcctcatctaaaacagatacaggccgtggaaatggaccccttcctttagggggtagtggtttaatggaagaaatgagtgccctgctggccaggaggagaagaattgctgaaaagggatcaacaatagaaacagaacaaaaagaggacaaaggtgaagattcagagcctgtaacttctaaggcctcttcaacaagtacacctgaaccaacaagaaaaccttgggaaagaacaaatacaatgaatggcagcaagtcacctgttatctccagaccaaaatccacacccttatcacagcccagtgccaatggagtccagacggaaggacttgactatgacaggctgaagcaggacattttagatgaaatgagaaaagaattaacaaagctaaaagaagagctcattgatgcaatcaggcaggaactgagcaagtcaaatactgcatagaggaacagactaaggagagataggactttaatctggaggaaaaatatcctacaaacaacaactgttcacaacagcaaacccctacatttatgagctgtaagaagaaaatggagacaaacagaaggagggaaaaaccaacctactctgaaagccttcagacattatgactctggtgataagctctttccctctccgtttgctgcttttttctggcctttacaacagaatggaagagaatcatttaagagttcctgtaacagttatgcagaaaatactaaaacccatcaggcaagatcaccacgcattgaaatattttcatatcaagataaagtcgcacattttccacaatacattgctaaaataaagaggagaaaggcttaggaagtttttttgcagagagtgctggtaaagaattgagcaagtttgctattgtattgtaatgtttctctcaggtttgttcttcctatcatgtttgatattccatgaataattgagatcagccctatgtaagttaagatcataatatgtggaacaaatggaattgtaagtgctttcaaagggtaatatttataagaaagtgtccgaaaaatgtttcttcagcttgagaaattttagaatgataggaagtttctcgagttagccttcatgcaattttgtagattaaaacataaaatttgtccagaacttaaagatttagatgccttcctaaattgttacaatgctttaccaaatctatgacttctacataacacaaaccagtggtcaaatgtaaacactatattgtagatttactgtaggttttcaaccttttttagatttatgcatgtggacatttttataatgtaattacaatcaccacaaggttagcttttttaattgcagacagtaatgcatgtcacactaatatgtagtggccttttcaaggcctagtcccagggaaaacattttgtagagtataggggagtgggaggaaggggaggaataattttttatttaaagttgatttctgcactatctttttctcagttacctgcatgaataaataatgagaaatattttgtgactttaattggtaaatatgttacaaaaccaagtacttaatcttttacatcatgtcttcagctatttgtattttaaccagtaatttcaatggtctgaaacatgattctgagcttcacataatatcttaactgtggaactcaaaagtttgatcactgaatttggcagttattattacctaggtacccccgctgttacacaggtgtttagatacgtgttcctgaatgaagctgcttttgaattttgttatgttgaaatgcaagaaataacaatgatggcagcaattaaggtcacagaaatcattaggtaaaggaaaaccaatgaggagttctgcagttttcttttaataagtaaagtgagacttgggtggtgggaagaaggaaggtgggaagaaggaattagacactctgcctgccactctgcgtgtgtgtgctctcgcgcacgtgctgtctatatggaagccactcccttttctttcctttgaaactggtaaggttaaaataggggagaaatcctacatgttggaatgatagctttttggaaaatttaagaaactctccaggctctccatcttgatttatgcttgagttgttatgtgccatatttgctttgaactctgattatcagaagttttactaaaactttgaaataattcactttcatctgctttctagattttgtacatctcagtccataaagcaaagcttgttgatagtgtagttttctaaacgctgcaaatttgcagcctttaccactacaaagaagtttggatgagggattttttttttctttgtcaaaatagttcctgtttctgtagaaatttcatttttagattaaactgtgatggatgagctatcataattcaagtatacatttcttttttctatcagatattcattgtcatgcagtagtagtaaaaacatcaaagatgcagcaagcttattaagtattattttctaaaagaaataggaggcattttcatctttattattgtacttttggttatgcaaacactttgataatataaacagttatgtcccctataaatctggtcagcaacctcttttgattttgttgggtaagttaaatagtctgtagtaggtagagtactgggtacaagtggtccaaactaagataagagactaaaataaaatgctaaatcttaaaagaaactgggtttatgcactaaacgttttgtgccttggtctaatattaacatgatgtatgtgtaaactgacaaaaaaaaaaaaaaaaaaaaaccagtgttgaatcatgctatatttcccatcatcccagattgctaaatgttctttccaagaagtctgaatgaattattatatacatttgctatcatacatgacagttgtgtcattattagagatttcagtaattaaaatgggaaacagaagcctaagttatttaccttatcaaaaccacgttccttggaaccacattattatgatggtttttgtgctcttgtacgttggatgtcttaagctgagtacagtttaggggatcctttctaatgacaggaaggcactgctttcctcaacactgtgatctgacctgtgacaagtctgtactatccactatgtaaatggctcacaagtcaattgcaaacaaactgaatgtacaaatcttagtgctggtgctgaaatctcttcagaatagtcatcatgatttaaaagtttgtttaaaaatttgcaagcatcaagtgtcaatcaaaactgaagatgaaacactaatgaatgttgaattctcatgcttttaggtgtacttcctttttagaattttcagttttctgctatttttaccgtaactatttcgtttaaatttgtttcatttaagtttcctacacgctaacttcgtttgtgcgattgaaataaaattgcagtatatatatgttgcttgtttgtgacacttagataatcttctgaaataatttgttttaaagtaagttatattggatgtgaaaaacaccttttaaagtccaagactttactacttaaaagtttacatgtcacgtcactattctttacagatttcatagaagtcgtgaatactaagtaatgtatacaaaagaaatatgtgatgatgtgtctactttttgtttgaaataactgttgggtgttccctcttcttattttctctctgcccaccttgacacagtaacttcctcttatagtcaagatgatgattaagtgtttaatttttattccattttgttctgcaacacgttcaggtacttaaaactcattcatgcagttagaattatcctttatgtagtttgcatggtaaaggacattgtgtggtaaagggcattattgagtaatgaattttaagtatagcaaaatatgtatagtgtttatacatgatgctgatttcttaaaacctacatataagcagtagtactttttctctattataaagtattaattttgagttccattttataattctgatgtcttcattagaaatacaaaaatacaatccttgtattttttctttgaccagacccaaattttccccttcccccctccattctcctctccacttctcgtggaccgcgtgttcccaatattcattaacatttgcagccattacagagttacagttgtaaaattttcagctgtttttttttttttttttttgctctagcctgtctcatgttcttgcttctcttcatatgtaagtcagtatttttgtctacaaattaaaagtcacttgtcattcaaaaatgagttaagtaacatgataatcttttaaatttacctagctacaacttttatgtctcttgtaaatttatatatactttcagtgccattgtgaagaattggccttttaattctaagtagtattaccctatgaagcacagtgtgcaaaggtatgctacaaggtctctttaattcctgtgtggccattataattttataacaccattaccctttaaattctaccgattataagcagcgtaaaagtaactatataaagcaaacatcgcaaaggaactctgcaggagctcttaattcctttatgtagctatcataaaattcactttcctgaagacatttactctcattcacttccaaactccaaacctttttctggtagcaccacttttgtttttaatagaaagatgagttcatatctgtacatctctccaaagctctaaggaatgagaaaaggatcctagtatattgaaattactgatgtttaatacctctgccttttcactaaaagccatttaatatttttaaagtcaaaacttgacatacaggtatttataaggaatctccatgactctgaaggaatgaaattgatgtaggtagctttggctatgtaaagacatagtagaggacaattacttaaagaagagttttcttttgaggatttgtagatttgactaagcagctgaagtcagtaacccctcaagaaagtccgtttatagaagccaagaactgttggaggtctgtgatgcaggtttttctgttcccaacatcaaaagctgtggattatttggtgtgttcccctttatgttatctctcgataatttttgagacatcaagattttttaaaatatcaatactggaaagatgaaaccttcaaattaaaacctaaaattgattagaaagaaaagtaaaatattaatgcagtaaatttaggatggttacagatactcaccatcaacataaataaatggagttctaggataaattatttgtggaatactaatggtcaagtcacataagagtaaaatcttttggtgaggagacacatttgacaactgctaaagaattaactaaatttgtctttctaaatagttttctttataaagtaacagaaacattgtaaaaggataaatgactgtcataatgacttaggatgttgtaagaatgtctgccacatttattggttatttctgttgaaatctgaaggaatcgatacatctgaaaattgagaaagggaaataggactgtccccgttacagatactctgtgatgcacacaaccttctaaacggaagtgttagtatcatttaaagcacatagtaggccttgagtatttgcagattaacatgcagaaaaaatcaaagatgaagccccaattaagtgtttgaaccaaagaatcacagtcactgagctgcacccccgttctgtgaagcatgttaaatactcataaagagcagagagcagggcccgtagacgcttctggtgtaggacacaggaattctaggcagagggagaaaattaggggccccagttggtggctgagagtaaaaagaatataccatttgagtagtgctgttctttttcctcagtttttaaagacatataattcctagtagttaggacatctaaatagctcggtaaactggtcagaggcgggaggattgcttgaggccagaagttttgagatcagcctgggtaacagggagactcatttctacaaaaaaatttaaaaatttaggccaggcatggtggtgcacacctgtaatcccagctactcaggagactgaagcgggaggatcacctgagcccagggaggacgcggctgcagtgagccgttatcatgccactgtactccagcctgggtgacagagcgagaacctgtctctaaaaaaaaaaaaaaaaaattctaagagaatatagcttttcatagaaattattagaaaagcttacatatttcattagagagcccagtttgttagactacatttattccgtaaaagttctatatacaaatgacaacccatagtttatcatgtaaatctgatttaactgttcccttcaattccaagaaagatttcttcagcagtagatgacaattctaaaagcataaagaaataactaataaaggagatggatgatgttataggttggtttggttgggttttagtaaatagttattcttctaagaaggcttagaaaatcgagaattgaatagttggtactttgaattccataggaaaaagcactcagaagaaaaagtctacattggctagtgtttagattgagagttaattttcccatcaagtccaaaagtttccatccaagtctatagaaactgagagaaaaggttcttggcttacacttaaaatacacattgttgcaaccatataagagagatacattacagaacgcttttaaaaatttggtctcttaagcgcctaacagtccatgctttagtcacatctgtgaaacctcttttctttttttctttttcttttatttttttttttaaagattaaaggcattttaaaaataaatgtttcatggccgggcatggtggctcacgcctgtaatcccagcactttgggaggctgaggtgggcagatcacctgaggtcaggagtttgagaccagcctggccaacatgatgaaaccccatctctactaaaaatacaaaaaaattggctgggcatagtggtgggcacctgtaatcccagctcttcgggaggctgagacagaagagtcgcttgaatccaggaggtggaggttgcagtgagctaagaccgcgccactgtactccagcctgggcgacagagcgagattccatctctaaataaataaatgtttttcaacgtgttttatgtgagaaataccagcttttcattattactaccagttgatctcaggtgtcacttggttggttctgctgaccgaggcactgggcattttaaatatggagtttccctccacccattgatcaagtctgaggtttgtccatccttggtggcaggctagcttaaccatggattcacaaaccccatttgattgtcgtaagtcataaggccaccccagtgccagtggttgggcatcacagtgagtctgaggtgatgaatttgagttagctgtaggctagttccgcaactcagcaatagcccatggatggttggtaaaagacgttgactttgccacttaaatttccaggagaagaatagcttatagtttatctgaggaaagtaattgggaaggcttagatattgagaagaaagccctgttaaaatctaggtagcatttcctttcttctttattactagagggatgggaggttcaggcctgagtcaggactttacaatttggtgtccttcccagaggtactttgggcttgatcattttaagtttcaattgcaaaaaaaaatttttgacggagtgttgctctgtcactcaggttggagtgcagtggtgcgatctcggctcactgcaacttcccccccctgggttcaaagggattttcctgcctcagcctcccaagtagctgggactacaggcgcgtgccaccatgcccgactaatttttgtatttttagtagagatggggtttcaccatgttgcccaggctggtcttgaactcctgagctcaggtgatctgcccgcctcggccttcaattgcagaagtttttgaagggagaatatttgatcctcacataaaatgtccttgtttctgaaagaaaacatggtaaaaattgttattgagtccatgtctttgccaccttgttggacttgatttccctttctctgtgttcctcccgccctcagtctctctcagtctgtccttttttgtgtgtggagttgtgggcaggtcattggactgggactgactttaccagttttcaggctgtggggctagtcagtcattctctctgagccttctacctctaaagttgagttctttttttaaattctttttgttttgtttttattttttccttgccactatacaagcaaggatagataaagctttttattattattgttattattattatttcgagacagtctcgctctgtcatccaggctggagtgcagtggtgtgatttcagctcactgcaacctctgcctcccgggttcaagcgattctcctacctcagcctccttagtagctgggactacaggcatgcgccaccacacccggctaatttttgtatttttagtagagacagggtttcaccgtattggccaggctggtctcgaactcctgacctcaggtgatccacccaccttggcctcccaaagtgttgggattacaggcataagcgaccgtgcccatccccgataaagttgagttctgaatttcctctttcactgtattctcggcagctactggttggtttattctttttttttaatcttttttggtttattcttcttttgatctttgaagagaaggagaaaaaagatctgagtttggctctcccatcttaagtgcagcttttagttgttttatagtcatagacgctattgcactggacagcatgcatcctggatgtaaacaatgcggaaaaatcaatggagtgaccatcttggggtcagtggtgttgcataaagcaccagtggtgtgctgttctgtgtcagtttcctctgcgccacgtgctttcacagtttgaattaccagcatctctgtggtggcttcagtacattctccattgtgcttcaacctggaagcacattctgccgttcagaaagactgattccaatcatgtaatgggaccacacgagatccatgctccaattatatgaatagcagaaggtccatttgactcttgtagttcaagagctgtttctaagtaaacagactttccagagctcgatgaagtgaagaagcccttctttcaattcctgggcagaattcagtggttttcatatcatctgaacctgctgtgctgctgtttattctatcactgtcagccttgaaaggaaaaaaggaataatcttaccctcctgcccttcttattttatatcttccatcttatccatctatatccatgtagtcattccttccgagttccctggttttaatccaaaagactctgtttaacagcaatgtcttggcagaccaggtgccgcttccgtgccatttgagggctctgagtctttgcttcgtcttaggaagataaagataatttggcagaaagtcagagatggaaatagcagtttgggatgataaaagatgggtcctgttttgctgacattcttttactttggttcttggtgcgtgtcctttgggattcatttcttgctagcatgaataggacatgcttttcgttaggtgcttttcttttttggagaacatgaagtgtttctaacaaaactgaatgagctagaaagaattctattttgagacatctgtagttgatgcaaagtatttctgtaatcctcaatgacagtacttacatatttgcatagaattttttttttaatttttgaggaaacctctctggagtctgtatttataggagcatcctgaaagtccctattatgtagctggtgggagcgagagagggacagccacactcgtgctgtgagcagagcacaacttcaggcagagtgaatgccttctgagttctcattggaagctttctgttgctcagcctctggcagatttcagaaccttctacttaagccaggtgtggtggtgcgtgctcctaggcacagcgactcggggggctgaggcagaaggatcacttgagcccaaagttggaggccagcctgggcaacatagcgaggcctgtctccttaaaaaataaataaataaataataaataaataaataaataaaaaccttgtccttgactattgtgctgtctgctgcccctttgtagggatggggttggggtcagaataagcatgtgcatgaatggcggaaagctttggtggtgtttgtttgtttgtttgttttttgagaggtgggggagtcagcagtgaacctttctggttaaagaacaacgtacataatttctattatgagatttagaaggttaaatacttttttttttcaggcctaccaagttgatagaccaaaagtatatagtagaacagcacagtagaaaaaatttaaaagtgaatttcttatggtccaaaaggatggatagtcacagtccataacctttcataatatatgctggaattggaatctcttgtcatcttgctttgctctgaattttagaactagaagtgtgcatgtatgtcaaaagattatgcagagctattttctttgctaacaatgtaaacatttgcaccccatgaatgggactttataatctggaagtgagcctaaggttgcgtatactgaagtcatgttttaaaagttaaggttgacttaaacatatacaaggctgtattttaattgtaactagaaatcatttactatgcatacagaacctcatgtatcttatcatggaatttgtgaattaatgggccttgccgaattcaagggtaagggaaactggtaacaacttgttttaaatcaacatactataagctcctgcttgcttgactcaagttgtttgaaaatctgaattaaacaggatctcattgtcaggaaacatcttctaagcttgacatctacgtttaagaagggaacgtggaagagaaggtgagacatgaaactaaaacagctgggagggtaggatcagactgcacctgatttttggaccaaagtttcatataggaataaataaaaaggaggaccacttgtgagccaacctaggaaggacttgccagaaagtagcagctcctgctgcaaaatacagtgccttcaaaatgattctctgtgtgaattgcatgcaatttcatgtaaccataaagtgtaacctgtatgtgcatgacatgtgtctagaatgtgtaaagttaggattcagcaggaaggggcctggccctgtcactgtggtggatcagtggacctgctgaagtcactggactcatgtgacttaggtttgcagcatcagacccctgtgtttgcattaagtggccacatcgttgaaatcggatcaatctctccctcagctttctttcctactttgcagctttgctggttttaactgcttcattcttctgcttcttggtatccttttttcttttgaaataaaaacatgaaatacttaattc

SEQ ID NO: 619 - DNA, 13172 bp, Homo sapiens
gggttcctcgcggcgatcccgactctcctcccgcggctgcagcagctgccggttgcacacggcctcggcggcggcgcggcgagcgcgggcctgtggagcggcggccgggcgcgcggccccggcgggcacccctcagagggcggccgaggaagctccgggaggaggagcaggaccacgaggaggtgggaggcggcggccgcctggggaccagctccgcgcctcggcctctccgccccctccccagcctttctctcgccctcttctcccacactcccggccggcgcctcggctttgtgcgaggagatggtgtagccccctggccgccgaaggaggagccggacacttgtctcccgtctccgagctgctccccacccctggaggagagacccccccctcggctcggcgccttctgcgtctcccggctggtggggaagcctctgcgccgccggcaccatgagtgaacagagtatctgtcaggcaagagctgctgtgatggtttatgatgatgccaataagaagtgggtgccagctggtggctcaactggattcagcagagttcatatctatcaccatacaggcaacaacacattcagagtggtgggcaggaagattcaggaccatcaggtcgtgataaactgtgccattcctaaagggttgaagtacaatcaagctacacagaccttccaccagtggcgagatgctagacaggtgtatggtctcaactttggcagcaaagaggatgccaatgtcttcgcaagtgccatgatgcatgccttagaagtgttaaattcacaggaaacagggccaacattgcctagacaaaactcacaactacctgctcaagttcaaaatggcccatcccaagaagaattggaaattcaaagaagacaactacaagaacagcaacggcaaaaggagctggagcgggaaaggctggagcgagaaagaatggaaagagaaaggttggagagagagaggttagaaagggaaaggctggagagggagcgactggaacaagaacagctggagagagagagacaagaacgggaacggcaggaacgcctggagcggcaggaacgcctggagcggcaggaacgcctggagcggcaggaacgcctggatcgggagaggcaagaaagacaagaacgagagaggctggagagactggaacgggagaggcaagaaagggagcgacaagagcagttagaaagggaacagctggaatgggagagagagcgcagaatatcaagtgctgctgcccctgcctctgttgagactcctctaaactctgtgctgggagactcttctgcttctgagccaggcttgcaggcagcctctcagccggccgagactccatcccaacagggcattgtcttgggaccacttgcacctccacctcctccaccactcccaccagggcctgcacaggcttcagtagccctccctcctcccccagggccccctccacctcctccactcccatccaccgggcctccaccgccccctcctccccctcctctccctaatcaagtaccccctcctcctccaccacctcctgccccacccctccctgcatctggattctttttggcatccatgtcagaagacaatcgccctttaactggacttgcagctgcaattgccggagcaaaacttaggaaagtgtcacggatggaggatacctctttcccaagtggagggaatgctattggtgtgaactccgcctcatctaaaacagatacaggccgtggaaatggaccccttcctttagggggtagtggtttaatggaagaaatgagtgccctgctggccaggaggagaagaattgctgaaaagggatcaacaatagaaacagaacaaaaagaggacaaaggtgaagattcagagcctgtaacttctaaggcctcttcaacaagtacacctgaaccaacaagaaaaccttgggaaagaacaaatacaatgaatggcagcaagtcacctgttatctccagacgggattctccaaggaaaaatcagattgtttttgacaacaggtcctatgattcattacacagaccaaaatccacacccttatcacagcccagtgccaatggagtccagacggaaggacttgactatgacaggctgaagcaggacattttagatgaaatgagaaaagaattaacaaagctaaaagaagagctcattgatgcaatcaggcaggaactgagcaagtcaaatactgcatagaggaacagactaaggagagataggactttaatctggaggaaaaatatcctacaaacaacaactgttcacaacagcaaacccctacatttatgagctgtaagaagaaaatggagacaaacagaaggagggaaaaaccaacctactctgaaagccttcagacattatgactctggtgataagctctttccctctccgtttgctgcttttttctggcctttacaacagaatggaagagaatcatttaagagttcctgtaacagttatgcagaaaatactaaaacccatcaggcaagatcaccacgcattgaaatattttcatatcaagataaagtcgcacattttccacaatacattgctaaaataaagaggagaaaggcttaggaagtttttttgcagagagtgctggtaaagaattgagcaagtttgctattgtattgtaatgtttctctcaggtttgttcttcctatcatgtttgatattccatgaataattgagatcagccctatgtaagttaagatcataatatgtggaacaaatggaattgtaagtgctttcaaagggtaatatttataagaaagtgtccgaaaaatgtttcttcagcttgagaaattttagaatgataggaagtttctcgagttagccttcatgcaattttgtagattaaaacataaaatttgtccagaacttaaagatttagatgccttcctaaattgttacaatgctttaccaaatctatgacttctacataacacaaaccagtggtcaaatgtaaacactatattgtagatttactgtaggttttcaaccttttttagatttatgcatgtggacatttttataatgtaattacaatcaccacaaggttagcttttttaattgcagacagtaatgcatgtcacactaatatgtagtggccttttcaaggcctagtcccagggaaaacattttgtagagtataggggagtgggaggaaggggaggaataattttttatttaaagttgatttctgcactatctttttctcagttacctgcatgaataaataatgagaaatattttgtgactttaattggtaaatatgttacaaaaccaagtacttaatcttttacatcatgtcttcagctatttgtattttaaccagtaatttcaatggtctgaaacatgattctgagcttcacataatatcttaactgtggaactcaaaagtttgatcactgaatttggcagttattattacctaggtacccccgctgttacacaggtgtttagatacgtgttcctgaatgaagctgcttttgaattttgttatgttgaaatgcaagaaataacaatgatggcagcaattaaggtcacagaaatcattaggtaaaggaaaaccaatgaggagttctgcagttttcttttaataagtaaagtgagacttgggtggtgggaagaaggaaggtgggaagaaggaattagacactctgcctgccactctgcgtgtgtgtgctctcgcgcacgtgctgtctatatggaagccactcccttttctttcctttgaaactggtaaggttaaaataggggagaaatcctacatgttggaatgatagctttttggaaaatttaagaaactctccaggctctccatcttgatttatgcttgagttgttatgtgccatatttgctttgaactctgattatcagaagttttactaaaactttgaaataattcactttcatctgctttctagattttgtacatctcagtccataaagcaaagcttgttgatagtgtagttttctaaacgctgcaaatttgcagcctttaccactacaaagaagtttggatgagggattttttttttctttgtcaaaatagttcctgtttctgtagaaatttcatttttagattaaactgtgatggatgagctatcataattcaagtatacatttcttttttctatcagatattcattgtcatgcagtagtagtaaaaacatcaaagatgcagcaagcttattaagtattattttctaaaagaaataggaggcattttcatctttattattgtacttttggttatgcaaacactttgataatataaacagttatgtcccctataaatctggtcagcaacctcttttgattttgttgggtaagttaaatagtctgtagtaggtagagtactgggtacaagtggtccaaactaagataagagactaaaataaaatgctaaatcttaaaagaaactgggtttatgcactaaacgttttgtgccttggtctaatattaacatgatgtatgtgtaaactgacaaaaaaaaaaaaaaaaaaaaaccagtgttgaatcatgctatatttcccatcatcccagattgctaaatgttctttccaagaagtctgaatgaattattatatacatttgctatcatacatgacagttgtgtcattattagagatttcagtaattaaaatgggaaacagaagcctaagttatttaccttatcaaaaccacgttccttggaaccacattattatgatggtttttgtgctcttgtacgttggatgtcttaagctgagtacagtttaggggatcctttctaatgacaggaaggcactgctttcctcaacactgtgatctgacctgtgacaagtctgtactatccactatgtaaatggctcacaagtcaattgcaaacaaactgaatgtacaaatcttagtgctggtgctgaaatctcttcagaatagtcatcatgatttaaaagtttgtttaaaaatttgcaagcatcaagtgtcaatcaaaactgaagatgaaacactaatgaatgttgaattctcatgcttttaggtgtacttcctttttagaattttcagttttctgctatttttaccgtaactatttcgtttaaatttgtttcatttaagtttcctacacgctaacttcgtttgtgcgattgaaataaaattgcagtatatatatgttgcttgtttgtgacacttagataatcttctgaaataatttgttttaaagtaagttatattggatgtgaaaaacaccttttaaagtccaagactttactacttaaaagtttacatgtcacgtcactattctttacagatttcatagaagtcgtgaatactaagtaatgtatacaaaagaaatatgtgatgatgtgtctactttttgtttgaaataactgttgggtgttccctcttcttattttctctctgcccaccttgacacagtaacttcctcttatagtcaagatgatgattaagtgtttaatttttattccattttgttctgcaacacgttcaggtacttaaaactcattcatgcagttagaattatcctttatgtagtttgcatggtaaaggacattgtgtggtaaagggcattattgagtaatgaattttaagtatagcaaaatatgtatagtgtttatacatgatgctgatttcttaaaacctacatataagcagtagtactttttctctattataaagtattaattttgagttccattttataattctgatgtcttcattagaaatacaaaaatacaatccttgtattttttctttgaccagacccaaattttccccttcccccctccattctcctctccacttctcgtggaccgcgtgttcccaatattcattaacatttgcagccattacagagttacagttgtaaaattttcagctgtttttttttttttttttttgctctagcctgtctcatgttcttgcttctcttcatatgtaagtcagtatttttgtctacaaattaaaagtcacttgtcattcaaaaatgagttaagtaacatgataatcttttaaatttacctagctacaacttttatgtctcttgtaaatttatatatactttcagtgccattgtgaagaattggccttttaattctaagtagtattaccctatgaagcacagtgtgcaaaggtatgctacaaggtctctttaattcctgtgtggccattataattttataacaccattaccctttaaattctaccgattataagcagcgtaaaagtaactatataaagcaaacatcgcaaaggaactctgcaggagctcttaattcctttatgtagctatcataaaattcactttcctgaagacatttactctcattcacttccaaactccaaacctttttctggtagcaccacttttgtttttaatagaaagatgagttcatatctgtacatctctccaaagctctaaggaatgagaaaaggatcctagtatattgaaattactgatgtttaatacctctgccttttcactaaaagccatttaatatttttaaagtcaaaacttgacatacaggtatttataaggaatctccatgactctgaaggaatgaaattgatgtaggtagctttggctatgtaaagacatagtagaggacaattacttaaagaagagttttcttttgaggatttgtagatttgactaagcagctgaagtcagtaacccctcaagaaagtccgtttatagaagccaagaactgttggaggtctgtgatgcaggtttttctgttcccaacatcaaaagctgtggattatttggtgtgttcccctttatgttatctctcgataatttttgagacatcaagattttttaaaatatcaatactggaaagatgaaaccttcaaattaaaacctaaaattgattagaaagaaaagtaaaatattaatgcagtaaatttaggatggttacagatactcaccatcaacataaataaatggagttctaggataaattatttgtggaatactaatggtcaagtcacataagagtaaaatcttttggtgaggagacacatttgacaactgctaaagaattaactaaatttgtctttctaaatagttttctttataaagtaacagaaacattgtaaaaggataaatgactgtcataatgacttaggatgttgtaagaatgtctgccacatttattggttatttctgttgaaatctgaaggaatcgatacatctgaaaattgagaaagggaaataggactgtccccgttacagatactctgtgatgcacacaaccttctaaacggaagtgttagtatcatttaaagcacatagtaggccttgagtatttgcagattaacatgcagaaaaaatcaaagatgaagccccaattaagtgtttgaaccaaagaatcacagtcactgagctgcacccccgttctgtgaagcatgttaaatactcataaagagcagagagcagggcccgtagacgcttctggtgtaggacacaggaattctaggcagagggagaaaattaggggccccagttggtggctgagagtaaaaagaatataccatttgagtagtgctgttctttttcctcagtttttaaagacatataattcctagtagttaggacatctaaatagctcggtaaactggtcagaggcgggaggattgcttgaggccagaagttttgagatcagcctgggtaacagggagactcatttctacaaaaaaatttaaaaatttaggccaggcatggtggtgcacacctgtaatcccagctactcaggagactgaagcgggaggatcacctgagcccagggaggacgcggctgcagtgagccgttatcatgccactgtactccagcctgggtgacagagcgagaacctgtctctaaaaaaaaaaaaaaaaaattctaagagaatatagcttttcatagaaattattagaaaagcttacatatttcattagagagcccagtttgttagactacatttattccgtaaaagttctatatacaaatgacaacccatagtttatcatgtaaatctgatttaactgttcccttcaattccaagaaagatttcttcagcagtagatgacaattctaaaagcataaagaaataactaataaaggagatggatgatgttataggttggtttggttgggttttagtaaatagttattcttctaagaaggcttagaaaatcgagaattgaatagttggtactttgaattccataggaaaaagcactcagaagaaaaagtctacattggctagtgtttagattgagagttaattttcccatcaagtccaaaagtttccatccaagtctatagaaactgagagaaaaggttcttggcttacacttaaaatacacattgttgcaaccatataagagagatacattacagaacgcttttaaaaatttggtctcttaagcgcctaacagtccatgctttagtcacatctgtgaaacctcttttctttttttctttttcttttatttttttttttaaagattaaaggcattttaaaaataaatgtttcatggccgggcatggtggctcacgcctgtaatcccagcactttgggaggctgaggtgggcagatcacctgaggtcaggagtttgagaccagcctggccaacatgatgaaaccccatctctactaaaaatacaaaaaaattggctgggcatagtggtgggcacctgtaatcccagctcttcgggaggctgagacagaagagtcgcttgaatccaggaggtggaggttgcagtgagctaagaccgcgccactgtactccagcctgggcgacagagcgagattccatctctaaataaataaatgtttttcaacgtgttttatgtgagaaataccagcttttcattattactaccagttgatctcaggtgtcacttggttggttctgctgaccgaggcactgggcattttaaatatggagtttccctccacccattgatcaagtctgaggtttgtccatccttggtggcaggctagcttaaccatggattcacaaaccccatttgattgtcgtaagtcataaggccaccccagtgccagtggttgggcatcacagtgagtctgaggtgatgaatttgagttagctgtaggctagttccgcaactcagcaatagcccatggatggttggtaaaagacgttgactttgccacttaaatttccaggagaagaatagcttatagtttatctgaggaaagtaattgggaaggcttagatattgagaagaaagccctgttaaaatctaggtagcatttcctttcttctttattactagagggatgggaggttcaggcctgagtcaggactttacaatttggtgtccttcccagaggtactttgggcttgatcattttaagtttcaattgcaaaaaaaaatttttgacggagtgttgctctgtcactcaggttggagtgcagtggtgcgatctcggctcactgcaacttcccccccctgggttcaaagggattttcctgcctcagcctcccaagtagctgggactacaggcgcgtgccaccatgcccgactaatttttgtatttttagtagagatggggtttcaccatgttgcccaggctggtcttgaactcctgagctcaggtgatctgcccgcctcggccttcaattgcagaagtttttgaagggagaatatttgatcctcacataaaatgtccttgtttctgaaagaaaacatggtaaaaattgttattgagtccatgtctttgccaccttgttggacttgatttccctttctctgtgttcctcccgccctcagtctctctcagtctgtccttttttgtgtgtggagttgtgggcaggtcattggactgggactgactttaccagttttcaggctgtggggctagtcagtcattctctctgagccttctacctctaaagttgagttctttttttaaattctttttgttttgtttttattttttccttgccactatacaagcaaggatagataaagctttttattattattgttattattattatttcgagacagtctcgctctgtcatccaggctggagtgcagtggtgtgatttcagctcactgcaacctctgcctcccgggttcaagcgattctcctacctcagcctccttagtagctgggactacaggcatgcgccaccacacccggctaatttttgtatttttagtagagacagggtttcaccgtattggccaggctggtctcgaactcctgacctcaggtgatccacccaccttggcctcccaaagtgttgggattacaggcataagcgaccgtgcccatccccgataaagttgagttctgaatttcctctttcactgtattctcggcagctactggttggtttattctttttttttaatcttttttggtttattcttcttttgatctttgaagagaaggagaaaaaagatctgagtttggctctcccatcttaagtgcagcttttagttgttttatagtcatagacgctattgcactggacagcatgcatcctggatgtaaacaatgcggaaaaatcaatggagtgaccatcttggggtcagtggtgttgcataaagcaccagtggtgtgctgttctgtgtcagtttcctctgcgccacgtgctttcacagtttgaattaccagcatctctgtggtggcttcagtacattctccattgtgcttcaacctggaagcacattctgccgttcagaaagactgattccaatcatgtaatgggaccacacgagatccatgctccaattatatgaatagcagaaggtccatttgactcttgtagttcaagagctgtttctaagtaaacagactttccagagctcgatgaagtgaagaagcccttctttcaattcctgggcagaattcagtggttttcatatcatctgaacctgctgtgctgctgtttattctatcactgtcagccttgaaaggaaaaaaggaataatcttaccctcctgcccttcttattttatatcttccatcttatccatctatatccatgtagtcattccttccgagttccctggttttaatccaaaagactctgtttaacagcaatgtcttggcagaccaggtgccgcttccgtgccatttgagggctctgagtctttgcttcgtcttaggaagataaagataatttggcagaaagtcagagatggaaatagcagtttgggatgataaaagatgggtcctgttttgctgacattcttttactttggttcttggtgcgtgtcctttgggattcatttcttgctagcatgaataggacatgcttttcgttaggtgcttttcttttttggagaacatgaagtgtttctaacaaaactgaatgagctagaaagaattctattttgagacatctgtagttgatgcaaagtatttctgtaatcctcaatgacagtacttacatatttgcatagaattttttttttaatttttgaggaaacctctctggagtctgtatttataggagcatcctgaaagtccctattatgtagctggtgggagcgagagagggacagccacactcgtgctgtgagcagagcacaacttcaggcagagtgaatgccttctgagttctcattggaagctttctgttgctcagcctctggcagatttcagaaccttctacttaagccaggtgtggtggtgcgtgctcctaggcacagcgactcggggggctgaggcagaaggatcacttgagcccaaagttggaggccagcctgggcaacatagcgaggcctgtctccttaaaaaataaataaataaataataaataaataaataaataaaaaccttgtccttgactattgtgctgtctgctgcccctttgtagggatggggttggggtcagaataagcatgtgcatgaatggcggaaagctttggtggtgtttgtttgtttgtttgttttttgagaggtgggggagtcagcagtgaacctttctggttaaagaacaacgtacataatttctattatgagatttagaaggttaaatacttttttttttcaggcctaccaagttgatagaccaaaagtatatagtagaacagcacagtagaaaaaatttaaaagtgaatttcttatggtccaaaaggatggatagtcacagtccataacctttcataatatatgctggaattggaatctcttgtcatcttgctttgctctgaattttagaactagaagtgtgcatgtatgtcaaaagattatgcagagctattttctttgctaacaatgtaaacatttgcaccccatgaatgggactttataatctggaagtgagcctaaggttgcgtatactgaagtcatgttttaaaagttaaggttgacttaaacatatacaaggctgtattttaattgtaactagaaatcatttactatgcatacagaacctcatgtatcttatcatggaatttgtgaattaatgggccttgccgaattcaagggtaagggaaactggtaacaacttgttttaaatcaacatactataagctcctgcttgcttgactcaagttgtttgaaaatctgaattaaacaggatctcattgtcaggaaacatcttctaagcttgacatctacgtttaagaagggaacgtggaagagaaggtgagacatgaaactaaaacagctgggagggtaggatcagactgcacctgatttttggaccaaagtttcatataggaataaataaaaaggaggaccacttgtgagccaacctaggaaggacttgccagaaagtagcagctcctgctgcaaaatacagtgccttcaaaatgattctctgtgtgaattgcatgcaatttcatgtaaccataaagtgtaacctgtatgtgcatgacatgtgtctagaatgtgtaaagttaggattcagcaggaaggggcctggccctgtcactgtggtggatcagtggacctgctgaagtcactggactcatgtgacttaggtttgcagcatcagacccctgtgtttgcattaagtggccacatcgttgaaatcggatcaatctctccctcagctttctttcctactttgcagctttgctggttttaactgcttcattcttctgcttcttggtatccttttttcttttgaaataaaaacatgaaatacttaattc

SEQ ID NO: 620 - DNA, 7442 bp, Homo sapiens
ccggagcggccggggccacgatggagcgcgacggctgcgcggggggcgggagccgcggcggcgagggcgggcgcgctccccgggagggcccggcggggaacggccgcgatcggggccgcagccacgctgccgaggcgcccggggacccgcaggcggccgcgtccttgctggcccctatggacgtgggggaggagccgctggagaaggcggcgcgcgcccgcactgccaaggaccccaacacctataaagtactctcgctggtattgtcagtatgtgtgttaacaacaatacttggttgtatatttgggttgaaaccaagctgtgccaaagaagttaaaagttgcaaaggtcgctgtttcgagagaacatttgggaactgtcgctgtgatgctgcctgtgttgagcttggaaactgctgtttagattaccaggagacgtgcatagaaccagaacatatatggacttgcaacaaattcaggtgtggtgagaaaaggttgaccagaagcctctgtgcctgttcagatgactgcaaggacaagggcgactgctgcatcaactacagttctgtgtgtcaaggtgagaaaagttgggtagaagaaccatgtgagagcattaatgagccacagtgcccagcagggtttgaaacgcctcctaccctcttattttctttggatggattcagggcagaatatttacacacttggggtggacttcttcctgttattagcaaactaaaaaaatgtggaacatatactaaaaacatgagaccggtatatccaacaaaaactttccccaatcactacagcattgtcaccggattgtatccagaatctcatggcataatcgacaataaaatgtatgatcccaaaatgaatgcttccttttcacttaaaagtaaagagaaatttaatcctgagtggtacaaaggagaaccaatttgggtcacagctaagtatcaaggcctcaagtctggcacatttttctggccaggatcagatgtggaaattaacggaattttcccagacatctataaaatgtataatggttcagtaccatttgaagaaaggattttagctgttcttcagtggctacagcttcctaaagatgaaagaccacacttttacactctgtatttagaagaaccagattcttcaggtcattcatatggaccagtcagcagtgaagtcatcaaagccttgcagagggttgatggtatggttggtatgctgatggatggtctgaaagagctgaacttgcacagatgcctgaacctcatccttatttcagatcatggcatggaacaaggcagttgtaagaaatacatatatctgaataaatatttgggggatgttaaaaatattaaagttatctatggacctgcagctcgattgagaccctctgatgtcccagataaatactattcatttaactatgaaggcattgcccgaaatctttcttgccgggaaccaaaccagcacttcaaaccttacctgaaacatttcttacctaagcgtttgcactttgctaagagtgatagaattgagcccttgacattctatttggaccctcagtggcaacttgcattgaatccctcagaaaggaaatattgtggaagtggatttcatggctctgacaatgtattttcaaatatgcaagccctctttgttggctatggacctggattcaagcatggcattgaggctgacacctttgaaaacattgaagtctataacttaatgtgtgatttactgaatttgacaccggctcctaataacggaactcatggaagtcttaaccaccttctaaagaatcctgtttatacgccaaagcatcccaaagaagtgcaccccctggtacagtgccccttcacaagaaaccccagagataaccttggctgctcatgtaacccttcgattttgccgattgaggattttcaaacacagttcaatctgactgtggcagaagagaagattattaagcatgaaactttaccctatggaagacctagagttctccagaaggaaaacaccatctgtcttctttcccagcaccagtttatgagtggatacagccaagacatcttaatgcccctttggacatcctataccgtggacagaaatgacagtttctctacggaagacttctccaactgtctgtaccaggactttagaattcctcttagtcctgtccataaatgttcattttataaaaataacaccaaagtgagttacgggttcctctccccaccacaactaaataaaaattcaagtggaatatattctgaagctttgcttactacaaatatagtgccaatgtaccagagttttcaagttatatggcgctactttcatgacaccctactgcgaaagtatgctgaagaaagaaatggtgtcaatgtcgtcagtggtcctgtgtttgactttgattatgatggacgttgtgattccttagagaatctgaggcaaaaaagaagagtcatccgtaaccaagaaattttgattccaactcacttctttattgtgctaacaagctgtaaagatacatctcagacgcctttgcactgtgaaaacctagacaccttagctttcattttgcctcacaggactgataacagcgagagctgtgtgcatgggaagcatgactcctcatgggttgaagaattgttaatgttacacagagcacggatcacagatgttgagcacatcactggactcagcttctatcaacaaagaaaagagccagtttcagacattttaaagttgaaaacacatttgccaacctttagccaagaagactgatatgttttttatccccaaacaccatgaatctttttgagagaaccttatattttatatagtcctctagctacactattgcattgttcagaaactgtcgaccagagttagaacggagccctcggtgatgcggacatctcagggaaacttgcgtactcagcacagcagtggagagtgttcctgttgaatcttgcacatatttgaatgtgtaagcattgtatacattgatcaagttcgggggaataaagacagaccacacctaaaactgcctttctgcttctcttaaaggagaagtagctgtgaacattgtctggataccagatatttgaatctttcttactattggtaataaaccttgatggcattgggcaaacagtagacttatagtagggttggggtagcccatgttatgtgactatctttatgagaattttaaagtggttctggatatcttttaacttggagtttcatttcttttcattgtaatcaaaaaaaaaattaacagaagccaaaatacttctgagaccttgtttcaatctttgctgtatatcccctcaaaatccaagttattaatcttatgtgttttctttttaattttttgattggatttctttagatttaatggttcaaatgagttcaactttgagggacgatctttgaatatacttacctattataaaatcttactttgtatttgtatttaaaaaagaaaaatattcctatcctgctcactggtaattaacataggtttaaaatggcttcaaatgtggccctatagacggttaaaattgtaccttatcttggcaaaacttcagagcaccagtcagtgcatgcaaggtgccattttttattgagatgcttagaatgtttctttctgtgcacaagacttaccctaccagcagcagagccattctctgttgagtggttcattttgaagttccacagattgaagagaacatgccaccaatcacctcacatcttcttggtggacatgataaatgacacaatgaacttgatttctttactaccttgactgtagctttttatccctacctgtgaaccttcaaagactgcattaacttttaggctacataggtccaattgaggtataatatcagtacaccaaagatttttatatgtccttcgtgtgaccattcttcaacggcctaagggccagctgcaaagacttttggaaaatacaatttacaactcaaaattatttaataatttaggaagttgctttttttttttttttttttcagtcctgcagtttcctgaagctctgtatatgatatttttttcagcctgcttctctctgttgttcagattaggtaattttattcttctgtctcgaagctcactgattctttattctgtctaatctgttctgctgttgagcccatttattcctgatttttatattttagttattgtatgttttatttctaaaatttccattcagtttttctttatatcttctatttgctgagaatttctgtctctttgctgagactttctacgttttcatttgtttcaagtgcatttatacttgcttgttgaagaatttttatgatggctgctgtaaaatccttatcagataattccaacatctgtcacctcattgtttgcatctactgatggtcttttttccattcggaaacattttcctgtttcttggtgtgtggaatgattttttattgaaacctggatatttttaggtattatgttatgagactatgggtcttatttaaaccttctgctttagccaactttctcagataccaccacagcaggggaattgggagcactgcttcattattaccaggtgtggctaggagtccaggttccccagtcagcctccctttatactgagtaacagggtcccctcattactactgggcaaggtgagaattcagtttcccattaggtctttattgattcttccctggctggaatgtgcagcggcaccttttggtgcaccctgggaatctccactaatgctatgggacagagtgaccaggaagagcttcattacaccaggtgggaatgaaattcccagtagcctacacagccttctccgacaccactctggagttgtattcttccagcacacaaacatacacaatttaactcaaagcatcttagcagagcttaattaaatggatagatgcctgttccctttgctggataccaagaatacaaaagtcagggagttggggcacctctttacagcttggtgagagtgtaagtctggactccccactcagcatttgctggtatgggtggggccatggtgtttttccatggtgtttggttggagtacagccttttttacccttgcttggctacccttttctggtcctttggcaggagagagcaggactctcttagggcttttttttcccctgcatttattgacatttccaggttgctgactttttcagctccaagttggaaatatatgagctgaaaagaaaatgtagggaactcatcacagtgttgttacttgggccccaatgttcctagcctattttctgtctactattcagagtcttgctgtgttttaatataatatccaggatttttatatgcatttagcagaaggatgtctactctgcctttgtagaagtgtctcactgatttttacatatttttccagcacacaaacatacacaatttaactcaaagcatcttagcagagcttaattaaatggatagatgtctgttccctttgctggacgccaagaatacaaaaaagaacaagtgacaattttctctgtcttagggagaagagacagcagaagtgtaaatgatccctaaagagtgatagatgttatcatgaagccacaggaggggtgccaggctgcacaaaagagacactggatgcttcttggtagtagaggcagtggcttcccagccttggggctaaggcttgtagggtgaattggaacttttcagatgagcaaggcaaagaagggaccttctaacattccttggatggaacatttttgacattttcccatttacagctacttatattttctacaagtgtcactgtgaccaacttatgtacacatactttttcttgcttagttataataatctgttcttaaagaaaatgtcagtctctacattctatgctgactgttaaggaaagagcacccacatctgctcctacttagctttttttctgtggttcttacacagtattcctttttttcttttcttgaaagagactcctcctttcttttcttttcttgaaagagttttaaacagataagatggcaaaagtgactgatctctactcccccagtttgaatggtaaatttgaatggtaaattcccatgaacatatatggaaatgtctttatcctactttctccaataaaggctgttcttagcttttcaaatgcaaagtgaaacctttatttatcttgatttcttttttttttttttttttttttttttttttgagatgctctgtcacccaggctggagtgcagtggcaagatcttggctcactgcaagctccgcctcccaggttcacgccattctcctggctcagcctcccgagtaactgggactacaggcacctgccgtcacgcctggctaattttttgtatttttagtagagaatggagtttcaccgtgttagccaggatggtctcgatctcctgaccttgtgatctgcccgcctcggcctcccaaagtgctgggattacaggctcgagccactgcctccagcctatcctgatttctactgtcatgcctcacatcagtccttttttttttttttgagacagagtctcgctctgtggcccaggctagactgcagtggcatgatctcggctcactgcaacctccacctccggggttctagcaattctcctgcctcagcctcctgagtagctgggattataggcgcatgccacacctggctttttgtattttagtggagatggggtttcactgtgttgctcaggctggtcttgatctcctgagctcagacaatccccccgccttggcctcccaaagtgctaggattataggcgagagctgctgtgtgcttcttaagtgaggtaagtaacttccatagaaaatttccatcagttcattcatgaaagaacaaagaacctggcaaaacttaaaaaaacgtttccaagaatcagataaaagaggacaaaccttagggagaagaaggcagctgctcatttccagcaggggaagtagctgcatagagtacaaggactggtaggcctgttggctgttcctgtttaaggagacaagatgggcatggaacagggaccaccccctcctctgggagaagctgttacccccttcacttttcctcctctgtcattacccacaatcactctccttctttgcgctatggtaggtgtttacccatcataggaatgggcatttgaactttgaaactgaatgtggtgattacacttcatgctgaagcttttcacatgagtgctttcataagcattaagtaaaattttataatgactgcagtccaaggacattttccctggtttttggccagtctaaatattgtaagagagagagaagaaaagtgtacggaatataattgtctctaagctaagaaatgtggatgttcaaataaaacatacgtacagaa

SEQ ID NO: 621 - DNA, 2943 bp, Homo sapiens
ggcgcggtcaggtgctccgctccagagttgagcgcaggtgagctcctgcgcgttccgggggcgttcctccagtcaccctcccgccgttacccgcggcgcgcccgagggagtctcctccagaccctccctcccgttgctccaaactaatacggactgaacggatcgctgcgaggattatcttacactgaactgatcaagtactttgaaaatgacttcgaaatttctcttggtgtccttcatacttgctgcactgagtctttcaaccaccttttctctccaaccagaccagcaaaaggttctactagtttcttttgatggattccgttgggattacttatataaagttccaacgccccattttcattatattatgaaatatggtgttcacgtgaagcaagttactaatgtttttattacaaaaacctaccctaaccattatactttggtaactggcctctttgcagagaatcatgggattgttgcaaatgatatgtttgatcctattcggaacaaatctttctccttggatcacatgaatatttatgattccaagttttgggaagaagcgacaccaatatggatcacaaaccagagggcaggacatactagtggtgcagccatgtggcccggaacagatgtaaaaatacataagcgctttcctactcattacatgccttacaatgagtcagtttcatttgaagatagagttgccaaaattattgaatggtttacgtcaaaagagcccataaatcttggtcttctctattgggaagaccctgatgacatgggccaccatttgggacctgacagtccgctcatggggcctgtcatttcagatattgacaagaagttaggatatctcatacaaatgctgaaaaaggcaaagttgtggaacactctgaacctaatcatcacaagtgatcatggaatgacgcagtgctctgaggaaaggttaatagaacttgaccagtacctggataaagaccactataccctgattgatcaatctccagtagcagccatcttgccaaaagaaggtaaatttgatgaagtctatgaagcactaactcacgctcatcctaatcttactgtttacaaaaaagaagacgttccagaaaggtggcattacaaatacaacagtcgaattcaaccaatcatagcagtggctgatgaagggtggcacattttacagaataagtcagatgactttctgttaggcaaccacggttacgataatgcgttagcagatatgcatccaatatttttagcccatggtcctgccttcagaaagaatttctcaaaagaagccatgaactccacagatttgtacccactactatgccacctcctcaatatcaccgccatgccacacaatggatcattctggaatgtccaggatctgctcaattcagcaatgccaagggtggtcccttatacacagagtactatactcctccctggtagtgttaaaccagcagaatatgaccaagaggggtcatacccttatttcataggggtctctcttggcagcattatagtgattgtattttttgtaattttcattaagcatttaattcacagtcaaatacctgccttacaagatatgcatgctgaaatagctcaaccattattacaagcctaatgttactttgaagtggatttgcatattgaagtggagattccataattatgtcagtgtttaaaggtttcaaattctgggaaaccagttccaaacatttgcagaaaccattaagcagttacatatttaggtatacacacacacacacacacacatacacacacacggaccaaaatacttacacctgcaaaggaataaagatgtgagagtatgtctccattgttcactgtagcatagggatagataagatcctgctttatttggacttggcgcagataatgtatatatttagcaactttgcactatgtaaagtaccttatgtattgcactttaaatttctctcctgatgggtactttaatttgaaatgcactttatgcacagttatgtcttataacttgattgaaaatgacaactttttgcacccatgtcacagaatacttgttacgcattgttcaaactgaaggaaatttctaataatcccgaataatgaacgtagaaatctatctccataaattgagagaagaagaaggtgataagtgttgaaaattaaatgtgataacctttgaaccttgaattttggagatgtattcccaacagcagaatgcaactgtgggcatttcttgtcttatttctttccagagaacgtggttttcatttatttttccctcaaaagagagtcaaatactgacagattcgttctaaatatattgtttctgtcataaaattattgtgatttcctgatgagtcatattactgtgattttcataataatgaagacaccatgaatatactttttttctatatagttcagcaatggcctgaatagaagcaaccaggcaccatctcagcaatgttttctcttgtttgtaattatttgctcctttgaaaattaaatcactattaattacattaaaaatcaaattggataaaacaatgttttctttctggtagcgcataataacagagcacaagcatcttttagatttgagcatttgaagattcaaagttgcgaaagagcacaaaccatattaggtaaaatattggccactcgatccttgaaaagaactgtgtggagcctggaaaaaaaaattaggaccacatgtgagatgtttacaagacacccagaacagtggtaaagtgtgcatactagaaaaagcagcaaaataactctttgtggtaacaggtatcaaaacacgggagccgagatgatatagctctgtttcaagaaatatgtgaatacccacctaccaggtgctcagtggaatcaaagatgaatccaagttcacaaatagacttctacttc

SEQ ID NO: 622 - DNA, 539 bp, Homo sapiens
cagcctccagagcaccagcactggcactggcactggcacacgctatggcaaatgaagtgcaagacctgctctcccctcggaaagggggacatcctcctgcagtaaaagctggaggaatgagaatttccaaaaaacaagaaattggcaccttggaaagacataccaaaaaaacaggattcgagaaaacaagtgccattgcaaatgttgccaaaatacagacactggatgccctgaatgacacactggagaagctcaactataaatttccagcaacagtgcacatggcacatcaaaaacccacacctgctctggaaaaggttgttccactgaaaaggatctacattattcagcagcctcgaaaatgttaagcctggatttaaaacacagccgtctggccagctgcctcgaatatctgacagcttagcaaaaagggccaaagctttccataggcgtgctgcacttgcttggtaaattaaacagcttttgtatcttcccctttgactttaggtaataaagcatccaaacttgtaaaaaaaaaa

SEQ ID NO: 623 - DNA, 1281 bp, Homo sapiens
ggaaatcctcatctttcccagtgggaagttagtaagaatataaaacagaaaaattaagaagtagcaatataaacatattactaagataaataaaggcaaatatcaaaagaatcaactaaaagagctaaaagtggtttccttcggagagcaggcaataggagtaaaggtgaggaactggagaactagctgagtgcagaagcgtatgcctgtaatccagcactgaggctgaggcaggaggatctcttgagcctagaagtttgagaccagcctgggcaacaaagcgagaccctgcctctacaaaaaattaaaaaattagctgggcacagtggcatgtgcctgtagtctcagctacttgggaggctgaggtgggagaactgtcagagcccaggaggtcaatgctacagtgagccatgttcatgccactgtattccaccctgggtgacagagaacctgtctcaaacaaaccaacaaaaaattgcagagctactggttttgtaacaagctttgtagaactgtttgacttttctaaacaatgtgcatggataattttaataaaaacaaaaactgtatttgaaagagacagaacacttaccaatatacttttcttgctttttgaatagaggtaacagtctgaacttcttttaatgtttgctttgttttcttttctgctgacttgaatgcctatttatagaaaagagttttaaaaacaatttgttaagaatgtatttaaataacaccaaagtaaataatggggcaagaatttttttaaatgtcacaaaatggcacaatctacacacacacacacaaacacacacacacacaaatacgcatacttgaaagtaatgaagaaatgaaaatatttttgcctgaagtattaaaataatctaaactaaagaattactacatgaaaatatttgcccaagacctacaaagtaataaataccttgtcattttctagatactgagtacctatcatatgcttggttctaggctagatgccattagagatataagagtgaacaagatggacaaagcccccactcccaccccactaggtctagaagagacaactattaatcatataatcctttaaataaatatataatggtgagtgcttctaaagatgctacaggaatataacaaggaaacccgatttacactgggttatggtcaaagaaggtatctctaaggaaatgacatttaagctgaatcctcaacgactaacggggttatcaggcaaagaataggaaaaagggcattacaagcaaaaaaaaaaaaaaa

SEQ ID NO: 624 - DNA, 12887 bp, Homo sapiens
aacaactttcttattatctagcttcataattgcagtaaggaatagctttttttgcttgcagctgagatgactttttcaagggagaaaaagggatttctataacgaagagagggagagagagatgaagagggagggagtaagggagagagggaagaagggagaaagagagagagatttgaatatacattgcttcaaggatgcaaaaaattacaacctggaaaaggcttcgagtaactttaggaaaatgagctgctggactcctcagtcaatctgtcctttctagtcaatgaaaaagacagggtttgaggttccttccgaaacggggccggctaatttagcccctcccacgagcccaagggtctgttatatctctgtttccttgaggacctctctcacggagacggaccacagcaagcagaggctgggggggggaaagacgaggaaagaggaggaaaacaaaagctgctacttatggaagatacaaaggagtctaacgtgaagacattttgctccaagaatatcctagccatccttggcttctcctctatcatagctgtgatagctttgcttgctgtggggttgacccagaacaaagcattgccagaaaacgttaagtatgggattgtgctggatgcgggttcttctcacacaagtttatacatctataagtggccagcagaaaaggagaatgacacaggcgtggtgcatcaagtagaagaatgcagggttaaaggtcctggaatctcaaaatttgttcagaaagtaaatgaaataggcatttacctgactgattgcatggaaagagctagggaagtgattccaaggtcccagcaccaagagacacccgtttacctgggagccacggcaggcatgcggttgctcaggatggaaagtgaagagttggcagacagggttctggatgtggtggagaggagcctcagcaactacccctttgacttccagggtgccaggatcattactggccaagaggaaggtgcctatggctggattactatcaactatctgctgggcaaattcagtcagaaaacaaggtggttcagcatagtcccatatgaaaccaataatcaggaaacctttggagctttggaccttgggggagcctctacacaagtcacttttgtaccccaaaaccagactatcgagtccccagataatgctctgcaatttcgcctctatggcaaggactacaatgtctacacacatagcttcttgtgctatgggaaggatcaggcactctggcagaaactggccaaggacattcaggttgcaagtaatgaaattctcagggacccatgctttcatcctggatataagaaggtagtgaacgtaagtgacctttacaagaccccctgcaccaagagatttgagatgactcttccattccagcagtttgaaatccagggtattggaaactatcaacaatgccatcaaagcatcctggagctcttcaacaccagttactgcccttactcccagtgtgccttcaatgggattttcttgccaccactccagggggattttggggcattttcagctttttactttgtgatgaagtttttaaacttgacatcagagaaagtctctcaggaaaaggtgactgagatgatgaaaaagttctgtgctcagccttgggaggagataaaaacatcttacgctggagtaaaggagaagtacctgagtgaatactgcttttctggtacctacattctctccctccttctgcaaggctatcatttcacagctgattcctgggagcacatccatttcattggcaagatccagggcagcgacgccggctggactttgggctacatgctgaacctgaccaacatgatcccagctgagcaaccattgtccacacctctctcccactccacctatgtcttcctcatggttctattctccctggtccttttcacagtggccatcataggcttgcttatctttcacaagccttcatatttctggaaagatatggtatagcaaaagcagctgaaatatgctggctggagtgaggaaaaaaatcgtccagggagcattttcctccatcgcagtgttcaaggccatccttccctgtctgccagggccagtcttgacgagtgtgaagcttccttggcttttactgaagcctttcttttggaggtattcaatatcctttgcctcaaggacttcggcagatactgtctctttcatgagtttttcccagctacacctttctcctttgtactttgtgcttgtataggttttaaagacctgacacctttcataatctttgctttataaaagaacaatattgactttgtctagaagaactgagagtcttgagtcctgtgataggaggctgagctggctgaaagaagaatctcaggaactggttcagttgtactctttaagaacccctttctctctcctgtttgccatccattaagaaagccatatgatgcctttggagaaggcagacacacattccattcccagcctgctctgtgggtaggagaattttctacagtaggcaaatatgtgctaaagccaaagagttttataaggaaatatatgtgctcatgcagtcaatacagttctcaatcccacccaaagcaggtatgtcaataaatcacatattcctaggtgatacccaaatgctacagagtggaacactcagacctgagatttgcaaaaagcagatgtaaatatatgcattcaaacatcagggcttactatgaggtaggtggtatatacatgtcacaaataaaaatacagttacaactcagggtcacaaaaaatgcatcttccaatgcatatttttattatggtaaaatatacataaatataattcaccattttaacatttaattcatattaaatacgtacaaatcagtgacatttagtacattcacagtgttgtgccaccatcaccactatttagttccagaacatttgcatcatcaatacattgtctagagacaagactatcctgggtaggcagaaaccatagatcttttgtgtttacagctatggaaaccaactgtaccataaagatagttcactgagttttaaagccaagccacatcttatttttccaaggtttaatttagtgagagggcagcattagtgtggagtggcatgcttttgccctatcgtggaatttacacatcagaatgtgcaggatccaagtctgaaagtgttgccacccgtcacacaacatgggctttgtttgcttattccatgaagcagcagctatagaccttaccatggaaacatgaagagaccctgcacccctttccttaaggattgctgcaagagttacctgttgagcaggattgactggtgatgtttcattctgaccttgtcccaagctctccatctctagatctggggactgactgttgagctgatggggaaagaaaagctctcacacaaaccggaagccaaatgtcccctatctcttgaatgatcaagtcacttttgacaacatccaggtgaatataaaaacttaataaagctgtggaaaggaactcttaatcttcttttctgctacttaggttaaattcactagatcttgattaggaatcaaaattcgaattgggacatgttcaaattctttcttgtggtagttgcctatactgtcatcgctgctgttggttgagcatttgtggtgtaccacgctgtgtgctcaagggtattacattcatcttctcatttaatcctcacaacaatctgaagaaggtaggtattacaattcccacttcatagaaacagaaactgaggttcagagaggttaagtcatttgcccaaatggctgagccaaagcctaccatgtacctaacctttattttctttcccgaacataccaggctgtctcctcataacttccaagcatgcacttaaaactccacatgaatacaaggttcatgggacttggtattcatagaaagggaggcagaaagctggtctgttcctgataggcttgtaatttaatatcattctgttcatgtgctttggatggaagcacatctggcatatgatgctaatcagtggttcccatacccctggcttcctaattttaatgtttgctcacagcatagtagattgacatcaaatagtggccgatgatgatgaaaataaaggtcaaataagttgagccaataacagccgcttttttccttctgtctgcgtatacaaagcactgtcatgcacacaatctattctgaccctcacaacaacccataagggtgtaaatagtatttccattttacaaatgaggatcacacaaactactacatggcagagcagatactccaactcatgtcttctggttgaagcctattgctttttcttttctaaacactttccctcagcaagttggaattagacttcacaagtctccttcagagaacacaaatcttttcttattccattcctgtttggttgcctacgtccaatctccccctccccagagatgccaaaaaaaaaatcctttaaggtatttgggagccaaactcaacttgttaaaatctcaaattatggagacaatcagcagacacaacctaaccccaattattttggcaggaaggttggtttagaggcagatccagcaatctgctttgggccactctgggtggggtaggtgaaataagattggtcactgttaactaattttaatattggattggccattggttatcactgattaccattctcccctggattttcacccaggactcaaaacttggttctgctaaccctgttcctttatgaggaaccttttaaagattcctttataaggtgggagttttttttctatgaacctataggggagaaaaaagatcagcagaagtcattacttttttttttttttttttttttttttgagagagagtctcactccattgcccaggctggagtgcagtggtgctatctcggctcactgcaacctccgcctcctgggttcaagcaattctcctgcctcagcctcccgagtagctgggattgcaggtgcccaccaccacacccggctaatttttgtatttttagtaaagacagggtttcaccatgttggccaggctggtctccaactcccaatctcaggtgatcctattgcctcgggctcccaaagtgctgggattacaggagtgagccaccatgcctggccagaagtggttacttctgtagacaaaagaataatgctacttaatcaggctttctgtgtgacaagaaagagaaagaaaataaagaagtttcaattcatccaattcttaataagaaatatgtaaataaaattttttaaaattacacttcattttaatgttgtatcagtcaaggtccctgcaagagatggatggtatggtacactcaaactgggtaacacaggagagttttcagaaagcaactaaatccaaaatactatcaaggaatcaatataaaaattgttaatatttttctcatactaaattttcaaaatattttgtgtctattacatttacagcacatcttaattaggactagctgtgtgttcacctcacatgtggcttgtagctaccatactggacagcacatgtccaaaaaaatacacgtaaagttaaagtttaaaagacacaggaactaagccctcattgtctttcccttgggaggtagtttaaagagctatagatgctgtaacattcttgctattatttattatatatgacattattcctaaaaaagcttttgagatcctaggttgtattcctcaggttttgttgccttcccatgaagatgtgaaggcagggatgcctgttattcagtccaagatgcatgacaagagaccttgggaaagtttcatctggatttaaagattaattcttgatgcttacattccatactcaaaatgtaaatttgaatattaaaataaagatgattttttttttggagctagtcttgctctgttgcccaggctggaatgcagtggcatgatcatggctcactgcagcctcgacctcccaagctcaagcaaggctacaggtgtgcacctaagtagctaggactacaggtgtgcaccaccatgtctagctatttttttttctgtagagacagggttttcctatgttgtccaggctggtctcgaactcctgccctcaagcaatcctcctgccttggcctcccaaagtgttgagattacaggcgtaagccactgcacctggccaagatgaatattttaatagctcacagaacaaagtttgccacataatgataaaattactatgaaaatatattccctttattgtcagtttaaaagatgaactgagtttcacccaaactggtctggcccctctctgattcaaataccaatagttgctctgattcaaattccaactgttagaacatgacagctgctcataactagctttgcttactaaccatgtttctttccatttgtattaggtcctttactttttataacagcctcaaagtttcatgaattgctgcagtaaacattgattttcatgtttgtgagtctgcaagccagctgggcagctctacttcaggtggtaagggtggatcagacctattccatatacctcttgttctccttgtccagtggtttctagggatatgttctcatgatgaaccccgcagaggctcgtgaaagtgagaggaaactaggatgcctcttaaggtcttggtcaggatggggtctcctgtcacttctgtcacaggctattgtaagtcatatgagcaagctcaataaaatataaacaagtcagataaacagtgggaggaatggcaaagtcatatggccaaggccatgagtgattaattttaacacaggaaaaaagtaaagcattaaatgcgattatttaatatacaatgtcttattaactgaaatataaaatgtgtttactgtaaaatataatctgtttatctcaccaaagaaatattatctttaaaaaatgtcattacttctaagacatcatcagtctgcaacttctttccatagccttaatcaggatgctgtggcagctcccacattagcctcgcattctaaactggtagatgtcctaggaaaccatacatctatgtatttttcttattttatacgtttaggacaatgtatagctaattacccaactttttatttgcatacaaatctaatacaactgaacacaatcagttttatcacaggtataatggatttttcaatagtgaggaggtgcctccatgagccttctctttagaaaagtggcattcaagactcttcatttgaagtgaagattgctatgtcttttgcattgctctattttacataaattaagttataaattgacactataatcaactgacaccatgatcagtgatgatgatcaccctcatcagcactagagttgacttgtttttataacccctttgcatgtatgttgaatagcaaagttcatcagagaacatgtattagtcaatggtaagtaagatactctcatctaagaaataacatcacctcttctaatgaagttctaagaagagagggaagaaaaagtcttgggagctagtcagggaatagtgtgtatttgcaattacctaaactgaactctaccattactcctaacccagttcctcctcctgtgttttacatgattaatgccacccctgcctcaatgaaccaagatcagctccatcactgggacctccccattctgcctgtgcaatatttttcttttttatttctccttctaatattactgttattgctccagtaaagagctgtaatatattttacctggactgataccaggaatggtggtgttgcttccaatctgttgctgctagattaatctttgcaaagcacaggcttaatttcattgctgctcaactaaaaccactggtggctttccattgcctacaaaataaagtcaacctccccatcagacattcaaggctttcaatgatccatggccgccagctctctccaggctcatatcccactccactcctctgatgtttcctacactacactacactatactacactacagccaggtagaatgactgttcacccaacaccactcaggttgtcttctcaacttggaatactcttgcaccttcaaagctcatttcaaatgccccttcatttgtgaagccttctccaaatttccaagtcagaatgtctcttccttgtgctaccacaaccctttaactgagcctccattagtgcactgagaccattctgttcagtgtctgggtgaagcttcctggtgaaaaatatgttacctatttctttctgaaaagttggattcagggatattatcacggacctaaggtaatagttctagccaacctccctgtccactgccaggccgactacaaacccttctgttgctggcgagctggtccgcaccactagttctgcttcactctatttatctcttgatgtaaccatcttctttctccaggttttaagaaccagcccaactcctggttccctgatgaagcttttattcccctagccacatggaacttttcctttttggaacatgcctttagtttctgtgtagtttgccatgcagcacttcattgtacacattattaaaacagaattttaaggattagaatgaaccttaaaagatcatgcatctcaaaatttaatgtacatacaaattacccagggattttgttgaaataaaaattatttaattttaattaatataaataattcagtaggtctggggtgaggcctgaggttttacatttccaacaagctgccaggtaaagccaatacatctgtccaggaatcacactttgcgtatcaaaggtctagatgacattatcattccaaagagtttcttttacaggctctcagatcagtgttcatccactacctgactactgtcattcacaggcattctgttccacagcaggccagctaacgtggtatttacaaagctcactcctcttatacaacaatccaagtgtttcttttgtcagttgtctgtgccccaggagatccctctctgccttgccttgccctctgcctttggagaccagcacctcatactcagtgaaggcctggagtgcttaagagggatttcttccagctctcttgccctggtcttcagtgtattagatgtattacctccatgctctcagtagaggcccataggaaagagtaggtaggttatgccagctcacacgcatcctttaaaaatggtttagaagtttagctggtttcttattactcctgtctatggatgtttccttctgtcactctactagggatgaaacagctaatcatgttcaatagttacatttagattggtttttaaaaactatgattgtattagttcgtttccatgctgctgataaagacatatctgagactggaaacaaaaagggtttaattggacttacagttccacatggctggggaggcctcaaaatcaggtgggaggcaaaaggtacttcttacgtggtggcatcaagagcaaaatgaggaagaagcaaaagcagaaactcttcataaacccaccagatcttgtgggacttattatcacgagaatagcacagaaaagactggcctccatgattcaattacctcccactgcgtccctcccacaacatgtgggaattctgggagatacaattcaagttgagatttgggtggggacacagccaaaccatatcattcctccctgggctcctccaaatttcataatcctcacatttcaaaaccaatcattccttcccaacagttccccaaagtcttaactcatttcagcattaacccaaaagtccacagtccaaagtctcatctgagacaaggcaagtcccttccacttacaagcctgtaaaagcaagctagttacctcctagatacaatggggggtacaggtattgggtaaatacagctgttccaaatgagagaaattggccaaaacaaaggggttacagggtccatgcaagtctgaaatccagtggggcagtcaaattttaaagctccataatgatctcctttgactccatgtctcacattcaggtcatgctgatgcaagagataggttcccatggtcttgtgcagctccgcccctgtggctttgcagagtacagcctccctcctggctgctttctcaggctgatgttgagtgtctgtagcttttccaggcacaagatgcaagttggtggttgatctaccattctggggtctaccattctggggtctaccgttctgggactgtggccttcttctcacagctccactaggcagtgccccaacagggactctgtgtgggggctctgccccacatttcccttccacactgccctaggagaggttccccatgagggctctgcccctgcagcaaacttttgcctggacatccaggtgtttccatatatattctgaaatctaggcagaggttcccaaatctcaattcttgacatctctgcacccacaggctcaacatcacatggaagctgccaatgcttggggcctctaccctctgaagccacagcccaagctctatgttggctcctttcagccatggctggagcagctgggacacagggcaccaagtccctaggctgcacacagcacagagaccctgggcccagcccacaaaaccactttttcctcctgggcctctgggcctgtgatgggaggggctgccatgaaggtctctgacatgacctggagacattttccccatggtcttggggattaacattaggctccttgctgcttatgcaaatttctgcagccagcttgaatttctccttaaaaaaaatgggtttttcttttctactgcatcatcaggctgcagattttccacatttatgctcttgtttcccttttaaaacagaatgtttttaacagcacccaagtcaccttttgaatgctttgctgcttagaaatttattccaccagataccctaagtcatctctctcaagctctaagttccacaaatctctagggcaagggtgaaatgctgccagtctccttgctaaaacataacaagggtcacctttacttcagttcccaacaaggtcttcatctccatctgagaccacctcagcctggaccttattgttcatatcactatcagtatttttgtcaatgccattcacagtctctaggaggttccaaactttcctacattttcctatcttcttctgagccctccagattatttcaacacccagttccaaagttgcttccacattttcgggtatcttttcagcaatgccccactctactggtactattagtccattttcatgctgctgataaagacatacctgagactgggaacaaaaagaggtttaattggacttatagttccacctggctggggaggcctcagaatcatggcaggaggtgaaaggcatttcttacacggcagcagcaagagaaaaatgaagaagcagcaaaagcagaaacccctgataaaaccatcagatctcgtgagacttattcactatcacaagaatagcatgggaaagaccagcccccttgattcaattacctccccctgggtcctgtgggaattctggaaggtacaattcaagttgagatttgggtggggacacagccaaaccatatcaatgattttgtactttaaccagctgaatggaagtacaatctcttgctatatgacacaataattatttgcaaaatgagtaaacatatcataaggaaattatttttacaaggtttgaaacctgaaatgcagtctattatcatacataactaaaaatagagcctcaataaacagattcccagttttgaaaatgcaacatttgtactccacattgtcagttttcttaggtatatttataaatactcctataaaaatgtaaagaaacacataatgtagattgctaattttataataacacaagttgattttgacatccaacttattaattatgaaatgacttttggcctagtaacaatgaaaatgggggcaaatacagataaatggtaattcttagaatgaactactcagcaccaattctaagtttttcttgatggtaaatcataatgttccctttctcctcggttctgcaatctataggcataccataattgtaatcaatagcttaaaaatatgtctctctgtcctattctgtatctgtatctcttggatttttacctttgcaatagtcaactgaaccatcttcttggagtactcatgaagatggaagtctacatggagaatacaggatgaatccactctgtctcctgcagtgaagtctgtttgaaggatgtatttggctgtcttctggacaggccattctaataacagaaacaaacaagttattttaaaacttattggaatattcaaatattaaccaaagtagaaaaatataatacacatccatgtgcccatcacagaacttcactgattatcatcatttagccagtcttgaagaagcaagtgctaattacaatcacaaatgaaacaagattcagacttcatgaagagcactgcgctataataaaagaagaaatgagcacatacattcttttactgacagtcaaatggtgaaggtgggcagaatcattatgtgatgcaacatggcaaaagtatacagacagtgcatccagaggaaggcaccttgctgaatgactagaatggaagtaggagacattttgcaggcccccttcatcctgcagggagaaccagaaccacagcagctctatttgcctattcctctttaaattacaaagttaaaatttgggagtagtagaaaatcaattggttatcttatagagtctcctagaatatttcattggcattgagaaggtggaaaatgcaaattatatactttaaaatgtaatttttgcttttcacatatgcttaaagcctaaaacctcttaataaacttcttctgaaatata

SEQ ID NO: 625 - DNA, 8765 bp, Homo sapiens
ggacagcgccgaggaggaagaggttgatggcggcggcggagctccgagagacctcggctgggcaggggccggccgtggcgggccggggactgcgcctctagagccgcgagttctcgggaattcgccgcagcggacgcgctcggcgaatttgtgctcttgtgccctcctccgggcttgggcccaggcccggcccctcgcacttgcccttaccttttctatcgagtccgcatccctctccagccactgcgacccggcgaagagaaaaaggaacttcccccaccccctcgggtgccgtcggagccccccagcccacccctgggtgcggcgcggggaccccgggccgaagaagagatttcctgaggattctggttttcctcgcttgtatctccgaaagaattaaaaatggccgagaatgtggtggaaccggggccgccttcagccaagcggcctaaactctcatctccggccctctcggcgtccgccagcgatggcacagattttggctctctatttgacttggagcacgacttaccagatgaattaatcaactctacagaattgggactaaccaatggtggtgatattaatcagcttcagacaagtcttggcatggtacaagatgcagcttctaaacataaacagctgtcagaattgctgcgatctggtagttcccctaacctcaatatgggagttggtggcccaggtcaagtcatggccagccaggcccaacagagcagtcctggattaggtttgataaatagcatggtcaaaagcccaatgacacaggcaggcttgacttctcccaacatggggatgggcactagtggaccaaatcagggtcctacgcagtcaacaggtatgatgaacagtccagtaaatcagcctgccatgggaatgaacacagggatgaatgcgggcatgaatcctggaatgttggctgcaggcaatggacaagggataatgcctaatcaagtcatgaacggttcaattggagcaggccgagggcgacagaatatgcagtacccaaacccaggcatgggaagtgctggcaacttactgactgagcctcttcagcagggctctccccagatgggaggacaaacaggattgagaggcccccagcctcttaagatgggaatgatgaacaaccccaatccttatggttcaccatatactcagaatcctggacagcagattggagccagtggccttggtctccagattcagacaaaaactgtactatcaaataacttatctccatttgctatggacaaaaaggcagttcctggtggaggaatgcccaacatgggtcaacagccagccccgcaggtccagcagccaggcctggtgactccagttgcccaagggatgggttctggagcacatacagctgatccagagaagcgcaagctcatccagcagcagcttgttctccttttgcatgctcacaagtgccagcgccgggaacaggccaatggggaagtgaggcagtgcaaccttccccactgtcgcacaatgaagaatgtcctaaaccacatgacacactgccagtcaggcaagtcttgccaagtggcacactgtgcatcttctcgacaaatcatttcacactggaagaattgtacaagacatgattgtcctgtgtgtctccccctcaaaaatgctggtgataagagaaatcaacagccaattttgactggagcacccgttggacttggaaatcctagctctctaggggtgggtcaacagtctgcccccaacctaagcactgttagtcagattgatcccagctccatagaaagagcctatgcagctcttggactaccctatcaagtaaatcagatgccgacacaaccccaggtgcaagcaaagaaccagcagaatcagcagcctgggcagtctccccaaggcatgcggcccatgagcaacatgagtgctagtcctatgggagtaaatggaggtgtaggagttcaaacgccgagtcttctttctgactcaatgttgcattcagccataaattctcaaaacccaatgatgagtgaaaatgccagtgtgccctccctgggtcctatgccaacagcagctcaaccatccactactggaattcggaaacagtggcacgaagatattactcaggatcttcgaaatcatcttgttcacaaactcgtccaagccatatttcctacgccggatcctgctgctttaaaagacagacggatggaaaacctagttgcatatgctcggaaagttgaaggggacatgtatgaatctgcaaacaatcgagcggaatactaccaccttctagctgagaaaatctataagatccagaaagaactagaagaaaaacgaaggaccagactacagaagcagaacatgctaccaaatgctgcaggcatggttccagtttccatgaatccagggcctaacatgggacagccgcaaccaggaatgacttctaatggccctctacctgacccaagtatgatccgtggcagtgtgccaaaccagatgatgcctcgaataactccacaatctggtttgaatcaatttggccagatgagcatggcccagccccctattgtaccccggcaaacccctcctcttcagcaccatggacagttggctcaacctggagctctcaacccgcctatgggctatgggcctcgtatgcaacagccttccaaccagggccagttccttcctcagactcagttcccatcacagggaatgaatgtaacaaatatccctttggctccgtccagcggtcaagctccagtgtctcaagcacaaatgtctagttcttcctgcccggtgaactctcctataatgcctccagggtctcaggggagccacattcactgtccccagcttcctcaaccagctcttcatcagaattcaccctcgcctgtacctagtcgtacccccacccctcaccatactcccccaagcataggggctcagcagccaccagcaacaacaattccagcccctgttcctacacctcctgccatgccacctgggccacagtcccaggctctacatccccctccaaggcagacacctacaccaccaacaacacaacttccccaacaagtgcagccttcacttcctgctgcaccttctgctgaccagccccagcagcagcctcgctcacagcagagcacagcagcgtctgttcctaccccaacagcaccgctgcttcctccgcagcctgcaactccactttcccagccagctgtaagcattgaaggacaggtatcaaatcctccatctactagtagcacagaagtgaattctcaggccattgctgagaagcagccttcccaggaagtgaagatggaggccaaaatggaagtggatcaaccagaaccagcagatactcagccggaggatatttcagagtctaaagtggaagactgtaaaatggaatctaccgaaacagaagagagaagcactgagttaaaaactgaaataaaagaggaggaagaccagccaagtacttcagctacccagtcatctccggctccaggacagtcaaagaaaaagattttcaaaccagaagaactacgacaggcactgatgccaactttggaggcactttaccgtcaggatccagaatcccttccctttcgtcaacctgtggaccctcagcttttaggaatccctgattactttgatattgtgaagagccccatggatctttctaccattaagaggaagttagacactggacagtatcaggagccctggcagtatgtcgatgatatttggcttatgttcaataatgcctggttatataaccggaaaacatcacgggtatacaaatactgctccaagctctctgaggtctttgaacaagaaattgacccagtgatgcaaagccttggatactgttgtggcagaaagttggagttctctccacagacactgtgttgctacggcaaacagttgtgcacaatacctcgtgatgccacttattacagttaccagaacaggtatcatttctgtgagaagtgtttcaatgagatccaaggggagagcgtttctttgggggatgacccttcccagcctcaaactacaataaataaagaacaattttccaagagaaaaaatgacacactggatcctgaactgtttgttgaatgtacagagtgcggaagaaagatgcatcagatctgtgtccttcaccatgagatcatctggcctgctggattcgtctgtgatggctgtttaaagaaaagtgcacgaactaggaaagaaaataagttttctgctaaaaggttgccatctaccagacttggcacctttctagagaatcgtgtgaatgactttctgaggcgacagaatcaccctgagtcaggagaggtcactgttagagtagttcatgcttctgacaaaaccgtggaagtaaaaccaggcatgaaagcaaggtttgtggacagtggagagatggcagaatcctttccataccgaaccaaagccctctttgcctttgaagaaattgatggtgttgacctgtgcttctttggcatgcatgttcaagagtatggctctgactgccctccacccaaccagaggagagtatacatatcttacctcgatagtgttcatttcttccgtcctaaatgcttgaggactgcagtctatcatgaaatcctaattggatatttagaatatgtcaagaaattaggttacacaacagggcatatttgggcatgtccaccaagtgagggagatgattatatcttccattgccatcctcctgaccagaagatacccaagcccaagcgactgcaggaatggtacaaaaaaatgcttgacaaggctgtatcagagcgtattgtccatgactacaaggatatttttaaacaagctactgaagatagattaacaagtgcaaaggaattgccttatttcgagggtgatttctggcccaatgttctggaagaaagcattaaggaactggaacaggaggaagaagagagaaaacgagaggaaaacaccagcaatgaaagcacagatgtgaccaagggagacagcaaaaatgctaaaaagaagaataataagaaaaccagcaaaaataagagcagcctgagtaggggcaacaagaagaaacccgggatgcccaatgtatctaacgacctctcacagaaactatatgccaccatggagaagcataaagaggtcttctttgtgatccgcctcattgctggccctgctgccaactccctgcctcccattgttgatcctgatcctctcatcccctgcgatctgatggatggtcgggatgcgtttctcacgctggcaagggacaagcacctggagttctcttcactccgaagagcccagtggtccaccatgtgcatgctggtggagctgcacacgcagagccaggaccgctttgtctacacctgcaatgaatgcaagcaccatgtggagacacgctggcactgtactgtctgtgaggattatgacttgtgtatcacctgctataacactaaaaaccatgaccacaaaatggagaaactaggccttggcttagatgatgagagcaacaaccagcaggctgcagccacccagagcccaggcgattctcgccgcctgagtatccagcgctgcatccagtctctggtccatgcttgccagtgtcggaatgccaattgctcactgccatcctgccagaagatgaagcgggttgtgcagcataccaagggttgcaaacggaaaaccaatggcgggtgccccatctgcaagcagctcattgccctctgctgctaccatgccaagcactgccaggagaacaaatgcccggtgccgttctgcctaaacatcaagcagaagctccggcagcaacagctgcagcaccgactacagcaggcccaaatgcttcgcaggaggatggccagcatgcagcggactggtgtggttgggcagcaacagggcctcccttcccccactcctgccactccaacgacaccaactggccaacagccaaccaccccgcagacgccccagcccacttctcagcctcagcctacccctcccaatagcatgccaccctacttgcccaggactcaagctgctggccctgtgtcccagggtaaggcagcaggccaggtgacccctccaacccctcctcagactgctcagccaccccttccagggcccccacctgcagcagtggaaatggcaatgcagattcagagagcagcggagacgcagcgccagatggcccacgtgcaaatttttcaaaggccaatccaacaccagatgcccccgatgactcccatggcccccatgggtatgaacccacctcccatgaccagaggtcccagtgggcatttggagccagggatgggaccgacagggatgcagcaacagccaccctggagccaaggaggattgcctcagccccagcaactacagtctgggatgccaaggccagccatgatgtcagtggcccagcatggtcaacctttgaacatggctccacaaccaggattgggccaggtaggtatcagcccactcaaaccaggcactgtgtctcaacaagccttacaaaaccttttgcggactctcaggtctcccagctctcccctgcagcagcaacaggtgcttagtatccttcacgccaacccccagctgttggctgcattcatcaagcagcgggctgccaagtatgccaactctaatccacaacccatccctgggcagcctggcatgccccaggggcagccagggctacagccacctaccatgccaggtcagcagggggtccactccaatccagccatgcagaacatgaatccaatgcaggcgggcgttcagagggctggcctgccccagcagcaaccacagcagcaactccagccacccatgggagggatgagcccccaggctcagcagatgaacatgaaccacaacaccatgccttcacaattccgagacatcttgagacgacagcaaatgatgcaacagcagcagcaacagggagcagggccaggaataggccctggaatggccaaccataaccagttccagcaaccccaaggagttggctacccaccacagcagcagcagcggatgcagcatcacatgcaacagatgcaacaaggaaatatgggacagataggccagcttccccaggccttgggagcagaggcaggtgccagtctacaggcctatcagcagcgactccttcagcaacagatggggtcccctgttcagcccaaccccatgagcccccagcagcatatgctcccaaatcaggcccagtccccacacctacaaggccagcagatccctaattctctctccaatcaagtgcgctctccccagcctgtcccttctccacggccacagtcccagcccccccactccagtccttccccaaggatgcagcctcagccttctccacaccacgtttccccacagacaagttccccacatcctggactggtagctgcccaggccaaccccatggaacaagggcattttgccagcccggaccagaattcaatgctttctcagcttgctagcaatccaggcatggcaaacctccatggtgcaagcgccacggacctgggactcagcaccgataactcagacttgaattcaaacctctcacagagtacactagacatacactagagacaccttgtagtattttgggagcaaaaaaattattttctcttaacaagactttttgtactgaaaacaatttttttgaatctttcgtagcctaaaagacaattttccttggaacacataagaactgtgcagtagccgtttgtggtttaaagcaaacatgcaagatgaacctgagggatgatagaatacaaagaatatatttttgttatggctggttaccaccagcctttcttcccctttgtgtgtgtggttcaagtgtgcactgggaggaggctgaggcctgtgaagccaaacaatatgctcctgccttgcacctccaataggttttattattttttttaaattaatgaacatatgtaatattaatagttattatttactggtgcagatggttgacatttttccctattttcctcactttatggaagagttaaaacatttctaaaccagaggacaaaaggggttaatgttactttaaaattacattctatatatatataaatatatataaatatatattaaaataccagttttttttctctgggtgcaaagatgttcattcttttaaaaaatgtttaaaaaaaaaaaaaaactgcctttcttcccctcaagtcaacttttgtgctccagaaaattttctattctgtaagtctgagcgtaaaacttcaagtattaaaataatttgtacatgtagagagaaaaatgactttttcaaaaatatacaggggcagctgccaaattgatgtattatatattgtggtttctgtttcttgaaagaatttttttcgttatttttacatctaacaaagtaaaaaaattaaaaagagggtaagaaacgattccggtgggatgattttaacatgcaaaatgtccctgggggtttcttctttgcttgctttcttcctccttaccctaccccccactcacacacacacacacacacacacacacacacacacacacacactttctataaaacttgaaaatagcaaaaaccctcaactgttgtaaatcatgcaattaaagttgattacttataaatatgaactttggatcactgtatagactgttaaatttgatttcttattacctattgttaaataaactgtgtgagacag

SEQ ID NO: 626 - DNA, 12265 bp, Homo sapiens
cactgagcggctgcggcgcggcttccatcctcccgccctcctgacgcggccggagcgcagccctgaggcccagggagaacgacacattggatacagaagggaggtgatcatgcaccatggcactggcccccagaacgtccagcatcagctgcagaggtccagggcctgccctggcagcgagggtgaggagcagccggcccaccccaacccacccccgtcccccgcagctcccttcgctccctcagcaagcccgtcggcaccccagtctcccagttatcaaatacagcagctgatgaataggagccctgcaaccgggcagaacgtgaacatcaccctgcagagcgtgggccctgtcgtcgggggaaaccagcagatcacactggccccactgccgctccccagccccacctctccaggcttccagttcagcgctcagcctcggcggtttgagcatgggtctccatcatacattcaggtcacgtcccccttgtcccagcaggtccagacccagagtcccacgcagcccagtccggggccggggcaggccttgcagaatgtgcgtgcaggtgcccctggccctgggctgggcctctgcagcagcagccctacagggggcttcgtggatgccagcgtgctggtgaggcagatcagcttgagcccctccagtggtggacactttgtgtttcaggatgggtcagggctcacccagatcgcccagggagcccaggttcagctccagcacccgggtacgcccatcacagtccgagagcggagaccctcccagccccacacacagtcagggggcaccatccaccacctgggaccccagagccctgcagccgcgggtggggccggcctgcagcccctggccagcccaagccacatcaccacggctaacttgccaccgcagatcagcagcatcatccagggccagctggttcagcagcagcaggtgctgcaggggccgccgctgccccggcccctgggcttcgagaggacacccggcgtgctgctccccggggctgggggcgcagcggggtttgggatgacgtccccacccccgcccaccagcccttccaggactgccgtgcccccaggcctttccagcctcccactcacgtctgtggggaacacgggaatgaagaaggttcccaagaagttagaggagattcccccagcctctccggagatggcacagatgaggaagcagtgcctggactatcattaccaggagatgcaggctctgaaggaggtcttcaaggagtatttgattgaactgtttttcttgcaacactttcaagggaacatgatggatttcttagctttcaagaagaaacattatgccccattacaagcatatcttaggcagaatgatttggacattgaagaagaggaggaggaggaggaagaggaggaagaaaaatctgaggttatcaatgacgagcaagccctcgcagggagcctggtagcaggggccggaagcacagtagagacggacctgtttaagaggcagcaggcgatgccctccacaggtatggcagagcagtctaagaggcctcgccttgaagtgggtcaccaaggggtagttttccagcacccaggggcggacgcaggcgttcctctccagcaactaatgccgaccgcacaaggaggaatgccccccacgccgcaggccgcgcagctcgctggacagaggcagagtcagcagcagtatgacccctccacggggcctcccgtgcagaacgctgccagcttgcacaccccactgccgcagctgcccgggaggctgcccccagccggtgttcccactgcagccctctcctctgcgctgcagtttgcacagcagccgcaagtggtagaggcccagacacagctccaaatcccggtgaagactcagcagcccaatgttcccatccctgcaccgcccagcagccaactccccatccctccctcgcagcctgcacagctggccctccacgttcccacacctggaaaggtgcaggtgcaggcctctcagctttcctccctgccacagatggtagcatcgacaaggctccctgtggaccctgccccgccctgcccacggcctctgcccacctcttctacctcgtccctcgcgcctgtgagtggctccggcccaggaccctcccctgctcgatcctctccagtaaatagaccttcctcagccaccaataaggcactatctccagtcacttcccggaccccaggggtggtggcatctgcccccaccaaaccacagagtcctgctcagaatgccacctcgtcccaagacagttctcaggatacgctgacagaacaaataactctggagaaccaggtgcatcagcgcattgcggagctgaggaaagcaggtctgtggtcccagaggcgtctgccaaagctgcaggaggccccacgccccaagtcccactgggactatctgctggaggagatgcagtggatggccacagactttgcccaggagaggaggtggaaggtggctgctgcgaagaagctcgttagaactgtggtgcgccatcacgaggagaagcagctccgtgaagaaagggggaagaaggaagagcagagcagactgaggcggatagccgcctccacggcccgggagatagagtgcttttggtcgaatattgaacaggttgtggaaataaaactacgagtagaattagaagaaaaaaggaagaaggccttaaatttacagaaagtttccaggagagggaaagaattgagacctaaaggatttgacgcattacaggaaagttctctggattcaggaatgtctggaagaaaaagaaaagctagcatatctttgactgatgacgaagtggacgatgaagaggaaacaattgaagaggaggaagcaaatgaaggcgttgtggaccaccaaacagaactttctaatttagccaaggaagctgagctgcccctcctggacctgatgaagctgtacgaaggcgccttcctgccgagttctcagtggccccggccgaagcctgatggggaggacacaagcggagaggaagatgcagatgactgtccaggcgacagggagagtcgcaaggacttggttctcatcgactcgcttttcatcatggatcagttcaaagctgccgagaggatgaatatcgggaagccaaacgccaaggacattgcggacgtcactgcggtggctgaagccatcctgccgaagggcagtgctcgggtcacaacctcggtcaagtttaatgctccatctttgttgtatggggctctcagagattatcagaagattggcctggactggctggccaaactttacaggaagaatctcaatggcatattggcagatgaagctgggctgggtaaaacagtgcagatcattgctttttttgcccacctagcttgtaacgaaggtaattggggcccccatcttgttgttgtgagaagttgtaacatactcaagtgggagcttgaattgaaacgttggtgtcccggactcaaaatcctctcatatattggcagccacagagaactcaaagcaaagagacaggagtgggccgaacccaacagcttccacgtctgcatcacgtcctacactcagttcttccggggcctcaccgccttcacacgagtgcgctggaagtgcctggtcattgatgagatgcagcgcgtgaagggcatgaccgagaggcactgggaagcggttttcaccctgcagagccaacaacgtctgcttctgatcgactcgccgctgcacaataccttcctggagctctggaccatggtgcacttcctggtcccagggatctccaggccctacctgagctcccctctgagggcccccagtgaagagagccaggattactaccataaagtggtcataaggttacacagggtgacacagccatttattttgaggagaactaagagagatgtggaaaagcaactaacaaagaaatatgagcatgttttgaagtgtcgcctttctaaccgacaaaaagccttatacgaggacgttatcctgcaacctggcactcaggaggccttgaagagcgggcactttgtcaacgtcctgagcatccttgtgcggctgcagcgcatctgcaaccaccctgggctcgtcgagccccggcacccaggctcttcctacgtggcggggccactggagtatccgtccgcatctctaatcctgaaggcactggagagagatttctggaaggaagcagatctttctatgtttgatctcatcggcttagaaaataaaatcactcgtcacgaggcagagttgctgtctaagaaaaagataccgcggaaactcatggaggaaatctccacttcagcagccccagcagcccgaccagcagcagcaaagctgaaggccagcaggttgtttcagcctgtgcagtatggccagaagcccgagggtcgcaccgtggctttccccagcactcacccgccccggacggcagcccccaccacggcctctgctgctccacagggcccgcttcgaggacggccgcccatcgccacgttctctgccaatccggaggcaaaagcagcagcagccccgtttcagacctctcaggcttccgccagtgctccacgacaccagcccgcctcggcctccagcacagccgctagcccggcccatcctgcgaaactgcgggcccagaccacagcacaggcctccaccccaggccagcccccgccccagccccaggccccctcgcacgcggccgggcagagcgcgctgcctcagaggctggtgctcccctcgcaggcccaggcccgcttgcccagtggagaggtagtgaaaatagctcagctggcatccatcacaggaccacagagccgcgtggctcagccagagacgccggtgacactgcagttccagggcagcaagttcaccctgtcacacagccagctccggcagctcacagcgggccagccgctgcagctgcaaggcagcgtcctccagatcgtgtccgcccccgggcagccctaccttcgagcccctggccctgtggtgatgcagaccgtgtctcaggcgggcgctgtgcacggcgccctgggaagcaagcccccggccggcggtcccagccctgcacccttgaccccacaagttggcgttccgggccgcgtggcggtgaatgccttggctgtaggagaacccggaacggcctccaaaccagcttctcccattggagggccgacccaggaggaaaagaccagactcttgaaagagcgcctggatcagatttatttagtcaacgagcggcgctgttctcaagctccagtctatggcagagacttgctaaggatttgtgccctgcctagccatggaagggtacagtggcgtgggtccctggatggccgtcgtgggaaggaggccgggccagcgcacagttacacttcatcctcagaaagtccaagtgagctgatgttgacgctttgtcggtgtggagagtctctgcaggatgttattgacagggtggcctttgtgattcctccggtggtggcagcacccccgtccctacgggtgccgcggccgccacccctgtacagccacagaatgaggatcttgaggcagggcctgagagagcacgctgcgccgtacttccagcagctgcggcagaccacggctccacgcctgctgcagttccctgagctgaggctggtgcagttcgactcagggaagttggaagctttagctatcttgcttcagaaattgaaatctgaaggacgtcgggtgctgattttatcacagatgattcttatgttggacattttagagatgttcttgaacttccattacctcacctatgtaagaatcgatgaaaatgccagcagtgagcaacggcaggaactgatgaggagtttcaacagagacaggcggattttttgtgccattctctccactcacagccgtaccacaggtataaaccttgtagaggcggacaccgtcgtgttttatgacaatgacctgaatccagtgatggatgccaaagctcaggagtggtgcgataggatcgggagatgcaaagacatccacatatacaggcttgtgagtggcaattccattgaagagaaattgttgaaaaatggaactaaagatctgatccgagaagtggctgctcagggaaatgactactccatggctttcttaactcagcgaaccatccaggagctgtttgaagtttattctcccatggatgatgctggcttcccggtcaaagctgaggagtttgtggtgctttctcaggaaccttctgtcacggaaaccattgcacccaaaattgcaagacctttcatagaggccctcaagagtattgagtatctggaggaggatgcccagaagtccgcacaggagggggtgctgggaccacacactgatgctctgtcatcagactctgagaacatgccgtgtgatgaagaaccatcccaattagaggagctagctgacttcatggagcagcttacaccaattgaaaaatatgctttaaattacctggaattattccatacttctattgagcaagaaaaggagagaaacagtgaggacgcagtgatgactgcagtgagggcatgggagttctggaacctgaagaccctgcaggagagggaggcccggctgcggctggagcaggaggaggcggagctcctgacctacacgcgagaggatgcctacagcatggagtatgtctacgaagatgtcgatgggcagacagaagtcatgccgctctggaccccacccaccccgccgcaggacgacagcgacatctacctcgactcggtcatgtgtctcatgtatgaagccactcccatcccagaggctaagctgccccctgtgtacgtgaggaaggagcggaagcgacacaaaacagacccctcagctgcaggcaggaagaagaagcagcgtcacggggaggcggtcgtccctcctcggtccctgtttgaccgcgcaacaccaggacttctgaaaattcgcagagagggcaaggagcagaagaagaatattctgctgaagcagcaggtgccattcgccaagcccctgccaacttttgccaaacccacagctgagcctggtcaagacaaccccgagtggctcatcagtgaggactgggcgctgctgcaggctgtaaagcagttactggagctgcctttgaacctcacaatcgtgtcacctgctcacacacctaattgggatcttgtcagtgacgttgttaactcctgtagccgaatctaccgctcttccaaacagtgccggaatcgctacgagaatgtcatcattccacgagaggaggggaagagtaaaaacaaccgtcctctccgtacgagccagatctatgcccaggatgagaatgccacacacacccagctgtacacgagccactttgacttaatgaaaatgactgctggcaagaggagtcccccaatcaaacctctgcttggcatgaatccctttcagaagaaccccaagcacgcgtctgtgttggcagaaagtggaatcaactatgacaagccgctgcctcccatccaggtggcatctctccgtgcagagcgaatcgcaaaagagaaaaaggctctggctgatcagcagaaggcacagcagccggccgtggcccagccacccccgccccagccgcagcccccaccacccccgcagcagccaccgccaccgctgccacaaccacaggcagcgggcagccagccgccagcagggccaccagctgtccagccccaaccccagccacagccccagacccagccacagcctgtgcaggccccagcgaaggcgcagcccgcaatcacgacggggggcagtgcagccgtactggcaggaaccattaaaacatcagttactgggacgagcatgcccactggtgccgtgagtggaaatgtgatcgtgaacaccatcgcaggggtcccagctgccaccttccagtccatcaacaagcgcctggcgtcgccagtggctcctggggccttgactacgccgggaggctctgctcccgcccaggtggtgcacacccagcccccgccacgggcagtcggctccccagccacggcgacccctgacctggtgtccatggcaacgactcagggtgttcgagcggtcacttctgtgacagcctcggccgtggtcactaccaacctgaccccagtgcagaccccggcacggtctttggtgccccaagtgtcccaagccacaggagttcagctccctggaaaaaccatcacacctgcacatttccagcttctcaggcagcagcagcagcagcagcaacaacagcagcagcagcagcagcagcagcagcagcagcagcagcagcaacagcagcagcagcaacagacgacgacgacctctcaggtgcaagttccacagatccagggccaggcccagtccccagcacagatcaaagctgtgggcaagctgacgccggaacacctcatcaaaatgcagaagcagaaactgcagatgcccccgcagcccccaccgccacaggcccagtctgcgcccccgcagccaacagcccaagtgcaagtgcagacctcgcagccgccgcagcagcagagcccccagctcacgacggtcacggccccaaggcctggtgccctgctgacgggcaccaccgtggccaacctccaggtggcccggctcacccgggttcccacttctcagctgcaggcgcaagggcagatgcagacccaggcaccccagccagcccaggtggccttggcgaagcctccggtggtgtccgtcccggcagctgtggtctcctcaccgggagtcaccaccctgcccatgaacgtcgcggggatcagcgtggcgatcggtcagccacagaaggcagcaggacagaccgtggtggcccagcccgtgcacatgcagcagctgctgaagctgaagcagcaggccgtccagcagcagaaggccatccagccccaggctgcacagggcccggcagccgtccagcagaagatcaccgcacagcagatcaccacccctggcgcgcagcagaaggttgcctacgccgcgcagccggcccttaagacccagtttcttaccacacccatctcccaggcccagaaactggccggggcccagcaagtgcagacccagatccaggttgcaaaacttcctcaagttgttcaacagcaaacacccgtggccagcatccagcaagttgcctctgcttcccagcaggcttctccacagactgtggcgctcacgcaggcgacggcggccgggcagcaggtgcagatgatccctgcagtgaccgcgactgcccaggtggttcagcagaaactcattcagcagcaggtggtgaccacggcgtcggccccgctccagactccaggcgctcccaacccagcccaggtgcccgccagctccgacagcccaagccagcagcccaagttacagatgagggtccctgctgtcaggctaaagacacctactaagcctccgtgccagtagtcagggcagcagggctgcctctcatctaaagcaaaactaccttcctcacagaaaacgctttattagtgaaccttgggaccatgtcacgcaagagattcagcactgggaaagatataattgaaacaaaatagtgtaatcattttattaaaatgcatcccacactgcaggacaaatggtccttatggagtgccgcgttctctgtactacgtggctcatggaaaaagtgacaacatggcttcctctaaatcatttcacctttcagtccccacccgcacccgtcccctagagccatagtactgtgttctgaaagccatttagaatttctttgtgagcatgtagtgctttgcacgccacagaagccgtctgccgtgtgtgaggagcatacaatggactttctaaagataaggcgtgggcttccacagtgtctgccagagtttagttctttataccttactgaaaaatgcctcgtggtcttcgcagaggggaaggcctgtctaaagtcaatcatccgagatgggttttccattccaaagaaaggcaatatggttccttccttccctcctaaaatatgacttaacttttaagagaaatgttctgacacccacctaaacacacaaggcacgttcctggcctgtgttcaagggaaatgatcagtcattgcattgttattccaaagagcagccaacagtggcctcccccaggccctaccctgcaatgggattcgctttcatttaatggaaacttctgggactgatgcccaactcagtgcactcaagacgcatctccagttttcgggggaagctggtatttgacatagtgtgttaaacagctcctgagaacctttgggacactctgccatggctggcgtgaggcccagaggaccacgcagaggcaatggtagtacagatgtcacagctgagggtacgatgaggcctgggctcagtgagccaggacgaatgtgacagacaccccttgctgccacagtcagccctttgacgaaggtgggctggtgattctggaagtattggctatagcggtgggcccagtcaactcttccttgtggacttacgacagcagattttctctaggataagcttgtgtggttctgccagtgaagcagagaaccacctgtgctgttgtggaaggcgtgccgttgagggggaaaacgaagcccagtatttgctactgtttttcctttttttactatgacaggaaaataaatgcaattttagtggaattgattgacagtgtctccttactttgaagttttcaccaaagcaaaaaggtccatatccaatagtatcctttgtgctgtggcttgattttggcctattttacattatttggtccaggaaattaggttatattaggttttttgtatactaaaaatcagttatggcacaataaagattttctgtttttaaattgtatttcatctgcttcctccccattctctcactttaagtgacattgaggaaggtattctgtcccacaggtttctgtggacagcgatacagcaggagtcagtgaaatcaactggggagctcacttgagctcttgataagaaatgtggagaaaagtaaaaaccaagctttgaagaaacagaagaaattaatcttttagttagttgaacataccaaagcagaggactggaatctgtttgttctaaccaacccgttctccctggcttggcacgtgccgtgagagcgcagcttgccggagggagggccgctgtgtgcgcctcacatctggctcccagtggaaacttttactcctcctcatccgcagatgtgatagaactgaagtatctaggaattctgcctttgtcatttgttttaatttgtgtgccctgttcattttttttgtctttcccaaatcttggtagtctccttatagttgaagataaaatgttgagtgcacttattttagaatatcctagacataactgtctaagtaaaagcgctctattaatctaaaacactacaagagaatttaacaccatctctcaaatgcttttttggagagcttaatgggattctgaatatttgcaatgtggagtttccgccccgatctcacgtcagtgagggtctcctgtctctcaagtgtgtttcctttggctgttccctaatacaaaacacggacatatttttactcgtagcactcaatttagtaacttctagatgctaccgttgacctgagttaaattcatttagtcgtgtacgtaaaaactctccttttagtgtgttattttcttggccttcccttttaaaggttaaagtttctaacctaagaattaagtacgcgttcaggaagctgttgtctaggccttccccttgtgaatctgggttcattccaatacggcaagtaagagttggaaactttgagaacacagactataaaggcagcagcccgaacactgtcagactctaattggcgaccctgggaaacagttgccctgctattctttaaagaaagacgtttattctgatgataaaaacagttagccagactgtttttaaagcacctggcgggaagcagaaggttggatccaagcccttgttcagatttggtgcctgataagacaggggtttctctttttgtgacctttattattattattttgttaactgttgtaaccagttagctgttgtgttttaagatagaaaggaacaagactaaaattgtaaatactttgtaaacatcagcatttgtacttgaatagtaggattttaaagggcattgatagcataccaaacaaaaggcaaaataaagtgacctttttatata

SEQ ID NO: 627 - DNA, 3783 bp, Homo sapiens
caggccgccggcccgggagagcgcgcggcggcggcggcggcgggacggccccgagcgcgccctcccgcctgcggccactcgcagccggcgctggccgggccggcgcgccccgcaggcggctagagcgcggcctcggcctcggcgcgggcttgccccgggccgtagcccgcgagaggcggcgcgggcggccgagggcactgacggcgtcgcgggacgctcccgggcggcggcgcagcggcagcggcagcggcagcggcagcgcagggggcggaggcagggggcgcccccagccaggatgctgcggttcctgcgccggacctttggccgccgctccatgcagcgctacgcgcggggcgcggcggggcgcggggccgccgggctgggggacgagcgcgatggggggccacgggggggcccggccgccgccgcctcctcctcggcgctgcccgccgcgcccgggggcagcgtgttcccggcgggcggcgggcccctgctcaccggcggcgcggccgtgcacatctccgccgccggcgccgccaaggccaccctctactgccgcgtcttcctgctcgacgggaccgaagtgagcgtggacctgccgaaacatgccaaaggccaggatttgtttgatcagattgtgtaccacttggaccttgtggaaacagattactttggcctccagttcctcgactctgcccaggttgcgcactggctggatcatgccaaacccataaaaaagcagatgaaaattggacctgcttatgctttacactttcgagttaaatactattcttcagaaccaaacaaccttcgtgaggagtttacaaggtacctgtttgttttacaactcaggcatgacattctttctggaaaattgaaatgcccttatgaaacagctgtggaattagctgctctctgtctacaagcggagcttggggagtgcgagcttccagaacacacaccagagcttgtgtctgagtttcggttcattccaaatcagacagaagcaatggaatttgatatcttccagagatggaaagagtgcaggggaaagagccctgcccaggcggaactctcctatctgaataaagcgaagtggctggaaatgtatggggtagacatgcacgttgtcaggggaagagatggctgtgaatattctcttggactgaccccgacaggcatattaatctttgaaggagctaacaaaataggcttattcttttggcctaaaattaccaaaatggattttaaaaagagcaaattgacactcgtggtggtcgaggatgatgatcagggacgtgagcaagagcacacgtttgtgttccggttagacagtgccaggacctgcaaacacctttggaagtgtgcagttgagcaccacgcattcttccgactgcggacgccaggaaacagcaaatccaatagatccgactttatcaggctgggctctcgcttcagattcagtgggcggacagaatatcaagctacacatggctccaggttacgaagaaccagcacctttgagaggaagcctagtaaacgttatccatcccggagacattcaacgttcaaagcaagcaacccagtgatagcagcccagctctgctctaaaacaaatccagaagtccataattaccagcctcaatatcatcctaatatccatcccagccagccccggtggcatcctcactctccaaatgtcaggccatcctttcaggatgacaggtcgcattggaaagcatcggccagtggagatgacagccattttgattatgtccacgaccagaaccagaagaacttaggagggatgcaaagtatgatgtatcgagataaactcatgactgcactttgagagactgaagcatctctcttccattcaccttcatagtttcattgcattccatgaaaagtgtcttggcctcagatggatggatgtgtttggacgagtgtctttaaggagtagtcctgaaaggtgtttttggtgtccatgtaaatatttgaagataaaaccactatagcttgtcataatttactgttgactgcattctcattaaaatgaaggtaaaggctcaggaatcatattgatgttctgattttaaaattggagtcaaagtctatgtttatcattttactatgttcctgatgttctttgttatttaattaatgggagcaaataaaaccagaagagcttgggaagattgctcagcatatattcctgtcgtagaagttgagattgctagggtccagtttccctagtgtggcctggacgagtcatttccccttcattgacctcattttccccatctgaaaagagagggttggactaagtgatctccaaggtcctttccaactctaaaattctgcaatttgttaacatttcattttgtttaggttgaggacatacattcaaactaattttatcacaaggaaaactgcaatacccacttccttgacagagttactcctttcagaagctaaataaagtatataacttattagatgttatatagatacagggggactttgaatttcacatcttaaagcagttgagctactttgaatttaagcagtcgtactaatcttaaattgcatagcatttgttttgatcgaatttgctgctcaagtatgggaataatttttaatgtcttaatgattggtgctgctaacttgcgtgatttcagaagacataattgtgaatacacactgtcagaattgggggattggtttttaccctagacttcactcttaaaaagcaacgtgcaatcaagatcatttatggctcaaatgaaagcatataaggttttcttgaagttgtgccaaagcattctgtagagtaggatgagatggttgttgccctagtctgttggtagaaccagaaatcaatatgttgtcttttaggttaaagcttgtaccaaaatatttatttcccccatttcaagccctgagtcaaacatttttttctcttaataatagacctgaaatgttttattagtatttctgtgaaatcagttgattcttgtgccatttttgtatatgtaattgtaattttgcccatgttaggccctctaaaaaatgtttgacatcctttgagatattttattactaaaatctgatcttttttggctactgcaaaaatctattcagcaagaaggtatcagctgcataccttgcacagtggagctgactacctataaactctccctaaggcatttgtttacaggtgtattccattttagcagacgttctgatgctcagtgtatgtgctgcatacaaataaatgtgttctgaatcttttcatcttattgatagcatttttacaaatgtgtttccaaggaataaagattattcttgctttttttttgactccatcttcattttttttaaattgattcttgttgctatgcagaagtctcatttgtgaatgaccttggtaacagaacagttggcttttggaagtctgaaggtgagcattcagttaggtgggtggagcaagatcatcctagaatgaggctgctcttggcaagagtggatcttataggcacagcagctgatgcctttcttcatctggggcaactctggtgaaggttgtcctgcctgtcacaggtgctgagtagagagaagtggtggcagtgggatttcctcagtaatagtcctgtaaaggtacgtgtttgtcctggctacttgtgctcttcctggcaggaaggcatccaaacccttatctgtgggctcctggaaattgtgtatgccatataataccctctaataaatacctctctgcttaaa

SEQ ID NO: 628 - DNA, 3963 bp, Homo sapiens
attaaggactcggggcaggaggggcagaagttgcgcgcaggccggcgggcgggagcggacaccgaggccggcgtgcaggcgtgcgggtgtgcgggagccgggctcggggggatcggaccgagagcgagaagcgcggcatggagctccaggcagcccgcgcctgcttcgccctgctgtggggctgtgcgctggccgcggccgcggcggcgcagggcaaggaagtggtactgctggactttgctgcagctggaggggagctcggctggctcacacacccgtatggcaaagggtgggacctgatgcagaacatcatgaatgacatgccgatctacatgtactccgtgtgcaacgtgatgtctggcgaccaggacaactggctccgcaccaactgggtgtaccgaggagaggctgagcgtatcttcattgagctcaagtttactgtacgtgactgcaacagcttccctggtggcgccagctcctgcaaggagactttcaacctctactatgccgagtcggacctggactacggcaccaacttccagaagcgcctgttcaccaagattgacaccattgcgcccgatgagatcaccgtcagcagcgacttcgaggcacgccacgtgaagctgaacgtggaggagcgctccgtggggccgctcacccgcaaaggcttctacctggccttccaggatatcggtgcctgtgtggcgctgctctccgtccgtgtctactacaagaagtgccccgagctgctgcagggcctggcccacttccctgagaccatcgccggctctgatgcaccttccctggccactgtggccggcacctgtgtggaccatgccgtggtgccaccggggggtgaagagccccgtatgcactgtgcagtggatggcgagtggctggtgcccattgggcagtgcctgtgccaggcaggctacgagaaggtggaggatgcctgccaggcctgctcgcctggattttttaagtttgaggcatctgagagcccctgcttggagtgccctgagcacacgctgccatcccctgagggtgccacctcctgcgagtgtgaggaaggcttcttccgggcacctcaggacccagcgtcgatgccttgcacacgacccccctccgccccacactacctcacagccgtgggcatgggtgccaaggtggagctgcgctggacgccccctcaggacagcgggggccgcgaggacattgtctacagcgtcacctgcgaacagtgctggcccgagtctggggaatgcgggccgtgtgaggccagtgtgcgctactcggagcctcctcacggactgacccgcaccagtgtgacagtgagcgacctggagccccacatgaactacaccttcaccgtggaggcccgcaatggcgtctcaggcctggtaaccagccgcagcttccgtactgccagtgtcagcatcaaccagacagagccccccaaggtgaggctggagggccgcagcaccacctcgcttagcgtctcctggagcatccccccgccgcagcagagccgagtgtggaagtacgaggtcacttaccgcaagaagggagactccaacagctacaatgtgcgccgcaccgagggtttctccgtgaccctggacgacctggccccagacaccacctacctggtccaggtgcaggcactgacgcaggagggccagggggccggcagcaaggtgcacgaattccagacgctgtccccggagggatctggcaacttggcggtgattggcggcgtggctgtcggtgtggtcctgcttctggtgctggcaggagttggcttctttatccaccgcaggaggaagaaccagcgtgcccgccagtccccggaggacgtttacttctccaagtcagaacaactgaagcccctgaagacatacgtggacccccacacatatgaggaccccaaccaggctgtgttgaagttcactaccgagatccatccatcctgtgtcactcggcagaaggtgatcggagcaggagagtttggggaggtgtacaagggcatgctgaagacatcctcggggaagaaggaggtgccggtggccatcaagacgctgaaagccggctacacagagaagcagcgagtggacttcctcggcgaggccggcatcatgggccagttcagccaccacaacatcatccgcctagagggcgtcatctccaaatacaagcccatgatgatcatcactgagtacatggagaatggggccctggacaagttccttcgggagaaggatggcgagttcagcgtgctgcagctggtgggcatgctgcggggcatcgcagctggcatgaagtacctggccaacatgaactatgtgcaccgtgacctggctgcccgcaacatcctcgtcaacagcaacctggtctgcaaggtgtctgactttggcctgtcccgcgtgctggaggacgaccccgaggccacctacaccaccagtggcggcaagatccccatccgctggaccgccccggaggccatttcctaccggaagttcacctctgccagcgacgtgtggagctttggcattgtcatgtgggaggtgatgacctatggcgagcggccctactgggagttgtccaaccacgaggtgatgaaagccatcaatgatggcttccggctccccacacccatggactgcccctccgccatctaccagctcatgatgcagtgctggcagcaggagcgtgcccgccgccccaagttcgctgacatcgtcagcatcctggacaagctcattcgtgcccctgactccctcaagaccctggctgactttgacccccgcgtgtctatccggctccccagcacgagcggctcggagggggtgcccttccgcacggtgtccgagtggctggagtccatcaagatgcagcagtatacggagcacttcatggcggccggctacactgccatcgagaaggtggtgcagatgaccaacgacgacatcaagaggattggggtgcggctgcccggccaccagaagcgcatcgcctacagcctgctgggactcaaggaccaggtgaacactgtggggatccccatctgagcctcgacagggcctggagccccatcggccaagaatacttgaagaaacagagtggcctccctgctgtgccatgctgggccactggggactttatttatttctagttctttcctccccctgcaacttccgctgaggggtctcggatgacaccctggcctgaactgaggagatgaccagggatgctgggctgggccctctttccctgcgagacgcacacagctgagcacttagcaggcaccgccacgtcccagcatccctggagcaggagccccgccacagccttcggacagacatataggatattcccaagccgaccttccctccgccttctcccacatgaggccatctcaggagatggagggcttggcccagcgccaagtaaacagggtacctcaagccccatttcctcacactaagagggcagactgtgaacttgactgggtgagacccaaagcggtccctgtccctctagtgccttctttagaccctcgggccccatcctcatccctgactggccaaacccttgctttcctgggcctttgcaagatgcttggttgtgttgaggtttttaaatatatattttgtactttgtggagagaatgtgtgtgtgtggcagggggccccgccagggctggggacagagggtgtcaaacattcgtgagctggggactcagggaccggtgctgcaggagtgtcctgcccatgccccagtcggccccatctctcatccttttggataagtttctattctgtcagtgttaaagattttgttttgttggacatttttttcgaatcttaatttattattttttttatatttattgttagaaaatgacttatttctgctctggaataaagttgcagatgattcaaaccgaaaaaaaaaaaaaaaaaa

SEQ ID NO: 629 - DNA, 6364 bp, Homo sapiens
ctgggatagaagcggcaggagcagcgttggcaccggcgaaccatggctgggattttctatttcgccctattttcgtgtctcttcgggatttgcgacgctgtcacaggttccagggtataccccgcgaatgaagttaccttattggattccagatctgttcagggagaacttgggtggatagcaagccctctggaaggagggtgggaggaagtgagtatcatggatgaaaaaaatacaccaatccgaacctaccaagtgtgcaatgtgatggaacccagccagaataactggctacgaactgattggatcacccgagaaggggctcagagggtgtatattgagattaaattcaccttgagggactgcaatagtcttccgggcgtcatggggacttgcaaggagacgtttaacctgtactactatgaatcagacaacgacaaagagcgtttcatcagagagaaccagtttgtcaaaattgacaccattgctgctgatgagagcttcacccaagtggacattggtgacagaatcatgaagctgaacaccgagatccgggatgtagggccattaagcaaaaaggggttttacctggcttttcaggatgtgggggcctgcatcgccctggtatcagtccgtgtgttctataaaaagtgtccactcacagtccgcaatctggcccagtttcctgacaccatcacaggggctgatacgtcttccctggtggaagttcgaggctcctgtgtcaacaactcagaagagaaagatgtgccaaaaatgtactgtggggcagatggtgaatggctggtacccattggcaactgcctatgcaacgctgggcatgaggagcggagcggagaatgccaagcttgcaaaattggatattacaaggctctctccacggatgccacctgtgccaagtgcccaccccacagctactctgtctgggaaggagccacctcgtgcacctgtgaccgaggctttttcagagctgacaacgatgctgcctctatgccctgcacccgtccaccatctgctcccctgaacttgatttcaaatgtcaacgagacatctgtgaacttggaatggagtagccctcagaatacaggtggccgccaggacatttcctataatgtggtatgcaagaaatgtggagctggtgaccccagcaagtgccgaccctgtggaagtggggtccactacaccccacagcagaatggcttgaagaccaccaaagtctccatcactgacctcctagctcataccaattacacctttgaaatctgggctgtgaatggagtgtccaaatataaccctaacccagaccaatcagtttctgtcactgtgaccaccaaccaagcagcaccatcatccattgctttggtccaggctaaagaagtcacaagatacagtgtggcactggcttggctggaaccagatcggcccaatggggtaatcctggaatatgaagtcaagtattatgagaaggatcagaatgagcgaagctatcgtatagttcggacagctgccaggaacacagatatcaaaggcctgaaccctctcacttcctatgttttccacgtgcgagccaggacagcagctggctatggagacttcagtgagcccttggaggttacaaccaacacagtgccttcccggatcattggagatggggctaactccacagtccttctggtctctgtctcgggcagtgtggtgctggtggtaattctcattgcagcttttgtcatcagccggagacggagtaaatacagtaaagccaaacaagaagcggatgaagagaaacatttgaatcaaggtgtaagaacatatgtggacccctttacgtacgaagatcccaaccaagcagtgcgagagtttgccaaagaaattgacgcatcctgcattaagattgaaaaagttataggagttggtgaatttggtgaggtatgcagtgggcgtctcaaagtgcctggcaagagagagatctgtgtggctatcaagactctgaaagctggttatacagacaaacagaggagagacttcctgagtgaggccagcatcatgggacagtttgaccatccgaacatcattcacttggaaggcgtggtcactaaatgtaaaccagtaatgatcataacagagtacatggagaatggctccttggatgcattcctcaggaaaaatgatggcagatttacagtcattcagctggtgggcatgcttcgtggcattgggtctgggatgaagtatttatctgatatgagctatgtgcatcgtgatctggccgcacggaacatcctggtgaacagcaacttggtctgcaaagtgtctgattttggcatgtcccgagtgcttgaggatgatccggaagcagcttacaccaccaggggtggcaagattcctatccggtggactgcgccagaagcaattgcctatcgtaaattcacatcagcaagtgatgtatggagctatggaatcgttatgtgggaagtgatgtcgtacggggagaggccctattgggatatgtccaatcaagatgtgattaaagccattgaggaaggctatcggttaccccctccaatggactgccccattgcgctccaccagctgatgctagactgctggcagaaggagaggagcgacaggcctaaatttgggcagattgtcaacatgttggacaaactcatccgcaaccccaacagcttgaagaggacagggacggagagctccagacctaacactgccttgttggatccaagctcccctgaattctctgctgtggtatcagtgggcgattggctccaggccattaaaatggaccggtataaggataacttcacagctgctggttataccacactagaggctgtggtgcacgtgaaccaggaggacctggcaagaattggtatcacagccatcacgcaccagaataagattttgagcagtgtccaggcaatgcgaacccaaatgcagcagatgcacggcagaatggttcccgtctgagccagtactgaataaactcaaaactcttgaaattagtttacctcatccatgcactttaattgaagaactgcactttttttacttcgtcttcgccctctgaaattaaagaaatgaaaaaaaaaaacaatatctgcagcgttgcttggtgcacagattgctgaaactgtggggcttacagaaatgactgccggtcatttgaatgagacctggaacaaatcgtttctcagaagtacttttctgttcatcaccagtctgtaaaatacatgtacctatagaaatagaacactgcctctgagttttgatgctgtatttgctgccagacactgagcttctgagacatccctgattctctctccatttggaattacaaccattgtattttgtttgtggcataaattacagtcatctgtctttcactggaatgaagaccatgcctaggaacattttttaaggactcagctgtggcttttagggcttggttcataccatgggggaaaaaaaagtcctaggagaaagcgacgtggctcattagtgttgcctcttcagtgctcaagccgcctggtggattcctatgacacagggggcctggaaagaaagggaaagtggatttaaaatatatatatacgtaacccaagccccataacccctaactggacaaatgaggtctgtttctttgggcctgaggctgtgccatataaagtcttattttgggactttacaaacttgtcctaactatcttgtggatagtgggctgtgacaatctggaatagagaacgttcacacttcgctcctttaaagaagcgaccccagatctgcaagggagtagattctgctatcttggcctcacagcccttcctgttgattacaaagcccgtggaagaaaacagaacacaccctcctcagttccgtctaaatgtgtttcttctgcttcaattacaccagttctggggcaaagacactgatgaaacaacacccatacctgaaaagaataaatgtgtgactttcaaatcccctttcgcagtgaaagaaacagcaaacacttaagattcagcatctgttctccagttgcactgaggaatgcactgtctcgcagcaccagctctgcagagcccttgccccagactctttgcggttttatttatatgtatttccatatttcattcctgtgtgtcactgctgcattggtgtggcagcaagtgaccaaatgctacaggtcttactatggacaccaggtcaggtgcaaccacacaaaacaaagccagttccatgagctgcctatgatatgcattgcggaagtaacattttacccagggtgtgccattgcagtgatataaatatatttttttcttagactaaatatgagctgactatctcttttgatgtgtgtacataggtgtgagtgtgtgtgtatgcgtgcctgtctgtgtgcgggtgtgtgtatgtgcatagcctcatgcttaggactacccatgaatgttgtggaatgctacacctggagagttctggttttccaccagtttcaagatgaagaactacatgatacagtggacctggagaccatccccttggaaagacaacccagagatgttcagcatcctgtatctacacgcatcctgtatctacacgtgtattttgtagctgtcacactaaccttaataagaattctacagctttggacagaggcattttcaccttaatggtgaagtaatttaaaatataaatccattcaggtgacaacccatcatcaaaattacaaattttctgattgaactcatctgaatcatcagttccttgatggagagagagaaggagatggaatgtgtctggtaaccccaaatggagtacaagtagcctttgttttcctgcataaatggacttgttgaatgcgaacgaatatatgcaattcatatacttttggagatgaacgtagatatgtgtgtcagctttgagatggtgtgtcctggattaatactttgtctcccaatatcacagaaaaatacatgccagtgactcttgaggttaaggtagttgggatgaaatggcctcaggcaatttcacattccctaattacctggaaagttctacagtaattaatatgcagctaactcctgttgccctcacaagagcatcagccttctagaatcggagctccggagtgtgaagattcagtattgatatgatatgtataccaaactccagccaacttactgccatttttcataatctgagtggctgccttgcttatcctaagctgtggttgcagaaaccgtggccatttatataagctataacatcaaatcagggaaaaatgaggaaaaaaaatagattctgaaccatttattgttgaataagtagagaaaatcatcaataaatatttattacattctgacagggtgtgtggcattgtgttctatgccagagtgacaaagttgattcacccctttttggggaccttaatatattttttaagggatgtgcctatgcattgatgcctgaaaaatatgtataaagaaatgaggttgactcttctgagcagttcatcttttccagaggtaagggtaggaggccaacttcagggtctgggtctgagcccgtgggcaagccctggccgagtgagctccaatgctaactcatgtgccgatctctagagcagtgggaaactaccccgctgcaccaaatcaagtagcttcaccttgtgtatgcaggccccaagttattttttagcaatcttacgagtgaaatgttctggtgggttgaaaaacgttcttattttaaagaaaggttgtgctcgctacactgctggtgtgtgcattctgagacctcttgtattcaatctgtgaaggatatgtgtattaatccgtacacccgtatagcctcaatatttgtctgaagacacttaaattctgacccataaaggaaagttctagaagcaatattttcacttatttaacattctccaaacaacatcaagcattgatacacactgaagagtgcgtttattttttgtatcactctaagtatgttggaatatgcaaggactgtggttcaaattagaatgtataaggcatattataatttagttcatactgaataagaaattaacagaacattgttcggttcacacgttccaaactttgagtgatttctggagttagacatagattttctattttgttttaatttgtcaaggtatttttcttcccttcatgaactttaggtacacataacttatgtcatttatttatggtcttttatacctagtttgtaaaattgtaaaatagcaaactaaatgcaaagagtttgcatttgaaaataataaagtagttgccgtatacaaccctgcaaaaaaaaaaaaaaaaaa

SEQ ID NO: 630 - DNA, 4996 bp, Homo sapiens
gcgccggggtgtgcgcccggccgggtgtgcggagagcgagggagcgcgctccctcccgacgcgcgggccgcagcggccaagcccgagggtgcgtggcgcccccgcccgcccggcccggcccggccatggcccccgcccggggccgcctgccccctgcgctctgggtcgtcacggccgcggcggcggcggccacctgcgtgtccgcggcgcgcggcgaagtgaatttgctggacacgtcgaccatccacggggactggggctggctcacgtatccggctcatgggtgggactccatcaacgaggtggacgagtccttccagcccatccacacgtaccaggtttgcaacgtcatgagccccaaccagaacaactggctgcgcacgagctgggtcccccgagacggcgcccggcgcgtctatgctgagatcaagtttaccctgcgcgactgcaacagcatgcctggtgtgctgggcacctgcaaggagaccttcaacctctactacctggagtcggaccgcgacctgggggccagcacacaagaaagccagttcctcaaaatcgacaccattgcggccgacgagagcttcacaggtgccgaccttggtgtgcggcgtctcaagctcaacacggaggtgcgcagtgtgggtcccctcagcaagcgcggcttctacctggccttccaggacataggtgcctgcctggccatcctctctctccgcatctactataagaagtgccctgccatggtgcgcaatctggctgccttctcggaggcagtgacgggggccgactcgtcctcactggtggaggtgaggggccagtgcgtgcggcactcagaggagcgggacacacccaagatgtactgcagcgcggagggcgagtggctcgtgcccatcggcaaatgcgtgtgcagtgccggctacgaggagcggcgggatgcctgtgtggcctgtgagctgggcttctacaagtcagcccctggggaccagctgtgtgcccgctgccctccccacagccactccgcagctccagccgcccaagcctgccactgtgacctcagctactaccgtgcagccctggacccgccgtcctcagcctgcacccggccaccctcggcaccagtgaacctgatctccagtgtgaatgggacatcagtgactctggagtgggcccctcccctggacccaggtggccgcagtgacatcacctacaatgccgtgtgccgccgctgcccctgggcactgagccgctgcgaggcatgtgggagcggcacccgctttgtgccccagcagacaagcctggtgcaggccagcctgctggtggccaacctgctggcccacatgaactactccttctggatcgaggccgtcaatggcgtgtccgacctgagccccgagccccgccgggccgctgtggtcaacatcaccacgaaccaggcagccccgtcccaggtggtggtgatccgtcaagagcgggcggggcagaccagcgtctcgctgctgtggcaggagcccgagcagccgaacggcatcatcctggagtatgagatcaagtactacgagaaggacaaggagatgcagagctactccaccctcaaggccgtcaccaccagagccaccgtctccggcctcaagccgggcacccgctacgtgttccaggtccgagcccgcacctcagcaggctgtggccgcttcagccaggccatggaggtggagaccgggaaaccccggccccgctatgacaccaggaccattgtctggatctgcctgacgctcatcacgggcctggtggtgcttctgctcctgctcatctgcaagaagaggcactgtggctacagcaaggccttccaggactcggacgaggagaagatgcactatcagaatggacaggcacccccacctgtcttcctgcctctgcatcaccccccgggaaagctcccagagccccagttctatgcggaaccccacacctacgaggagccaggccgggcgggccgcagtttcactcgggagatcgaggcctctaggatccacatcgagaaaatcatcggctctggagactccggggaagtctgctacgggaggctgcgggtgccagggcagcgggatgtgcccgtggccatcaaggccctcaaagccggctacacggagagacagaggcgggacttcctgagcgaggcgtccatcatggggcaattcgaccatcccaacatcatccgcctcgagggtgtcgtcacccgtggccgcctggcaatgattgtgactgagtacatggagaacggctctctggacaccttcctgaggacccacgacgggcagttcaccatcatgcagctggtgggcatgctgagaggagtgggtgccggcatgcgctacctctcagacctgggctatgtccaccgagacctggccgcccgcaacgtcctggttgacagcaacctggtctgcaaggtgtctgacttcgggctctcacgggtgctggaggacgacccggatgctgcctacaccaccacgggcgggaagatccccatccgctggacggccccagaggccatcgccttccgcaccttctcctcggccagcgacgtgtggagcttcggcgtggtcatgtgggaggtgctggcctatggggagcggccctactggaacatgaccaaccgggatgtcatcagctctgtggaggaggggtaccgcctgcccgcacccatgggctgcccccacgccctgcaccagctcatgctcgactgttggcacaaggaccgggcgcagcggcctcgcttctcccagattgtcagtgtcctcgatgcgctcatccgcagccctgagagtctcagggccaccgccacagtcagcaggtgcccaccccctgccttcgtccggagctgctttgacctccgagggggcagcggtggcggtgggggcctcaccgtgggggactggctggactccatccgcatgggccggtaccgagaccacttcgctgcgggcggatactcctctctgggcatggtgctacgcatgaacgcccaggacgtgcgcgccctgggcatcaccctcatgggccaccagaagaagatcctgggcagcattcagaccatgcgggcccagctgaccagcacccaggggccccgccggcacctctgatgtacagccagcagggcccaggcagccaccaagcccaccccaggtcatgccagcggcagaggacgtgaggggctggcagcaggcagggcggccccaggcctctgccctcctctcaggtgctggaggagctgaaggcttcgccacaggacctggagttatcaggggtcaggcgcctgggaaggggcctttggtggccaccctggtgaggacacctgtcccccagggcaggcaccttctcttttccagagcctggggcctccacgtcacagagtccaacagggacatcactcgcctgcctctgtgtgcgtgcatgtgtgtgtgtggtggggggtgttctcacaaggtcatgggatctcatgtgaacagtgtgtgatcaagtgtgtccaccccttcgggtctcagcatggacgtgtgcatgttatgagcgtgtgcttatccgttaaggctggaggcacatgtgggtgatggtggatgatgtgtcatgaatgaggaggtgtgtgagcagggaactcagtgtgacaccgccaggtccagcacccatgggggcgggggagaggctcacccctacgtccccccacacctggaggctggagccaggggccacttctgaactgcaccagcaccaggcccaccctcgtctctgcctgggtgagcccaccccggctgtatctcaggtctgggtcctccctctagccgaggaggccacctgcagcctccacccggctctcaccgctgcttcaacaggaaaacagggttcccggtcagtccggctggccgccttcatggaggcatcatggcagagcacatgagatgtcctcagctgggcttggctgcctggccagggccgggggctcagcagcctcctctagcctctgatgccttccctccacggcccaggtctcctcactcaaagtcccttcgccaacctttcaatgcccagccctgacacctgccctttgtcccccaggcctaggatcagggaccagaggatcctatcttctcagcacccagcccaccccttcctgtagcatatggggagactaaggcctggagagaggggtgatgccccgtcccaggttgcactgcaaccaagtgtcagagtcggggctccggcctcctgccaaggctcttgtccccatacaccatcccacaagggcgctgggggtggaagtgccctggaagcccctcccctctcacactgacctccccccttacggcccaccagggtatgtaaatatctcttttctaccatgtcagaatattttttcctcactcctgacaatgcaaaaatggtcttcaaagcacataaaaagcacccagggtgagaaagccccatcccgggggccgttggcaggcagggaagcaggaaccccaccgtgtgccccctgccagccccagagggagtggcgagcccagctgcccagccctgccccccctccccatagccagcacagctatcccgcggggacaccagcactgagccccctctccctcctgcaataattcggggagtctcagccccatccaggtgccgcggccagctctctacacctctatatattatattactatatagccgagctgttcttccttcctatggaagtcggaaacatggtcagaacacgatctgggggggggatcctgtcttcctccccaccccaccccactcttacccaatttctgggctctggatcctcacagtcatggaggcaccgtgggcctggcacttgcaaaagtgtggcccctcactctagtgtgtggtccctctcagggtcctggggatctgcctctctgtggtctccatcctgactcttgaacttacccacaataagaataaattctgcctcatcttt

SEQ ID NO: 631 - DNA, 1866 bp, Homo sapiens
gcgccggggtgtgcgcccggccgggtgtgcggagagcgagggagcgcgctccctcccgacgcgcgggccgcagcggccaagcccgagggtgcgtggcgcccccgcccgcccggcccggcccggccatggcccccgcccggggccgcctgccccctgcgctctgggtcgtcacggccgcggcggcggcggccacctgcgtgtccgcggcgcgcggcgaagtgaatttgctggacacgtcgaccatccacggggactggggctggctcacgtatccggctcatgggtgggactccatcaacgaggtggacgagtccttccagcccatccacacgtaccaggtttgcaacgtcatgagccccaaccagaacaactggctgcgcacgagctgggtcccccgagacggcgcccggcgcgtctatgctgagatcaagtttaccctgcgcgactgcaacagcatgcctggtgtgctgggcacctgcaaggagaccttcaacctctactacctggagtcggaccgcgacctgggggccagcacacaagaaagccagttcctcaaaatcgacaccattgcggccgacgagagcttcacaggtgccgaccttggtgtgcggcgtctcaagctcaacacggaggtgcgcagtgtgggtcccctcagcaagcgcggcttctacctggccttccaggacataggtgcctgcctggccatcctctctctccgcatctactataagaagtgccctgccatggtgcgcaatctggctgccttctcggaggcagtgacgggggccgactcgtcctcactggtggaggtgaggggccagtgcgtgcggcactcagaggagcgggacacacccaagatgtactgcagcgcggagggcgagtggctcgtgcccatcggcaaatgcgtgtgcagtgccggctacgaggagcggcgggatgcctgtgtggcctgtgagctgggcttctacaagtcagcccctggggaccagctgtgtgcccgctgccctccccacagccactccgcagctccagccgcccaagcctgccactgtgacctcagctactaccgtgcagccctggacccgccgtcctcagcctgcacccggccaccctcggcaccagtgaacctgatctccagtgtgaatgggacatcagtgactctggagtgggcccctcccctggacccaggtggccgcagtgacatcacctacaatgccgtgtgccgccgctgcccctgggcactgagccgctgcgaggcatgtgggagcggcacccgctttgtgccccagcagacaagcctggtgcaggccagcctgctggtggccaacctgctggcccacatgaactactccttctggatcgaggccgtcaatggcgtgtccgacctgagccccgagccccgccgggccgctgtggtcaacatcaccacgaaccaggcaggtaggcggagaaactccgtcccgcagcgtcctggtcccccagcttcccctgcctcagacccatccagggatcagagctctgccggggacgtgctgtgggcctttaggcaagtgcctctctggccctgcgctcctcaccaggacccagagctggaggctcttcattgcctttagaaaagtggaacacattctataagtaagagaaatcccaaaagctcagaggcaggctagtgtggccgtcgaaagcctaggttccagaactttccctctctgtgcctcagtttcctccctggtgcaatgggaataatagtacctgcctgaggtcctctcaggaggcttaaatgagaggaatgaaattgcttagcccagcacctggcccgtggtaaatgctcaataaatgtcattaaaaaataaaaaaaaaaaaaaa

SEQ ID NO: 632 - DNA, 4536 bp, Homo sapiens
gaattccacatgcacacccacacccacgcgcgcccgcaccgccccacgcgcacacactcctgcccacgcccacgcagcgctccgggaagtccggtccgggcgagagcgcgaaaggataccgagaagccacccgcggagagcgcagcggcgccctgggacgcggcgctctcccggcgctgctgcctcggcttggtctcggcctgcgggccgtcggccggcgatggccctggattatctactactgctcctcctggcatccgcagtggctgcgatggaagaaacgttaatggacaccagaacggctactgcagagctgggctggacggccaatcctgcgtccgggtgggaagaagtcagtggctacgatgaaaacctgaacaccatccgcacctaccaggtgtgcaatgtcttcgagcccaaccagaacaattggctgctcaccaccttcatcaaccggcggggggcccatcgcatctacacagagatgcgcttcactgtgagagactgcagcagcctccctaatgtcccaggatcctgcaaggagaccttcaacttgtattactatgagactgactctgtcattgccaccaagaagtcagccttctggtctgaggccccctacctcaaagtagacaccattgctgcagatgagagcttctcccaggtggactttgggggaaggctgatgaaggtaaacacagaagtcaggagctttgggcctcttactcggaatggtttttacctcgcttttcaggattatggagcctgtatgtctcttctttctgtccgtgtcttcttcaaaaagtgtcccagcattgtgcaaaattttgcagtgtttccagagactatgacaggggcagagagcacatctctggtgattgctcggggcacatgcatccccaacgcagaggaagtggacgtgcccatcaaactctactgcaacggggatggggaatggatggtgcctattgggcgatgcacctgcaagcctggctatgagcctgagaacagcgtggcatgcaaggcttgccctgcagggacattcaaggccagccaggaagctgaaggctgctcccactgcccctccaacagccgctcccctgcagaggcgtctcccatctgcacctgtcggaccggttattaccgagcggactttgaccctccagaagtggcatgcactagcgtcccatcaggtccccgcaatgttatctccatcgtcaatgagacgtccatcattctggagtggcaccctccaagggagacaggtgggcgggatgatgtgacctacaacatcatctgcaaaaagtgccgggcagaccgccggagctgctcccgctgtgacgacaatgtggagtttgtgcccaggcagctgggcctgacggagtgccgcgtctccatcagcagcctgtgggcccacaccccctacacctttgacatccaggccatcaatggagtctccagcaagagtcccttccccccacagcacgtctctgtcaacatcaccacaaaccaagccgccccctccaccgttcccatcatgcaccaagtcagtgccactatgaggagcatcaccttgtcatggccacagccggagcagcccaatggcatcatcctggactatgagatccggtactatgagaaggaacacaatgagttcaactcctccatggccaggagtcagaccaacacagcaaggattgatgggctgcggcctggcatggtatatgtggtacaggtgcgtgcccgcactgttgctggctacggcaagttcagtggcaagatgtgcttccagactctgactgacgatgattacaagtcagagctgagggagcagctgcccctgattgctggctcggcagcggccggggtcgtgttcgttgtgtccttggtggccatctctatcgtctgtagcaggaaacgggcttatagcaaagaggctgtgtacagcgataagctccagcattacagcacaggccgaggctccccagggatgaagatctacattgaccccttcacttacgaggatcccaacgaagctgtccgggagtttgccaaggagattgatgtatcttttgtgaaaattgaagaggtcatcggagcaggggagtttggagaagtgtacaaggggcgtttgaaactgccaggcaagagggaaatctacgtggccatcaagaccctgaaggcagggtactcggagaagcagcgtcgggactttctgagtgaggcgagcatcatgggccagttcgaccatcctaacatcattcgcctggagggtgtggtcaccaagagtcggcctgtcatgatcatcacagagttcatggagaatggtgcattggattctttcctcaggcaaaatgacgggcagttcaccgtgatccagcttgtgggtatgctcaggggcatcgctgctggcatgaagtacctggctgagatgaattatgtgcatcgggacctggctgctaggaacattctggtcaacagtaacctggtgtgcaaggtgtccgactttggcctctcccgctacctccaggatgacacctcagatcccacctacaccagctccttgggagggaagatccctgtgagatggacagctccagaggccatcgcctaccgcaagttcacttcagccagcgacgtttggagctatgggatcgtcatgtgggaagtcatgtcatttggagagagaccctattgggatatgtccaaccaagatgtcatcaatgccatcgagcaggactaccggctgcccccacccatggactgtccagctgctctacaccagctcatgctggactgttggcagaaggaccggaacagccggccccggtttgcggagattgtcaacaccctagataagatgatccggaacccggcaagtctcaagactgtggcaaccatcaccgccgtgccttcccagcccctgctcgaccgctccatcccagacttcacggcctttaccaccgtggatgactggctcagcgccatcaaaatggtccagtacagggacagcttcctcactgctggcttcacctccctccagctggtcacccagatgacatcagaagacctcctgagaataggcatcaccttggcaggccatcagaagaagatcctgaacagcattcattctatgagggtccagataagtcagtcaccaacggcaatggcatgagaactcttgtttcttggggaaggagaggagggaaaaggaccagggtcaagggggaccagaggttgaccactgtggaatgtactggagagactggcttctcagctgaggaatgcatttccatcagtgaagaatcaaccggacctgttgctagcaggcaatctccatttctcagtgacagaagcatgtttgagatgccgtgggaaaccaaatatataataataaaaatataaaaaggtgatgttcaacagaagtgaagacaaaacaatatgcatcaggagaacaagagtaaacccagctcccactctcagtgggctgcagttgcccaaccacaggaagaaagggaaggaggtagagggaagaaacagaagcagtgttccattttcttcctcaccaatgacattcttttcttttctcctttcgtactcctccctgagagtcccctcccttctcccacactcgtttccctttgctcatgactcctgtagggaagtttcttcaaacaaaacccagctcctgagtctccagatgttgttctgtcagttgccaaaggactttgctgaccactgcatggggatccaaccaattcaattaatgtcttcatattgaagaagagatgtaccttcaattgaaaacctcgtttttcttttgtttgcattttctgcaaaaaggaaaaagaaaccacaaattggggaaaaaaaaagaagaaaaacctgtttccgtgtgcaaaagcacacatatgtatgtctgtgttataaaatgactgtgcttgttcgtaacagatgcaaacaagaaagaagaactgggaagtctttgtccctaggaaatccaaaggggctggaatatggtgttggtttggctttctggttggcccaatcggcctattggctcaatgggaagagaggagagggagaaaaataaaatgaaaggaaaaaaaaaagtttgcaaattcagacaggaaacaggtgagtggtttgaattggatgcagtgtgggccatcctggaatgatactgactgattaattattcctgataacatctcaagaaaaggagaaggaaagtgtttctggagaatgttctttcacatcactggaatctgcaattcaagaagtgacaagggagaattcttgctttacctatggactggcttaagccgtgtggcatccgaggaatgtttcaaatgtgtctgtgtttctctttacattccttgttgtacctcattgttcaattcacttttgtaaattccacctaacatttaattattttaaatttctccttttaccttaatctccttgctaattttatctgtctaattaaaaagagcagaagcatgtctgggtttacgtaaaaaaaaaaaaaaaaaa

SEQ ID NO: 633 - DNA, 4869 bp, Homo sapiens
cattctgctggctgcgcggtggcggcggctgtgtgtgcgccgcgccttgccgccccccctggccccccgagcccggggcgcgcgctcccgcccgggccgtccgggccccgcggcgccgcggcccgaggccccgggaagcgcagccatggctctgcggaggctgggggccgcgctgctgctgctgccgctgctcgccgccgtggaagaaacgctaatggactccactacagcgactgctgagctgggctggatggtgcatcctccatcagggtgggaagaggtgagtggctacgatgagaacatgaacacgatccgcacgtaccaggtgtgcaacgtgtttgagtcaagccagaacaactggctacggaccaagtttatccggcgccgtggcgcccaccgcatccacgtggagatgaagttttcggtgcgtgactgcagcagcatccccagcgtgcctggctcctgcaaggagaccttcaacctctattactatgaggctgactttgactcggccaccaagaccttccccaactggatggagaatccatgggtgaaggtggataccattgcagccgacgagagcttctcccaggtggacctgggtggccgcgtcatgaaaatcaacaccgaggtgcggagcttcggacctgtgtcccgcagcggcttctacctggccttccaggactatggcggctgcatgtccctcatcgccgtgcgtgtcttctaccgcaagtgcccccgcatcatccagaatggcgccatcttccaggaaaccctgtcgggggctgagagcacatcgctggtggctgcccggggcagctgcatcgccaatgcggaagaggtggatgtacccatcaagctctactgtaacggggacggcgagtggctggtgcccatcgggcgctgcatgtgcaaagcaggcttcgaggccgttgagaatggcaccgtctgccgaggttgtccatctgggactttcaaggccaaccaaggggatgaggcctgtacccactgtcccatcaacagccggaccacttctgaaggggccaccaactgtgtctgccgcaatggctactacagagcagacctggaccccctggacatgccctgcacaaccatcccctccgcgccccaggctgtgatttccagtgtcaatgagacctccctcatgctggagtggacccctccccgcgactccggaggccgagaggacctcgtctacaacatcatctgcaagagctgtggctcgggccggggtgcctgcacccgctgcggggacaatgtacagtacgcaccacgccagctaggcctgaccgagccacgcatttacatcagtgacctgctggcccacacccagtacaccttcgagatccaggctgtgaacggcgttactgaccagagccccttctcgcctcagttcgcctctgtgaacatcaccaccaaccaggcagctccatcggcagtgtccatcatgcatcaggtgagccgcaccgtggacagcattaccctgtcgtggtcccagccggaccagcccaatggcgtgatcctggactatgagctgcagtactatgagaaggagctcagtgagtacaacgccacagccataaaaagccccaccaacacggtcaccgtgcagggcctcaaagccggcgccatctatgtcttccaggtgcgggcacgcaccgtggcaggctacgggcgctacagcggcaagatgtacttccagaccatgacagaagccgagtaccagacaagcatccaggagaagttgccactcatcatcggctcctcggccgctggcctggtcttcctcattgctgtggttgtcatcgccatcgtgtgtaacagaagacgggggtttgagcgtgctgactcggagtacacggacaagctgcaacactacaccagtggccacatgaccccaggcatgaagatctacatcgatcctttcacctacgaggaccccaacgaggcagtgcgggagtttgccaaggaaattgacatctcctgtgtcaaaattgagcaggtgatcggagcaggggagtttggcgaggtctgcagtggccacctgaagctgccaggcaagagagagatctttgtggccatcaagacgctcaagtcgggctacacggagaagcagcgccgggacttcctgagcgaagcctccatcatgggccagttcgaccatcccaacgtcatccacctggagggtgtcgtgaccaagagcacacctgtgatgatcatcaccgagttcatggagaatggctccctggactcctttctccggcaaaacgatgggcagttcacagtcatccagctggtgggcatgcttcggggcatcgcagctggcatgaagtacctggcagacatgaactatgttcaccgtgacctggctgcccgcaacatcctcgtcaacagcaacctggtctgcaaggtgtcggactttgggctctcacgctttctagaggacgatacctcagaccccacctacaccagtgccctgggcggaaagatccccatccgctggacagccccggaagccatccagtaccggaagttcacctcggccagtgatgtgtggagctacggcattgtcatgtgggaggtgatgtcctatggggagcggccctactgggacatgaccaaccaggatgtaatcaatgccattgagcaggactatcggctgccaccgcccatggactgcccgagcgccctgcaccaactcatgctggactgttggcagaaggaccgcaaccaccggcccaagttcggccaaattgtcaacacgctagacaagatgatccgcaatcccaacagcctcaaagccatggcgcccctctcctctggcatcaacctgccgctgctggaccgcacgatccccgactacaccagctttaacacggtggacgagtggctggaggccatcaagatggggcagtacaaggagagcttcgccaatgccggcttcacctcctttgacgtcgtgtctcagatgatgatggaggacattctccgggttggggtcactttggctggccaccagaaaaaaatcctgaacagtatccaggtgatgcgggcgcagatgaaccagattcagtctgtggaggtttgacattcacctgcctcggctcacctcttcctccaagccccgccccctctgccccacgtgccggccctcctggtgctctatccactgcagggccagccactcgccaggaggccacgggccacgggaagaaccaagcggtgccagccacgagacgtcaccaagaaaacatgcaactcaaacgacggaaaaaaaaagggaatgggaaaaaagaaaacagatcctgggagggggcgggaaatacaaggaatattttttaaagaggattctcataaggaaagcaatgactgttcttgcgggggataaaaaagggcttgggagattcatgcgatgtgtccaatcggagacaaaagcagtttctctccaactccctctgggaaggtgacctggccagagccaagaaacactttcagaaaaacaaatgtgaaggggagagacaggggccgcccttggctcctgtccctgctgctcctctaggcctcactcaacaaccaagcgcctggaggacgggacagatggacagacagccaccctgagaacccctctgggaaaatctattcctgccaccactgggcaaacagaagaatttttctgtctttggagagtattttagaaactccaatgaaagacactgtttctcctgttggctcacagggctgaaaggggcttttgtcctcctgggtcagggagaacgcggggaccccagaaaggtcagccttcctgaggatgggcaacccccaggtctgcagctccaggtacatatcacgcgcacagcctggcagcctggccctcctggtgcccactcccgccagcccctgcctcgaggactgatactgcagtgactgccgtcagctccgactgccgctgagaagggttgatcctgcatctgggtttgtttacagcaattcctggactcgggggtattttggtcacagggtggttttggtttagggggtttgtttgttgggttgttttttgttttttggttttttttaatgacaatgaagtgacactttgacatttcctaccttttgaggacttgatccttctccaggaagaaggtgctttctgcttactgacttaggcaatacaccaagggcgagattttatatgcacatttctggatttttttatacggttttcattgacactcttccctcctcccacctgccaccaggcctcaccaaagcccactgccatggggccatctgggccattcagagactggagtgagatttgggtgtggagggggaggcgccaaggtggaggagcttcccactccaggactgttgatgaaagggacagattgaggaggaagtgggctctgaggctgcagggctggaagtccttgcccacttcccactctcctgccccaatctatctagtacttcccaggcaaataggcccctttgaggctcctgagtgccctcagatggtcaaaacccagttttccctctgggagcctaaaccaggctgcatcggaggccaggacccggatcattcactgtgataccctgccctccagagggtgcgctcagagacacgggcaagcatgcctcttcccttccctggagagaaagtgtgtgatttctctcccacctccttccccccaccagacctttgctgggcctaaaggtcttggccatggggacgccctcagtctagggatctggccacagactccctcctgtgaaccaacacagacacccaagcagagcaatcagttagtgaattgaatggaaataaacgctttagttataatatga

SEQ ID NO: 634 - DNA, 4866 bp, Homo sapiens
cattctgctggctgcgcggtggcggcggctgtgtgtgcgccgcgccttgccgccccccctggccccccgagcccggggcgcgcgctcccgcccgggccgtccgggccccgcggcgccgcggcccgaggccccgggaagcgcagccatggctctgcggaggctgggggccgcgctgctgctgctgccgctgctcgccgccgtggaagaaacgctaatggactccactacagcgactgctgagctgggctggatggtgcatcctccatcagggtgggaagaggtgagtggctacgatgagaacatgaacacgatccgcacgtaccaggtgtgcaacgtgtttgagtcaagccagaacaactggctacggaccaagtttatccggcgccgtggcgcccaccgcatccacgtggagatgaagttttcggtgcgtgactgcagcagcatccccagcgtgcctggctcctgcaaggagaccttcaacctctattactatgaggctgactttgactcggccaccaagaccttccccaactggatggagaatccatgggtgaaggtggataccattgcagccgacgagagcttctcccaggtggacctgggtggccgcgtcatgaaaatcaacaccgaggtgcggagcttcggacctgtgtcccgcagcggcttctacctggccttccaggactatggcggctgcatgtccctcatcgccgtgcgtgtcttctaccgcaagtgcccccgcatcatccagaatggcgccatcttccaggaaaccctgtcgggggctgagagcacatcgctggtggctgcccggggcagctgcatcgccaatgcggaagaggtggatgtacccatcaagctctactgtaacggggacggcgagtggctggtgcccatcgggcgctgcatgtgcaaagcaggcttcgaggccgttgagaatggcaccgtctgccgaggttgtccatctgggactttcaaggccaaccaaggggatgaggcctgtacccactgtcccatcaacagccggaccacttctgaaggggccaccaactgtgtctgccgcaatggctactacagagcagacctggaccccctggacatgccctgcacaaccatcccctccgcgccccaggctgtgatttccagtgtcaatgagacctccctcatgctggagtggacccctccccgcgactccggaggccgagaggacctcgtctacaacatcatctgcaagagctgtggctcgggccggggtgcctgcacccgctgcggggacaatgtacagtacgcaccacgccagctaggcctgaccgagccacgcatttacatcagtgacctgctggcccacacccagtacaccttcgagatccaggctgtgaacggcgttactgaccagagccccttctcgcctcagttcgcctctgtgaacatcaccaccaaccaggcagctccatcggcagtgtccatcatgcatcaggtgagccgcaccgtggacagcattaccctgtcgtggtcccagccggaccagcccaatggcgtgatcctggactatgagctgcagtactatgagaaggagctcagtgagtacaacgccacagccataaaaagccccaccaacacggtcaccgtgcagggcctcaaagccggcgccatctatgtcttccaggtgcgggcacgcaccgtggcaggctacgggcgctacagcggcaagatgtacttccagaccatgacagaagccgagtaccagacaagcatccaggagaagttgccactcatcatcggctcctcggccgctggcctggtcttcctcattgctgtggttgtcatcgccatcgtgtgtaacagacgggggtttgagcgtgctgactcggagtacacggacaagctgcaacactacaccagtggccacatgaccccaggcatgaagatctacatcgatcctttcacctacgaggaccccaacgaggcagtgcgggagtttgccaaggaaattgacatctcctgtgtcaaaattgagcaggtgatcggagcaggggagtttggcgaggtctgcagtggccacctgaagctgccaggcaagagagagatctttgtggccatcaagacgctcaagtcgggctacacggagaagcagcgccgggacttcctgagcgaagcctccatcatgggccagttcgaccatcccaacgtcatccacctggagggtgtcgtgaccaagagcacacctgtgatgatcatcaccgagttcatggagaatggctccctggactcctttctccggcaaaacgatgggcagttcacagtcatccagctggtgggcatgcttcggggcatcgcagctggcatgaagtacctggcagacatgaactatgttcaccgtgacctggctgcccgcaacatcctcgtcaacagcaacctggtctgcaaggtgtcggactttgggctctcacgctttctagaggacgatacctcagaccccacctacaccagtgccctgggcggaaagatccccatccgctggacagccccggaagccatccagtaccggaagttcacctcggccagtgatgtgtggagctacggcattgtcatgtgggaggtgatgtcctatggggagcggccctactgggacatgaccaaccaggatgtaatcaatgccattgagcaggactatcggctgccaccgcccatggactgcccgagcgccctgcaccaactcatgctggactgttggcagaaggaccgcaaccaccggcccaagttcggccaaattgtcaacacgctagacaagatgatccgcaatcccaacagcctcaaagccatggcgcccctctcctctggcatcaacctgccgctgctggaccgcacgatccccgactacaccagctttaacacggtggacgagtggctggaggccatcaagatggggcagtacaaggagagcttcgccaatgccggcttcacctcctttgacgtcgtgtctcagatgatgatggaggacattctccgggttggggtcactttggctggccaccagaaaaaaatcctgaacagtatccaggtgatgcgggcgcagatgaaccagattcagtctgtggaggtttgacattcacctgcctcggctcacctcttcctccaagccccgccccctctgccccacgtgccggccctcctggtgctctatccactgcagggccagccactcgccaggaggccacgggccacgggaagaaccaagcggtgccagccacgagacgtcaccaagaaaacatgcaactcaaacgacggaaaaaaaaagggaatgggaaaaaagaaaacagatcctgggagggggcgggaaatacaaggaatattttttaaagaggattctcataaggaaagcaatgactgttcttgcgggggataaaaaagggcttgggagattcatgcgatgtgtccaatcggagacaaaagcagtttctctccaactccctctgggaaggtgacctggccagagccaagaaacactttcagaaaaacaaatgtgaaggggagagacaggggccgcccttggctcctgtccctgctgctcctctaggcctcactcaacaaccaagcgcctggaggacgggacagatggacagacagccaccctgagaacccctctgggaaaatctattcctgccaccactgggcaaacagaagaatttttctgtctttggagagtattttagaaactccaatgaaagacactgtttctcctgttggctcacagggctgaaaggggcttttgtcctcctgggtcagggagaacgcggggaccccagaaaggtcagccttcctgaggatgggcaacccccaggtctgcagctccaggtacatatcacgcgcacagcctggcagcctggccctcctggtgcccactcccgccagcccctgcctcgaggactgatactgcagtgactgccgtcagctccgactgccgctgagaagggttgatcctgcatctgggtttgtttacagcaattcctggactcgggggtattttggtcacagggtggttttggtttagggggtttgtttgttgggttgttttttgttttttggttttttttaatgacaatgaagtgacactttgacatttcctaccttttgaggacttgatccttctccaggaagaaggtgctttctgcttactgacttaggcaatacaccaagggcgagattttatatgcacatttctggatttttttatacggttttcattgacactcttccctcctcccacctgccaccaggcctcaccaaagcccactgccatggggccatctgggccattcagagactggagtgagatttgggtgtggagggggaggcgccaaggtggaggagcttcccactccaggactgttgatgaaagggacagattgaggaggaagtgggctctgaggctgcagggctggaagtccttgcccacttcccactctcctgccccaatctatctagtacttcccaggcaaataggcccctttgaggctcctgagtgccctcagatggtcaaaacccagttttccctctgggagcctaaaccaggctgcatcggaggccaggacccggatcattcactgtgataccctgccctccagagggtgcgctcagagacacgggcaagcatgcctcttcccttccctggagagaaagtgtgtgatttctctcccacctccttccccccaccagacctttgctgggcctaaaggtcttggccatggggacgccctcagtctagggatctggccacagactccctcctgtgaaccaacacagacacccaagcagagcaatcagttagtgaattgaatggaaataaacgctttagttataatatga

SEQ ID NO: 635 - DNA, 3149 bp, Homo sapiens
ctgagctcagggaggagctccctccaggctctatttagagccgggtaggggagcgcagcggccagatacctcagcgctacctggcggaactggatttctctcccgcctgccggcctgcctgccacagccggactccgccactccggtagcctcatggctgcaacctgtgagattagcaacatttttagcaactacttcagtgcgatgtacagctcggaggactccaccctggcctctgttccccctgctgccacctttggggccgatgacttggtactgaccctgagcaacccccagatgtcattggagggtacagagaaggccagctggttgggggaacagccccagttctggtcgaagacgcaggttctggactggatcagctaccaagtggagaagaacaagtacgacgcaagcgccattgacttctcacgatgtgacatggatggcgccaccctctgcaattgtgcccttgaggagctgcgtctggtctttgggcctctgggggaccaactccatgcccagctgcgagacctcacttccagctcttctgatgagctcagttggatcattgagctgctggagaaggatggcatggccttccaggaggccctagacccagggccctttgaccagggcagcccctttgcccaggagctgctggacgacggtcagcaagccagcccctaccaccccggcagctgtggcgcaggagccccctcccctggcagctctgacgtctccaccgcagggactggtgcttctcggagctcccactcctcagactccggtggaagtgacgtggacctggatcccactgatggcaagctcttccccagcgatggttttcgtgactgcaagaagggggatcccaagcacgggaagcggaaacgaggccggccccgaaagctgagcaaagagtactgggactgtctcgagggcaagaagagcaagcacgcgcccagaggcacccacctgtgggagttcatccgggacatcctcatccacccggagctcaacgagggcctcatgaagtgggagaatcggcatgaaggcgtcttcaagttcctgcgctccgaggctgtggcccaactatggggccaaaagaaaaagaacagcaacatgacctacgagaagctgagccgggccatgaggtactactacaaacgggagatcctggaacgggtggatggccggcgactcgtctacaagtttggcaaaaactcaagcggctggaaggaggaagaggttctccagagtcggaactgagggttggaactatacccgggaccaaactcacggaccactcgaggcctgcaaaccttcctgggaggacaggcaggccagatggcccctccactggggaatgctcccagctgtgctgtggagagaagctgatgttttggtgtattgtcagccatcgtcctgggactcggagactatggcctcgcctccccaccctcctcttggaattacaagccctggggtttgaagctgactttatagctgcaagtgtatctccttttatctggtgcctcctcaaacccagtctcagacactaaatgcagacaacaccttcctcctgcagacacctggactgagccaaggaggcctggggaggccctaggggagcaccgtgatggagaggacagagcaggggctccagcaccttctttctggactggcgttcacctccctgctcagtgcttgggctccacgggcaggggtcagagcactccctaatttatgtgctatataaatatgtcagatgtacatagagatctattttttctaaaacattcccctccccactcctctcccacagagtgctggactgttccaggccctccagtgggctgatgctgggacccttaggatggggctcccagctcctttctcctgtgaatggaggcagagacctccaataaagtgccttctgggctttttctaacctttgtcttagctacctgtgtactgaaatttgggcctttggatcgaatatggtcaagaggttggaggggaggaaaatgaaggtctaccaggctgagggtgagggcaaaggctgacgaagaggggagttacagatttcctgtagcaggtgtgggcttacagacacatggactgggctgggaggcgagcaaaggaagcagctgagactgttggagaacgcttacaagacttcatgcaagcaaggacatgaactcagaacactgaggtcagaagcatcctgctgtcatgacaccgctcgagtgaccttgaccttgaccaagtctgtcctgtttaggactgatttttcctattaggctagggtttggacctgatgttctcaagatgtctagaattgcatggctggccttgtggaatagatggttttgcattccagccaagtgtgctgtaaactgtatatctgtaatatgaatcccagcttttgagtctgacaaaatcagagttaggatcttgtaaaggaaaaaaaaaaaaaaacaaaacaaaatggagatgagtacttgctgagaaagaatgagggaaggagttggcatttgttgaaagtgtagtctttttctcttttttttttaattgcaacttttactttagatttaggaggtcgtgcgcaggtttgttacatgggtatattgtgtgatgctgagcttgggatgcgaatgatcctgtcacccaggtagtgagtatagcacccagtgaaactgtagtctcatgccaggcactgtgctagcccactctggctcatttaatcctctcctaagaagagaggagacacagcgtccccatttgacagatgcagaaagaggttccacaggtgtgccttgattctgtcctaaaaccgtttcccggaagcttttcctggtgtgggcgcttctaacctaatcctcaatcgattccagaactattactctgtttccacagtgatactgtgtctaggttttagggaggacagttcattgatgttacttaagaatgctttccaggtggaaagttccttaagtttgaggcttcaaattccatacagcacattaaaatcccattcatgagtttgaaatactgctctgttgtcttggaaataccaatcagattgttggctgaagtgatgtggataaagaagggatcttagaaaaactaaaaaaaaaaaaaaaaaa

SEQ ID NO: 636 - DNA, 2774 bp, Homo sapiens
gggaagatggcggcgccgctcatccccctctcccagcagattcccactggaaattcgttgtatgaatcttattacaagcaggtcgatccggcatacacagggagggtgggggcgagtgaagctgcgctttttctaaagaagtctggcctctcggacattatccttgggaagatatgggacttggccgatccagaaggtaaagggttcttggacaaacagggtttctatgttgcactgagactggtggcctgtgcacagagtggccatgaagttaccttgagcaatctgaatttgagcatgccaccgcctaaatttcacgacaccagcagccctctgatggtcacaccgccctctgcagaggcccactgggctgtgagggtggaagaaaaggccaaatttgatgggatttttgaaagcctcttgcccatcaatggtttgctctctggagacaaagtcaagccagtcctcatgaactcaaagctgcctcttgatgtcctgggcagggtctgggacctcagtgacattgacaaggatgggcacttggatcgagatgagttcgctgtggccatgcacttggtgtaccgagccctggagaaggagcccgtgccctccgccctgcccccgtccctcatcccaccctccaagagaaagaagactgtgttccctggcgccgtccccgtcctgcctgccagccccccaccaaaagacagcctccgctccacgccgtcccacggcagcgtcagcagcctcaacagcacagggagcctgtcccccaagcacagcctcaagcaaacacagccaacagtgaactgggtggtgcccgtggcagacaagatgcgatttgatgagatattcctgaagaccgacctggacctggatggctacgtgagtggccaggaggtgaaggagatcttcatgcactcgggcctcacccagaaccttctagcacacatatgggccctggccgatacgaggcaaacggggaagttaagcaaagaccaattcgcgttagctatgtatttcattcagcagaaggtcagtaaaggcatcgaccctcctcaagtcctctcgccggacatggtcccgccttcggagagaggcacgcccggcccggacagttcaggctctctcggctccggggagtttactggcgtgaaggagcttgatgacatcagtcaagagattgcccagttacaaagagagaaatattcactggaacaagacattcgagaaaaggaagaggcaatcagacagaaaaccagcgaggtgcaggaattacaaaatgacctagaccgggaaacaagcagtttgcaggagctcgaggctcagaaacaggatgctcaagaccgcctggacgagatggaccagcagaaggccaagctccgagacatgctgagcgacgtccggcagaagtgccaggatgagactcagatgatctcatcactgaaaacgcaaatccaatctcaggaatctgacttaaagtcccaggaagacgatctgaaccgagccaagtcggagctgaaccgattgcagcaggaggaaacccagctggagcagagcattcaggctgggcgagtccagctggaaaccatcatcaagtccctgaagtcaacgcaagacgaaatcaaccaggcaaggagcaaactttcccagctgcatgaaagccgccaggaggcccacaggagcctggagcagtatgaccaggtgctcgatggagcccatggtgccagcctgaccgacctggccaacctgagcgaaggcgtctccctggcagagaggggcagttttggagccatggatgatcctttcaaaaataaagccttgttatttagcaacaacacgcaagagttgcatccggatcctttccagacagaagaccccttcaaatctgacccatttaaaggagctgaccccttcaaaggcgacccgttccagaatgacccctttgcagaacagcagacaacttcaacagatccatttggaggggaccctttcaaagaaagtgacccattccgtggctctgccactgacgacttcttcaagaaacagacaaagaatgacccatttacctcggatccattcacgaaaaacccttccttaccttcgaagctcgacccctttgaatccagtgatcccttttcatcctccagtgtctcctcaaaaggatcagatccctttggaaccttagatcccttcggaagtgggtccttcaatagtgctgaaggctttgccgacttcagccagatgtccaagcccccaccttctgggcctttcacctcctccttgggaggggcaggattctcagatgacccctttaaaagtaaacaggacactcctgctctgcctccgaagaaacctgctcctccacggcctaaaccgcccagcggtaaaagtacacctgtaagccagcttggttccgcagactttcccgaggcccccgatccattccagccactcggggctgacagcggcgacccgttccaaagtaaaaaggggtttggggacccgtttagtggaaaagacccatttgtcccctcctctgcagctaaaccttctaaggcctctgcctcgggctttgcagacttcacctctgtaagttgagtcctccgcctccgggccaccccactcccttccgcttgcagcttccctgggatttttgtctccttttaaaggcaaacctcccagcttctttagcctcttggtacctcacactctctgtccctcgcgttatttattctacactgccacttctgtaagaaaaacagtttctcaat

SEQ ID NO: 637 - DNA, 11941 bp, Homo sapiens
cacgcgcgcccggctgggggatctcctccgcgtgcccgaaagggggatatgccatttggacatgtaattgtcagcacgggatctgagacttccaaaaaatgaagccggcgacaggactttgggtctgggtgagccttctcgtggcggcggggaccgtccagcccagcgattctcagtcagtgtgtgcaggaacggagaataaactgagctctctctctgacctggaacagcagtaccgagccttgcgcaagtactatgaaaactgtgaggttgtcatgggcaacctggagataaccagcattgagcacaaccgggacctctccttcctgcggtctgttcgagaagtcacaggctacgtgttagtggctcttaatcagtttcgttacctgcctctggagaatttacgcattattcgtgggacaaaactttatgaggatcgatatgccttggcaatatttttaaactacagaaaagatggaaactttggacttcaagaacttggattaaagaacttgacagaaatcctaaatggtggagtctatgtagaccagaacaaattcctttgttatgcagacaccattcattggcaagatattgttcggaacccatggccttccaacttgactcttgtgtcaacaaatggtagttcaggatgtggacgttgccataagtcctgtactggccgttgctggggacccacagaaaatcattgccagactttgacaaggacggtgtgtgcagaacaatgtgacggcagatgctacggaccttacgtcagtgactgctgccatcgagaatgtgctggaggctgctcaggacctaaggacacagactgctttgcctgcatgaatttcaatgacagtggagcatgtgttactcagtgtccccaaacctttgtctacaatccaaccacctttcaactggagcacaatttcaatgcaaagtacacatatggagcattctgtgtcaagaaatgtccacataactttgtggtagattccagttcttgtgtgcgtgcctgccctagttccaagatggaagtagaagaaaatgggattaaaatgtgtaaaccttgcactgacatttgcccaaaagcttgtgatggcattggcacaggatcattgatgtcagctcagactgtggattccagtaacattgacaaattcataaactgtaccaagatcaatgggaatttgatctttctagtcactggtattcatggggacccttacaatgcaattgaagccatagacccagagaaactgaacgtctttcggacagtcagagagataacaggtttcctgaacatacagtcatggccaccaaacatgactgacttcagtgttttttctaacctggtgaccattggtggaagagtactctatagtggcctgtccttgcttatcctcaagcaacagggcatcacctctctacagttccagtccctgaaggaaatcagcgcaggaaacatctatattactgacaacagcaacctgtgttattatcataccattaactggacaacactcttcagcacaatcaaccagagaatagtaatccgggacaacagaaaagctgaaaattgtactgctgaaggaatggtgtgcaaccatctgtgttccagtgatggctgttggggacctgggccagaccaatgtctgtcgtgtcgccgcttcagtagaggaaggatctgcatagagtcttgtaacctctatgatggtgaatttcgggagtttgagaatggctccatctgtgtggagtgtgacccccagtgtgagaagatggaagatggcctcctcacatgccatggaccgggtcctgacaactgtacaaagtgctctcattttaaagatggcccaaactgtgtggaaaaatgtccagatggcttacagggggcaaacagtttcattttcaagtatgctgatccagatcgggagtgccacccatgccatccaaactgcacccaagggtgtaacggtcccactagtcatgactgcatttactacccatggacgggccattccactttaccacaacatgctagaactcccctgattgcagctggagtaattggtgggctcttcattctggtcattgtgggtctgacatttgctgtttatgttagaaggaagagcatcaaaaagaaaagagccttgagaagattcttggaaacagagttggtggaaccattaactcccagtggcacagcacccaatcaagctcaacttcgtattttgaaagaaactgagctgaagagggtaaaagtccttggctcaggtgcttttggaacggtttataaaggtatttgggtacctgaaggagaaactgtgaagattcctgtggctattaagattcttaatgagacaactggtcccaaggcaaatgtggagttcatggatgaagctctgatcatggcaagtatggatcatccacacctagtccggttgctgggtgtgtgtctgagcccaaccatccagctggttactcaacttatgccccatggctgcctgttggagtatgtccacgagcacaaggataacattggatcacaactgctgcttaactggtgtgtccagatagctaagggaatgatgtacctggaagaaagacgactcgttcatcgggatttggcagcccgtaatgtcttagtgaaatctccaaaccatgtgaaaatcacagattttgggctagccagactcttggaaggagatgaaaaagagtacaatgctgatggaggaaagatgccaattaaatggatggctctggagtgtatacattacaggaaattcacccatcagagtgacgtttggagctatggagttactatatgggaactgatgacctttggaggaaaaccctatgatggaattccaacgcgagaaatccctgatttattagagaaaggagaacgtttgcctcagcctcccatctgcactattgacgtttacatggtcatggtcaaatgttggatgattgatgctgacagtagacctaaatttaaggaactggctgctgagttttcaaggatggctcgagaccctcaaagatacctagttattcagggtgatgatcgtatgaagcttcccagtccaaatgacagcaagttctttcagaatctcttggatgaagaggatttggaagatatgatggatgctgaggagtacttggtccctcaggctttcaacatcccacctcccatctatacttccagagcaagaattgactcgaataggagtgaaattggacacagccctcctcctgcctacacccccatgtcaggaaaccagtttgtataccgagatggaggttttgctgctgaacaaggagtgtctgtgccctacagagccccaactagcacaattccagaagctcctgtggcacagggtgctactgctgagatttttgatgactcctgctgtaatggcaccctacgcaagccagtggcaccccatgtccaagaggacagtagcacccagaggtacagtgctgaccccaccgtgtttgccccagaacggagcccacgaggagagctggatgaggaaggttacatgactcctatgcgagacaaacccaaacaagaatacctgaatccagtggaggagaacccttttgtttctcggagaaaaaatggagaccttcaagcattggataatcccgaatatcacaatgcatccaatggtccacccaaggccgaggatgagtatgtgaatgagccactgtacctcaacacctttgccaacaccttgggaaaagctgagtacctgaagaacaacatactgtcaatgccagagaaggccaagaaagcgtttgacaaccctgactactggaaccacagcctgccacctcggagcacccttcagcacccagactacctgcaggagtacagcacaaaatatttttataaacagaatgggcggatccggcctattgtggcagagaatcctgaatacctctctgagttctccctgaagccaggcactgtgctgccgcctccaccttacagacaccggaatactgtggtgtaagctcagttgtggttttttaggtggagagacacacctgctccaatttccccacccccctctctttctctggtggtcttccttctaccccaaggccagtagttttgacacttcccagtggaagatacagagatgcaatgatagttatgtgcttacctaacttgaacattagagggaaagactgaaagagaaagataggaggaaccacaatgtttcttcatttctctgcatgggttggtcaggagaatgaaacagctagagaaggaccagaaaatgtaaggcaatgctgcctactatcaaactagctgtcactttttttctttttctttttctttctttgtttctttcttcctcttcttttttttttttttttttaaagcagatggttgaaacacccatgctatctgttcctatctgcaggaactgatgtgtgcatatttagcatccctggaaatcataataaagtttccattagaacaaaagaataacattttctataacatatgatggtgtctgaaattgagaatccagtttctttccccagcagtttctgtcctagcaagtaagaatggccaactcaactttcataatttaaaaatctccattaaagttataactagtaattatgttttcaacactttttggtttttttcattttgttttgctctgaccgattcctttatatttgctcccctatttttggctttaatttctaattgcaaagatgtttacatcaaagcttcttcacagaatttaagcaagaaatattttaatatagtgaaatggccactactttaagtatacaatctttaaaataagaaagggaggctaatatttttcatgctatcaaattatcttcaccctcatcctttacatttttcaacatttttttttctccataaatgacactacttgataggccgttggttgtctgaagagtagaagggaaactaagagacagttctctgtggttcaggaaaactactgatactttcaggggtggcccaatgagggaatccattgaactggaagaaacacactggattgggtatgtctacctggcagatactcagaaatgtagtttgcacttaagctgtaattttatttgttctttttctgaactccattttggattttgaatcaagcaatatggaagcaaccagcaaattaactaatttaagtacatttttaaaaaaagagctaagataaagactgtggaaatgccaaaccaagcaaattaggaaccttgcaacggtatccagggactatgatgagaggccagcacattatcttcatatgtcacctttgctacgcaaggaaatttgttcagttcgtatacttcgtaagaaggaatgcgagtaaggattggcttgaattccatggaatttctagtatgagactatttatatgaagtagaaggtaactctttgcacataaattggtataataaaaagaaaaacacaaacattcaaagcttagggataggtccttgggtcaaaagttgtaaataaatgtgaaacatcttctcatgcaattattttattatccaacacactaatcttttgatactttatataattccctttcttcatatactgcatccagtactagaaccatcattattatgtatcattttgaaagaatacctgatgagatgaaggatgagaacaaatgacagagatgagtctccaagtaaagggggcctcacatcaataattaggaaacttagatataagtcgcccttttctgaaaattctaccccaagtcatttagatttttaaaaaatatttctaatgttaaaatattgggaccaaattagaatcaatagtataagattaattaattagagtaaaaatatctattaaggcagagaaagtttagagaaaaaaatccaaagaaatttgtgtttcttcctattctgaacaagtaaatccatccatccatccatccaaacctcctttatctaactgtgtctactaaaagcaccatgttttgtggggaacactcagataaatggaatatcatcctcaacttcaaaattctatgatctaggagatttaattaaaatgacattttaatttttctatgcgttccaacaatcagattgcatagtctcttttgtgaatagctgtcatataatcagttgtactgtaagatatctcctttaaactcatttgggatataagttaaacatccttcaaattgttgatgttgacaaacaggataatttcaataatattattcaaacataaactggtctaggagaatattgcatcactgactaattagcctatctagagtctaacttcaccattaaaccaaaagcagatggtggtccttggccaagaatattggagacattggagttggtttttttctaagctataagaagtgaggcgagctgaaaaagtatggtagagcaggagaagggtttgtgagattccttctagtgaagttcaccctcaaacttttcaggggtaaagacacagagtgattcaggggccacaatctaatagctcagggctctcctatccattcagagaagtctctaggaaaagggatctcatatcagtacttatgaaaaattgaatataagcctccctttctaaataaatctgcatcgagtcatcacagccctctttttggatactataccttgattttttttttctgatttacaatatgcatatggtttctactgggctatagaaagcagaatcactcattttggagaaggaaaaaatgaatagttaaaacaaacttttaactgttaaggtaacagaaatgtatttagtgaatgtctctttcctcctaagaacacaagacttctacatgttgggtaatacctagagatgcatgtaggaataatccaaaatgacccaaatgctttataatagcaccactttataattcttttgaatgatttctgtagtatataattgacttcagttgtttgagtgttttttgttttatttttgtcccccctgggaaaacatatttcagcatgtataagagggagaaaaaaagtttcattccttccagagaataacttatttagtccagtagggtagaattttaaaatgtcagttaaagtcttcaaagtgcttggggggatatcagattccagaggccaattgtagcaattgaaatttgcagaatcaattatgtaaatctgagacaaattagtattaaaattacacggagtatattttttaaatcacccaactttgtagattatacctattttgggcaggtatggaaaaattttgcagttaaatgattgcctaaagaaagtggtaaacaggtgaggaaagatggcctctgatctaggatagatccagaaccacaaagcatctgcaccacaaaaggtgttagactaccaagcagctcctggttttctgcatagtattagtagcacagcttaggatgagaatcctttctccagtaacattcttaaaatagcatgaaaaacaacgcaaaactcaaatttctattaaaacacacaaactaaaatcaagtgattcttttttgtagattagggagaaggactgaatatctaatttaagagaaggaatagtgtttaagtgttatagtgtgtgagctaataccttctaaaggaaagacatggcatgaagattgtgcatacttacaatgctaaggaaaaatcaagaaaaggactgtgtgaggctctgctactagatgaagttggaaggactattaatgtgcttcttgaagtatcaaaaatgaaaagaaaattaaaattgtttaagcctgacagggaaggatgtaaatacaagtttttctagagctctctaacctttatttcaaaactggaattattcatccatctgtaattgttgataatttaactagtatatgtagttcataaggtaatagaaaaggtgatcatgaaagcatgtatataactggacagaaccacgataatgctataagatgtagatttagttaggttatcagatgttaaatgattttaatattattaaataaatcaaactagaaaactaaccacaagtataatgtaacaaagttaaatgcaggatataaaaatgtaggatggattttgcatagtaaaaagataagtttgccatttaaaattgttgtttgttgggtttagctgaaagtaggcatatatggttccacttgggaaaacttgctttaaagcattacaatgaacaattttttctcattctcttattcctttatcactttttaaatgtaaagaaaattgtatttatttatttttttaaataaacaccaccttgcagaatttaataggcaaacatgttacatatgactaagtaagggtcttcaagatgaagtaaagaaaatgtaaatgttctattaccttatgcagagacaaaaaaaaaaaggagtggtgtcatttagctagcaaacaaacaaaatacagttaattggtgatatgtcctttcttttctcactatgccctcttgcctccaaaaatgacaacaaagaatcacaatttttctgataaataaatgctaaaccaagcgtttcaaactattgcattgccattcttttggactttagttattagaatgatgattgttatagggcaaatgagaaatccatgtgcatcagcttctagttgttaaaaaaaccagataaattaacttctactgtatactgtgggcagaggatcctagagctgatcctacaacatcagcttctagttgttaaaaaaaaaaaaagaaacagataaattaacttctactgtatatactgtgggcagaggatcttactgtgcctctgtttgtgtacatggacttcggtgtgtatcagtttgaaggacagccttgccccatgtaaacatataaatgcagattggtatcgcctggttgctatttgcttaagaacaaatattatacagatgagatcaggcataattttaaaagatcattatcagtggagacctcattattactgatattacaatggggccagtttttatacttctgggtagaattaataaaatttttctgatcccagagatctgagttctctctgcagttggaaacaagaagctgttgtgggcattgtgtcgggccaggggcccttgtgtttgtgtgggcaaatatcttttagcagtgtgagctgcttttttcttttcattaaaagtctctctaaaataatagaaatttcagatactcggttcaagtctcactgattttgtagaggtccaaaaatgtaggatctgtcacttttgcaggcccctgcctcacctaattcctggccaggtgacattttgggcagaagtaaatgcttctatagtcacaagctaaaatgactctaagccccaatttcacggggggtattcacatgcttcctctggaaaatactctttgacagtcagctttgcaagtaagtgattaccttgttaggaatcaaagaaaaatgtatttctctctgacctttagaggaaaatagaatccttcccttttttgcccattgacacaactggcactgctctcttccctttctaccaccctggttcaaagtagtcccccgatgctgtcctgttcctttcttaagccatagtggatctctgagatcctacaccccactttgtgaaacactgacttcatctttgccctcgaatgcctgattttttcataagagattctagcaatttggacactgtttaagtgaactatcaaactaccgcatagagaatatttaagctattaaaattatggtttcccatgaagatcaattctctgtgtccttccctataggaatttgagacgagttagccctgtgatgaatcttgaaactcacatatgtccacatacacttggtagaacttcgatttaatctttacataaaagctgtacatataaccaagaagttatttttgccagtaaattaacttatttgctttattcatcttatttggttcctaatcgtaaatattttgtagctgctgtaaatttttttctcccaaatgaggagtcttattatcataaaggtaaaggctattcagctttgataaccacctgcaattcttttttggatcattcatccatctaacaaatacataatgaggacagttcatgttaatgaaaatccatgttgtttaatagaatgccatcctttacctacttttgctctttatggacgtttttcttttcatgctctagtgagctttccctatatcatgagaagtggttatatttgtgcaaatatacaaatataggaaaacaaagattcatacctgtaggcaatagtctaacttgtccaaaccactttgcctttactgctatttttatccccaatgcgtagatatttcccccaggcctatagcctttgtgaaggaaagcaaatcatacctcctgtatattgacacgaatctggttttcaaatgtcatttccagattttttagttaattgggggttgtccttttcccttaatgtgagagtcattttcctgtatatttctggatctctcaggggctgggaggggggagtgaggggactacaaccatagcactccaagaacccttttgggattactccagtaatcaactacgaaagttattttctaaatgtagatatgtaaggtgttcttttaaagtaaggtactttgaaatatgtagcataaactggtactgctgttaaatgggtcgattattaaacggagcagctgtgtgagggcagctaactttgaatgcctgtctccctggctggtgtgtctccttctcatgttgagagcaccagggattgcgtggctgcatgctgaaaccgcattttcccatggtgtatgactagttcatctctttcttgagcaccattacaagaagatcaaatgaaaatgagatcaatgtggaagacaattcatagcacaaaaaaagtcatcttaaatctactctcaaacattcatcttatacatgcatcaaagtaatttactgacatcagtttgggtgagagagggagtcactttactgaaaaggcagaggcttaaggtgtatacatttgtactcacttccttattttcttaacttgtaagcagaaaacaagccctctctcttgtgaagtatcttcaaaggattggggtgcaaaaataccttgctggtaagccatcaatgttttatttaaatccctgcattcaaagttagctgcctttttgaaataaacaaacaaaaaatactactgtatgtttgaaaatgtgaatagtatttttatagcttgttaaagacatggctagttgcatttgtaaataagtataatgttgctttgattttcttttgtggacatctttatttggaacataattgtctttagggttgatttgtatataagtaattggcctgtgattgtttcttttttggttggaagttatcattttgacattacttgtgattctgtgttcagcactattgtgatgtgttcaacctctgcactcgcttacacaataggatatgccaattgtgtgtggtgtaatgttattttgatttttttccatgttattgatgaaggatcatgcacctaacacatactaacttttttaatgttaggcatatttttagtatactttctcttattctttcttctcctccaaccttttacccatcctccttcctttccctcattcctgttgttatttgagaatgagggagaaacagtattttacatttatgtaattaggcttttccgttagttctcaaggatcctcttttggctcttgggaaagaattgtacctgtacaaggcaattatagaatgcgaactgctttgcctcattccatactgatcatcccagctgaacaatttgaaaactgttctgcctttttgttacatgaatctgtcagaaatatatttttaatttaatataaatgaaattcaataaaatatgaaacaaacgttaaaaaaaaaaaaaaaaaa

SEQ ID NO: 638 - DNA, 2382 bp, Homo sapiens
aagagggaagtcgtggtggtcgcgagggagccggaaagatggtggttaccagatctgcacgggctaaggccagcatccaagccgcgtcggctgaaagttccgggcaaaagagttttgctgctaatgggattcaagcgcatccagaaagtagtactggatctgatgcccgaactactgctgaatcacagaccactgggaagcaaagtttaatccctagaactcctaaagctagaaagaggaagagcagaactacaggctcactaccaaaggggactgaaccatctacggatggagagacctctgaggcagagtcaaattattctgtgtctgagcaccatgataccattttaagggtaactaggagaaggcagatcttaattgcatgctccccagtgtccagtgttaggaaaaagccgaaagtaactccaacaaaggagtcttacactgaagaaatagtgtctgaagcagaatctcatgtttcaggtatttctagaattgtgcttcctacagaaaaaactacaggagccagaagaagtaaggctaaatctctgacagatccaagccaagaatctcatacagaagctatatctgatgctgagacatcaagctcagacatttcattctctggaattgcaactagaagaaccaggagtatgcagaggaaattaaaggcacaaactgaaaagaaagatagtaagattgtaccaggaaatgagaaacagatcgtgggtacacctgtgaattcagaggattcagataccagacaaacttcccatttacaagcaagatctctttctgagataaataagccaaatttctataataatgactttgatgatgatttctcccacagaagttcagaaaatatattaacagtgcacgaacaggccaatgttgaatctcttaaagaaacaaaacagaattgtaaggatttggatgaagatgccaatggaataacagatgaggggaaagaaattaatgagaaaagttctcagctgaagaatctttctgaacttcaggacactagccttcaacagttagtttctcagagacattcaaccccccaaaataaaaatgctgtatcagtgcactctaatctgaactctgaggctgtaatgaaatcattaactcaaacatttgcaactgtggaagtaggcagatggaataacaacaaaaagagccccataaaagcaagtgacttgacaaagtttggtgattgtggtggtagtgatgatgaagaagagtccacagttataagtgtcagtgaagacatgaacagtgaagggaatgtagattttgaatgtgataccaaactatacacgtctgcgcccaacacatctcagggtaaagataattctgtcttactagttctcagcagtgatgaaagccaacagtctgaaaacagtgagaatgaagaggatactttatgttttgttgaaaatagtggccaaagggagtcattaagtggagacacaggaagtctgtcatgtgacaatgcattgtttgtaattgacacaactcctggaatgagtgctgataaaaatttttacttggaagaggaagacaaggcaagtgaggttgccattgaggaagaaaaagaagaggaagaggatgaaaaaagtgaagaagattcatcagaccatgacgaaaatgaagatgagtttagtgatgaagaagacttcctaaatagcacaaaggctaaacttctgaagttgacaagcagcagcatagaccctggtctgagtatcaagcagttgggtggtttgtatattaattttaatgcagataaactacagtctaacaagagaaccctaacacagatcaaggagaaaaagaaaaatgagcttctgcagaaagccgtcattacacctgattttgaaaaaaaccactgtgttccaccatatagtgaatcaaagtatcaacttcagaaaaaacgcagaaaagaacgacaaaaaacagcaggggatggctggtttggtatgaaagctccagaaatgacaaatgaactgaaaaatgatctcaaagcactgaagatgagagccagcatggacccgaaaagattttacaagaaaaatgatagagatggcttccccaagtacttccagattggaaccattgttgacaatccagctgatttctaccattcacgaattcccaagaagcaaaggaaaagaactattgtggaagaactgctggctgattctgaattcagaagatacaaccgaaggaagtactcagagatcatggctgaaaaagcagcaaatgcagcaggaaaaaagttccgaaagaagaagaaatttcgcaattaagatttaccaagcaaactgcaacattttacattgctcctttatttacttattaaagacgtttggaaaactaaaa

SEQ ID NO: 639 - DNA, 4628 bp, Homo sapiens
tcacttgcctgatatttccagtgtcagagggacacagccaacgtggggtcccttctaggctgacagccgctctccagccactgccgcgagcccgtctgctcccgccctgcccgtgcactctccgcagccgccctccgccaagccccagcgcccgctcccatcgccgatgaccgcggggaggaggatggagatgctctgtgccggcagggtccctgcgctgctgctctgcctgggtttccatcttctacaggcagtcctcagtacaactgtgattccatcatgtatcccaggagagtccagtgataactgcacagctttagttcagacagaagacaatccacgtgtggctcaagtgtcaataacaaagtgtagctctgacatgaatggctattgtttgcatggacagtgcatctatctggtggacatgagtcaaaactactgcaggtgtgaagtgggttatactggtgtccgatgtgaacacttctttttaaccgtccaccaacctttaagcaaagaatatgtggctttgaccgtgattcttattattttgtttcttatcacagtcgtcggttccacatattatttctgcagatggtacagaaatcgaaaaagtaaagaaccaaagaaggaatatgagagagttacctcaggggatccagagttgccgcaagtctgaatggcgccatcaaacttatgggcagggataacagtgtgcctggttaatattaatattcccattttattaataatatttatgttgggtcaagtgttaggtcaataacactgtattttaatgtacttgaaaaatgtttttatttttgttttatttttgacagactatttgctaatgtataatgtgcagaaaatatttaatatcaaaagaaaattgatatttttatacaagtaatttcctgagctaaatgcttcattgaaagcttcaaagtttatatgcctggtgcacagtgcttagaagtaagcaattcccaggtcatagctcaagaattgttagcaaatgacagatttctgtaagcctatatatatagtcaaatcgatttagtaagtatgttttttatgttcctcaaatcagtgataattggtttgactgtaccatggtttgatatgtagttggcaccatggtatcatatattaaaacaataatgcaattagaatttgggagaagcaaatataggtcctgtgttaaacactacacatttgaaacaagctaaccctggggagtctatggtctcttcactcaggtctcagctataattctgttatatgaggggcagtggacagttccctatgccaactcacgactcctacaggtactagtcactcatctaccagattctgcctatgtaaaatgaattgaaaaacaattttctgtaatcttttatttaagtagtgggcatttcatagcttcacaatgttccttttttgtatattacaacatttatgtgaggtaattattgctcaacagacaattagaaaaaagtccacacttgaagcctaaatttgtgctttttaagaatatttttagactatttctttttataggggctttgctgaattctaacattaaatcacagcccaaaatttgatggactaattattattttaaaatatatgaagacaataattctacatgttgtcttaagatggaaatacagttatttcatcttttattcaaggaagttttaactttaatacagctcagtaaatggcttcttctagaatgtaaagttatgtatttaaagttgtatcttgacacaggaaatgggaaaaaacttaaaaattaatatggtgtatttttccaaatgaaaaatctcaattgaaagcttttaaaatgtagaaacttaaacacaccttcctgtggaggctgagatgaaaactagggctcattttcctgacatttgtttattttttggaagagacaaagatttcttctgcactctgagcccataggtctcagagagttaataggagtatttttgggctattgcataaggagccactgctgccaccacttttggattttatgggaggctccttcatcgaatgctaaacctttgagtagagtctccctggatcacataccaggtcagggaggatctgttcttcctctacgtttatcctggcatgtgctagggtaaacgaaggcataataagccatggctgacctctggagcaccaggtgccaggacttgtctccatgtgtatccatgcattatataccctggtgcaatcacacgactgtcatctaaagtcctggccctggcccttactattaggaaaataaacagacaaaaacaagtaaatatatatggtcatatacatattgtatatatattcatatacaaacatgtatgtatacatgaccttaatggatcatagaattgcagtcatttggtgctctgctaaccatttatataaaacttaaaaacaagagaaaagaaaaatcaattagatctaaacagttatttctgtttcctatttaatacagctgaagtcaaaatatgtaagaacacattttaaatactctacttacagttggccctctgtggttagttccacatctgtggattcaaccaaccaaggacggaaaatgcttaaaaaataatacaacaacaacaaaaaatacattataacaactatttacttttttttttttctttttgagatggagtctcgctctgttgcccaggttggagtgcagtggcacgatctcggctcactgcaacctcacctcccgggttcaagagatcctcctgcctcagcctcctgagcagctgggactacaggcgcatgccaccatgcccagctaatttttgtatttttagtagaggcggggtttcaccatgttggccaggatggtctcaatctcctaaccttgagatccaccctccacagcctcccaaactgctgggattacaggtgtgagccaccgcacgtagcatttacattaggtattacaagtaatgtaaagatgatttaagtatacaggaggatgtgaataggttatatgcaagcactatgcccttttatataagtgacttgaacatctgtgcccgattttagtatgtgcaggggggcgatctgggaatcagtcccctgtggataccaaggtacaactgtatttattaacgcttactagatgtgaggagagtctgaatattttcagtgatcttggctgtttcaaaaaaatctattgacttttcaataaatcagctgcaatccatttatttcatttacaaaagatttattgtaagcatctcaatcttggtttgtcagtttatcttaagcatgtcaattcataaaaacaagtcatttttgtatttttcatctttaagaatgcttaaaaaagctaatccctaaaatagttagatctttgtaaatgcatattaaataataaagtatgacccacattactttttatgggtgaaaataagacaaaaataatagttttagtgaggatggtgctgagtaaacataaaaactgatttgctctcagctgatgtgtcctgtacacagtgggaagattttagttcacacttagtctaactcccccattttacagatttctcactatatatatttctagaaggggctatgcatattcaatgtattgagaaccaaagcaaccacaaatgcataaatgcataatttatggtcttcaaccaaggccacataataacccagttaacttactctttaaccaggaatattaagttctataactagtactcaaggtttaaccttaaaattaagatttccttaaccttaaccttaaaattgatattatattaaacatacataatacaatgtaactccactgttctcctgaatattttttgctctaatctctctgccgaaagtcaaagtgatgggagaattggtatactggtatgactacgtcttaagtcagatttttatttatgagtctttgagactaaattcaatcaccaccaggtatcaaatcaacttttatgcagcaaatatatgattctagtgtctgacttttgttaaattcagtaatgcagtttttaaaaacctgtatctgacccactttgtaatttttgctccaatatccattctgtagacttttgaaaaaaaagtttttaatttgatgcccaatatattctgaccgttaaaaaattcttgttcatatgggagaagggggagtaatgacttgtacaaacagtatttctggtgtatattttaatgtttttaaaaagagtaatttcatttaaatatctgttattcaaatttgatgatgttaaatgtaatataatgtattttctttttattttgcactctgtaattgcactttttaagtttgaagagccattttggtaaacggtttttattaaagatgctatggaacataaagttgtattgcatgcaatttgaagtaacttatttgactatgaatgttatcggattactgaattgtatcaatttgtttgtgttcaatatcagctttgataattgtgtaccttaagatattgaaggagaaaatagataatttacaagatattattaatttttatttatttttcttgggaattgaaaaaaattgaaataaataaaaatgcattgaacatcttgcattcaaaatcttcactgac

SEQ ID NO: 640 - DNA, 815 bp, Homo sapiens
gcggcgttgtagttaagctcgtgtaacggcggcggtgtcggcagctgctgtagcgaagagagtttggcgcgatgtctcacaccattttgctggtacagcctaccaagaggccagaaggcagaacttatgctgactacgaatctgtgaatgaatgcatggaaggtgtttgtaaaatgtatgaagaacatctgaaaagaatgaatcccaacagtccctctatcacatatgacatcagtcagttgtttgatttcatcgatgatctggcagacctcagctgcctggtttaccgagctgatacccagacataccagccttataacaaagactggattaaagagaagatctacgtgctccttcgtcggcaggcccaacaggctgggaaataattgtgttggaagcactgggggggttggggtgggcttggaacacaggtgtgtacagcgtgctgtagtggaagttttgtatcatagtaatcctgtttccactttgttatactctagccaagattgactgtattagatgaaatgtgaggatcttgttcaatcggaaacccccgttacctcctctttttctttctctttcttttttttttttttacttaaacatttttatgatgatttagatggaagttgttcttcgtcacttaatgttggttccagtccttcaactgttcatatctactttataacattcacatactaacccttcttcaagatggggtggggggtggaaatgcagtttagccatgtcctcaagataaagtcttggtaaaaataaataaatgtcctttagttataaaaaaaaaaaaaaaaaaa

SEQ ID NO: 641 - DNA, 1896 bp, Homo sapiens
caacagtagggccccgcgggcgtcctggccgccatgtgcaccgtagtggaccctcgcattgtccggagatacctactcaggcggcagctcgggcagggggcctatggcattgtgtggaaggcagtggaccggaggactggtgaggtcgtggccatcaagaaaatctttgatgcttttagggataagacagatgcccagagaacattccgggaaatcacgctcctccaggagtttggggaccatcccaacatcatcagcctccttgacgtgatccgggcagagaacgacagggacatttacctggtgtttgagtttatggacactgacctgaacgcagtcatccggaagggcggcctgctgcaggacgtccacgtgcgctccatcttctaccagctcctgcgggccacccggttcctccactcggggcacgttgtgcaccgggaccagaagccgtccaatgtgctcctggatgccaactgcacagtgaagctgtgtgactttggcctggcccgctccctgggcgacctccctgaggggcctgaggaccaggccgtgacagagtacgtggccacacgctggtaccgagcaccggaggtgctgctctcttcgcaccgatacacccttggggtggacatgtggagtctgggctgtatcctgggggagatgctgcgggggagacccctgttccccggcacgtccaccctccaccagctggagctgatcctggagaccatcccaccgccatctgaggaggacctcctggctctcggctcaggctgccgtgcctctgtgctgcaccagctggggtcccggccacgacagacgctggatgccctcctaccgccagacacctccccagaggccttggacctccttaggcgactcctggtgttcgccccggacaagcggttaagcgcgacccaggcactgcagcacccctacgtgcagaggttccactgccccagcgacgagtgggcacgagaggcagatgtgcggccccgggcacacgaaggggtccagctctctgtgcctgagtaccgcagccgcgtctatcagatgatcctggagtgtggaggcagcagcggcacctcgagagagaagggcccggagggtgtctccccaagccaggcacacctgcacaaacccagagccgaccctcagctgccttctaggacacctgtgcagggtcccagacccaggccccagagcagcccaggccatgaccctgccgagcacgagtccccccgtgcagccaagaacgttcccaggcagaactccgctcccctgctccaaactgctctcctagggaatggggaaaggccccctggggcgaaggaagcgccccccttgacactctcgctggtgaagccaagcgggaggggagctgcgccctccctgacctcccaggctgcggctcaggtggccaaccaggccctgatccggggtgactggaaccggggcggtggggtgagggtggccagcgtacaacaggtccctccccggcttcctccggaggcccggcccggccggaggatgttcagcacctctgccttgcagggtgcccaggggggtgccagggctttgcttggaggctactcccaagcctacgggactgtctgccactcggcactgggccacctgcccctgctggaggggcaccatgtgtgagccgccctactcccttcacctggccctctgttcctgccccagccccttccccagacccctctccagtctcctgcaccccttagccctccctgctttgcctggcccgttgaagttccagggagcttgcccgggtctcctcgggggagcagatgagggccctgcccccgccccactgacttcctccaataaagtcatgtctgcccccaacctaaaaaaaaaaaaaaaaaa

SEQ ID NO: 642 - DNA, 2204 bp, Homo sapiens
gagcggtgcggaggctctgctcggatcgaggtctgcagcgcagcttcgggagcatgagtgctgcagtgactgcagggaagctggcacgggcaccggccgaccctgggaaagccggggtccccggagttgcagctcccggagctccggcggcggctccaccggcgaaagagatcccggaggtcctagtggacccacgcagccggcggcgctatgtgcggggccgctttttgggcaagggcggctttgccaagtgcttcgagatctcggacgcggacaccaaggaggtgttcgcgggcaagattgtgcctaagtctctgctgctcaagccgcaccagagggagaagatgtccatggaaatatccattcaccgcagcctcgcccaccagcacgtcgtaggattccacggctttttcgaggacaacgacttcgtgttcgtggtgttggagctctgccgccggaggtctctcctggagctgcacaagaggaggaaagccctgactgagcctgaggcccgatactacctacggcaaattgtgcttggctgccagtacctgcaccgaaaccgagttattcatcgagacctcaagctgggcaaccttttcctgaatgaagatctggaggtgaaaataggggattttggactggcaaccaaagtcgaatatgacggggagaggaagaagaccctgtgtgggactcctaattacatagctcccgaggtgctgagcaagaaagggcacagtttcgaggtggatgtgtggtccattgggtgtatcatgtataccttgttagtgggcaaaccaccttttgagacttcttgcctaaaagagacctacctccggatcaagaagaatgaatacagtattcccaagcacatcaaccccgtggccgcctccctcatccagaagatgcttcagacagatcccactgcccgcccaaccattaacgagctgcttaatgacgagttctttacttctggctatatccctgcccgtctccccatcacctgcctgaccattccaccaaggttttcgattgctcccagcagcctggaccccagcaaccggaagcccctcacagtcctcaataaaggcttggagaaccccctgcctgagcgtccccgggaaaaagaagaaccagtggttcgagagacaggtgaggtggtcgactgccacctcagtgacatgctgcagcagctgcacagtgtcaatgcctccaagccctcggagcgtgggctggtcaggcaagaggaggctgaggatcctgcctgcatccccatcttctgggtcagcaagtgggtggactattcggacaagtacggccttgggtatcagctctgtgataacagcgtgggggtgctcttcaatgactcaacacgcctcatcctctacaatgatggtgacagcctgcagtacatagagcgtgacggcactgagtcctacctcaccgtgagttcccatcccaactccttgatgaagaagatcaccctccttaaatatttccgcaattacatgagcgagcacttgctgaaggcaggtgccaacatcacgccgcgcgaaggtgatgagctcgcccggctgccctacctacggacctggttccgcacccgcagcgccatcatcctgcacctcagcaacggcagcgtgcagatcaacttcttccaggatcacaccaagctcatcttgtgcccactgatggcagccgtgacctacatcgacgagaagcgggacttccgcacataccgcctgagtctcctggaggagtacggctgctgcaaggagctggccagccggctccgctacgcccgcactatggtggacaagctgctgagctcacgctcggccagcaaccgtctcaaggcctcctaatagctgccctcccctccggactggtgccctcctcactcccacctgcatctggggcccatactggttggctcccgcggtgccatgtctgcagtgtgccccccagccccggtggctgggcagagctgcatcatccttgcaggtgggggttgctgtgtaagttatttttgtacatgttcgggtgtgggttctacagccttgtccccctccccctcaaccccaccatatgaattgtacagaatatttctattgaattcggaactgtcctttccttggctttatgcacattaaacagatgtgaatattcaaaaaaaaaaaaaaaaaaaaaaaaaaaaaaaaaaa

SEQ ID NO: 643 - DNA, 1838 bp, Homo sapiens
cgattacatttccggagccgccctgggtgtcagcggctcggctcccgcgcacgctccggccgtcgcgcagcctcggcacctgcaggtccgtgcgtcccgcggctggcgcccctgactccgtcccggccagggagggccatgatttccctcccggggcccctggtgaccaacttgctgcggtttttgttcctggggctgagtgccctcgcgcccccctcgcgggcccagctgcaactgcacttgcccgccaaccggttgcaggcggtggagggaggggaagtggtgcttccagcgtggtacaccttgcacggggaggtgtcttcatcccagccatgggaggtgccctttgtgatgtggttcttcaaacagaaagaaaaggaggatcaggtgttgtcctacatcaatggggtcacaacaagcaaacctggagtatccttggtctactccatgccctcccggaacctgtccctgcggctggagggtctccaggagaaagactctggcccctacagctgctccgtgaatgtgcaagacaaacaaggcaaatctaggggccacagcatcaaaaccttagaactcaatgtactggttcctccagctcctccatcctgccgtctccagggtgtgccccatgtgggggcaaacgtgaccctgagctgccagtctccaaggagtaagcccgctgtccaataccagtgggatcggcagcttccatccttccagactttctttgcaccagcattagatgtcatccgtgggtctttaagcctcaccaacctttcgtcttccatggctggagtctatgtctgcaaggcccacaatgaggtgggcactgcccaatgtaatgtgacgctggaagtgagcacagggcctggagctgcagtggttgctggagctgttgtgggtaccctggttggactggggttgctggctgggctggtcctcttgtaccaccgccggggcaaggccctggaggagccagccaatgatatcaaggaggatgccattgctccccgaaccctgccctggcccaagagctcagacacaatctccaagaatgggaccctttcctctgtcacctccgcacgagccctccggccaccccatggccctcccaggcctggtgcattgacccccacgcccagtctctccagccaggccctgccctcaccaagactgcccacgacagatggggcccaccctcaaccaatatcccccatccctggtggggtttcttcctctggcttgagccgcatgggtgctgtgcctgtgatgatgcctgcccagagtcaagctggctctctggtatgatgaccccaccactcattggctaaaggatttggggtctctccttcctataagggtcacctctagcacagaggcctgagtcatgggaaagagtcacactcctgacccttagtactctgcccccacctctctttactgtgggaaaaccatctcagtaagacctaagtgtccaggagacagaaggagaagaggaagtggatctggaattgggaggagcctccacccacccctgactcctccttatgaagccagctgctgaaattagctactcaccaagagtgaggggcagagacttccagtcactgagtctcccaggcccccttgatctgtaccccacccctatctaacaccacccttggctcccactccagctccctgtattgatataacctgtcaggctggcttggttaggttttactggggcagaggatagggaatctcttattaaaactaacatgaaatatgtgttgttttcatttgcaaatttaaataaagatacataatgtttgtatgaaaaaaaaaaaaaaaaa

SEQ ID NO: 644 - DNA, 6641 bp, Homo sapiens
ggttacattttggatcctcgcggagtactggtcaggcggttaagtcctgtacctaggaaagagggcgagctctggggcgctctccggtgtcatgaggagcttcaaaagagtcaactttgggactctgctaagcagccagaaggaggctgaagagttgctgcccgccttgaaggagttcctgtccaaccctccagctggttttcccagcagccgatctgatgctgagaggagacaagcttgtgatgccatcctgagggcttgcaaccagcagctgactgctaagctagcttgccctaggcatctggggagcctgctggagctggcagagctggcctgtgatggctacttagtgtctaccccacagcgtcctcccctctacctggaacgaattctctttgtcttactgcggaatgctgctgcacaaggaagcccagaggccacactccgccttgctcagcccctccatgcctgcttggtgcagtgctctcgcgaggctgctccccaggactatgaggccgtggctcggggcagcttttctctgctttggaagggggcagaagccctgttggaacggcgagctgcatttgcagctcggctgaaggccttgagcttcctagtactcttggaggatgaaagtaccccttgtgaggttcctcactttgcttctccaacagcctgtcgagcggtagctgcccatcagctatttgatgccagtggccatggtctaaatgaagcagatgctgatttcctagatgacctgctctccaggcacgtgatcagagccttggtgggtgagagagggagctcttctgggcttctttctccccagagggccctctgcctcttggagctcaccttggaacactgccgtcgcttttgctggagccgccaccatgacaaagccatcagcgcagtggagaaggctcacagttacctaaggaacaccaatctagcccctagccttcagctatgtcagctgggggttaagctgctgcaggttggggaggaaggacctcaggcagtggccaagcttctgatcaaggcatcagctgtcctgagcaagagtatggaggcaccatcacccccacttcgggcattgtatgagagctgccagttcttcctttcaggcctggaacgaggcaccaagaggcgctatagacttgatgccattctgagcctctttgcttttcttggagggtactgctctcttctgcagcagctgcgggatgatggtgtgtatgggggctcctccaagcaacagcagtcttttcttcagatgtactttcagggacttcacctctacactgtggtggtttatgactttgcccaaggctgtcagatagttgatttggctgacctgacccaactagtggacagttgtaaatctaccgttgtctggatgctggaggccttagagggcctgtcgggccaagagctgacggaccacatggggatgaccgcttcttacaccagtaatttggcctacagcttctatagtcacaagctctatgccgaggcctgtgccatctctgagccgctctgtcagcacctgggtttggtgaagccaggcacttatcccgaggtgcctcctgagaagttgcacaggtgcttccggctacaagtagagagtttgaagaaactgggtaaacaggcccagggctgcaagatggtgattttgtggctggcagccctgcaaccctgtagccctgaacacatggctgagccagtcactttctgggttcgggtcaagatggatgcggccagggctggagacaaggagctacagctaaagactctgcgagacagcctcagtggctgggacccggagaccctggccctcctgctgagggaggagctgcaggcctacaaggcggtgcgggccgacactggacaggaacgcttcaacatcatctgtgacctcctggagctgagccccgaggagacaccagccggggcctgggcacgagccacccacctggtagaactggctcaggtgctctgctaccacgactttacgcagcagaccaactgctctgctctggatgctatccgggaagccctgcagcttctggactctgtgaggcctgaggcccaggccagagatcagcttctggacgataaagcacaggccttgctgtggctttacatctgtactctggaagccaaaatgcaggaaggtatcgagcgggatcggagagcccaggcccctggtaacttggaggaatttgaagtcaatgacctgaactatgaagataaactccaggaagatcgtttcctatacagtaacattgccttcaacctggctgcagatgctgctcagtccaaatgcctggaccaagccctggccctgtggaaggagctgcttacaaaggggcaggccccagctgtacggtgtctccagcagacagcagcctcactgcagatcctagcagccctctaccagctggtggcaaagcccatgcaggctctggaggtcctcctgctgctacggattgtctctgagagactgaaggaccactcgaaggcagctggctcctcctgccacatcacccagctcctcctgaccctcggctgtcccagctatgcccagttacacctggaagaggcagcatcgagcctgaagcatctcgatcagactactgacacatacctgctcctttccctgacctgtgatctgcttcgaagtcaactctactggactcaccagaaggtgaccaagggtgtctctctgctgctgtctgtgcttcgggatcctgccctccagaagtcctccaaggcttggtacttgctgcgtgtccaggtcctgcagctggtggcagcttaccttagcctcccgtcaaacaacctctcacactccctgtgggagcagctctgtgcccaaggctggcagacacctgagatagctctcatagactcccataagctcctccgaagcatcatcctcctgctgatgggcagtgacattctctcaactcagaaagcagctgtggagacatcgtttttggactatggtgaaaatctggtacaaaaatggcaggttctttcagaggtgctgagctgctcagagaagctggtctgccacctgggccgcctgggtagtgtgagtgaagccaaggccttttgcttggaggccctaaaacttacaacaaagctgcagataccacgccagtgtgccctgttcctggtgctgaagggcgagctggagctggcccgcaatgacattgatctctgtcagtcggacctgcagcaggttctgttcttgcttgagtcttgcacagagtttggtggggtgactcagcacctggactctgtgaagaaggtccacctgcagaaggggaagcagcaggcccaggtcccctgtcctccacagctcccagaggaggagctcttcctaagaggccctgctctagagctggtggccactgtggccaaggagcctggccccatagcaccttctacaaactcctccccagtcttgaaaaccaagccccagcccatacccaacttcctgtcccattcacccacctgtgactgctcgctctgcgccagccctgtcctcacagcagtctgtctgcgctgggtattggtcacggcaggggtgaggctggccatgggccaccaagcccagggtctggatctgctgcaggtcgtgctgaagggctgtcctgaagccgctgagcgcctcacccaagctctccaagcttccctgaatcataaaacacccccctccttggttccaagcctcttggatgagatcttggctcaagcatacacactgttggcactggagggcctgaaccagccatcaaacgagagcctgcagaaggttctacagtcagggctgaagtttgtagcagcacggataccccacctagagccctggcgagccagcctgctcttgatttgggccctcacaaaactaggtggcctcagctgctgtactacccaactttttgcaagctcctggggctggcagccaccattaataaaaagtgtccctggctcagagccctctaagactcagggccaaaaacgttctggacgagggcgccaaaagttagcctctgctcccctgcgcctcaataatacctctcagaaaggtctggaaggtagaggactgccctgcacacctaaacccccagaccggatcaggcaagctggccctcatgtccccttcacggtgtttgaggaagtctgccctacagagagcaagcctgaagtaccccaggcccccagggtacaacagagagtccagacgcgcctcaaggtgaacttcagtgatgacagtgacttggaagaccctgtctcagctgaggcctggctggcagaggagcctaagagacggggcactgcttcccggggccgggggcgagcaaggaagggcctgagcctaaagacggatgccgtggttgccccaggtagtgcccctgggaaccctggcctgaatggcaggagccggagggccaagaaggtggcatcaagacattgtgaggagcggcgtccccagagggccagtgaccaggccaggcctggccctgagatcatgaggaccatccctgaggaagaactgactgacaactggagaaaaatgagctttgagatcctcaggggctctgacggggaagactcagcctcaggtgggaagactccagctccgggccctgaggcagcttctggagaatgggagctgctgaggctggattccagcaagaagaagctgcccagcccatgcccagacaaggagagtgacaaggaccttggtcctcggctccggctcccctcagcccccgtagccactggtctttctaccctggactccatctgtgactccctgagtgttgctttccggggcattagtcactgtcctcctagtgggctctatgcccacctctgccgcttcctggccttgtgcctgggccaccgggatccttatgccactgctttccttgtcaccgagtctgtctccatcacctgtcgccaccagctgctcacccacctccacagacagctcagcaaggcccagaagcaccgaggatcacttgaaatagcagaccagctgcaggggctgagccttcaggagatgcctggagatgtccccctggcccgcatccagcgcctcttttccttcagggctttggaatctggccacttcccccagcctgaaaaggagagtttccaggagcgcctggctctgatccccagtggggtgactgtgtgtgtgttggccctggccaccctccagcccggaaccgtgggcaacaccctcctgctgacccggctggaaaaggacagtcccccagtcagtgtgcagattcccactggccagaacaagcttcatctgcgttcagtcctgaatgagtttgatgccatccagaaggcacagaaagagaacagcagctgtactgacaagcgagaatggtggacagggcggctggcactggaccacaggatggaggttctcatcgcttccctagagaagtctgtgctgggctgctggaaggggctgctgctgccgtccagtgaggagcccggccctgcccaggaggcctcccgcctacaggagctgctacaggactgtggctggaaatatcctgaccgcactctgctgaaaatcatgctcagtggtgccggtgccctcacccctcaggacattcaggccctggcctacgggctgtgcccaacccagccagagcgagcccaggagctcctgaatgaggcagtaggacgtctacagggcctgacagtaccaagcaatagccaccttgtcttggtcctagacaaggacttgcagaagctgccgtgggaaagcatgcccagcctccaagcactgcctgtcacccggctgccctccttccgcttcctactcagctactccatcatcaaagagtatggggcctcgccagtgctgagtcaaggggtggatccacgaagtaccttctatgtcctgaaccctcacaataacctgtcaagcacagaggagcaatttcgagccaatttcagcagtgaagctggctggagaggagtggttggggaggtgccaagacctgaacaggtgcaggaagccctgacaaagcatgatttgtatatctatgcagggcatggggctggtgcccgcttccttgatgggcaggctgtcctgcggctgagctgtcgggcagtggccctgctgtttggctgtagcagtgcggccctggctgtgcgtggaaacctggagggggctggcatcgtgctcaagtacatcatggctggttgccccttgtttctgggtaatctctgggatgtgactgaccgcgacattgaccgctacacggaagctctgctgcaaggctggcttggagcaggcccaggggccccccttctctactatgtaaaccaggcccgccaagctccccgactcaagtatcttattggggctgcacctatagcctatggcttgcctgtctctctgcggtaaccccatggagctgtcttattgatgctagaagcctcataactgttctacctccaaggttagatttaatccttaggataactcttttaaagtgattttccccagtgttttatatgaaacatttccttttgatttaacctcagtataataaagatacatcatttaaaccctgaaaaaaaaaaaaaaaaaa

SEQ ID NO: 645 - DNA, 7101 bp, Homo sapiens
ccagcgtcaggccagccccggcatgctctgcggccgcccgcggtccagctccgacaacaggaattttctccgagagcgggccgggctcagttcagctgctgtccagacccggatcggcaacagtgccgcctccagacgttctcctgccgctcgcccgcccgtcccagcgcccccagccctcccgcgagggcgccccgggacggaaggatccaccagtctgtcggcgcccgccgttctcgtggtcgccgtcgccgtcgtcgtggtggtagtctccgccgtcgcctgggccatggccaattacatccacgtccctcccggctccccggaggtgcccaagctgaacgtcaccgttcaggatcaggaggagcatcgctgccgggagggggccctgagcctcctgcaacacctgcggcctcactgggacccccaggaggtgaccctgcagctcttcacagatggaatcacaaataaacttattggctgttacgtgggaaacaccatggaggatgtagtcctggtgagaatttatggcaataagactgagttattagtcgatcgagatgaggaagtaaagagttttcgagtgttgcaggctcatgggtgtgcaccacaactctactgtaccttcaataatggactatgctatgaatttatacaaggagaagcactggatccaaagcatgtctgcaacccagccattttcaggctaatagctcgtcagcttgctaaaatccatgctattcatgcacacaatggctggatccccaaatctaatctttggctaaagatgggaaagtatttctctctcattcccacaggatttgcagatgaagacattaataaaaggttcctaagtgatatcccaagctctcagattctccaggaagagatgacttggatgaaggagattctttccaacctgggctcacctgttgtgctttgccataatgacctattgtgtaagaatataatctacaatgagaaacaaggtgatgtacagttcattgattatgaatattctggatacaactacctggcatatgatattggaaatcatttcaatgaatttgcaggtgtgagtgatgtagactatagtctgtatccagatagagaactacagagtcagtggctgcgtgcttaccttgaagcctacaaagaatttaagggctttgggactgaagttactgaaaaggaggtagaaatactcttcattcaagtcaatcagtttgcattggcttctcatttcttttggggattgtgggctttgattcaagccaaatactccactattgagtttgatttccttgggtatgcaattgttcgttttaaccagtactttaaaatgaagcctgaggttactgcattaaaagtgcctgagtaaagaagagatttaattattctccagtagctgagcaatgcttgtgaatcttttcttaagaaatcccaaaaagccaatattagttaaaattctgttgtttaatttggttatcttgctttataaattatgcctctaaacaatcaaatctatttttgaaatagactgaatgatgtcaagaaatatacctactgctatccgtatgtggtggattagaaatgtgttaaatctgcaaaaggtataaagatgtcagtttaatttctttgataatttaacctatgttgtatgtgaattatttattataaacttagcacgattctgtgactgtttttctctgtttcacgttcgttgagtgtaagcaatgaaaatgtcccaaataagttttttaagttttactttaataagattaatttcagtaaacattctagttgttcagtgtaacctttttatcttgatgcattgtaagtaaaatgaatcatttactcttgaaatgccagtcattgactgatgtagataatttaggattttcatataaaaatagctgtttaggaaggtgaaatacattcactgtctctgttggtggtacatcttgttgaattcaatattagaaagtatttctttttggggtaatataacttagaattaaatccctgtttctctatgtagtctggcagtataaatataaatatttaccatataatcttggaataagtattagttaatgttaccaaaatctgtattaaataatgttttcaaatgctaaatatggtcgttactattttcagttttaaaaattttatagtatcaaattgtttctaaccaaaaatttccttttacttctagagatgctttatgtttttgattattaaatagtcactagtattgctaatttttgaaacaaatacacaaaatttatcatatgtagaaataagaaaatattgtttaggttaattattttttacctatccagagtcattccttacatttcagtttcatgtttcattcctcacattttagtttcatgttttagtttgattctatgtttttagactgatagcaaatgattacttgatacatgtaagttcagcgttatatgttgaggcagttatataattaaataaggaacacttagggcattgatcttgtacacttaaaatctgacaaatgacaaaatgtgaattaagcataaatagtcatggcaggagggcttttgtttatttctcttgtttttgtttaactgtatttttaattttgtctggtggtaagagggaggtaattattgtatggaaagaagttagatctttcagatagataaataggcttcaggttttgaagtctgctctgtgtagttgagcagtcatggttaactttacttagaaaattagtctgacaagctttgcacttcggtcacataagtgcccatgtacaaagttggcttactggatctgcatattcaaaatatgcaactacaaatttatcctctgagaaatcttctgaggagtctaatgtattccaaatgacttaatattctcagacaaatgctttaaaatacttggattatctcaagatttttgaagctaataaagtaaatagaaacacaggccattttaaatggtaaattctagttacataaatataatcttaaagtatgtttgtatctgtaacagtgttagaccagatttggtttctacctccccaatgttataaatgttcacttttgtttttataaaccatattactgtaagatcaatagaactttgcctagttaagtgaatggaaccaattaaacaactagtagctttttataatgttagtgtgaacttgaaaaattgtttttggtggaatttttgtctgtggttagaacattttcataaaacagataaagaatgtgtaatactcttaattttttttttttttttttttttttttttgctttctgccttctaaagtgcaacagtatatatcttgtagaactgtgggaggagagaagataatttttctaccttactccatattcttacttcaaactattttgaatagaggttcactgagccattgctgatagactgtgcatagctactagctgtcacactattgtaggttttttggagagattcatagggaagtgaatgtaaccaggaataaaggctctcactttagctctgggactatgcagtggatcttgggaacaaaataagatatctaatctattttccccattctggctagattttggttgttgtgatgctcctacttcctgtataggtttttgggatcatggtgcaggctagtaataggattcagaattgcttcccttttatatcgaccatgtaagggattctaaaggagggtaaatctcaaagtgctctgaaatcatccctctaaaatctgtcctgtggtgtgctaagatgtctgttgcctttttatgttaagctaaggaacttgaatgccttacctaataactcaactagtagtaagctcattttgtaaatatgaaaatggctgtaagaagtggcattcatgtatattcaatgttagtcaatagaccatagtggcctggatgctttaacaagccaaattccgcaattttttttccttttttccccttcatacttgtatgatctcacctgaccagtgatttcttttcctcctaaccccatgctaccaccattttctggaaatcaaagagatgtggtagtaaatcatacagtacacacgatcatctgagatcaatatgagcacaaaactcatcaagtaggtctgcctggaatgtatataaaaaatgtaaataaaaatttgtaaattagtgtgaactgtatcttgcatatgagactgtgtattgttttgcattctcttcccttttgtagaaatttttctgtaaggaaatgattcagcttgttggttttagagtaaaaatagccaacagttgtggctacacagtgagatcacaggaactggaaatagggtttgtcggctttggttaatgtcagtactcatttatttagcctctcagtgcttaataagacttttctttattttttagttagccgttaggttttgtgaggttagattcctggaagcagtgaatttatacactgttatattaatagagctccgttctttgagtcatgattccaagctaaaggaaattaaaaatgtaatttaataatttcctatttttagggttgttaatttttttctacaaaaaaaccttgaaattttagatatcccaatgtgaatctaatttccatatatacagaaattagacaaataataagtctttagttcaacttaagcatatctcaaatgacttctctaaatttaaagttgatcatgataggatcataaaagacagaaaagacttaagtaatcttgtaatgacaattatttccatttttgctgaactaaaaatatttaacttcataaatatgttactacagcttccagatttaaagaaaaaaagtttcccccactctcaattaaaagttagaaccctccacttttaaaattatacaaatatttcttttttacattacacagaagccttctgtaccattttacgaatttctgtcttcataatataagtgaaaatactgtcatttcaattttctgctttaaattgtttttaataagcattccaaagtgatacagacttaagcttttaatcaatcagtcattcagttgatagacaaagttagcgatgctttatgctaggaaacttgttgacagtaacctgtgcgactttatgcagaagacaaatgctagtaattattatgcacagaggaaaaatcattttaagtatgtggtaaagcagcttcatctttcaaaattgatttgctctggtttttctttagtccattagattccagaatgtccttttactgggaatttagttatgtattaagataacctgttttcagttctttttgaaaagaagacattatttatattgaaccaccttattttaaaatttttaacttttatataccacttgtgtgattccagtgtcatgtcttgggtttgatgtcgttggacagaaaagtgtatcaattattttaaatgaatttttccccatgtttgaggcttagtctgtaaatgtgttgctgtaacagaaaatacttgggtatgcattacttgaatacttgaaaactgaaattaataagatgtattacataatgaattagatttctctgaacagtttttacactgaaaatcttcatttctggattgcagtttgaaatggaatgaagacctgaattatttgggtagaaaaaattatgatagtgcttataagaactgtaaactgttttaaactattttgtgtttgacgcatcaaacttcaagttttttgtaagtttctctcctgaaattttctttctcttctatactttatgcacttactatactactgatgtaataaaagagcagggttaaaaatattgtatctgtattcattgtgaatcctgtagcttttctagttaacaaaaaatcgctttctaaaatactcttaatcccattgttttggttaacatcttacccatttgttgtatttcaaatgccattaatcattttagtacaacacctatgtttataaaaatttgaaaacattacatattgtatttaaaactaattagtgaagagtaagaaaaaaactagccaacagaattgtaggtgatgcattagttaaatttcaaaactcataataaaggaactttcagagattggttgaaacccagtggtatccctgtaaattagctcctgtgactggaaaagaccccaaaaaggcagtagaggagattagtgtttacttgctgtggttgtggtgtgctgctacttaattataggtagtgacacactgaaattcttatttgtccaataatctgaagtagtttcctatatttatctgtactaaattgactataaattgagtctgcaaagaggaaactttttgactgtactgtatttaggagcctttgtacagcttggtcaaatttccatgatatgaagtatttgagttttaaaatatactgttattaaaaggaaaaagacatggccattattccatgtgcttaaatgataatttccttattcagtttcagaagaaaaagaatgaaattgggtaactgtcattgcgttagctttatgttgaattgggaaattgtggcataaagcttaaattcgtgtttatcaaatgtgaaccatagtagtataatgctgctttgtatataatgtaagtgctacaaatagtctcagcactgaaaatgtattgatacctcttaaatgaatgcaacttttgatgtaggtgttttgctatgcctcagaaaatatctgtctgagaatttgttaatctgtttgataatgaagatacttcctgttttcttgtttcatattttcatgttcaaaatttaagttttacatttttactactgttaatttaaataaaatttgttctgtggataaaatgaggttggcagtgaagaaaattaaaaacagcctcattcatgtaactggttaagtaaaaatacattttcactatgtgttcataaacttttaatgaagctgtttgtctttcagttcaaatataagtgatgtttaggctttatttctgttaataaggctttttaccattgattaaatgaaggaatgtatctttttgaagagatttatattctgtaaataaaaattcgttgtaacaataaagttgagttctaactacagtgtattca

SEQ ID NO: 646 - DNA, 910 bp, Homo sapiens
ccagcgtcaggccagccccggcatgctctgcggccgcccgcggtccagctccgacaacaggaattttctccgagagcgggccgggctcagttcagctgctgtccagacccggatcggcaacagtgccgcctccagacgttctcctgccgctcgcccgcccgtcccagcgcccccagccctcccgcgagggcgccccgggacggaaggatccaccagtctgtcggcgcccgccgttctcgtggtcgccgtcgccgtcgtcgtggtggtagtctccgccgtcgcctgggccatggccaattacatccacgtccctcccggctccccggaggtgcccaagctgaacgtcaccgttcaggatcaggaggagcatcgctgccgggagggggccctgagcctcctgcaacacctgcggcctcactgggacccccaggaggtgaccctgcagctcttcacagatggaatcacaaataaacttattggctgttacgtgggaaacaccatggaggatgtagtcctggtgagaatttatggcaataagactgagttattagtcgatcgagatgaggaagtaaagagttttcgagtgttgcaggctcatgggtgtgcaccacaactctactgtaccttcaataatggactatgctatgaatttatacaaggagaagcactggatccaaagcatgtctgcaacccagccattttcagtttatcatcgttgactctttgcaaaggaaaaactacaagatgttttggattaaccggctgcagagggtcaaggcttctgcttagttttttctagttagtgtttgagttgaagtgttatacatttcttactgccgattgcttattacttaattgttcatgttttcagagttcttgcctattaaaattttattaatttggttaacaa

SEQ ID NO: 647 - DNA, 1670 bp, Homo sapiens
gatttcctcccacgcgaccttccagttctcggagccaggttaggggtttggcggaggaggactgcggggcgcgggcctagggccccagcagccacggccaggggagcgctcaagacagaaagccggtggcttcctcacctccacctgtaatgcaggagggagaattggctatttctcctataagccctgtggcagccatgcctcccctaggcacccacgtgcaagccagatgtgaagctcaaattaacctgctgggtgaaggggggatctgcaagctgccaggaagactccgcatccagcccgcactgtggagcagggaggacgtgctgcactggctgcgctgggcagagcaggagtactctctgccatgcaccgcggagcacgggttcgagatgaacggacgcgccctctgcatcctcaccaaggacgacttccggcaccgtgcgcccagctcaggtgacgtcctgtatgagctgctccagtacatcaagacccagcggcgagccctggtgtgtggacccttttttggagggatcttcaggctgaagacgcccacccagcactctccagtccccccggaagaggtgactggcccctctcagatggacacccgaaggggccacctgctgcagccaccagacccagggcttaccagcaacttcggccacctggatgaccctggcctggcaaggtggacccctggcaaggaggagtccctcaacttatgtcactgtgcagagctcggctgcaggacccagggggtctgttccttccccgcgatgccgcaggcccccattgacggcaggatcgctgactgccgcctgctgtgggattacgtgtatcagctgctccttgatacccgatatgagccctacatcaagtgggaagacaaggacgccaagatcttccgagttgtggatccaaatgggctcgccagactctggggaaatcacaagaaccgggtgaacatgacctacgagaagatgtctcgtgccctgcgccactattataagcttaatatcattaagaaggaaccggggcagaaactcctgttcagatttctaaagactccgggaaagatggtccaggacaagcacagccacctggagccgctggagagccaggagcaggacagaatagagttcaaggacaagaggccagaaatctctccgtgaggggcaggtggactccaggcacccggtaccgatggggcagggaccgagtctcccatgaaggcagactcctcctcccagcagagcagcaggatccccagccagactctgtacccacaggattacagccattgcttgggaaggctgggaggcctcccatccaggacactgggggcaggagtgtcatcttttgggcagggcaatcctggggctaaatgaggtacaggggaatggactctcccctactgcacccctgggagaggaagccaggcaccgatagagcacccagccccacccctgtaaatggaatttaccagatgaagggaatgaagtccctcactgagcctcagatttcctcacctgtgaaatgggctgaggcaggaaatgggaaaaagtgttagtgcttccaggcggcactgacagcctcagtaacaataaaaacaatggtagctgaaaaaaaaaaaaaaaaaaaaaaaaaaaaaaaaaaaaaaaaaaaaa

SEQ ID NO: 648 - DNA, 1853 bp, Homo sapiens
gagggtctgtggtcctctgatcaacataggctggtgggagtacaggactcgcctcctcagggttccctgtgctgccacttttcagccatggccacaagtgaacagagtatctgccaagcccgggcttccgtgatggtctacgatgacaccagtaagaaatgggtaccaatcaaacctggccagcagggattcagccggatcaacatctaccacaacactgccagcaacaccttcagagtcgttggagtcaagttgcaggatcagcaggttgtgatcaattattcaatcgtgaaagggctgaagtacaatcaggccacgccaaccttccaccagtggcgagatgcccgccaggtctacggcttaaactttgcaagtaaagaagaggcaaccacgttctccaatgcaatgctgtttgccctgaacatcatgaattcccaagaaggaggcccctccagccagcgtcaggtgcagaatggcccctctcctgatgagatggacatccagagaagacaagtgatggagcagcaccagcagcagcgtcaggaatctctagaaagaagaacctcggccacagggcccatcctcccaccaggacatccttcatctgcagccagcgcccccgtctcatgtagtgggcctccaccgccccccccacccccagtcccacctccacccactggggctaccccacctcccccacccccactgccagccggaggagcccaggggtccagccacgacgagagctccatgtcaggactggccgctgccatagctggggccaagctgagaagagtccaacggccagaagacgcatctggaggctccagtcccagtgggacctcaaagtccgatgccaaccgggcaagcagcgggggtggcggaggaggcctcatggaggaaatgaacaaactgctggccaagaggagaaaagcagcctcccagtcagacaagccagccgagaagaaggaagatgaaagccaaatggaagatcctagtacctccccctctccggggacccgagcagccagccagccacctaactcctcagaggctggccggaagccctgggagcggagcaactcggtggagaagcctgtgtcctcgattctgtccagaaccccgtctgtggcaaagagccccgaagctaagagcccccttcagtcgcagcctcactctaggatgaagcctgctgggagcgtgaatgacatggccctggatgccttcgacttggaccggatgaagcaggagatcctagaggaggtggtgagagagctccacaaggtgaaggaggagatcatcgacgccatcaggcaggagctgagtgggatcagcaccacgtaaggggccggcctcgctgcgctgattcgtcgagcccatccggcgacagaggacagccagaagcccagccagccccagactccagtgcaccagagcacgcacaggagcctgggcgcgctgctgtgaaacgtcctgacctgtgatcacacatgacagtgaggaaaccaagtgcaactcctgggtttttttagattctgcctgacacggaacaccaggtctgctcgtcttttttgtgttttatatttgcttatttaaggtacatttctttgggtttctagagacgcccctaagtcacctgcttcattagacggtttccaggttttctcccaggtgacgctgttagcgcctcagctggcggtgacagccggcccagcgtggcgccaccacacaccgcagagctgtccaggcacagctccgtccccagcgctcatggtgttgaaactgtctgtcatgcaccacggtgtctgtgtccacacagtaataaacggtttactgtccgcaaaaaaaaaaaa

SEQ ID NO: 649 - DNA, 6457 bp, Homo sapiens
gctgaccagccagtgaggacgcccgctgcctcccacctgccctcctgccgtctttcgccagccaagcccagcctgagccagcacttgcctttacgaccatgttcaaggggctgagcaaaggctcccaggggaaggggtcccccaagggctcccccgccaaggggtcccccaaaggctcccccagcaggcacagccgggctgccacccaggagctggcccttctcatctcccgcatgcaagccaacgccgaccaggtggagcgggacatcctggagacgcagaagaggctgcagcaggaccggctgaacagtgagcagagccaggccctgcagcaccagcaggagacgggccgcagcctgaaggaggctgaggtgctgctcaaggacctcttcctggacgtggacaaggcccggcggctcaagcacccgcaggctgaggagattgagaaggacatcaagcagctgcacgagcgggtgacccaggagtgtgcggagtaccgtgccctgtacgagaagatggtgctgccccccgacgtgggacccagggtcgactgggcacgcgtgctggagcagaaacagaagcaggtctgcgcaggccagtacgggccgggcatggcggagctggagcaacagatcgccgagcacaacatcctgcagaaggagatcgacgcctatgggcagcagctgcggagcctcgtggggccggatgcagccaccatccggagccaataccgagacctactgaaggcggcgtcgtggcgcgggcagagcctgggcagcctgtacacgcacctccagggctgcacgcggcagctgagcgccctggctgagcagcagcgccgcatcctgcagcaggactggagcgacctcatggccgaccctgcgggcgtgcggcgggagtacgagcacttcaagcagcacgagctgctgagccaggagcagagcgtgaaccagctggaggacgacggcgagcgcatggtggagctgcggcaccccgcggtggggcccatccaggcccaccaggaggccctgaagatggagtggcagaacttcctgaacctgtgtatctgccaggagacccagctgcagcacgtggaggactaccgccggttccaggaagaggccgactcagtcagccagaccctggcgaagctcaactccaacttggatgccaagtacagccctgcacctgggggcccccctggcgcccccacagagctgctgcaacagctggaggcagaggaaaaacggctggccgtcaccgagagggccactggggacctgcagcggcgaagccgggatgtggcccctctgccacagcgaagaaacccccctcagcagcccctgcacgtggacagcatctgcgactgggactcaggagaagtgcagctgctgcagggtgagcggtataagctggtagataacactgaaccgcacgcctgggtcgtgcagggccctggcggggagaccaagcgtgctcccgccgcctgcttctgcatcccagcaccagaccctgatgctgtggccagggcctcccggctggcctcagagctgcaggccctgaagcagaaattggccacagtccagagccgcctgaaggccagtgctgtggagtctcttcggcccagccagcaggctccatctggctcagacctggccaacccacaggcccagaagctcctgacacagatgacccggctggatggagacctgggacagatagagaggcaggtgctggcctgggcgcgggccccgctgagccgccccacacccttggaggacttggagggccgcatccacagccatgagggcacagcccagcgcctgcagagcctgggaacggagaaggagacagcccagaaggagtgcgaggcgtttctgtccacgcggcccgtgggccccgctgccctgcagctgcccgtagccctcaacagcgtgaagaacaagttcagtgacgtgcaggttctgtgcagcctctacggggagaaagccaaggctgccctggatctggagcggcagatccaggatgcggacagggtcatccgaggcttcgaggccaccctggtgcaggaggcccccatccctgctgaaccgggggctctgcaggagagggtcagcgagctgcagcgccagcggagggagctgctggaacagcagacctgcgtgctgcggctacaccgcgcgctgaaggcctcggagcacgcatgcgctgccctgcagaacaacttccaggagttctgccaagacctgcctcgccagcagcgccaggtgcgagccctcaccgaccgctaccacgccgtaggggaccagctggacctgcgggagaaggtggtgcaggatgccgccctcacctaccagcagttcaagaactgcaaggataacctgagctcctggctggagcacctgccccgcagccaggtgcggcccagcgacggccccagccagatcgcctacaagctgcaggcgcagaagaggctgacgcaggagatccagagccgagagcgggacagggccacagcatcccacctctcccaggccctgcaggcagcgctccaggactatgagctccaggcagacacctaccgctgctctttggagcccaccctggcagtgtcagcccccaagagaccccgagtggctcccctgcaagagagcatccaagcccaggagaagaaccttgcaaaggcctatactgaggttgcagcagcacagcagcagctgctccagcagctggagtttgctagaaaaatgctggagaagaaggagctcagtgaggacatccgaaggacccatgatgcaaagcagggctccgagagccctgcccaagcagggagagagtcagaggccctgaaggcccagctggaagaggagaggaagcgggtggcccgggtgcagcatgagctggaggcgcagaggagccaactgctgcagctgaggacccagcggcccttggagaggctggaggagaaggaagtggtagagttctaccgggacccccagctggagggcagcctgtccagggtgaaggcccaggtggaggaggagggcaagcggcgggctggcctgcaggcagacctggaagtggcagcccagaaggtcgtgcagctggaaagcaagaggaagaccatgcagcctcatctgctgaccaaggaggtcacccaggtggagagggaccccggcctggacagccaggcggcccagctcaggatccagatccagcagctccgcggggaggatgccgtcatctcggcccggctggaagggctgaagaaggagctactggcccttgagaagagggaggtggacgtgaaggagaaggtcgtggtgaaagaggtagtcaaggtggagaagaatctggaaatggtcaaggcagcccaggctctgaggctgcagatggaggaggatgctgcgcggaggaagcaggcggaggaggctgtggccaagctacaggctcgcatcgaagacctggagcgggctatcagctcggtggagcccaaggtcatcgtgaaggaggtgaagaaggtggagcaggacccagggctcctccaggagtcctccaggctgaggagcctcctcgaggaggagaggaccaagaacgcgacgctggccagggagctgagcgacctgcacagcaagtacagcgtggtggagaagcagaggcccaaagtgcagctccaggagcgcgtccacgagatcttccaggtggatccggagacagagcaggagatcactcggctcaaggccaagctgcaggagatggcgggcaagaggagcggtgtggagaaggaggtggagaagctgctgcccgacctggaggtcctgcgggcccagaagcccacggtggagtacaaggaggtgacccaggaggtggtgaggcatgagaggagccccgaggtgctgcgtgagatcgaccgcctgaaggctcagctcaacgagctcgtcaacagccacgggcgctcccaggagcagctcatccgcctgcagggtgagcgcgacgagtggaggcgcgagcgggccaaggtggagaccaagacggtgagcaaggaggtggtgcgccacgagaaggacccggtgctggagaaagaagcagagcggctccgccaggaggtgcgggaggcggcccagaagaggcgggccgcggaggacgcggtgtacgagctgcagagcaagcgcctgctgctggagaggaggaagcccgaggagaaggtggtggtgcaggaggtggtggtcacccagaaggacccgaagctgcgcgaggagcacagccggctgagcgggagcctggatgaggaggtgggccggcggcgccagctagagcttgaggtgcagcagctgcgggccggcgtggaggagcaggagggcctgctcagcttccaggaggaccgcagcaagaagctggccgtggagagggagctgcggcagctgaccttgaggatccaggagctcgagaagcggcctcccacggtgcaggagaagatcatcatggaggaagtggtcaagctggagaaggacccggacctggagaagtccacggaagccctgcggtgggacctggaccaggagaagacccaggtaaccgagctgaatcgggagtgcaagaacctgcaggtccagattgacgtcctccagaaagccaaatcgcaggagaagaccatctacaaggaagtgatccgggtgcagaaggaccgcgtcctggaagatgagcgggcccgcgtgtgggagatgctcaacagggagcgcacggcccggcaggcccgggaggaggaggcacggcgcctgcgggagcgcattgaccgggccgagacgctggggagaacctggtcccgggaggagtccgagctgcagagggcccgggaccaggccgaccaggagtgtgggcggctgcagcaggagctgcgggctctggagaggcagaagcagcagcagacactgcagctgcaggaggagtcgaagctgctcagccagaagacggagagcgagcgacagaaggcggcccagcggggccaggagctctcgcggctggaggcggccatcctccgcgagaaggaccagatctacgagaaggagcggacgctccgggacctccacgccaaggtgagccgggaggagctcagccaggagacccagacgcgagagaccaacctttccaccaagatctccatcctggaacccgagacggggaaggacatgtccccatacgaggcctacaagaggggcatcatcgacaggggccagtacttgcagctgcaggagctcgagtgtgactgggaggaggtcaccacctcggggccctgtggggaggagtctgtgctcctggaccgcaagagcgggaagcagtactccatcgaggccgccctccgctgccggcgcatctctaaggaggagtaccatctgtacaaggacggccacctgcccatctccgagtttgcgctgcttgtagctggggagaccaagccaagctcctcactctccatcggctctatcatctccaagtccccgctcgcctccccggccccccagagcaccagtttcttctctcccagcttctctctcgggctcggtgatgacagcttccctatcgccgggatctatgacacaaccacagacaacaagtgcagcatcaagacggccgtggccaagaacatgctggaccccatcactgggcagaagctactggaggcccaggcggccacagggggcatcgtggacctgctcagccgtgagcgctactctgtgcacaaggcgatggagaggggcctgatcgagaacacctccacacagaggctgcttaacgcccagaaggccttcaccggcatcgaggaccccgtcaccaagaagaggctctcggtgggcgaggccgtccagaagggctggatgccccgggagagcgtgctcccacacctgcaggtgcagcacctgaccggggggctcatcgaccccaagaggacaggccgcatccccatccagcaggccctcctctccgggatgatcagtgaagagctggcccagctcctgcaggacgagtccagctacgagaaggatttgacagaccccatctccaaggaacggctgagctacaaggaggccatgggccgctgccgcaaagaccccctgagcggcctgctgctcctgccagcggcactggaggggtaccgctgctaccgctccgcctcccccaccgtcccgcgctcccttcgctgacacgggccaaggagccagtggggaagtgcgtgtgttgggccaggtaggatacgtacacctcttgcctcagagcagcctcatcccaggcagtgggtcttccctctgtccaaccactgttttattattttactaacatggtgatgggctccctcccctaaccttggtgcctgatccatccccagaccaggacagcagccactcagttcttcctccacctccacccagtgatcccaataaacgaattctgtctccccgtg

SEQ ID NO: 650 - DNA, 3140 bp, Homo sapiens
cccgtgttctgcgttgccggccgtgggtgctctggccacagtgagttaggggcgtcggagcgggtttctccaaccgcaatcggctccgctcaaggggaggaggagagtcccttctcggaaggcctaaggaaacgtgtcgtctggaatgggcttgggggccacgcctgcacatctccgcgagacagagggataaagtgaagatggtgctgttattgttacctcgagtgccacatgcgacctctgagatatgtacacagtcattcttactatcgcactcagccattcttactacgctaaagaagaaataattattcgaggatatttgcctggcccagaagaaacttatgtaaatttcatgaactattatatccgttttcctcggagtgagagaaaactctttttagatatcatctgagaggtagttaatttggcaccatggggatacagggattgctacaatttatcaaagaagcttcagaacccatccatgtgaggaagtataaagggcaggtagtagctgtggatacatattgctggcttcacaaaggagctattgcttgtgctgaaaaactagccaaaggtgaacctactgataggtatgtaggattttgtatgaaatttgtaaatatgttactatctcatgggatcaagcctattctcgtatttgatggatgtactttaccttctaaaaaggaagtagagagatctagaagagaaagacgacaagccaatcttcttaagggaaagcaacttcttcgtgaggggaaagtctcggaagctcgagagtgtttcacccggtctatcaatatcacacatgccatggcccacaaagtaattaaagctgcccggtctcagggggtagattgcctcgtggctccctatgaagctgatgcgcagttggcctatcttaacaaagcgggaattgtgcaagccataattacagaggactcggatctcctagcttttggctgtaaaaaggtaattttaaagatggaccagtttggaaatggacttgaaattgatcaagctcggctaggaatgtgcagacagcttggggatgtattcacggaagagaagtttcgttacatgtgtattctttcaggttgtgactacctgtcatcactgcgtgggattggattagcaaaggcatgcaaagtcctaagactagccaataatccagatatagtaaaggttatcaagaaaattggacattatctcaagatgaatatcacggtaccagaggattacatcaacgggtttattcgggccaacaataccttcctctatcagctagtttttgatcccatcaaaaggaaacttattcctctgaacgcctatgaagatgatgttgatcctgaaacactaagctacgctgggcaatatgttgatgattccatagctcttcaaatagcacttggaaataaagatataaatacttttgaacagatcgatgactacaatccagacactgctatgcctgcccattcaagaagtcatagttgggatgacaaaacatgtcaaaagtcagctaatgttagcagcatttggcataggaattactctcccagaccagagtcgggtactgtttcagatgccccacaattgaaggaaaatccaagtactgtgggagtggaacgagtgattagtactaaagggttaaatctcccaaggaaatcatccattgtgaaaagaccaagaagtgcagagctgtcagaagatgacctgttgagtcagtattctctttcatttacgaagaagaccaagaaaaatagctctgaaggcaataaatcattgagcttttctgaagtgtttgtgcctgacctggtaaatggacctactaacaaaaagagtgtaagcactccacctaggacgagaaataaatttgcaacatttttacaaaggaaaaatgaagaaagtggtgcagttgtggttccagggaccagaagcaggtttttttgcagttcagattctactgactgtgtatcaaacaaagtgagcatccagcctctggatgaaactgctgtcacagataaagagaacaatctgcatgaatcagagtatggagaccaagaaggcaagagactggttgacacagatgtagcacgtaattcaagtgatgacattccgaataatcatattccaggtgatcatattccagacaaggcaacagtgtttacagatgaagagtcctactcttttgagagcagcaaatttacaaggaccatttcaccacccactttgggaacactaagaagttgttttagttggtctggaggtcttggagatttttcaagaacgccgagcccctctccaagcacagcattgcagcagttccgaagaaagagcgattcccccacctctttgcctgagaataatatgtctgatgtgtcgcagttaaagagcgaggagtccagtgacgatgagtctcatcccttacgagaaggggcatgttcttcacagtcccaggaaagtggagaattctcactgcagagttcaaatgcatcaaagctttctcagtgctctagtaaggactctgattcagaggaatctgattgcaatattaagttacttgacagtcaaagtgaccagacctccaagctatgtttatctcatttctcaaaaaaagacacacctctaaggaacaaggttcctgggctatataagtccagttctgcagactctctttctacaaccaagatcaaacctctaggacctgccagagccagtgggctgagcaagaagccggcaagcatccagaagagaaagcatcataatgccgagaacaagccggggttacagatcaaactcaatgagctctggaaaaactttggatttaaaaaagattctgaaaagcttcctccttgtaagaaacccctgtccccagtcagagataacatccaactaactccagaagcggaagaggatatatttaacaaacctgaatgtggccgtgttcaaagagcaatattccagtaaatgcagactgctgcaaagcttttgcctgcaagagaatctgatcaatttgaagtccctgtttgggaatgaggcacttatcagcatgaagaattttttctcattctgtgccattttaaaaatagaatacattttgtatattaactttaaaaaaaaaaaaaaaaaaa

SEQ ID NO: 651 - DNA, 4780 bp, Homo sapiens
ggaagtgggtgtgacggggacgggggcccggtgggcccgcggaggaaagatactggggagtgggagccgcggggttcagagcgatgattcccccacaggaggcatccgctcgacggcgggagattgaggacaagctgaagcaggaggaggagactctgtccttcatccgagacagcctggagaagagcgaccagctcactaagaacatggtgtctatcttatcatcctttgagagccgccttatgaagctggagaactccatcatccctgtgcacaagcagacggagaatctgcagcggctgcaggagaatgttgagaagacgctgtcctgcctggaccatgtcatcagctactaccatgtggccagtgacactgagaagatcatcagagagggccccacaggtaggctggaagagtacctgggaagcatggccaagattcagaaggcagtggagtatttccaggacaacagcccagacagcccggaactcaacaaagtgaaactgctctttgagcgcgggaaggaggccctggagtccgaatttcgcagcctgatgacgcggcacagtaaggtcgtctcgcccgtgctcatcttggatctgatcagtggtgacgatgatctggaggcccaggaggacgtgaccctggagcacctgcccgagagcgtgctccaggatgtcattcgcatctcccgctggctggtggaatatggccgcaaccaagatttcatgaacgtctactaccagatacgctccagccagctggaccgctccatcaaaggactgaaggagcatttccataagagcagttcttcctctggggttccctactcccctgctatccccaacaagaggaaagacacacctaccaagaagccagtcaagcggccagggacgatccgtaaggctcagaaccttctgaaacagtattcccagcatggtctagatgggaaaaaggggggctctaacctcattcctctggaagggagagatgacatgctggacgtggagaccgatgcctacatccactgcgtcagtgccttcgtcaagctggcgcagagcgagtaccagctgctggccgacatcatccccgagcaccaccagaagaagaccttcgactccctgatacaggatgccctggatgggctgatgcttgaaggggagaacatcgtgtctgctgcccggaaggccattgtgcgacacgacttctccacggtgctcaccgtcttccccatcctgcgacacctcaagcagaccaagcctgagtttgaccaggtgctccagggcacggctgccagcacaaagaacaagctgcctggcctcatcacatccatggagaccatcggtgccaaagcgctggaggacttcgcagacaacatcaagaatgacccggacaaggagtacaacatgccgaaggacggcaccgtacacgagctcaccagcaatgccatcctcttcctgcagcagcttttggacttccaggagacggcaggcgccatgctggcctcccaagagaccagctcttcggccaccagctacagctctgagttcagcaagcggctgctaagcacctatatctgtaaagtgctgggcaacctgcagttgaacttgctgagcaagtccaaggtgtacgaggacccagctctgagcgccatcttcctgcacaacaactacaattacatcctcaagtccctggagaagtctgaactgatccagctggtggcagtgacacagaagactgctgagcgctcctaccgggagcacattgagcagcagatccagacctaccagcgcagctggttaaaggtgactgattacatcgcagagaagaatctacctgtgttccagccgggagtcaagctccgggacaaggagcggcagattatcaaggagcgttttaagggcttcaatgatggcctcgaagaactgtgcaaaatccagaaggcctgggctattccagacacagagcagagggacaggattcgccaggcccagaagaccattgtcaaggagacctacggggcctttctacagaagtttggcagcgtgcccttcaccaagaacccggagaagtacatcaagtacggggtggagcaggtgggcgacatgatcgatcgccttttcgacacctctgcctgagcctgctgctagccctgcctggttccaccagactggcgtgtcattggacagataaaccagtgttagcttgcctctgggctgggtgagcttgaagtcctctgggacagagacctgtctccacgcctccgggagctgtgtccctgagccccctagtcctggctcctgctttttccccacagcccgtgttcccagccgaaccagcactctcccggaagcctggggtccctccacaccttggcttttatgaccctgatggcttctgaaacaggaaaagagagaaggaagacagaggcctgtgcccactgctgctccatgtgtaccaagagcagcagggcagaagggccctccctccagcctaggtcagaggtggggacagagaactcccctacagcccagagatgtggcagggctcagagaagcagccagagctcctggaggaaaggcagtcgggactgaccccctctcttaaaacacattcccgcccgcccacaggcctgaggtctgggacctttccctcccaggagtcccctaggtggctgggggaggcaggctcactggccattttccctagagtccagcacactgcaggaggcgttcggaggaggagttccgccccaccctctacagccttcctcaggcccctgtctctggcccccagcctcagtgcctcttggcccagggccaggcagtcgtggttgcagaaggagcaattaggctgcctgcctgtgggctgggagacagggacaatggggaaaagttaaggagcaaaatgggggttggaagcaaaaaatagggccccacctatttaggacgagattgaagactgacccttgaggcacacttgcactggagatgggtttatttcacgctctgtgcttgtgtgctagcggagggagagctcagggtggcttaatccagaggccctgtcatggcccgcccccagccatgggaaagcaaacttcatcctaaggtgtgcagcccaggccctgcccctttacagtctaggccgcctgccatggggtgcagcctctccaggggctgcgtcagacttgcacgctgcccacatccagattcctgcaaagacgaattgggtgcacagcaccccaaccacatacacgaggaagaagatgcggtcagcagtctcaggccagcttctctgtgacccctttactcctctggagggctctgtggggagagatacagggaaaggagctgttcttcaaggtcccctcaacatgagcggaagagcgaaccccaggggtcatcagcctgtatcgcttcctttcttagattctcagctgatgaaaatttgggtctggcccatttcaggccatcttcagttgaagaaacaccctcttaggctgtgcaaggcatgggttatcaggggattgaggtcacctgggacttcagggaggctcagcttgctccctgccccagacctgtttcttctaagggaggaggacatggtggagaccagggacaggagagccagcagggtggatgcaaggggcctctacccacacctggacctccgtgccctcaccccagccctaggtgtgcacctaggcctcattccttaccccccagcccctgcccaccttcagcaggatgaggccctgggttgccgtgctctcgctgttcccctctcggggctgggctggggccgctcttggccccaaggttgccccgggccagcagcccagccagcagcacagtctctatggtgctgaggaagagcagcagcagcaggatggtgaagtagtaaactgggggaggcagggcacagggagatgctcaggggccagtccctgtgtctctggtgcccagcgagctgagcaccagtgggtgaccggggagaaacagggcagactgggtaagggagcagggcttactgagcagtgggttgcaggaggaggagctgggcagggcctgcaccagggaggagtggaggacgaggtaactcagcagcaatgtcaccttgtagcctatgcgctcaatggcccggaggggcagcaaccccccgcacacgtcagccaacagcagtgcctctgcaggcaccaagagagcgatgatggacttgagcgccgtgttcttcagcctcagctggaaggggaaaagtcagggccttcccggcgggggggaaggaggtgggcatcgggggcatggggcctggcctctggccgtgcatcctcactcccacccgcctccagcagccctctgtcggcctcctcccgacttgactcaccgtcacctggaagcagggcaccagctgctggggtgggacttgggtcttcagatcataaactacgtattccctcttgacactcacaatctcgttcaccacgtgggcctggaactctaactccatcgctgaggggtgggaatgagaactatgaaccaggaaggagagatcccagctgccaagtctgggggtagcagactggagcccaggggtgatggagacttttgatggcttttggcagggacagacttggacacaaaaccgatccatagaagggcttcccaaaccttgttttgcaacatcccaaattgtctccagttgaaggaaggcctttatcagattcatagatgagctttcattgtaaaaataaatgtactttgcaccacttcatgatggaggg

SEQ ID NO: 652 - DNA, 4687 bp, Homo sapiens
ggaagtgggtgtgacggggacgggggcccggtgggcccgcggaggaaagatactggggagtgggagccgcggggttcagagcgatgattcccccacaggaggcatccgctcgacggcgggagattgaggacaagctgaagcaggaggaggagactctgtccttcatccgagacagcctggagaagagcgaccagctcactaagaacatggtgtctatcttatcatcctttgagagccgccttatgaagctggagaactccatcatccctgtgcacaagcagacggagaatctgcagcggctgcaggagaatgttgagaagacgctgtcctgcctggaccatgtcatcagctactaccatgtggccagtgacactgagaagatcatcagagagggccccacaggtaggctggaagagtacctgggaagcatggccaagattcagaaggcagtggagtatttccaggacaacagcccagacagcccggaactcaacaaagtgaaactgctctttgagcgcgggaaggaggccctggagtccgaatttcgcagcctgatgacgcggcacagtaaggtcgtctcgcccgtgctcatcttggatctgatcagtggtgacgatgatctggaggcccaggaggacgtgaccctggagcacctgcccgagagcgtgctccaggatgtcattcgcatctcccgctggctggtggaatatggccgcaaccaagatttcatgaacgtctactaccagatacgctccagccagctggaccgctccatcaaaggactgaaggagcatttccataagagcagttcttcctctggggttccctactcccctgctatccccaacaagaggaaagacacacctaccaagaagccagtcaagcggccagggagagatgacatgctggacgtggagaccgatgcctacatccactgcgtcagtgccttcgtcaagctggcgcagagcgagtaccagctgctggccgacatcatccccgagcaccaccagaagaagaccttcgactccctgatacaggatgccctggatgggctgatgcttgaaggggagaacatcgtgtctgctgcccggaaggccattgtgcgacacgacttctccacggtgctcaccgtcttccccatcctgcgacacctcaagcagaccaagcctgagtttgaccaggtgctccagggcacggctgccagcacaaagaacaagctgcctggcctcatcacatccatggagaccatcggtgccaaagcgctggaggacttcgcagacaacatcaagaatgacccggacaaggagtacaacatgccgaaggacggcaccgtacacgagctcaccagcaatgccatcctcttcctgcagcagcttttggacttccaggagacggcaggcgccatgctggcctcccaagagaccagctcttcggccaccagctacagctctgagttcagcaagcggctgctaagcacctatatctgtaaagtgctgggcaacctgcagttgaacttgctgagcaagtccaaggtgtacgaggacccagctctgagcgccatcttcctgcacaacaactacaattacatcctcaagtccctggagaagtctgaactgatccagctggtggcagtgacacagaagactgctgagcgctcctaccgggagcacattgagcagcagatccagacctaccagcgcagctggttaaaggtgactgattacatcgcagagaagaatctacctgtgttccagccgggagtcaagctccgggacaaggagcggcagattatcaaggagcgttttaagggcttcaatgatggcctcgaagaactgtgcaaaatccagaaggcctgggctattccagacacagagcagagggacaggattcgccaggcccagaagaccattgtcaaggagacctacggggcctttctacagaagtttggcagcgtgcccttcaccaagaacccggagaagtacatcaagtacggggtggagcaggtgggcgacatgatcgatcgccttttcgacacctctgcctgagcctgctgctagccctgcctggttccaccagactggcgtgtcattggacagataaaccagtgttagcttgcctctgggctgggtgagcttgaagtcctctgggacagagacctgtctccacgcctccgggagctgtgtccctgagccccctagtcctggctcctgctttttccccacagcccgtgttcccagccgaaccagcactctcccggaagcctggggtccctccacaccttggcttttatgaccctgatggcttctgaaacaggaaaagagagaaggaagacagaggcctgtgcccactgctgctccatgtgtaccaagagcagcagggcagaagggccctccctccagcctaggtcagaggtggggacagagaactcccctacagcccagagatgtggcagggctcagagaagcagccagagctcctggaggaaaggcagtcgggactgaccccctctcttaaaacacattcccgcccgcccacaggcctgaggtctgggacctttccctcccaggagtcccctaggtggctgggggaggcaggctcactggccattttccctagagtccagcacactgcaggaggcgttcggaggaggagttccgccccaccctctacagccttcctcaggcccctgtctctggcccccagcctcagtgcctcttggcccagggccaggcagtcgtggttgcagaaggagcaattaggctgcctgcctgtgggctgggagacagggacaatggggaaaagttaaggagcaaaatgggggttggaagcaaaaaatagggccccacctatttaggacgagattgaagactgacccttgaggcacacttgcactggagatgggtttatttcacgctctgtgcttgtgtgctagcggagggagagctcagggtggcttaatccagaggccctgtcatggcccgcccccagccatgggaaagcaaacttcatcctaaggtgtgcagcccaggccctgcccctttacagtctaggccgcctgccatggggtgcagcctctccaggggctgcgtcagacttgcacgctgcccacatccagattcctgcaaagacgaattgggtgcacagcaccccaaccacatacacgaggaagaagatgcggtcagcagtctcaggccagcttctctgtgacccctttactcctctggagggctctgtggggagagatacagggaaaggagctgttcttcaaggtcccctcaacatgagcggaagagcgaaccccaggggtcatcagcctgtatcgcttcctttcttagattctcagctgatgaaaatttgggtctggcccatttcaggccatcttcagttgaagaaacaccctcttaggctgtgcaaggcatgggttatcaggggattgaggtcacctgggacttcagggaggctcagcttgctccctgccccagacctgtttcttctaagggaggaggacatggtggagaccagggacaggagagccagcagggtggatgcaaggggcctctacccacacctggacctccgtgccctcaccccagccctaggtgtgcacctaggcctcattccttaccccccagcccctgcccaccttcagcaggatgaggccctgggttgccgtgctctcgctgttcccctctcggggctgggctggggccgctcttggccccaaggttgccccgggccagcagcccagccagcagcacagtctctatggtgctgaggaagagcagcagcagcaggatggtgaagtagtaaactgggggaggcagggcacagggagatgctcaggggccagtccctgtgtctctggtgcccagcgagctgagcaccagtgggtgaccggggagaaacagggcagactgggtaagggagcagggcttactgagcagtgggttgcaggaggaggagctgggcagggcctgcaccagggaggagtggaggacgaggtaactcagcagcaatgtcaccttgtagcctatgcgctcaatggcccggaggggcagcaaccccccgcacacgtcagccaacagcagtgcctctgcaggcaccaagagagcgatgatggacttgagcgccgtgttcttcagcctcagctggaaggggaaaagtcagggccttcccggcgggggggaaggaggtgggcatcgggggcatggggcctggcctctggccgtgcatcctcactcccacccgcctccagcagccctctgtcggcctcctcccgacttgactcaccgtcacctggaagcagggcaccagctgctggggtgggacttgggtcttcagatcataaactacgtattccctcttgacactcacaatctcgttcaccacgtgggcctggaactctaactccatcgctgaggggtgggaatgagaactatgaaccaggaaggagagatcccagctgccaagtctgggggtagcagactggagcccaggggtgatggagacttttgatggcttttggcagggacagacttggacacaaaaccgatccatagaagggcttcccaaaccttgttttgcaacatcccaaattgtctccagttgaaggaaggcctttatcagattcatagatgagctttcattgtaaaaataaatgtactttgcaccacttcatgatggaggg

SEQ ID NO: 653 - DNA, 948 bp, Homo sapiens
atggcggacctccggaaaccgtagattccgggcggtcggagccgccgggagctgtagttctcccgcggctcagagaagtaggcagagagcggacctggcggccgggcagcatggcggggctggagctcttgtcggaccagggctaccgggtggacgggcggcgcgccggggagctgcgcaagatccaggcgcggatgggcgtgttcgcgcaggctgacggctcggcctacattgagcagggcaacaccaaggcactggctgtggtctacggcccgcacgagatccggggctcccgggctcgagccctgccggacagggccctagtgaactgtcaatatagttcagcgaccttcagcacaggtgagcgcaagcgacggccacatggggaccgtaagtcctgtgagatgggcctgcagctccgccagactttcgaagcagccatcctcacacagctgcacccacgctcccagattgatatctatgtgcaggtgctacaggcagatggtgggacctatgcagcttgtgtgaatgcagccacgctggcagtgctggatgccgggatacccatgagagactttgtgtgtgcgtgctcagctggcttcgtggacggcacagccctggcggacctcagccatgtggaggaagcagctggtggcccccagctggccctggccctgctgccagcctcaggacagattgcgctgcttgagatggatgcccggctgcacgaggaccacctggagcgggtgttggaggctgctgcccaggctgcccgagatgtgcacaccctcttagatcgagtggtccggcagcatgtgcgtgaggcctctatcttgctgggggactgaccacccagccacccatgtccagaataaaaccctcctctgcccacacaaaaaaaaaaaaaaaaaaaaaaaaaaaaaaaaaaaaaaaaaaaaaaaaaaaaaa

SEQ ID NO: 654 - DNA, 1036 bp, Homo sapiens
ggcagcatggcgtccgtgacgctgagcgaggcggagaaggtgtacatcgtgcatggcgtccaggaagacctccgtgtggatggccgtggctgtgaggactaccgatgtgtcgaagtggaaactgatgtggtgtccaacactagtgggtccgccagggtcaagctgggtcacacagacatcttggtgggagtgaaagcagaaatggggacgccgaagctggagaaaccaaatgaaggctacttggagttctttgttgactgttcagccagtgctacccctgaatttgaaggtagaggaggtgatgaccttggcaccgagatcgctaacaccctctatcggatatttaacaataaaagcagtgtcgacttaaagaccctctgcattagtcctcgggagcactgctgggttctctatgtggatgtgctgcttctggaatgtggtggaaatttgtttgatgccatttccattgctgtaaaggctgctctcttcaatacaaggataccaagggttcgagttttggaggatgaagaggggtcgaaggacattgaattgtcagatgacccttatgactgcatacgactaagtgtggagaatgtcccctgcattgtcactctgtgcaagattggctatcggcatgtggtggatgctactcttcaggaggaggcctgctcgctggccagcttgctggtgtcggtgaccagcaagggagttgtgacgtgcatgaggaaagtggggaagggcagcctggacccagagagcatcttcgagatgatggagactggcaagcgtgtgggcaaggtactgcatgcctccttgcagagtgttctgcacaaggaagaaagcctggggcccaagagacagaaagttggattcctgggatgatttgcacatcaactgctcaactgtggattgttttttacttttccttttaaaccggttcgtatatatttttcttcgctgttacgaatttacagcagcatttgtacatgtaaaattaaaggctattttctggtaaaaaaaaaaaaaaaaaaaaaaa

SEQ ID NO: 655 - DNA, 6172 bp, Homo sapiens
ggcgggtccctgagctggaagccggagagcaagccctggaggttcactctttcaagaagtcgtgtgctgaggtgtaatgctacacaagtcagaggaaggaagggtcctgaaacacatggcctgattgttggcaaaggcatcataagaagctggcatttatttctgttctaacctattactgtataactgtgaatagacactatgcatatttgttggtcagcaaaaccaagaaacaagagctatggcatttgaaaaagtctgtctgattccagggtgtttttcctgggtttcatcatcaggtacctcctccctttcatctcagcaagaatgtggcaccttttatcgtttgataaagattaaggacatgttctttggtcaacagccagaacttaaaatctgctggaatagggtcagagaccatttcagctgcagctgaggaaaatgaaatgttcattttatttggtgccttgtctggggagcacactaactcttctggaaacgtgtcagtgaaacagagatcgttttgtggaatagcaacccatggttatggcgagtgacccgacgtgatctggggggcaggctgcagaggactcatgacaggctataccatgctgcggaatgggggcgcggggaacggaggtcagacctgcatgctgcgctggtccaaccgcatccgcctcacgtggctcagcttcacgctctttgtcatcctggtcttcttcccgctcatcgcccactattacctcaccactctggatgaggctgatgaggcaggcaagcggatttttggtccccgggtggggaacgagctgtgcgaggtgaagcacgtgctggatctgtgccgcatccgggagtcggtgagtgaagagctcctgcagctggaggccaagcgccaagagctgaacagcgagatcgccaagctgaatctgaagatcgaagcctgtaagaagagcattgagaacgccaagcaggacctgctccagctcaagaatgtcatcagccagaccgagcattcctacaaggagctcatggcccagaaccagcccaagctgtccctgcccatccgactgctcccagagaaggacgatgccggcctccctcccccgaaggccactcggggctgccggctacacaactgctttgattattctcgttgccctctcacctctggcttcccggtctacgtctatgacagtgaccagtttgtctttggcagctacctggatcccttggtcaagcaggcttttcaggcgacagcacgagctaacgtttatgttacagaaaatgcagacatcgcctgcctttacgtgatactagtgggagagatgcaggagcccgtggtgctgcggcctgctgagctggagaagcagttgtattccctgccacactggcggacggatggacacaaccatgtcatcatcaatctgtcacgtaagtcagatacacagaaccttctctataacgtcagtactggccgtgccatggtggcccagtccaccttctacactgtccagtacagacctggctttgacttggtcgtatcaccgctggtccatgccatgtctgagcccaacttcatggaaatcccaccacaggtgccggtgaagcggaaatatctcttcaccttccagggcgagaagattgagtctctgaggtctagccttcaggaggcccgctccttcgaagaggaaatggagggcgaccctcccgccgactacgatgaccggatcattgccaccctgaaggcggtgcaggacagcaagctggatcaggtcctggtggaattcacctgcaaaaaccagcccaaacccagcctgccgactgagtgggcactgtgtggagagcgggaggaccgcttggaattgctgaagctctccaccttcgccctcatcattacccccggggaccctcgcttggttatttcctctgggtgtgcaacacggctcttcgaagccctggaagtcggtgccgtcccggtggtgctgggggagcaggtccagcttccctaccaggacatgctgcagtggaacgaggcggccctggtggtgccaaagcctcgtgttaccgaggttcatttcctgctcagaagcctctccgatagtgacctcctggctatgaggcggcaaggccgctttctctgggagacttacttctccactgctgacagtatttttaataccgtgctggctatgattaggactcgcatccagatcccagccgctcccatccgggaagaggcggcagctgagatcccccaccgttcaggcaaggcggctggaactgaccccaacatggctgacaacggggacctggacctggggccagtggagacggagccgccctacgcctcacccagatacctccgcaatttcactctgactgtcactgacttttaccgcagctggaactgtgctccagggcctttccatcttttcccccacactccctttgaccctgtgttgccctcagaggccaaattcttgggctcagggactggctttcggcctattggtggtggagctgggggttctggcaaggaatttcaggcagcgcttggaggcaatgttccccgagagcagttcacggtggtgatgttgacttatgagcgggaggaagtgcttatgaactctttagagaggctgaatggcctcccttacctgaacaaggtcgtggtggtgtggaattctcccaagctgccatcagaggaccttctgtggcctgacattggcgttcccatcatggtggtccgtactgagaagaacagtttgaacaaccgattcttaccctggaatgaaattgagacagaggccatcctgtccattgatgacgatgctcacctccgccatgacgaaatcatgtttgggttccgggtgtggagagaagctcgggaccgcatcgtgggcttccctggccgttaccacgcatgggacatcccccatcagtcctggctctacaactccaactactcctgtgagctgtccatggtgctgacaggtgctgccttctttcacaagtattatgcctacctgtattcttatgtgatgccccaggccatccgggacatggtggatgaatacatcaactgtgaggacattgccatgaacttccttgtctcccacatcactcggaagccccccatcaaggtgacctcacggtggacattccgatgcccaggatgccctcaggccctgtctcatgatgactcccacttccacgagcggcacaagtgcatcaacttcttcgtgaaggtgtacggctacatgcccctcctgtacacgcagttcagggtggattctgtgctcttcaagacacgcctgccccatgacaagaccaagtgcttcaagttcatctaggggcagcgcacggtctggggaagaggatgagcagagggaggaagatggctcccaaggttcctaggcattgcaggaccttgggcacatctgctggtgggtggcccagagcctctgctggaaggggcagcaggaggagtggaaggaaaccgctgcctttatcttgaagtcagccacactgggcctggagccctgggcggagtccccggggttccccacacagggcactgactgatagcttacactgaggactgtggcgactctgcagagtcactcacaccgttcgtacgcccaggacagctggttcgtggtttttacattcaataacaactattatgattatttaaaaagagaaagtttcagatttgccattcaaggcttatttatatatatgtgtgtgtatataaatacatgcacacacttgcatacatatatatttttggctgggggagtgtgagttttgcctttctaagggagggaccgcgcaggctcctttgttctgtattctggcggagatgggtcctggccttgtgtcactggcttatccttaaagatcatctcccatcctccccagcgccatctgtgtgcagcaaccagaaagggatgaacttggccctcttgcgggcctggacaaggtctcttccttaccctttctgttgccagtcagcaacctgtaactcacattctcttcccagtgaatccctgggagcgcctgaccctggtgggctgttcagcttcctgctgctggggccagcgatttttgaggatttatctttaggccaggcttgcctccgtacttatccctgctctcccatttctctcttgtttgagagagaatgaggaagcaaagagtgagaaagaataggggctgaagacgccactcccagatggctctttctatcctgctcttctgttgaaacacacgtgctgtgggcctcaggcgtttctgaagtgctctttcttggattggacaggagatcagcagcgtgcacatctgctgtggtctgaagtggtttgcaggtcagcctcctctccctagtgtagagcaagccagtgtccttcgaggaacccacccggctggccgggaagttttacagcaaggcgcctgccttgggataattccttggtgaaattcaccttccccccgcctctgtctggagccccatcctgtgttatctgtggtttttggacccctaatgtcagcttggctgtaggactccccgaggtttggtatgtgctagaacaatgggaggctgtgatttgctgtgtaagctcacatccagccttggaatctaacgggcattcacaacccgagttaccactttccactccctgcttaggattctgttccctgggctgaaactgaaataagctaattttttgggtcacggtggcagtaggggaacctaggagggtgtgagtggcatttgtcagggatttagcccatgacgtgtttcttgaaccctactttctggaagtggagttgactctggaagttttctagcaactgaacaaaagctcaggtttgtcctggtcatgcacatgccttaagccagttccgtcttccctagaccttggcatcctgtgcttctatttcttggaatacgttctcctctgacctgcctgtaccacgtgggtcctcttcaagtactgttttgaagctgggctcttttgtgtagctcccacccacctgtagggctagctcggcttaagggaactctccccattggcaaaccggacccggccgccgccaggactgtgtttccaaaggttccccgcccccaaccccagcatcagcctgtagctcccctgctgaggcagtgtggttatgttcccagcagtgggggtcagacgcccttcctcagaactttctagttgccctctacctgactcctgacttgtattccttttagcagtagccttcttccctcggggagccaaagagtgtggtgtgtggcgctatattgtggctgctatttcatctggtttcttttaatgtgaggaactcacatactgacttcagtgggactcggtgagccggggccgtctgtgtggtgggaccccctttagcgggactcagtgagctggggccgtctgtgtggtggagccagggcctctccctttagtggagccaggttgtcgggccccgaatgtcactggtggatctaagaagggctgagtggtctgacaccaaaacatgccgcagggagggctgtggtgccggtgcttccaacaaggacagccctccttgaccctgaaaggaacactggcttgaaggactgcagacaggctctgaggggcacgccctcctcagcgagaggcagcaaggtggccacagtgtcactggtcaggtgcttctcaccacgggaaagccgccgacctgtgactcgcttgagatgggaaagcggcgccacagaccccgggtctccttggctgtctgtgggccgcccctggccaccttgtcctggctcgcagggtgcaggagcgcctcgttctctgggtggccggcttgctgctccggtttgggctgtcttaccataacaccgtcccagggctctgcaggccactgtgagcgctggctccctgggcagtgctcctccgtgtggactgtgcctcaggccagggctcaccagctggggtcctgtccggaaggatgggatctttctgggagctgcgccggacagagtggggagctcctagtttgtggggggaagctttgatatccatgccacgtccatccaccccaccccttttcgtcacgagcacaatggtcttacattggatttttgtaaaaaaataaaaataaatggagactttaactc

SEQ ID NO: 656 - DNA, 2273 bp, Homo sapiens
aattctcgcccaaggacagacctgaatctctagctgcctagaggctgactcaactgaaatcatggcgtttgacagcacttggaaggtagaccggagtgaaaactatgacaagttcatggaaaaaatgggtgttaatatagtgaaaaggaagcttgcagctcatgacaatttgaagctgacaattacacaagaaggaaataaattcacagtcaaagaatcaagcgcttttcgaaacattgaagttgtttttgaacttggtgtcacctttaattacaacctagcagacggaactgaactcagggggacctggagccttgagggaaataaacttattggaaaattcaaacggacagacaatggaaacgaactgaatactgtccgagaaattataggtgatgaactagtccagacttatgtgtatgaaggagtagaagccaaaaggatctttaaaaaggattgagcattattcttggcgcacagtccaaaatacaaattggacagaagatctatattgtaccagaactatttatttcaccccatcaagtataaggttactgattgattggtccttttataaacattggtatatttccattcatgccaaagcaaaagaagtaaaagctaattaggatttaatttgttttatattctctaagatatatatttactaaaagaatttgtgacattttaaaaaacaaaaataaatattgcgtccatgctgctttatatgtagccttgccttttaaaagaaaaagtatgtgaatatgaattgacagactgttttcgtagagagagggtcttactctttcactcaggctggaatgtagtggagagatcatagctcactgtaacctcaaactcctggactcatgcaatcttcctgcctcaggcttctgagtagctaggactatgggtacattccacagtgcccagctaatttttgttttgttttctttttattttttttagagatggggtcttgctatattgcccaggctggtcttgaacccctggcctcaagcaatcctcctgcctcagcctctcaagttgttttttttctttacatttgataaactaaaagcataggctgcatatgagtctttaacatcttgaactggttgtgaataattttctggcactggttgtaagtaatatctattattataaaaataatatatgctcagccagaaaacttagaaataagaaacacaaatgtaaaataagtatttccataactcataatccagagataattgccattctgattttgatagatatcctctcagctctcttccctgggggcagatatttcccaatacataccactttgaataggatgataggaaataaatgatgtactacattaaattaaattattgtattacatttttgtacacatcagtcattcccacgcttggctgaaaatcaggatcatctgagaaacttaaacaatttctgcattcttaatctccactgttattctattatatcagaatcgctaatagaaccaagaattctagaaaatttcctggtgattctgatgcagcctgtccactaacttgtctttgagaacaatggagatatcagttatcaatgttatttttaaccacccccttcttttttgttgttgtgggttttttcacataaacacatacattgccaattttccagggctcaaaaagtttccttttattcatattttcacatgacgtaaaattttatgtgcttcacataattgtattttagcagggtacatattaggggatggagagggggtacaatttttaagcatttgcagctgcaactctatagacttttgacaaattctttttcacactgatgtagataacagcttaacatttacatagttcttactacttgccacacactgttctaagtggtatatacatatgacatatatattaaaatgtaggaagaaaaatgtttgagtacctgatgaaaatgaatagagagtatgtaatctttgaaagctgaatactgcgtgttctcacttataagtgggagctaaataatgtatacacatggacacaccagagtgtagaataatagacactggagacttggaagagttggagggttggcagggggcgatgataatttacttaatgggtacaatgtacattattcagggggtgatggttacagcccagactttaccactatgcaatatatcaatgtaacaaaactatacttgtactccttaaatttatataaaaataccttaaatctaaaaaaaaaaaaaaaaaaaaaaa

SEQ ID NO: 657 - DNA, 1807 bp, Homo sapiens
cgcacgctcgctcgtacggcggccgcggcggcagggcggggccggagcagcgggcggcggcggaggcggcgcccgggagcgctcttcgcttccctcggggtcttgctcggacctcggccaccgcctgggatccccaggactcgtgcgtgcagcatgggcggcgtcggggagccgggaccgcgggagggacccgcgcagccgggggcgccgctgcccaccttctgctgggagcagatccgcgcgcacgaccagcccggcgacaagtggctggtcatcgagcgccgcgtctacgacatcagccgctgggcacagcggcacccagggggcagccgcctcatcggccaccacggcgctgaggacgccacggatgccttccgtgccttccatcaagatctcaattttgtgcgcaagttcctacagcccctgttgattggagagctggctccggaagaacccagccaggatggacccctgaatgcgcagctggtcgaggacttccgagccctgcaccaggcagccgaggacatgaagctgtttgatgccagtcccaccttctttgctttcctactgggccacatcctggccatggaggtgctggcctggctccttatctacctcctgggtcctggctgggtgcccagtgccctggccgccttcatcctggccatctctcaggctcagtcctggtgtctgcagcatgacctgggccatgcctccatcttcaagaagtcctggtggaaccacgtggcccagaagttcgtgatggggcagctaaagggcttctccgcccactggtggaacttccgccacttccagcaccacgccaagcccaacatcttccacaaagacccagacgtgacggtggcgcccgtcttcctcctgggggagtcatccgtcgagtatggcaagaagaaacgcagatacctaccctacaaccagcagcacctgtacttcttcctgatcggcccgccgctgctcaccctggtgaactttgaagtggaaaatctggcgtacatgctggtgtgcatgcagtgggcggatttgctctgggccgccagcttctatgcccgcttcttcttatcctacctccccttctacggcgtccctggggtgctgctcttctttgttgctgtcagggtcctggaaagccactggttcgtgtggatcacacagatgaaccacatccccaaggagatcggccacgagaagcaccgggactgggtcagctctcagctggcagccacctgcaacgtggagccctcacttttcaccaactggttcagcgggcacctcaacttccagatcgagcaccacctcttccccaggatgccgagacacaactacagccgggtggccccgctggtcaagtcgctgtgtgccaagcacggcctcagctacgaagtgaagcccttcctcaccgcgctggtggacatcgtcaggtccctgaagaagtctggtgacatctggctggacgcctacctccatcagtgaaggcaacacccaggcgggcagagaagggctcagggcaccagcaaccaagccagcccccggcgggatcgatacccccacccctccactggccagcctgggggtgccctgcctgccctcctggtactgttgtcttcccctcggccccctcacatgtgtattcagcagccctatggccttggctctgggcctgatgggacaggggtagagggaaggtgagcatagcacattttcctagagcgagaattgggggaaagctgttatttttatattaaaatacattcagatgtaaaaaaaaaaaaaaaaaaaaaaaaaaaaa

SEQ ID NO: 658 - DNA, 879 bp, Homo sapiens
ccacatgctgatccccactacaatcagtgacctgaactcagagtccaagtaggacacgcaggtggacgtggtgactgagatgacatcctctctaaagatttggggcatactcttggccctgctttgcatcctttgcaggctgtgtgtatacagtaacaacatttactggagagaattcataaaacttcattacttaagtccaagtcgagaattcaaagagtacaaatgtgatgtcctcatgagagaaaaagaggctctgaaaggcaagagctttcatatgttcatctatagcttatggttcaaaattcagcgtgcatgcatcaatgagaaggggagcgaccgatatagaaatgcatatgtatgggccccaggtgccctcaaagtactcgagtgtcactgggagaagtacaacaataggtacacagagagcagaagcttcagctacattgaattccattgtggcgtagatggatatgttgataacatagaagacctgaggattatagaacctatcagcaactagaaagtctatgcacatcctcagatattggtagagtattcagtgcttccaaagtggtgggccctgcctccatcaatagcccctgccactccccgcttacatttatgtgtcagtgttttccaactacttagagtttatgtacctcgtgatttcttgataccaaatctttgtgtggtttctgtatctgtaatacaattttgtcctaatttgcctaatttacacccacattttttccaagattcagctcatatggcatctgtcctcgactaacctaagactttcctgatattgactctctttatacctacccaagctgaacgaccctccttttcttaaataaaatatattattctaacgta

SEQ ID NO: 659 - DNA, 1672 bp, Homo sapiens
gcctgtccctgccttaagtgcctactggatcccgggagcctgggctggggcctgggcactgcttcctccttggcccctcaggcccttggaagcagagagagaacctcttgcagatcccaggctcgtccccagcacagcagacaccaggaaggtggccagagcctcactgagccgaaccgacggccgcctacccacccaggctggagccatggataaattccgcatgctcttccagcacttccagtcaagctcggagtcggtgatgaatggcatctgcctgctgctggctgcggtcaccgtcaagctgtactcctcctttgacttcaactgtccctgcctggtgcactacaatgcactctacggcctgggcctgctgctgacgcccccgctcgccctgtttctctgcggcctcctcgccaaccggcagtctgtggtgatggtcgaggagtggcgccggcccgcagggcaccggaggaaggacccaggcatcatcaggtacatgtgctcctctgtgctgcagagggcgctggccgcccccctggtctggatcctgctggccctccttgacgggaagtgcttcgtgtgtgccttcagcagctctgtggaccctgagaagtttctggactttgccaacatgacccccagccaggtacagctcttcctggccaaggttccctgcaaggaggatgagctggtcagggatagccctgctcggaaggcagtgtctcgctacctgcggtgcctgtcacaggccatcggctggagcgtcaccctgctgctgatcatcgcggccttcctggcccgctgcctgaggccctgcttcgaccagacagtcttcctgcagcgcagatactggagcaactacgtggacctggagcagaagctcttcgacgagacctgctgtgagcatgcgcgggacttcgcgcaccgctgcgtgctgcacttctttgccagcatgcggagtgagctgcaggcgcgggggctgcgccggggcaatgcaggcaggagactcgagctccccgcagtgcctgagccccccgcagtgcctgagcccccagaaggcctggatagtggaagtgggaaggcccacctgcgcgcaatctccagccgggagcaggtggaccgcctcctaagcacgtggtactccagcaagccgccgctggacctggctgcatcccccgggctctgcgggggtggccttagccaccgcgcccctaccttggcactgggcacgaggctgtcacaacacaccgacgtgtagggtcctggccaggcttgaagcggcagtgttcgcaggtgaaatgccgcgctgacaaagttctggagtctttccaggccgtggggaccccacggcaggcaccctaagtcttgttagcctcctttttaaagtagcccaatctctgcctagtttctgggtgtggcctccagcgcgcttcacagactttaatgtggactcggttcaccgagggccttgttaaatacaggttcagacagtgtagccaggaccgagtctgagattctgcattttaaacaagctcctggaggctgatgtgcttttggtcagtgaaccaaactttgagtagcaagaatctaagtaaatctgccatgggttctgggttctagatgtcaattctaaataataataatgaccttaaaaaaaaaaaaaaaaaaa

SEQ ID NO: 660 - DNA, 1322 bp, Homo sapiens
tcctcaaaggaggggcagagcctgcgcagggcaggagcagctggcccactggcggcccgcaacactccgtctcaccctctgggcccactgcatctagaggagggccgtctgtgaggccactacccctccagcaactgggaggtgggactgtcagaagctggcccagggtggtggtcagctgggtcagggacctacggcacctgctggaccacctcgccttctccatcgaagcagggaagtgggagcctcgagccctcgggtggaagctgaccccaagccacccttcacctggacaggatgagagtgtcaggtgtgcttcgcctcctggccctcatctttgccatagtcacgacatggatgtttattcgaagctacatgagcttcagcatgaaaaccatccgtctgccacgctggctggcagcctcgcccaccaaggagatccaggttaaaaagtacaagtgtggcctcatcaagccctgcccagccaactactttgcgtttaaaatctgcagtggggccgccaacgtcgtgggccctactatgtgctttgaagaccgcatgatcatgagtcctgtgaaaaacaatgtgggcagaggcctaaacatcgccctggtgaatggaaccacgggagctgtgctgggacagaaggcatttgacatgtactctggagatgttatgcacctagtgaaattccttaaagaaattccggggggtgcactggtgctggtggcctcctacgacgatccagggaccaaaatgaacgatgaaagcaggaaactcttctctgacttggggagttcctacgcaaaacaactgggcttccgggacagctgggtcttcataggagccaaagacctcaggggtaaaagcccctttgagcagttcttaaagaacagcccagacacaaacaaatacgagggatggccagagctgctggagatggagggctgcatgcccccgaagccattttagggtggctgtggctcttcctcagccaggggcctgaagaagctcctgcctgacttaggagtcagagcccggcaggggctgaggaggaggagcagggggtgctgcgtggaaggtgctgcaggtccttgcacgctgtgtcgcgcctctcctcctcggaaacagaaccctcccacagcacatcctacccggaagaccagcctcagagggtccttctggaaccagctgtctgtggagagaatggggtgctttcgtcagggactgctgacggctggtcctgaggaaggacaaactgcccagacttgagcccaattaaattttatttttgctggttttgaatgaaaaaaaaaaaaaaa

SEQ ID NO: 661 - DNA, 5720 bp, Homo sapiens
gcggctcaggggcggggacgggggcgtggtcccgccgtataagaacggagggggcggcggcgggacggctcactcggtgccgctgcctaggggctgtagaggtcgcgccgctcctgctggggcctgcccacgccaaggacctgcctctgtcgcctcctcttctattgcccagtttccccagccagaacatcccctgaagatggcagaggagagcagctgtaccagggattgcatgtccttcagcgtgctcaactgggatcaggttagccggctgcatgaggtcctcactgaagttgtacctatccacggacgaggcaactttccaaccttggagataactctgaaggacatcgtccagaccgtccgcagtcggctggaggaggcaggcatcaaagtgcacgacgtccggctgaatggctccgcagctggccacgttttggtcaaagacaatggcttgggctgcaaagacctggacctaatcttccatgtggctcttccaacagaggcagaatttcagctggttagagatgtggttctgtgttcccttctgaacttcctgccagagggtgtgaacaagctcaaaatcagtccagtcactctgaaggaggcatatgtgcagaagctagtgaaggtttgcacggacactgaccgctggagcctgatctccctctccaacaagaacgggaagaacgtggagctgaagtttgtcgactccattcggcgtcagtttgagttcagtgtggactctttccaaatcatcctggattctttgcttttcttctatgactgttccaataatcccatctctgagcacttccaccccaccgtgattggggagagcatgtacggggactttgaggaagcttttgaccatctgcagaacagactgatcgccaccaagaacccagaagaaatcagaggcgggggacttctcaagtacagcaaccttcttgtgcgggacttcaggcccacagaccaggaagaaatcaaaactctagagcgctacatgtgctccaggttcttcatcgacttcccggacatccttgaacagcagaggaagttggagacttaccttcaaaaccacttcgctgaagaagagagaagcaagtacgactacctcatgatccttcgcagggtggtgaacgagagcaccgtgtgtctcatggggcatgaacgcaggcagactctgaacctcatctccctcctggccttgcgtgtgctggcggaacaaaacatcatccccagtgccaccaacgtcacctgttactaccagccggccccttacgtcagtgatggcaacttcagcaactactacgttgcccatcctccagtcacctacagccagccttaccctacctggctgccctgtaactaaccttgagacctgagggtttccacagtgggaaccccaatagggctagggctctcaggtaggggagcctccttctagatgtaggcatttggcttttaaaggggaactcagctctgattctgcttttttttttttttttcctttgtgtacccattggaatgggtctacagtgtatcatgagccaaccctcaaaggacccgtattacagtgccacgttggaaaacgctacaggaagcatgacctatccacatctttccaagatagacactaacatgtcatgtcccaaacattagcacgtgggggttgagctctgtgcagtaatcgagattgggagaatttgggcagcgcgtgagaagtgctaagctacttgttttctcacttgagcccgggtaggctgtgttggccctcacttgggattctcagcagttacatgaaagttgtgctgataatctcttctcttgtaccaattttagtcaggcagaaaatggtaaacatgagggtgctcttgtgacttaatttttgttcaagggactaaattgcttatgtttattccctgtcagcggagtggagaatgtcattcatcaataaaccaaagccaatagctggagaattgagatctggttgaaagtggtttatggtttacatgctgtactatcctgaggaattgcgagatattgctgaggggaaaaaaaaatgaccttttcttgaaatgtaacttgaaaacaaaataaaatgtggaacataatgtttaattagaattgtggtggtggtagtggaaggggataattgtaaataggaaacatgaatgttcatttttttctttaaagaattcttattaaatggctccctgccttttttttcttttttcctcatcagctctttcatggctgaattttgttttattcttcctaagactgaggattgtgctgagtccagagtcattgtggtaactgacatgagggtcttcccatgttttaactggaaacccactttggtcacattccaagtatgacacagctgttcttctggagtactttagctattttttgtttttgttcttttcgttttttttttttccaaaaatagtgacttccttctccaggtgtgtttgacagcaactcaattcaggaatttcggtagaactgagtgacctgtggaactgctttagaatctaacctgctgtcttcgtgctctgtgtgaaggggaagctggggggttagcatgaagtctggccttgtgtgcattggagcttccaaggcactttgaaatcattccagtatatttgggaagaattgagtgaatgagaatgctcttccttattctggtagatttgacttgtttataattctgcactttagaagaaaaacagtgttaatctgtagttgaaagaaagcttagtagatgagagagttctaggctactgtggctttttccagtagatttagatgagattatgtgttttgaaatgttttgtgggatcccttagaaagcatcacttcagggcagagacactcaatattgccagccagcttgggttctaaagtgatttaatcaaattcatgctcctgatcttttttttcccccttcctttggctatgaaaacccaaagcccggagtgattgttttctccttgctttaagcagtgaagttatcctaatgcaaaagagcttagtagaaaatgagtggtttacctttttttctaaaagtatattttcaagtttattctggaatgtgatgtcttggtcctcttaaaagcagatcagccatgactgaaactcaaggcttagctggtatctatgttgtgctacattaggtgactagaagccacttcttagtgtaatcagctcctgtttccctgtgagccttagttatattttaattcagtggctttgagtcaaggccggttctaattgaggggacccagtgtgcttcagtgttaagagtggggcaatgaagagtgaaccccaatgaagagtgatcccaactttggaaactatctggtcattcatgaccttaaaaagctgccatggtggtcaaatggcatgtgtttgcacaaaaatgaccgatgtgtttaaccaaagctttgaaatgtgatgaagccaccaacataagcacttgcctaacagaaatcagtatttcttctacttagaaggcttggggcccagggtaatgaggcaccagatgaagataagatctgcatcaaggaattaaatttccagtttgtccttggggttctttctgcttatgttttttcccccccatctggtaatagtcctcttctgagaatgaaaggaggcacagaagttgcgagaaagacccagtccccagtctttgccaccattgcaccatggttgtctcggagtcccttcacctgacctttttagtcagctcagatctttttgtagtttgagaatagacctattcaagagctatcagggttaaaagctgcactgaccaaagctgtacttttaaaacacaacccctgggctagtgatgtctctacttgctctatgagccttttgccagcctcagaataggcgaggtaaccttgaatttcagggccctggaaactctagctgaaacctgcctttcctaatgctcacacaagcaccaggtaccctgagcttatactgagtccagtggttcctattttatgtgtgtgtgtatgtgtgtgtgttgagtaacatgaaacttggcagtagcagagagcactgaagttcacatgcaagttctaatctaaagttaagcagtctcttatttgtttcgggactctgatttgactctttttctgatgctttcggcatgtctgcagcctgttctcctagcctgctgcttggagtcaggttgagcatcagtgagatgaagacagtaccttttcctctcacattggcagaatagcacgcactagatgcctgaccttgagctctagtctcccctttaaatcttaccttggcagtaacacattattcctcattcaataatttcaatgctgaaactgaactctattactaatgccttccaatcagagttcctgatggggatgcctgtgggatggcccacacctgggggacctggcagatggggtgagttgggtaaggaagatgatgcttagttcctgatagatgctacagatgtagtttggcatttcagtttttgtccagtttgattttcactggggtttgagtcacagcaagctgtgtatgaacttgtgttttgtggtgacacattaataatcaaattgctaaaaccctgaatctgcttattcttcagcttcacctctgcactaaccccttacccttatggtacgtcaggattttaactagtactgctttgttgactttgggaaatggtgccactcaaaagcaacttcctaacttgaggaataactcctttgtagtttactttctggtactggttggtgccttgtattgggatacagctatattcttagctcaaatgtcctctttttgagagcaaagtagttatccaatggtgagacgagaccctgacgctcatagaggccattccttcctgggtgtcggaccagggctctgtgtcagggaaaaccttctgggtggactttgtaagaatccagtttccaaggttagattcacatccttaatcttgcagagactagaatttcacagctcgctttggaacatattccaattcaaccagttaaaatcagaggaccaagtcgtgggggaggggggcggtgttgaggagaggtatttttaaagatctggcaacttttcaggattatttgtggagaactctaaggttaagatcaggaaataaaagactgtgtgtgtgtgtgtgtgtgcgtgtgtgtgttcaagtgcctaaatcttgtttacctatcactttaaaaaaataattgaagtgtaagctaaataaaatgcttggagttttgcctgggctagtgagagttggtgcaaattcttgtgtgtgtttgcataggaaggtgagatgaccatctactaaagaggaagtagctaaatacagatctgtgggtgtttttaaaaaaactcaacctatctggtgttttattttaatggataaaaatgtaatttttctaaggtagcaacttatttccaaattaatatagatgaaaaatagataccaattagactaaattgaaagctttttgttctatatttgcatagcctttgaaatatttcttagtgcctaggaggtctggggattcctctttcgtggtggtcactaaccttacttgatgcagataaaatcacttgtcaatgcaaaatgtgttagaacttgataaagctttgagtttgagaaataaaggtatatttaaaatttaaataaaacttgtcatttatgctca

SEQ ID NO: 662 - DNA, 3259 bp, Homo sapiens
gttccgcaccggaagcgcgcttccagtcgccccggcaacagccgcctccctcgcgtcccccactccccctctgtctctccaaggaaaactaggcccctgcgcggccaacgcccaggatccgcaagctgcgcgcccacgagctccaccagcccattggagaaaagttactgttcagtccctgaaggcttgtgccataaaagagtgggagacattcccagggaggtgaggaatgaaagatcgaattaaagaccattaaagaccaaagggcatctaaatctgcagcaaccatcagctctcttttctttgagagtttcagcacccatttggactttcacaatcagagatggcagcggtaaaggcatcaacatcgaaagctaccaggccttggtattctcatccggtatatgcaagatactggcaacattatcatcaagcaatggcttggatgcaaagccatcacaatgcctacaggaaggccgtggaatcctgtttcaatcttccatggtacttaccttctgcgcttcttccccaaagctcttacgataatgaggctgcgtatcctcagtccttctatgaccatcatgtggcctggcaggactacccctgcagttcttcacatttcagaagatctgggcagcatccacgttacagcagtaggatccaggcatccacaaaagaagaccaagctttgtccaaagaggaagagatggagactgagtcagatgcagaggtagaatgtgacctgagcaatatggaaatcactgaagagctccgccagtactttgcagagaccgagaggcatagagaagaacgacggcggcagcagcagctggatgcagagcgcctggacagctatgtgaacgctgaccacgacctgtactgcaacacccgccggtcggtagaagccccaactgagaggcctggtgagcggcgccaggccgagatgaagcgtttgtacggggacagtgctgccaagatccaagccatggaggccgcggtgcagctgagctttgacaagcactgtgaccgaaagcagcccaagtactggccggtcatccccctgaagttctgagctcagggcacagggtacccagcctctccttcttccttttgggtacacgctctttatctctccttctgtacatttcttagggaaaggggactttgtactggggtacaggcatgttcaccacagtcccagtgggcctgtcacggggtggatgtactatgccagccacttggaggtctgcaggacatgttctgttgccaacatgataaattttctcctgacataaaataattttgcatatactatactggttttttatgttgttggtaacagttcaattcattaacgttcttgcctagagatactgcctggtgttttgcttttttatcttttcttgtctttaacctgtctgaactacacaaatgcctttaaaaaaccagatatcctctctgactctagctccattagcccccactaaaaatgagccaagtgtgtagtgagacaaataccactacctgtagtggagagggatgcatgttctataaagggccagagagtgaatatctttggcactgcaagccacacggtcagtgttgtgactactcaaccctccctttgtagtgtgaaagcagctgtagacagtaagtaaacaaatgggtgtggctgtgttctaataaaactttatttataaaaacaggcggccgggcgcaatggttcatgcctgtaatcccagcactttgggaggccgaggtgggcagatcacgaggtcaggagatggagaccatcctggccaacatgatgaaacccgtcgctactaaaatacaaaaaatgagccgggcatggtggtgtgtgcctgtaatcccagctacgtgggagactgaggcaggggaattgcttgaacccaggaggcagaggttgcagtgagctgagatcgcgccactgcactccaacctagagaaagagcaagactccgtctcaaaacaaaaacaaaaacagactgcaggccagatttggtctacagatggtagtttgccaactgcacctctcatggaatgaaaatcacctgcctgacatttttattcttgttatctcattatgtctacagagcttagatgtcatacagaattgagagcaaagaacaataattccggcccggcgcggtggctcatgcctgtaatcccagcactttgggaggctgaggtgggcagatcacgagatcaggagatcgagaccatcctggctaacacggtgaaaccccatctctactaaaaatacaaaaaattagccgggcgtggtggcgggcacctgtagtcccagctacttgggaggctgaggcaggagaatggcgtgaacccaggaggcggagcttgcagtgagccgagctccagcctgggcaacagagtgagactccatctcaaaagaaaaaaaaaaaagaacaataattcccaaacctggtcactgctgcagtcacctctgttgcagaaaacgcacagttgatttcttactatatacagcaaatattgatttgataaaggaatacatttctgaaaatgaaatctaaaagctgatggagcaggtcatttataaaagccagctgccttttaaataagttattacagtacattgccagggtgagcccatgttgacctgagaagattagcacatccatcaaaggctggtgaaaagatttagtattgacatgtttctctctaagaacagttggcttcacattcagcccctgccctgagacaaatgcattattttcatcagccctgggtgcttatttttctaagctctcattttattactggagtcacaatttgtgtgtaggtgttgccgacaaaaatgataattaactttcccttgaggtgacacataactaaaatttcaaatctttagtatttctccctttcattttaaattcatatgcctaactataaaataactgtgactgagatacaagtacaaaccaaagcctggaattgcagcaggtgctgaggcatttgaaagtgaaatgtttctcttcgcaaaggactcttataccctcccctaaagaaatcaccatgccggtctcacccctactggctttgttacctaaggcttcacctctcagtgcttctggttccttccttatccttaaaatgagtgttaataattctctcgtggggtcattgtgcggaccacattgagtagtgcctgtaaaacagtgctggctacacggtaaatactcaataaatgttgacacgttta

SEQ ID NO: 663 - DNA, 4612 bp, Homo sapiens
agaatgcactgctgacacgtgtgcgcgcgcgcggctccactgccgggcgaccgcgggaaaattccaaaaaaactcaaaaagccaatacgaggcaaagccaaattttcaagccacagatcccgggcggtggcttcctttccgccactgcccaaactgctgaagcagctcccgcgaggaccacccgatttaatgtgtgccgaccatttccttcagtgctggacaggctgctgtgaagggacatcaccttttcgctttttccaagatggctcaagattcagtagatctttcttgtgattatcagttttggatgcagaagctttctgtatgggatcaggcttccactttggaaacccagcaagacacctgtcttcacgtggctcagttccaggagttcctaaggaagatgtatgaagccttgaaagagatggattctaatacagtcattgaaagattccccacaattggtcaactgttggcaaaagcttgttggaatccttttattttagcatatgatgaaagccaaaaaattctaatatggtgcttatgttgtctaattaacaaagaaccacagaattctggacaatcaaaacttaactcctggatacagggtgtattatctcatatactttcagcactcagatttgataaagaagttgctcttttcactcaaggtcttgggtatgcacctatagattactatcctggtttgcttaaaaatatggttttatcattagcgtctgaactcagagagaatcatcttaatggatttaacactcaaaggcgaatggctcccgagcgagtggcgtccctgtcacgagtttgtgtcccacttattaccctgacagatgttgaccccctggtggaggctctcctcatctgtcatggacgtgaacctcaggaaatcctccagccagagttctttgaggctgtaaacgaggccattttgctgaagaagatttctctccccatgtcagctgtagtctgcctctggcttcggcaccttcccagccttgaaaaagcaatgctgcatctttttgaaaagctaatctccagtgagagaaattgtctgagaaggatcgaatgctttataaaagattcatcgctgcctcaagcagcctgccaccctgccatattccgggttgttgatgagatgttcaggtgtgcactcctggaaaccgatggggccctggaaatcatagccactattcaggtgtttacgcagtgctttgtagaagctctggagaaagcaagcaagcagctgcggtttgcactcaagacctactttccttacacttctccatctcttgccatggtgctgctgcaagaccctcaagatatccctcggggacactggctccagacactgaagcatatttctgaactgctcagagaagcagttgaagaccagactcatgggtcctgcggaggtccctttgagagctggttcctgttcattcacttcggaggatgggctgagatggtggcagagcaattactgatgtcggcagccgaaccccccacggccctgctgtggctcttggccttctactacggcccccgtgatgggaggcagcagagagcacagactatggtccaggtgaaggccgtgctgggccacctcctggcaatgtccagaagcagcagcctctcagcccaggacctgcagacggtagcaggacagggcacagacacagacctcagagctcctgcacaacagctgatcaggcaccttctcctcaacttcctgctctgggctcctggaggccacacgatcgcctgggatgtcatcaccctgatggctcacactgctgagataactcacgagatcattggctttcttgaccagaccttgtacagatggaatcgtcttggcattgaaagccctagatcagaaaaactggcccgagagctccttaaagagctgcgaactcaagtctagaaggcacgcaggccgtgtgggtgcccggcgtgagggatcaggctcgccagggccacaggacaggtgatgacctgtggccacgcatttgtggagtaagtgccctcgctgggctgtgagaatgagctgtacacatcttgggacaatctgctagtatctattttacaaaatgcagagccaggtccctcagcccagactcagtcagacatgttcactaatgactcaagtgagccttcggtactcctggtgcccgcccggccagaccgtcagcttgataattactaaagcaaaggcctgggtgggagaacaggtttctagtttttacccaagtcaagctgcacatctattatttaaaaattcaaagtcttagaaccaagaatttggtcatgaaccattaaagaatttagagagaacttagctctttttagactctttttaggagtcagggatctgggataaagccacactgtcttgctgtatggagaaattcttcaaggggagtcagggtccctcaggcttcccttgtgtctccctggacctgcctgacaggccacaggagcagacagcacacccaagcccgggcctccggcacactctttccactctgtatttgctaaatgatgctaactgctaccaaaaggcccttgggacatcagaggagccggcaggcgaaggtagaggatgtgttccagaaacattagaaggcaggattaattcagttagttagttctcttgttaaatggaaatgggaattggaaattcctgataaagaattggcctggctgggtgcagtggctcacacctgtgatcccagcactttgggaggccaaggcagggggattacttcagcccaggagttccagactgcctggctaacatggcaataccctatctctactaaaaatacaaaaattatcggggtgcaatggcatgcatctgtaatcccagctattcaagaggctgaggcatgaggatctcttgaacccgggaggtgggagttgtagtgagccgagatcatgacactgcactccagcctgggcaacagagcgagaccatctcttaaaaaaaggcattgttagtgtaatctcaaggttaacatttatttcatgtcagtacagggtgctttttcctttcagggacattctggaattgtattggttgtacattcttttgtgtctattctgtttgtcaagtgagtcaagacttgcttttgtccattttgatttgtgtgtattagtctgagtcttggctccgttttgaggtatgagcaaagttttgctggattagaagttaacctttagggaaattccttattttggtatgtggcaatgctaatagatccactgaagatctggaaaattccaggaacttttcacctgagcctttcttctgagaaatgctgcagtcagaagggtgtgctggtaaagtattttggtggcagctgccatcatggtcattgccttcatataacatgcttcgtgctcatggtcattgccttcatataacatgcttcgtgccatcatgatccttgccttcatataacaaacatgcttcgtcagaggtgttggggttgaaaaaggagctgcatgcttcactggagttgagggcctctctcctgttctgactttaagccagaacttgtggctgggccatggaagctgtgactcctctgtggacatggtggcagcagggaacccctagagagaggggccactgggaccaggcctcctgttgtggagggactcctgggacagtcctccaccctgtcctgtggtcctgtgtacagggttggcctcttcctcctcccctgccaggcctctgcccatgccccttccttccttctcctgggactggtgaagctaggcatctggaagacttcttcctagcctggaagccctgacctcggcccatctgcagaatctcccagttccttcacagctgccgagtcctctcacgggtgcggtggaggcggccttgccggtggtgctttctgggcagccaggggttcctgggtgggaggactgtccctctggggacgtggcactgaagtgcctgctggcttcatgtggccctttgccctttcccagcctgagagatgctcaaaggtggggagctgggggagccacccctcggccattccctccacctccaagacaggtggcggccgggcaggcactcttaagcccacctccccctcttgttgccttcgatttcggcaaagcctgggcaggtgccaccgggaaggaatggcatccgagatgctgggcggggacgcggcgtggccgagggggccttgacggcgttggcggggcctgggcacaggggcagccgcagggaggcagggatggcaaggcgtgaagccaccctggaaggaactggaccaaggtcttcagaggtgcgacagggtctggaatctgaccttactctagcaggagtttttgtagactctccctgatagtttagtttttgataaagcatgctggtaaaaccactaccctcagagagagccaaaaatacagaagaggcggagagcgcccctccaaccaggctgttattcccctggactccgtgacatctgtggaattttttagctctttaaaatctgtaatttgttgtctattttttcattctaaataaaacttcagtttgcacctaaaaaaaaaaaaaaaaaaaaaa

SEQ ID NO: 664 - DNA, 3309 bp, Homo sapiens
tgaaagcggaagtagggccttcgcgcacctcatggaatcccttctgcagcacctggatcgcttttccgagcttctggcggtctcaagcactacctacgtcagcacctgggaccccgccaccgtgcgccgggccttgcagtgggcgcgctacctgcgccacatccatcggcgctttggtcggcatggccccattcgcacggctctggagcggcggctgcacaaccagtggaggcaagagggcggctttgggcggggtccagttccgggattagcgaacttccaggccctcggtcactgtgacgtcctgctctctctgcgcctgctggagaaccgggccctcggggatgcagctcgttaccacctggtgcagcaactctttcccggcccgggcgtccgggacgccgatgaggagacactccaagagagcctggcccgccttgcccgccggcggtctgcggtgcacatgctgcgcttcaatggctatagagagaacccaaatctccaggaggactctctgatgaagacccaggcggagctgctgctggagcgtctgcaggaggtggggaaggccgaagcggagcgtcccgccaggtttctcagcagcctgtgggagcgcttgcctcagaacaacttcctgaaggtgatagcggtggcgctgttgcagccgcctttgtctcgtcggccccaagaagagttggaacccggcatccacaaatcacctggagaggggagccaagtgctagtccactggcttctggggaattcggaagtctttgctgccttttgtcgcgccctcccagccgggcttttgactttagtgactagccgccacccagcgctgtctcctgtctatctgggtctgctaacagactggggtcaacgtttgcactatgaccttcagaaaggcatttgggttggaactgagtcccaagatgtgccctgggaggagttgcacaataggtttcaaagcctctgtcaggcccctccacctctgaaagataaagttctaactgccctggagacctgtaaagcgcaggatggagattttgaagtacctggtcttagcatctggacagacctcttattagctcttcgtagtggtgcatttaggaaaagacaagttttgggtctcagcgcaggcctcagttctgtataggcaatgctgtgttattacttgaatatagaatatatagtttacaaaatgaaaattacaatgttctcaccaaatatatgccttcgtgtgtccaaagtataattattttagatgctaattttgaatagtttattaaacagttataaatatgcaaagtagctggcatgtagtgtcacggattttctggatagaggaagtgattggaagtactccacttaaagccatggaattagcaatagtttgctttttaatagaaggcccatttgtaagaatgttgaaaatatgtgtaccgtttaaagaaaaagcagctttaaagtgacaaacaaaataccctttttcttttagtatggtttatttttctaggttttctgtccctccctcagtagtgaagagttttctttattcctggcagtgtcaggaatattggtttgaaaagctgttggcctatctggagtttggccttgttaacctagtattctaaccagttaaccagccttagtatgcattaaaattgtattgttcagaaagtttgtttctcattttctgcaaattcttactttgaaaatgaatcaccacatagtatgtccctttaaagcattgacgcacagacaaatgtttaaagcacagtaaatacgaatatatgcctttggatattaaattaatgcttgatgataaaagaatcaaacttttttttttttgagatggagtctcgctctgtcacccagactggagtgcagtggtgtgatcactgctcagtgcaacctctgcctcccaggatcaagcaattctgactcagcctcccaagtagctgggattacaggcgcaggccaccatgcccggctaattttttgtatttttagtagagacggggtttcaccatgctggccaggctggtctcaaacacctgaccttgtgatccgtccgccttggcctcccaaagtgctgggattacaggcgtgagccaccgcgcctggccaaaacaacattttaagtagaagatccaggttttagtgcagcttctgccgttaactaggttaataaatcacaaccttggggccacagttgccttatatgtaaatgaagtgtttagaataaaatagttaaatttccttatttttcccttggtggctgccctgtggaaacagtttagaatatttgttttgtgtgtaggaacctagttgtgttagtttacctgggtgttccacagctgatagtgattgccttgaataaattcaagggcaatttattcatttttactagggagatagacctttacagcaatcaagatatttttgtccatatccaggttagctggtaagaggatttttttggagaaaaaaatgatatttagaaagttaatttctaattccggaatggaataaaaacaatatgagtagtgtaatcttgtagaaaaagagttgtataatcttgtagaatttctcattctgtggtacaacccaggggtaaactattattccagtagtcagtacacttttctagataaatcttgagtgaaaaccagcaatttctttttccttgtggtctgattcctttttctaatccatgaaggccatcttgtagattacatttatcattaatgcaagaataaagacaattcctcctgtcagttgcgtgaattttttttaagaaacaacccagtgaagagttctaccatagcaaggcctaatgttagctttagctttagaaaataacagtttgtgaacttacttccctatatttgcagctgtatctcacactatgatttacaataaaattgtaaagattgacaatagacttaagaaataacattttaaaatctattttatacttaccatttattattctgttattttagtctccatatgttcattacatacataatcttatttaatcttcacaccaaaactgtattcttatgaatatacgctaaaagattaagtaaaatgcccaagggtataaacaaaagcaacatgaaagtggaagccgtatctgtcatttattttatttccagaagcctagcacagtgtccagcatatggtagatacttgtagtgtttgaataaatgaaaccagcattagagctttatatactttctcttaaggacttgaaaagattaggaatctacgcatacactgagagagaaaaaagtgagagga

SEQ ID NO: 665 - DNA, 5028 bp, Homo sapiens
gcggccgctgcccgctttgcgccgctcctccctgcgcgagtagcgctggccccggcgtcgaggcggccatggcgacccggagcccgctccccacccaccccgcctgctccgccctcccctccgccccgcgccacctttgatggctcggacctcagccggccaccgccagccctgctcgcgcgcccgcgccgccgccgcccgcgggtattaatagccggcgccgccgcgccctcggccgccgggggcttgggagccgccgatcccggagcccgagccgggagagggagccgccgcagccgccggcgctgtggagatattctctaagccgctttcatcatgggagaaatagagcagaggccgaccccaggatcacgactgggggccccggaaaattcggggatcagtaccttggaacgtggacagaagccgcccccaacaccttcaggaaaactcgtgtccatcaaaatccagatgctggatgacacccaggaggcatttgaagttccacaaagagctcctgggaaggtgctgctggatgcagtttgcaaccacctcaacctcgtggaaggtgactattttggcctcgagtttcctgatcacaaaaagatcacggtgtggctggatctcctaaaacccattgtgaaacagattagaaggccaaagcacgttgttgttaagtttgtggtgaaattctttccgcctgaccacacacaactccaagaagaactcacaaggtacctgttcgcgctgcaggtgaagcaggacttggctcaaggcaggttgacgtgtaatgacaccagcgcagctctcttgatttcacacattgtgcaatctgagattggggattttgatgaagccttggacagagagcacttagcaaaaaataaatacatacctcagcaagacgcactagaggacaaaatcgtggaatttcaccataaccacattggacaaacaccagcagaatcagatttccagctcctagagattgcccgtcggctagagatgtatggaatccggttgcacccggccaaggacagggaaggcacgaagatcaatctggccgttgccaacacgggaattctagtgtttcagggtttcactaagatcaatgccttcaactgggccaaggtgcggaagctgagcttcaagaggaagcgctttctcatcaagctccggccagatgccaatagtgcgtaccaggataccttggaattcctgatggccagtcgggatttctgcaagtccttctggaaaatctgtgttgaacatcatgccttctttagactttttgaagagcccaaaccaaagcccaagcccgtcctctttagccgggggtcatcatttcggttcagtggtcggactcagaagcaggttctcgactatgttaaagaaggaggacataagaaggtgcagtttgaaaggaagcacagcaagattcattctatccggagccttgcttcacagcctacagaactgaattcggaagtgctggagcagtctcagcagagcaccagccttacatttggagaaggtgccgaatctccagggggccagagctgccggcgaggaaaggaaccgaaggtttccgccggggagccggggtcgcacccgagccctgcgccgaggagaagccccgcgggtaacaagcaggcggacggagccgcctcggcgcccacggaggaagaggaggaggtcgttaaggataggacccagcagagtaaacctcagcccccgcagccaagcacaggctccctgactggcagtcctcacctttccgagctgtctgtgaactcgcaggggggagtggcccctgccaacgtgaccttgtctcccaacctgagccccgacaccaagcaggcctctcccttgatcagcccgctgctgaatgaccaggcctgcccccggacggacgatgaggatgagggccggaggaagagattcccaactgataaagcgtacttcatagctaaggaagtgtctaccaccgagcgaacatatctgaaggatctcgaagttatcacttcgtggtttcagagcacagtgagcaaagaggacgccatgccggaagcactgaaaagtctcatattcccgaattttgaacctttgcacaaatttcatactaattttctcaaggaaattgagcaacgacttgccctgtgggaaggccgctcaaatgcccaaatcagagattaccaaagaatcggcgatgtcatgctgaagaacattcagggcatgaagcacctggcggctcacctgtggaagcacagcgaggccttggaggccctggagaatggaatcaagagctcccggcggctggagaacttctgcagagactttgagctgcagaaggtgtgttacctaccgctcaacaccttcctcctgcggccactgcaccggctcatgcactacaagcaggtcctggagcggctgtgcaaacaccacccgccgagccacgccgacttcagggactgccgagccgctttggcagagatcacggagatggtggcacagctccacggtacgatgatcaagatggagaatttccagaagctgcacgaactcaagaaagatttgattggcattgacaatcttgtggttccgggaagggagttcatccgtctgggcagcctcagcaagctctcggggaaggggctccagcagcgcatgttcttcctgttcaacgacgtcctgctatacacgagccgggggctgacggcctccaatcagtttaaagtccacgggcagctcccgctctatggcatgacgattgaggagagcgaagacgagtggggggtgccccactgcctgaccctccggggccagcggcagtccatcatcgtggccgccagttctcggtccgagatggagaagtgggttgaggacatccagatggccattgacctggcggagaagagcagcagccccgcccctgagttcctggccagcagcccccctgacaacaagtcccctgatgaagccaccgcggctgaccaggagtcagaggatgacctgagcgcctcgcgcacatcgctggagcgccaggccccgcaccgcggcaacacaatggtgcacgtgtgctggcaccgcaacaccagcgtctccatggtggacttcagcatcgcagtggagaatcagttgtctggaaacctgctgaggaaattcaaaaacagcaacgggtggcagaagctgtgggtggtgttcacaaacttctgcctgttcttctacaaatcacaccaggacaatcatccccttgccagcctgcctctgctcggctactcgctcaccatcccctctgagtccgagaacatccagaaagactacgtgttcaagctgcacttcaagtcccacgtctactacttcagggcggaaagcgagtacacgttcgaaaggtggatggaagtgatccgcagtgccaccagctctgcctcgcgaccccacgtgttgagtcacaaagagtctcttgtgtattgatggccggacacactcgtttccgcagtggctgctttcctggaagacgtttcctttcttctgtattaatgaagcctggtaaaattaacacctgtctgaaaatcaaaaacatggcttcccagcagctctcctgtctccacagccgcgttttttaaccccgacctctcagcgtctgaatgaacagcgctcccacctccagtcctggcatccgctgggggcgctgttctttagctagtgccagtattaaaacattgtcattacgagagtgccaaatgacatcttccctccaccctgcccctgaaaaacagtacacacacatccgttcaacacaagacagggcaagtgtttttcttcctaaaaaaagttctttcttttattattttcacctattggctgctgcattttacgaagtggacttcccggtgtttgtttgtttgtttgcaatacactcagtgcagccttaagcaaatgagatcattttcagatttcattttttttttcagtctttctacttttgtaataataggaagttagtaggactcacttctctgattaataagcaatttgcagcacacagcgttccactgcggggtttcacgctcacctgaaaacacctgttcccaacctacttcttggtgcaagttgaccaaatcgttttaagtggtaactctttccaaccgtagcagggttgttttctgttaagcaaagccgagatccagtgcaatacctggactgtcaccgtcctgtgagtggtgtacacaatgggaagataataagccgtggtgttttgctgtctgtctgtgtcacaagcatgaaaacccgtgtgtcattgatcagcaccatttgtggtatgttccgtgatgagcgtttagtgagcctgctggctgcagagcactatgaaatcatggtacgtagtccccggcacctgtcgttattcctatatcctcctgcaactgtggtttgaaactgcgcattctctagtagtatatatcgtgcctgtcttcaaaaacatttccctttttatactcattccccccaggcatggggtagtgtcagtcggactgcacagggaacacggtttccagtggctttggcccctactcgggaaacgtctgcctgttctcgatggtgatggggtggctgccattcccttggttttcctaagccctttctaacgagagtctcaaacaagcggaggcgagggccaattcaaccccattctttccagcgccccgcaccatagcacctgcccacctgagaaccaggaacgcaccctctctgtggagctctgactggtgtagctggaaacaaacagcaacttgcaaacggacgaagagcctgccgtgtgttaatcatttgccttacaagatgtaccagacggtttccagtactaacaaagggaataaaaatacctcacgccacaatccagcatattgatgttttaaggcaaaacaaaaaaaaaaaaaaaaaaaaaaaaaaaaaaaaaaaaaaaaaaaaaaaaaaaaaaaaaaaaaaaaaaaaaaaaaaaaaaaaaaaaaaaaaaaaaaaaaaaaaaaa

SEQ ID NO: 666 - DNA, 14536 bp, Homo sapiens
ggagttttccaccatgactattgccctgctgggttttgccatattcttgctccattgtgcgacctgtgagaagcctctagaagggattctctcctcctctgcttggcacttcacacactcccattacaatgccaccatctatgaaaattcttctcccaagacctatgtggagagcttcgagaaaatgggcatctacctcgcggagccacagtgggcagtgaggtaccggatcatctctggggatgtggccaatgtatttaaaactgaggagtatgtggtgggcaacttctgcttcctaagaataaggacaaagagcagcaacacagctcttctgaacagagaggtgcgagacagctacaccctcatcatccaagccacagagaagaccttggagttggaagctttgacccgtgtggtggtccacatcctggaccagaatgacctgaagcctctcttctctccaccttcgtacagagtcaccatctctgaggacatgcccctgaagagccccatctgcaaggtgactgccacagatgctgatctaggccagaatgctgagttctattatgcctttaacacaaggtcagagatgtttgccatccatcccaccagcggtgtggtcactgtggctgggaagcttaacgtcacctggcgaggaaagcatgagctccaggtgctagctgtggaccgcatgcggaaaatctctgagggcaatgggtttggcagcctggctgcacttgtggttcatgtggagcctgccctcaggaagcccccagccattgcttcggtggtggtgactccaccagacagcaatgatggtaccacctatgccactgtactggtcgatgcaaatagctcaggagctgaagtggagtcagtggaagttgttggtggtgaccctggaaagcacttcaaagccatcaagtcttatgcccggagcaatgagttcagtttggtgtctgtcaaagacatcaactggatggagtaccttcatgggttcaacctcagcctccaggccaggagtgggagcggcccttatttttattcccagatcaggggctttcacctaccaccttccaaactgtcttccctcaaattcgagaaggctgtttacagagtgcagcttagtgagttttcccctcctggcagccgcgtggtgatggtgagagtcaccccagccttccccaacctgcagtatgttctaaagccatcttcagagaatgtaggatttaaacttaatgctcgaactgggttgatcaccaccacaaagctcatggacttccacgacagagcccactatcagctacacatcagaacctcaccgggccaggcctccaccgtggtggtcattgacattgtggactgcaacaaccatgcccccctcttcaacaggtcttcctatgatggtaccttggatgagaacatccctccaggcaccagtgttttggctgtgactgccactgaccgggatcatggggaaaatggatatgtcacctattccattgctggaccaaaagctttgccattttctattgacccctacctggggatcatctccacctccaaacccatggactatgaactcatgaaaagaatttataccttccgggtaagagcatcagactggggatccccttttcgccgggagaaggaagtgtccatttttcttcagctcaggaacttgaatgacaaccagcctatgtttgaagaagtcaactgtacagggtctatccgccaagactggccagtagggaaatcgataatgactatgtcagccatagatgtggatgagcttcagaacctaaaatacgagattgtatcaggcaatgaactagagtattttgatctaaatcatttctccggagtgatatccctcaaacgcccttttatcaatcttactgctggtcaacccaccagttattccctgaagattacagcctcagatggcaaaaactatgcctcacccacaactttgaatattactgtggtgaaggaccctcattttgaagttcctgtaacatgtgataaaacaggggtattgacacaattcacaaagactatcctccactttattgggcttcagaaccaggagtccagtgatgaggaattcacttctttaagcacatatcagattaatcattacaccccacagtttgaggaccacttcccccaatccattgatgtccttgagagtgtccctatcaacacccccttggcccgcctagcagccactgaccctgatgctggttttaatggcaaactggtctatgtgattgcagatggcaatgaggagggctgctttgacatagagctggagacagggctgctcactgtagctgctcccttggactatgaagccaccaatttctacatcctcaatgtaacagtatatgacctgggcacaccccagaagtcctcctggaagctgctgacagtgaatgtgaaagactggaatgacaacgcacccagatttcctcccggtgggtaccagttaaccatctcggaggacacagaagttggaaccacaattgcagagctgacaaccaaagatgctgactcggaagacaatggcagggttcgctacaccctgctaagtcccacagagaagttctccctccaccctctcactggggaactggttgttacaggacacctggaccgcgaatcagagcctcggtacatactcaaggtggaggccagggatcagcccagcaaaggccaccagctcttctctgtcactgacctgataatcacattggaggatgtcaacgacaactctccccagtgcatcacagaacacaacaggctgaaggttccagaggacctgccccccgggactgtcttgacatttctggatgcctctgatcctgacctgggccccgcaggtgaagtgcgatatgttctgatggatggcgcccatgggaccttccgggtggacctgatgacaggggcgctcattctggagagagagctggactttgagaggcgagctgggtacaatctgagcctgtgggccagtgatggtgggaggcccctagcccgcaggactctctgccatgtggaggtgatcgtcctggatgtgaatgagaatctccaccctccccactttgcctccttcgtgcaccagggccaggtgcaggagaacagcccctcgggaactcaggtgattgtagtggctgcccaggacgatgacagtggcttggatggggagctccagtacttcctgcgtgctggcactggactcgcagccttcagcatcaaccaagatacaggaatgattcagactctggcacccctggaccgagaatttgcatcttactactggttgacggtattagcagtggacaggggttctgtgcccctctcttctgtaactgaagtctacatcgaggttacggatgccaatgacaacccaccccagatgtcccaagctgtgttctacccctccatccaggaggatgctcccgtgggcacctctgtgcttcaactggatgcctgggacccagactccagctccaaagggaagctgaccttcaacatcaccagtgggaactacatgggattctttatgattcaccctgttacaggtctcctatctacagcccagcagctggacagagagaacaaggatgaacacatcctggaggtgactgtgctggacaatggggaaccctcactgaagtccacctccagggtggtggtaggcatcttggacgtcaatgacaatccacctatattctcccacaagctcttcaatgtccgccttccagagaggctgagccctgtgtcccctgggcctgtgtacaggctggtggcttcagacctggatgagggtcttaatggcagagtcacctacagtatcgaggacagcgatgaggaggccttcagtatcgacctggtcacaggtgtggtttcatccagcagcacttttacagctggagagtacaacatcctaacgatcaaggcaacagacagtgggcagccaccactctcagccagtgtccggctacacattgagtggatcccttggccccggccgtcctccatccctctggcctttgatgagacctactacagctttacggtcatggagacggaccctgtgaaccacatggtgggggtcatcagcgtagagggcagacccggactcttctggttcaacatctcaggtggggataaggacatggactttgacattgagaagaccacaggcagcatcgtcattgccaggcctcttgataccaggagaaggtcgaactataacttgactgttgaggtgacagatgggtcccgcaccattgccacacaggtccacatcttcatgattgccaacattaaccaccatcggccccagtttctggaaactcgttatgaagtcagagttccccaggacaccgtgccaggggtagagctcctgcgagtccaggccatagatcaagacaagggcaaaagcctcatctataccatacatggcagccaagacccaggaagtgccagcctcttccagctggacccaagcagtggtgtcctggtaacggtgggaaaattggacctcggctcggggccctcccagcacacactgacagtcatggtccgagaccaggaaatacctatcaagaggaacttcgtgtgggtgaccattcatgtggaggatggaaacctccacccaccccgcttcactcagctccattatgaggcaagtgttcctgacaccatagcccccggcacagagctgctgcaggtccgagccatggatgctgaccggggagtcaatgctgaggtccactactccctcctgaaagggaacagcgaaggtttcttcaacatcaatgccctgctaggcatcattactctagctcaaaagcttgatcaggcaaatcatgccccacatactctgacagtgaaggcagaagatcaaggctccccacaatggcatgacctggctacagtgatcattcatgtctatccctcagataggagtgcccccatcttttcaaaatctgagtactttgtagagatccctgaatcaatccctgttggttccccaatcctccttgtctctgctatgagcccctctgaagttacctatgagttaagagagggaaataaggatggagtcttctctatgaactcatattctggccttatttccacccagaagaaattggaccatgagaaaatctcgtcttaccagctgaaaatccgaggcagcaatatggcaggtgcatttactgatgtcatggtggtggttgacataattgatgaaaatgacaatgctcctatgttcttaaagtcaacttttgtgggccaaattagtgaagcagctccactgtatagcatgatcatggataaaaacaacaacccctttgtgattcatgcctctgacagtgacaaagaagctaattccttgttggtctataaaattttggagccggaggccttgaagtttttcaaaattgatcccagcatgggaaccctaaccattgtatcagagatggattatgagagcatgccctctttccaattctgtgtctatgtccatgaccaaggaagccctgtattatttgcacccagacctgcccaagtcatcattcatgtcagagatgtgaatgattcccctcccagattctcagaacagatatatgaggtagcaatagtcgggcctatccatccaggcatggagcttctcatggtgcgggccagcgatgaagactcagaagtcaattatagcatcaaaactggcaatgctgatgaagctgttaccatccatcctgtcactggtagcatatctgtgctgaatcctgctttcctgggactctctcggaagctcaccatcagggcttctgatggcttgtatcaagacactgcgctggtaaaaatttctttgacccaagtgcttgacaaaagcttgcagtttgatcaggatgtctactgggcagctgtgaaggagaacttgcaggacagaaaggcactggtgattcttggtgcccagggcaatcatttgaatgacaccctttcctactttctcttgaatggcacagatatgtttcatatggtccagtcagcaggtgtgttgcagacaagaggtgtggcgtttgaccgggagcagcaggacactcatgagttggcagtggaagtgagggacaatcggacacctcagcgggtggctcagggtttggtcagagtctctattgaggatgtcaatgacaatccccccaaatttaagcatctgccctattacacaatcatccaagatggcacagagccaggggatgtcctctttcaggtatctgccactgatgaggacttggggacaaatggggctgttacatatgaatttgcagaagattacacatatttccgaattgacccctatcttggggacatatcactcaagaaaccctttgattatcaagctttaaataaatatcacctcaaagtcattgctcgggatggaggaacgccatccctccagagtgaggaagaggtacttgtcactgtgagaaataaatccaacccactgtttcagagtccttattacaaagtcagagtacctgaaaatatcaccctctataccccaattctccacacccaggcccggagtccagagggactccggctcatctacaacattgtggaggaagaacccttgatgctgttcaccactgacttcaagactggtgtcctaacagtaacagggcctttggactatgagtccaagaccaaacatgtgttcacagtcagagccacggatacagctctggggtcattttctgaagccacagtggaagtcctagtggaggatgtcaatgataaccctcccactttttcccaattggtctataccacttccatctcagaaggcttgcctgctcagacccctgtgatccaactgttggcttctgaccaggactcagggcggaaccgtgacgtctcttatcagattgtggaggatggctcagatgtttccaagttcttccagatcaatgggagcacaggggagatgtccacagttcaagaactggattatgaagcccaacaacactttcatgtgaaagtcagggccatggataaaggagatcccccactcactggtgaaacccttgtggttgtcaatgtgtctgatatcaatgacaaccccccagagttcagacaacctcaatatgaagccaatgtcagtgaactggcaacctgtggacacctggttcttaaagtccaggctattgaccctgacagcagagacacctcccgcctggagtacctgattctttctggcaatcaggacaggcacttcttcattaacagctcatcgggaataatttctatgttcaacctttgcaaaaagcacctggactcttcttacaatttgagggtaggtgcttctgatggagtcttccgagcaactgtgcctgtgtacatcaacactacaaatgccaacaagtacagcccagagttccagcagcacctttatgaggcagaattagcagagaatgcaatggttggaaccaaggtgattgatttgctagccatagacaaagatagtggtccctatggcactatagattatactatcatcaataaactagcaagtgagaagttctccataaaccccaatggccagattgccactctgcagaaactggatcgggaaaattcaacagagagagtcattgctattaaggtcatggctcgggatggaggaggaagagtagccttctgcacggtgaagatcatcctcacagatgaaaatgacaaccccccacagttcaaagcatctgagtacacagtatccattcaatccaatgtcagtaaagactctccggttatccaggtgttggcctatgatgcagatgaaggtcagaacgcagatgtcacctactcagtgaacccagaggacctagttaaagatgtcattgaaattaacccagtcactggtgtggtcaaggtgaaagacagcctggtgggattggaaaatcagacccttgacttcttcatcaaagcccaagatggaggccctcctcactggaactctctggtgccagtacgacttcaggtggttcctaaaaaagtatccttaccgaaattttctgaacctttgtatactttctctgcacctgaagaccttccagaggggtctgaaattgggattgttaaagcagtggcagctcaagatccagtcatctacagtctagtgcggggcactacacctgagagcaacaaggatggtgtcttctccctagacccagacacaggggtcataaaggtgaggaagcccatggaccacgaatccaccaaattgtaccagattgatgtgatggcacattgccttcagaacactgatgtggtgtccttggtctctgtcaacatccaagtgggagacgtcaatgacaataggcctgtatttgaggctgatccatataaggctgtcctcactgagaatatgccagtggggacctcagtcattcaagtgactgccattgacaaggacactgggagagatggccaggtgagctacaggctgtctgcagaccctggtagcaatgtccatgagctctttgccattgacagtgagagtggttggatcaccacactccaggaacttgactgtgagacctgccagacttatcattttcatgtggtggcctatgaccacggacagaccatccagctatcctctcaggccctggttcaggtctccattacagatgagaatgacaatgctccccgatttgcttctgaagagtacagaggatctgtggttgagaacagtgagcctggcgaactggtggcgactctaaagaccctggatgctgacatttctgagcagaacaggcaggtcacctgctacatcacagagggagaccccctgggccagtttggcatcagccaagttggagatgagtggaggatttcctcaaggaagaccctggaccgcgagcatacagccaagtacttgctcagagtcacagcatctgatggcaagttccaggcttcggtcactgtggagatctttgtcctggacgtcaatgataacagcccacagtgttcacagcttctctatactggcaaggttcatgaagatgtatttccaggacacttcattttgaaggtttctgccacagacttggacactgataccaatgctcagatcacatattctctgcatggccctggggcgcatgaattcaagctggatcctcatacaggggagctgaccacactcactgccctagaccgagaaaggaaggatgtgttcaaccttgttgccaaggcgacggatggaggtggccgatcgtgccaggcagacatcaccctccatgtggaggatgtgaatgacaatgccccgcggttcttccccagccactgtgctgtggctgtcttcgacaacaccacagtgaagacccctgtggctgtagtatttgcccgggatcccgaccaaggcgccaatgcccaggtggtttactctctgccggattcagccgaaggccacttttccatcgacgccaccacgggggtgatccgcctggaaaagccgctgcaggtcaggccccaggcaccactggagctcacggtccgtgcctctgacctgggcaccccaataccgctgtccacgctgggcaccgtcacagtctcggtggtgggcctagaagactacctgcccgtgttcctgaacaccgagcacagcgtgcaggtgcccgaggacgccccacctggcacggaggtgctgcagctggccaccctcactcgcccgggcgcagagaagaccggctaccgcgtggtcagcgggaacgagcaaggcaggttccgcctggatgctcgcacagggatcctgtatgtcaacgcaagcctggactttgagacaagccccaagtacttcctgtccattgagtgcagccggaagagctcctcttccctcagtgacgtgaccacagtcatggtcaacatcactgatgtcaatgaacaccggccccaattcccccaagatccatatagcacaagggtcttagagaatgcccttgtgggtgacgtcatcctcacggtatcagcgactgatgaagatggacccctaaatagtgacattacctatagcctcataggagggaaccagcttgggcacttcaccattcaccccaaaaagggggagctacaggtggccaaggccctggaccgggaacaggcctctagttattccctgaagctccgagccacagacagtgggcagcctccactgcatgaggacacagacatcgctatccaagtggctgatgtcaatgataacccaccgagattcttccagctcaactacagcaccactgtccaggagaactcccccattggcagcaaagtcctgcagctgatcctgagtgacccagattctccagagaatggccccccctactcgtttcgaatcaccaaggggaacaacggctctgccttccgagtgaccccggatggatggctggtgactgctgagggcctaagcaggagggctcaggaatggtatcagcttcagatccaggcgtcagacagtggcatccctcccctctcgtctttgacgtctgtccgtgtccatgtcacagagcagagccactatgcaccttctgctctcccactggagatcttcatcactgttggagaggatgagttccagggtggcatggtgggtaagatccatgccacagaccgagacccccaggacacgctgacctatagcctggcagaagaggagaccctgggcaggcacttctcagtgggtgcgcctgatggcaagattatcgccgcccagggcctgcctcgtggccactactcgttcaacgtcacggtcagcgatgggaccttcaccacgactgctggggtccatgtgtacgtgtggcatgtggggcaggaggctctgcagcaggccatgtggatgggcttctaccagctcacccccgaggagctggtgagtgaccactggcggaacctgcagaggttcctcagccataagctggacatcaaacgggctaacattcacttggccagcctccagcctgcagaggccgtggctggtgtggatgtgctcctggtctttgaggggcattctggaaccttctacgagtttcaggagctagcatccatcatcactcactcagccaaggagatggagcattcagtgggggttcagatgcggtcagctatgcccatggtgccctgccaggggccaacctgccagggtcaaatctgccataacacagtgcatctggaccccaaggttgggcccacgtacagcaccgccaggctcagcatcctaaccccgcggcaccacctgcagaggagctgctcctgcaatggtactgctacaaggttcagtggtcagagctatgtgcggtacagggccccagcggctcggaactggcacatccatttctatctgaaaacactccagccacaggccattcttctattcaccaatgaaacagcgtccgtctccctgaagctggccagtggagtgccccagctggaataccactgtctgggtggtttctatggaaacctttcctcccagcgccatgtgaatgaccacgagtggcactccatcctggtggaggagatggacgcttccattcgcctgatggttgacagcatgggcaacacctcccttgtggtcccagagaactgccgtggtctgaggcccgaaaggcacctcttgctgggcggcctcattctgttgcattcttcctcgaatgtctcccagggctttgaaggctgcctggatgctgtcgtggtcaacgaagaggctctagatctgctggcccctggcaagacggtggcaggcttgctggagacacaagccctcacccagtgctgcctccacagtgactactgcagccagaacacatgcctcaatggtgggaagtgctcatggacccatggggcaggctatgtctgcaaatgtcccccacagttctctgggaagcactgtgaacaaggaagggagaactgtacttttgcaccctgcctggaaggtggaacttgcatcctctcccccaaaggagcttcctgtaactgccctcatccttacacaggagacaggtgtgaaatggaggcgaggggttgttcagaaggacactgcctagtcactcccgagatccaaaggggggactgggggcagcaggagttactgatcatcacagtggccgtggcgttcattatcataagcactgtcgggcttctcttctactgccgccgttgcaagtctcacaagcctgtggccatggaggacccagacctcctggccaggagtgttggtgttgacacccaagccatgcctgccatcgagctcaacccattgagtgccagctcctgcaacaacctcaaccaaccggaacccagcaaggcctctgttccaaatgaactcgtcacatttggacccaattctaagcaacggccagtggtctgcagtgtgccccccagactcccgccagctgcggtcccttcccactctgacaatgagcctgtcattaagagaacctggtccagcgaggagatggtgtaccctggcggagccatggtctggccccctacttactccaggaacgaacgctgggaatacccccactccgaagtgactcagggccctctgccgccctcggctcaccgccactcaaccccagtcgtgatgccagagcctaatggcctctatgggggcttccccttccccctggagatggaaaacaagcgggcacctctcccaccccgttacagcaaccagaacctggaagatctgatgccctctcggccccctagtccccgggagcgcctggttgccccctgtctcaatgagtacacggccatcagctactaccactcgcagttccggcagggagggggagggccctgcctggcagacgggggctacaagggggtgggtatgcgcctcagccgagctgggccctcttatgctgtctgtgaggtggagggggcacctcttgcaggccagggccagccccgggtgccccccaactatgagggctctgacatggtggagagtgattatggcagctgtgaggaggtcatgttctagcttcccattcccagagcaaggcaggcgggaggccaaggactggacttggcttatttcttcctgtctcgtagggggtgagttgagtgtggctgggagagtgggagggaagccctcagcccaggctgttgtcccttgaaatgtgctcttccaatcccccacctagtccctgagggtggagggaagctgaggatagagctccagaaacagcactagggtcccaggagaggggcatttctagagcagtgaccctggaaaaccaggaacaattgactcctggggtgggcgacagacaggagggctccctgatctgccggctctcagtccccggggcaaagcctgattgactgtgctggctcaacttcaccaagatgcattctcatacctgcccacagctccattttggaggcaggcaggttggtgcctgacagacaaccactacgcgggccgtacagaggagctctagagggctgcgtggcatcctcctaggggctgagaggtgagcagcaggggagcgggcacagtcccctctgcccctgcctcagtcgagcactcactgtgtctttgtcaagtgtctgctccacgtcaggcactgtgctttgcaccggggagaaaatggtgatggagggcaacaaggactccgaggagcaccaccaggcctcgggccccagaggtcccgctcctcagcctacacgcagaggaacgggcccacctcagagtcacaccactggctgccagtcagggcctgccaggagtctacacagctctgaaccttctttgttaaagaattcagacctcatggaactctgggttcttcatcccaagtttcccaggcacttttggccaaaggaaggaaggaactaattcttcattttaaaaattcttaggcactttttgaccttgctgtctggatgagtttcctcaatgggatttttcttccctagacacaaggaagtctgaactcctatttagggccggttggaagcagggagctggaccgcagtgtccaggctggacacctgccattgcctcctctccactgcagacgcctgcccatcaagtattacctgcagcgactcaaccctatgcatggagggtcaatgtgggcacatgtctacacatgtgggtgcccatggatagtacgtgtgtacacatgtgtagagtgtatgtagccaggagtggtggggaccagaagcctctgtggcctttggtgacctcaccactccctcccacccagtccctccctctggtccactgccttttcatatgtgttgtttctggagacagaagtcaaaaggaagagcagtggagccttgcccacagggctgctgcttcatgcgagagggagatgtgtgggcgagagccaatttgtgtgagtggtttgtggctgtgtgtgtgactgtgagtgtgagtgacagatacatagtttcattggtcatttttttttttaacaataaagtatctttttttactgtt

SEQ ID NO: 667 - DNA, 19048 bp, Homo sapiens
gatggaagtatgatgtgatggatataattatgggacactgtgtgggcacacggcctcctgcttgttgcctcatcctcctgcttttcaagcttttggccactgtctcccaggggctgccagggactggacccctgggcttccacttcacacattccatttataatgctaccgtgtatgagaactcagcagcaaggacctacgtcaacagccagagtagaatgggcatcaccttaatagatctatcctgggatatcaaatacagaatagtgtccggagacgaggaaggctttttcaaagcagaggaagtcatcattgcagatttctgttttctcagaataagaactaaaggtggcaattctgccatattaaatagggaaatccaggataattatttattgatagtaaaaggttctgtcagaggagaggatttggaagcatggaccaaagtgaatatacaggttttagatatgaatgatctgagacctttgttttcacccacaacatactctgttaccatagcagaaagcacacctctaaggactagtgttgcccaggtgactgcaacagacgcagatattggttccaatggagaattctactactactttaaaaataaagttgatctcttttcagttcaccccacgagtggtgtcatctccttaagtggtcgattaaattatgatgaaaagaataggtatgatctggaaattttggctgtggaccggggaatgaaactgtatgggaacaatggagtgagcagtactgcaaagctttatgttcacattgagcgcataaatgaacatgccccaacaatccatgtagtcactcatgttcctttctcgttggaaaaagagccaacatatgcagtggtgacagttgatgacttagatgatggagcgaatggagagatcgaatctgtttccattgtggctggggatcctttagatcagttcttcctggctaaggaaggaaagtggttgaatgagtacaagattaaggagaggaagcagattgactgggagagctttccctatggctacaatctcactcttcaagcaaaagacaagggatctcctcaaaaatgttcagcattaaaggcagtctacattggcaaccccacaagagacactgtccccattagatttgaaaaagaagtgtacgatgtgagcataagtgaattttcccctcctggtgtcgtggttgctatagtaaaattaagtcctgaaccgatagatgtggaatacaaattatctcctggtgaggatgcagtgtactttaaaattaatcctcggtcgggtctgattgttacagcacggccactgaatactgttaagaaggaggtttataaactggaggtgacaaacaaggaaggagatttaaaagcacaggtcaccatcagcatagaagatgcaaatgaccacaccccagaatttcagcaaccactgtatgatgcttatgtgaatgaaagtgtcccagtgggaaccagcgttctaacagtttcagcttctgataaggataaaggagaaaatgggtacatcacctatagtatcgctagcctgaatttgttaccatttgtcattaatcagtttacaggtgttattagcacaactgaagaactggattttgaatcctccccagaaatttacagattcattgttagagcctctgactggggttcaccataccgccatgaaagtgaggtcaatgtgactattcgaataggaaatgtcaacgacaacagccctctctttgaaaaagtggcttgccagggagttatttcatatgactttccagttggtggtcacatcacagcagtctcagcgatcgatatcgatgaacttgaacttgtaaagtacaaaatcatttctggaaatgaacttggcttcttttatttaaacccagattctggtgttttacagcttaaaaaatcactgacaaattctggcattaaaaatggcaattttgccctcagaattacagcaactgatggagagaatcttgcagaccccatgtctattaacatttcagtcctacatgggaaagtgtcttcaaagagcttcagttgcagagaaactcgtgtggctcaaaagctggcagagaaactactcattaaggcaaaagcaaatgggaaactgaatctggaagatggatttcttgacttttattcaattaatagacagggaccatattttgacaagtcttttccttctgatgtggctgtaaaggaggatctgccagttggtgctaacattctgaagattaaagcctatgatgccgactctggcttcaatggaaaagtgctatttacaatatcagatggaaatacggatagttgctttaatattgatatggagactgggcagcttaaagtccttatgcccatggatcgagaacacacagacctctatctccttaatatcaccatctatgacttaggtaatccacagaaatcgtcatggagactgctgaccatcaatgtggaggatgctaatgacaatagcccagtttttattcaagacagttactcagttaacattcttgaaagttcaggcattggtactgaaatcattcaagtggaagccagagacaaagacttaggttctaatggtgaagtgacttactcagtcttgacagatacacagcagtttgccatcaatagctcaactggaatcgtttatgtagccgaccagttggaccgggaatccaaagccaattattctttgaaaatagaagccagggacaaggcagagagtggtcagcagctgttttcagttgtcactcttaaagtttttttagatgatgtcaatgactgctccccagctttcattcccagtagctatagtgtgaaggttcttgaagatctccctgttggcactgtcattgcttggcttgagacccatgatccagatcttggactggggggtcaagtgcgctattctttggtcaatgactataatgggagatttgaaatagataaagcaagtggtgccatccgcttgagcaaagagcttgattatgagaaacagcagttctataaccttactgtgcgggccaaagacaaagggcggcctgtctctctgtcatctgtttcctttgttgaggtggaagtggtggatgtcaatgaaaacctccacactccctatttcccagactttgctgttgttggatctgtaaaggaaaactcacgcattggaacaagcgtgctgcaggtgactgctcgagatgaagactccggaagggatggagagatccagtactccatcagggatggcagtggtcttggaaggttcagtatagacgacgagagtggggtcatcactgccgcagacattcttgatcgggagacaatggggtcatactggctaacagtgtatgccacagacaggggcgttgttccactctactccaccattgaggtctacattgaagttgaagatgtgaatgacaatgccccgctgacctcagaacctatatattatcctgttgtcatggaaaactctccaaaggacgtatctgtcattcagatccaggctgaagatcctgactccagttccaatgaaaaactgacatacaggattacaagtggaaatcctcagaatttttttgccatcaatatcaaaacaggtctgattacaacaacttcaaggaaattggatcgagaacagcaggcagaacattttctggaggtgactgtgacagatggtggtccctctccaaaacagtcaaccatttgggtggtggttcaggttctagatgaaaatgacaacaagccccagttcccagagaaggtctaccagatcaagctgccagaacgtgaccgaaagaagagaggagaaccgatttacagggcttttgcatttgatagagatgagggccccaacgcagaaatctcctacagtattgtggatgggaatgatgacggaaagttctttattgaccctaaaactgggatggtttcttctagaaagcagtttacagcaggcagttatgacatcctaacgataaaggcagtggacaatgggcgcccacagaaatcctccacggcccgcctccacattgaatggattaagaaaccacccccttcacctataccattgaccttcgatgagccgttttataacttcacagtcatggaaagtgatagagtgactgaaattgtaggggtggtgtctgtgcagccagctaacacccctctgtggtttgacatagttggggggaattttgacagcgcttttgatgcagagaagggtgttgggacaattgtcatcgcaaaacctttggatgcagagcagaggtccatctataatatgagtgtggaagtcaccgatgggacaaatgttgctgttactcaggtatttatcaaagtgctggataataatgataatggcccagaattctctcagccgaattacgatgtgacaatttccgaggatgtgcttccagacacggagatcctgcagattgaagccacagatagagatgagaagcacaagctgagctacactgttcatagcagcatcgactccatcagcatgagaaaattccggattgaccctagcactggcgtgctctatactgccgagaggctggaccatgaggcccaggacaagcacattctcaacataatggtcagagatcaggagtttccttatcgaagaaacttggcccgagtcattgtgaatgtggaggatgctaatgatcacagtccttattttaccaacccactgtatgaagcgtctgtgtttgaatctgctgctctgggatcagctgttctgcaagtgacggctctggacaaagacaaaggagaaaatgcagaactcatatataccatagaagcagggaacactgggaacatgtttaagatcgaaccggtcctaggcatcatcaccatttgcaaagaaccagacatgacgacgatgggtcagtttgtcctatccatcaaagtcacagatcagggatccccgccaatgtctgctactgcaattgtgcgcatttccgtcaccatgtctgacaattctcaccccaagttcattcacaaagactaccaagcagaagtaaatgaaaatgttgacattggaacatcagtcattctaatctctgccatcagtcaatctaccctcatttatgaagtcaaagatggagacattaatgggatctttaccataaatccatattctggagtcatcaccactcagaaggccctggattatgagcgcacatcctcttatcaactcatcattcaggccaccaatatggcaggaatggcttccaatgctacagtcaatattcagattgttgatgaaaatgataatgccccagtttttctcttttctcaatactcaggcagcctaagtgaggctgccccaattaatagcattgtcaggagcttggataacagcccactggtgattcgagccacagatgctgacagcaaccggaatgctctgcttgtgtatcagattgtggagtcaacagcaaaaaagtttttcacggtggactccagtacaggtgcaatcagaacaattgccaacctggaccatgaaaccattgcccatttccattttcatgtgcatgtgagagacagtggtagcccccaactgactgcagagagtcccgttgaagtcaacattgaggtgacagatgtgaatgataacccacctgtttttactcaggctgtgtttgagactatcttacttctacctacctatgttggagtggaggttctgaaagttagtgccacagatcctgactctgaggtaccccctgaactgacatacagcctaatggaaggcagtttggatcattttttaattgactcaaacagtggagtacttaccataaaaaacaacaacctctccaaggatcactacatgctgatagttaaggtgtctgatggaaagttctacagtacctccatggtcaccatcatggttaaagaagccatggacagcggcctccactttacacaaagcttctattccacctcaatctcagagaacaacactaacataaccaaagttgctattgtcaatgcagttggaaatcgccttaatgagcccttaaaatacagcatcttaaacccaggaaataagttcaagataaaatctacctcaggggtcattcagacgactggagtcccctttgaccgtgaagaacaagagttatatgagctggtggtagaagccagccgtgagctggaccatctgcgtgtggccagagtggtggtcagggttaacattgaagacataaatgacaattctccagtctttgtgggcctcccatactatgctgctgttcaagtggatgcggaacccgggactctgatttatcaggtgacagccattgacaaagataaaggtccaaatggagaagtgacctatgtcctgcaggatgactatggccactttgaaattaaccctaattcagggaatgttattttaaaggaagcattcaactctgacttgtccaacattgagtatggagtcaccatcctagccaaggatggcggaaaaccttctttgtctacatctgtggagcttcccatcactattgtcaacaaagcaatgcctgtgtttgataagcccttttatacagcatctgtcaatgaagacatcagaatgaacacacccatcctaagcatcaatgccaccagtccagaaggccaaggcatcatatatatcattatcgatggggacccttttaaacagtttaacattgactttgacactggggtcctgaaagttgttagccctttggattatgaagttacatctgcttacaagctgacaataagagccagcgacgcccttactggtgctagggctgaagtcactgttgacttgctagttaatgatgtaaatgacaacccccctattttcgatcagcctacatacaatacaacactatcagaagcatctcttattgggacacctgttttacaagttgtctctattgatgcagactcagaaaacaataaaatggtacattatcagattgtccaggatacctacaatagcacagattattttcacatagatagctcaagtggcttaatcctgacagcacgaatgctggaccatgagttagtacaacactgcactttgaaagtcagatcaatagatagtggcttcccatcactgagcagtgaggttctcgttcatatctacatctctgatgtaaatgacaaccctccagtttttaatcagctcatttatgagtcatatgtgagtgaattagccccccggggccattttgtaacctgtgtacaagcctctgatgcagacagctctgattttgaccggttggaatatagcattttatctgggaatgaccggacgagctttctgatggacagcaagagtggagttatcacattgtccaaccatcggaagcagcggatggagcctctgtacagtctcaatgtgtctgtctctgatgggttgttcaccagcactgcacaggtgcatattagggtacttggggctaacttgtacagccctgccttttcacaaagcacatacgtagctgaggtgagagagaacgtggctgcaggaacaaaggtaattcatgttcgagccacagatggtgatccagggacttatgggcagatcagctatgccatcatcaatgactttgccaaggatcgattcctcatagacagcaatgggcaggtcatcaccacagaaaggctagaccgggaaaaccctctagaaggggatgttagtatttttgtgagggcccttgatggtggagggagaacaactttctgcactgtgagagtgattgttgtggatgaaaatgacaatgctccccagttcatgacagtggaatatagagccagtgtcagggcagatgttggaaggggccacttggtcactcaagttcaagccatagatcccgatgatggagcaaattcaaggattacttattccctctatagcgaggcctctgtttcagtggccgacctcctggaaatcgatcctgacaatggctggatggtcacaaagggtaattttaaccagctgaaaaatacagtgctttcgttctttgtcaaagcagtagatgggggcatcccagtaaagcactccctcattcctgtctatatccacgtcttgccccctgaaacgttcttgccatcattcacccagtctcagtattcctttaccattgcagaagatacagccattgggagtacagtggacaccctgaggattttgcccagtcagaatgtctggttcagcacagttaatggggaacggccagaaaataacaaagggggcatattcgtcatagaacaggaaacaggcactattaagcttgacaaacgccttgaccgtgaaaccagcccagctttccactttaaagtagcagccactatacccctggacaaagtagacattgtgtttactgtggatgtagatatcaaggtattggatttgaatgacaacaagccagtctttgaaacttcaagctatgacaccattataatggaagggatgcctgttggcaccaaactcacacaagtgagagctattgatatggactggggagccaatggacaagtcacttactccctccactcggattcccagcccgaaaaggtaatggaagcattcaatattgacagcaacacgggctggatcagtaccttgaaggacctagatcacgagacagaccccacattcaccttctctgtggtggcctctgaccttggagaggcattctctctttcctccacggccttggtctctgtcagagtgacagatataaatgacaatgcaccagtcttcgcgcaggaagtgtaccgagggaatgtgaaggagagcgacccaccgggcgaggtggtagccgtcctcagcacctgggacagagacacatccgacgttaatcgccaagtgagctaccatattacaggaggaaaccctcgaggaaggtttgctctgggcctggtgcaaagtgagtggaaggtctatgtgaagaggcctctagacagagaagaacaggacatttactttctcaatatcactgccactgatgggctttttgtcacacaggccatggtggaagtgagcgtcagtgatgtgaatgacaatagcccagtgtgtgatcaggttgcatatacagcattacttcctgaagacattccatcaaataaaatcatcctgaaagtcagtgcaaaggatgctgatattggatccaatggatatatacgatactcactctatggatctggaaacagtgaattttttctagatccagaaagtggcgagttaaaaaccttggctctgttggaccgggagaggatccccgtgtacagcctgatggccaaggccactgacgggggtggcaggttctgccagtccaacatccacctaatcctggaggatgtgaatgataacccccctgtgttttcttctgaccactacaacacctgtgtctatgagaacacagccaccaaggctctgttgaccagagttcaagccgtggaccccgacattggcatcaataggaaggtcgtgtactccctggcagactcagctggtggggtcttctccattgacagctcatctggcatcatcatcctggagcagccactggaccgtgagcagcagtcttcgtacaacatcagcgtgcgggccactgaccagagtcctggacagtccctgtcctctctcactactgtcaccatcaccgttctggacattaatgacaacccccctgtgtttgagaggagggactacctggtgacggtgcctgaggacacctcccctggcacccaagtccttgctgtttttgccaccagcaaagatattggcacaaatgctgagatcacttatctcatccggtctgggaacgaacaagggaaatttaagatcaaccccaagacagggggtatttctgtctctgaagtcctggactatgaattatgcaaaaggttttacctggtagtggaagccaaagatgggggcaccccagctctcagcgctgtggccactgtcaacatcaacctcacagatgttaatgacaaccctcccaagttcagccaagacgtctacagtgcggttatcagtgaagacgccttggtgggagactctgtcattttgctaatagcagaagatgtagacagccagcccaacggacagattcatttttccattgtgaatggagatcgggacaatgaatttactgtagatcctgtcttgggacttgtgaaagttaagaagaaattggaccgggaacgggtgtctggatactctctgcttgtccaggccgtagacagtggcattcctgcaatgtcatcaactgcaactgtcaacattgatatttctgatgtgaatgacaacagcccggtgtttacacctgccaactatactgctgtgattcaggaaaataagccagtgggcaccagcatcttgcagctggtggtgacagacagagactcctttcacaatgggcctcccttttcattctctattttgtcgggaaatgaagaggaggagtttgtgttggaccctcatgggatcttgcggtcggctgtggtcttccagcacacagagtctctggaatacgtgttgtgtgtccaggcaaaggattcaggcaaaccccagcaagtttctcacacttacatccgcgtgcgagtcattgaggaaagcacccacaagcccacagccattcccctggaaattttcattgtcaccatggaggatgactttcctggtggggtcattgggaagattcatgccacagatcaagacatgtatgatgtgctcacatttgccctgaaatcggagcagaaaagcttatttaaagtgaacagtcacgatgggaaaatcatcgccctgggaggcctggacagcggcaagtatgtcctgaatgtgtctgtgagtgatggtcgcttccaggtacccattgatgtggtcgtgcatgtggagcagttggtgcatgagatgctgcagaacactgtcaccatccgctttgaaaatgtgtcccctgaggacttcgtggggctgcacatgcatgggttccggcgcaccctgcggaatgcagtcctcacccagaagcaggacagcctgcgcatcatcagcatccagcccgtggcaggcaccaaccaactggacatgctgtttgcggtggagatgcacagcagcgagttctacaagccagcctacctgatccagaagctgtccaatgctagaagacacctggagaatatcatgcgcatctcagccatcttggagaagaactgctcagggctggactgtcaggaacagcattgtgagcaaggcttgtcactcgattcccacgcgctcatgacctacagcacggctcgcatcagctttgtgtgtccgcgtttctacaggaacgtgcgttgcacctgcaatggaggactgtgtccggggtccaacgatccttgtgtggagaagccgtgtccaggggacatgcagtgtgtcagttatgaagccagcaggagaccgttcctctgccagtgtccaccagggaagctcggagagtgctcagggcacacttctctcagctttgctggaaacagttacatcaaatatcggctttctgaaaatagcaaagaagaggatttcaaactagctctgcgtcttcgaacactgcaaagcaatgggattataatgtacaccagagcaaatccctgcataattctgaagattgtggatggcaagctgtggttccagctggactgcggcagcggccctggaatcttgggcatctcgggccgtgctgtcaacgacgggagctggcactcggtcttcctggagctcaaccgcaatttcacgagcctgtccctggatgacagctacgtggagcggcgccgggcgcccctctacttccagacgctgagcactgagagtagcatctacttcggcgccctggtgcaagcggataacatccgcagcctgactgacacgcgggtcacgcaggtgctcagcggcttccagggctgcctggactcggtgatactgaataacaatgagctgccgctgcagaacaagcgcagcagcttcgcggaggtggtgggcctgacggagctgaagctgggctgcgtgctctatcccgacgcctgcaagcgcagcccgtgccagcacgggggcagctgcactggcctgccatcggggggctatcagtgtacctgtctctcacagtttacggggagaaactgtgaatctgagattacagcctgcttcccaaacccctgccggaatggaggatcctgcgatccaataggaaacactttcatctgcaattgtaaagctgggctcactggagtcacgtgtgaggaggacatcaatgagtgcgaacgagaggagtgtgagaacggaggctcctgcgtgaacgtgttcggctccttcctctgcaactgcacgccgggctacgtgggccagtactgcgggctgcgccccgtggtggtacccaatatccaggctggccactcctacgtggggaaggaggagctcatcggcatcgccgtggtcctcttcgtcatcttcatcctggtggttctcttcatagtcttccgcaagaaggtcttccgcaagaactactcccgcaacaacatcacgctagtgcaggacccggccaccgccgccctgcttaacaagagcaatggcatcccgttccggaacctgcgcggcagtggggacggccgcaacgtctaccaggaggtggggcccccgcaggtccccgtgcgccccatggcctacacaccctgcttccagagtgactccaggagcaacctggataagatcgtggacgggctgggaggcgagcaccaggaaatgaccacgtttcaccctgagtcgccccgcatcctgacagcccggcggggcgtggtcgtgtgcagtgtggcccccaacctccccgccgtgtcaccctgccgctccgactgcgactccatccggaagaatggctgggacgcgggaactgagaacaaaggggttgatgacccgggagaagtgacctgctttgcaggtagtaataaaggcagcaactctgaagttcagtccctcagctccttccagtcagattctggtgacgacaatgcctatcactgggacacctctgattggatgccaggggcccgcctgtcggacatagaggaagtgcccaactatgagaaccaggatggagggtctgcacaccaggggagcacacgggagctggagagcgattactacctgggtggttatgacattgacagtgaatacccaccccctcatgaagaggagttcttgagtcaggaccagctgcctcctcctctcccggaggacttcccagaccaatatgaggccctgccaccctcccagcctgtctccctggccagcacactgagcccagactgcaggagaaggccccagtttcatcctagccagtatctccctcctcacccattccccaacgaaacggatttggtgggcccgcctgccagctgtgaatttagtacttttgctgtgagcatgaaccagggcacagagcccacaggcccagcagacagcgtgtctctgtccttgcacaattccagaggcacctcatcctcggatgtgtctgccaactgcggctttgacgattccgaagtagccatgagtgactacgagagcgtgggagagctcagcctcgccagccttcacattccctttgtggagactcagcatcagactcaagtgtagacatcacatcttgggtacttcaccctgtttgttacagaaaagtggaagcagattggctgggcttctgtcccagtggagcattgtctgtggaatgagaagggaatactgtatttttccactagaaacttcttcacaagtcatactgtcccaacaagcaagcttgattccagttgggtgaaaatgaaaggctcagaaattgtttttgagaggtgactggtaatccttgatgtaggtacctatgttcacagctaaaaatgcaaagagggaaaaattatttcacccactaagttatacagccagtcttgtatggctttgtgcagtattgtgccctggaaagtgttacagcatcagtccttgcagtattaaaaactggcaacaatcaaagaggcattgttgcatgtaattttgagccaatgaaatgaaaatagtagtaatgattgttggaaaagttagtctcttaggcgaaagagaagagaaacaaatattattaaacaaaccagaaaatgggctgaagccttttaaatcaactctatttttttgataagctgcccaattttcagctataaaattaggcttgaataacatgtttagtatgctcagttatttctgtttgtttgtgttaagcatccaatctaatatagttgggttttatgatcttcaagaaaggtatcaatgaagagcaacatgaggctttttgggttccatttggtgggtgggggaggaagttaaagttgtttgaacattagaaagaatgtgattatctggttggttttgtgttttctggtaaatattccagttggtaaatctaacattgctacagaagttggctttgttcatatagcttctctacaattagatatttttagaagtttaagcaaaactcacaaattcaggggggaaaaaagaaaaaacgataccttcaaagtttgcggcctagataatcacaattcttcataatgcagaggaaaggtgtctgttattctaaatcggtagcatcaccattataaatacaattatgttaagaaaagaggaaagtagactagttattgtgtataaattataatagtgtgtgtgtgtctgggcctatgtacaaatatgtgcttgcactcagtaaggctgctcttgaggaaagctaatgtgaaggttttgggaaatggaccatgttgaaaattctgccggcgagcatggcatacctttcaatttctctgatctctatggtgttagagaaacatcaaatgccatattttactctggttcagttaactttattttggtactgccaataaagcaaaattgtgcttttttttttttttctcaagacagagtcttgctctgtcacccaggctagagtgcaatggcatgatctcagctcactgcaatctccacctcctgggttcaagcgattctcctgcctcagcctcccaggttgctggggttacaggtgtgtgccaccacgcctggctaattttttgtatttttagtagagatggggtttcaccatgttggccaggctggtctcaaactcctgacctcgtaatccacctgccgtggcctcccaaagtgctgggattacaggcatgagccaccgtgcccagcccaaaactgtgctttttaaaaacagtattttgttataattttccagaacttacctctgttttaaaagtgtgtaatgtttgattacaccctgggattcccttctcatctgtgggctttggccatgatttccaaaattaacaggagaatcattccactggaaatataacaatccagtcctcaaaactgaaagttgacaggttgagggactttccttttttgcttcaatcagattacggccgcctgtgcagtggccatggtaaatatatgcatatttgcactatctgcttaatgagcaaatctgtgtccacagtttctgatgacatatggcattggtgtgtaaattgtactgtccctagtctgtgcattattcactcagacatatttttagttatttcaattgcgtttaatccacttcttttttatgagtcagtgtttctgaatgtttatgcaaaaaaaaaaatcctttttcattcccaaactttctaagtaagtggatacactacacttcacaagttttccagcctttctcttcctgtctcttggtcagacctactcatggaggtattatccacactgtgatcttgaaataaatgaatttcactaaggctgctttcgagaacaaagtctttggtatttttcttatgtaagaagcacatttgcaagaatcatggaaaaaaatgacaaactaatggcctagaatagagtgactgctacactttaagtaatgcaatgacataaaaaccatcaaagtaaaaccaacatgtcatttcctgcccccaggaaatattagaatgagattaatgctgatgagtccctactgcttacacagcatctctttgagggagaatgcctgactgacacagtaatgaaagaataaatagatcctaatgcagtcatgaagccactgaagaaaattgtgcccaccctttgctgtgacctatataaaatatctctttctttgggatatcatcccctgattttctgcagaatagctctgcagctaaatatataccaggcaagcatgtattgtgttttgatttattatctttaaacacatgatatctcttcactttttggaaagttagatttctctgtagattatgaaatgctttgcagtcaggccaagatgctactaggtggggatgatcactaattcaaaaaagctggaagaatcctatttgctagtccaaactccttattttatcaaagaggaaacatacccagagtgggaaagagacttgcccaagcccacagaggaagttaattcgcttaacaaggagtagaacccatccatctagccaatattctttttacatcatattgttcacccctacactgccttgagcatgggagtcacctggttctgatggaccctctgacttccaccattccttctttggaatatgctataaaagaaaattcatggagaatatttttctgaaagcctcatgatcttatgtttccttgcagtccccctagggagaggggttatagaattcatacatttctgtagacattcatcgaaatgctgcttttgccaaatgaatgtttgtataatagggatgaaatgataattacagagttcagctcagaccagtcatcagttgtagtgaaactttgattatactgttacctactggttgcatttttggttttggttttgcatttttttcttcccacaaacactggctactctttgtcctaccccctccaccatgatgaaccatgtggaaactatttaaatcaattaatgtctttctcatttttcgaacatgtatgtgccacctcctggaagccatttcccataatctgttgtaggcactttactagtattgcacacattctggttaggttgagaatagctagactcttggtgctcgtcatatagtaagcaagaacttgggagtaataaaaggtgaataaaatgcatgcttcatttattccctttcctctatgaatattttgctgctgcattctagtctatgccagctttccatgtacccttggcctgcctattcatgaaatgccatataaaagacttaggaacatgagtaggtggtccatgctttgaggttcatccaattagggaataaatgtgaaaggctggaaagggaactagtttctgggatttgcctggaacttcccttggacattactagcacattctggaaaaaaagcaagttgaacatatctaccatcagtcctctcctacttacttcccaccccaccctatccactacccccactgatgctatgtttgcatcatcaaagtcaggggaattgagaaaagagattatcaaaataaattattaaaatccagaaaacagttttatgtgaagtaattcaggaagatctagtgttcattttgcatggattgtccagataattggctcttcactccgctgccttcccagtgcacaggtattgctaaagtggttaggctttaatgttttatgtttttagtttcaaactatgggaaatggagatttgaagaggcatttattccttgtcatcattttgtgtgctctgtgagaaggtggttatatgtttttgctggtttgtgtcccacagtgttcaactgcacattattctgatgaaaatccacaatgtctttgagcttctggttgtgtaatgctggggtttaaagtcaccatttgtgggtttggcatcaattaatatttagccagctggctaagagataggaaaagaatatgatatttctttccttatgtaataatgaaaagcaataattacaagtaggtaataatacacaaaggccataattagtctcttctagtgtttagaatgcacttgagaatcgtagagtcatttggagcgtgtttggaccaattagtatgtactgtagtacccttctggcaaacaaataactgaattgctactatttaacaatcttatgagcccacactactgcattttgggagtggcaaatgtgtttggaaatggaagcagttctttttaagcactgtatcagagagattgtcttgtacgtttgcctgttgcaaacaggctggtttgtaaaagatgtatgttttggtgtttgaaatgtttataaaattgtatataaatggtttcaattttccaggcttttgtagatactatatttgatgcctatcaggatgctttaatttggggggtcgaatataattgtaagtcatccacgctgttggtctgcaaacttttgaggtaactacacacacacacacacacacaaggattttagatttgaaaatgatgttttttactcatttcaaaatgtactgtaacctttctttggttcttactgttttcatttaactttctctgttttcaagaaaaattgtctttattgacatttgtaaaaaagaatgtgttttgcccagttattaagtattttatttttatgcaatttcagaatcacaatgaggtatgccatttcttcatatacatgcacattcacctcaacttgcacacacatcacacaccaaaccttatgcaaaggggaaagctaacacttagagtggattttgtcccttaaggaaatggattgttcctgcatatattgctggtggcagtattcagtcttgtgttctttttctaaaaaaaaagaaaagaaaagaaaaaaaaaacaaaagcaaacaaaaaaaaagacagccaaaaaaaagaaacaacaacaacaaaaaaaaacacaacagtgtacaggtttgtaactgccaaaatttgatggttaaaacaagttttcaagtaaaaagaaaaaaatgaaa

SEQ ID NO: 668 - DNA, 3363 bp, Homo sapiens
ggacgggcggaggggacgggaggcccagcggctccgggctccgctggctcgggcgtcggatcggagccgccggggcgcgggcggcccagagctggcctgaacctccaggacttcagcccttctaggagaatctgatcccaggtgagggaggtcacttggggtgtggcccagcaggcaggcgggactccagactgggaacggaagtcagccctgctggggctgggagctgaagcatctgttccttcctcgcgggtgtgagacaaggaagagtgatcattgccacaccaggagctgaagccatggcctcaaagcctgagaagagggtggcatcgtctgtctttatcaccctggcacccccgcgccgcgatgtggccgtggcggaggaagtgaggcaggcagtttgtgaggcccggcgtggccgcccctgggaggctcctgcccccatgaagacacccgaggctggcttggcggggaggcccagcccctggacaacccctggcagagctgcagccacagtgccggctgcacctatgcagctcttcaatggaggatgcccaccccctcctcctgtcctggatggtgaggacgtgcttcctgacctggacctcctcccaccccctccaccgccccctccagtgcttctgccttctgaagaggaggctcctgctccaatgggggcctcactcattgcagacttagagcagctgcacctgtccccgcccccgcccccaccacaggccccagcggagggaccttcagtccagcccggtcccctcaggcccatggaggaagagctgccacctcccccggcagaacctgttgagaaaggggcatccacagacatctgtgccttctgccacaagaccgtgtccccccgagagctggctgtggaggccatgaagaggcagtaccatgcccagtgcttcacgtgccgcacctgccgccgccagctggctgggcagagcttctaccagaaggatgggcgacccctctgcgaaccctgctaccaggacacactggagaggtgcggcaagtgtggcgaggtggtccgggaccacatcatcagggccctgggccaggccttccacccctcctgcttcacgtgtgtgacctgcgcccggtgcattggggatgagagctttgccctgggcagccagaacgaggtgtactgcctggacgacttctacaggaaattcgcccccgtctgcagcatctgtgaaaatcccatcatccctcgggatgggaaagatgccttcaaaatcgaatgcatgggaagaaacttccatgaaaattgctacaggtgtgaggactgcaggatcctcctgtctgtcgagcccacggaccaaggctgctaccccctgaacaaccatctcttctgcaagccatgccatgtgaagcggagtgctgcggggtgctgctgagagtgcccgctgggcagtgaacagaccactagccccggctggggcccttccctgacttggtttcccttcctaacctgctcttgcacactttccttctgagcctccatggagaccagcctgcaagccggcccagcctgtccaggatacagtggggctgagcacccccaggccttccactcctctaccctctgggcaccagaaggctcctggaccatgagcttcacccccagaattccctgctgaccctgccccacttccagggaaaagctgggggaggttggacccctctcactgactagctgtctggtaggggtgctaggaccagcctcgcctgtggggttgagctgtttgaggacaaactccaaggtcccttaaaaagtgccttttagaggctgggcatggtggctcacgcttgtaatcccagcactttgggaggccaaggtgggtggatcacctgaggtcaggagttcaagaccagcctggccaacatggtgaaaccctgtctctactaaaaatacaaaaattagccaggcatggtagcaggtgcctgtaatcccagctactggggaaagctgaggcaggagaattgcttcaatctggaaggcagaggttgcagtgagattgcaccattgcattccagcctgggcaacaagagggaaactccgtctcaaaaaaaaaaaagtgccttttaggccggatgtggtggctcatgcctgtaatcccagcactttgggaggccaaggcaggcagatcacttgaggtcaggagtttgagaccagcctggccaacacggcaaaaccccgtttctactaaaaatacaaaaattagctgggtgtggtggcgtgcgcctgtaatcccagctactcaggaggctgaggcaggagcattgcttgaacccgggaggcagaggttgcagtgagctgagatggcaccactgcactccagcctgggagacacagcgagactctgtctccaaaaaaaaaagtgctttttgaaaatgttgaggttgaaatgatgggaaccaacattctttggatttagtggggagcataatagcaaacacccccttggttcgcacatgtacaggaatgggacccagttggggcacagccatggacttccccgccctggaatgtgtggtgcaaagtggggccagggcccagacccaagaggagagggtggtccgcagacaccccgggatgtcagcatcccccgacctgccttctggcggcacctcccgggtgctgtgttgagtcagcaggcatggggtgagagcctggtatatgctgggaacagggtgcaggggccaagcgttcctccttcagccttgacttgggccatgcaccccctctcccccaaacacaaacaagcacttctccagtatggtgccaggacaggtgtcccttcagtcctctggttatgacctcaagtcctacttgggccctgcagcccagcctgtgttgtaacctctgcgtcctcaagaccacacctggaagattcttcttccctttgaaggagaatcatcattgttgctttatcacttctaagacattttgtacggcacggacaagttaaacagaatgtgcttccctccctggggtctcacacgctcccacgagaatgccacaggggccgtgcactgggcaggcttctctgtagaaccccaggggcttcggcccagaccacagcgtcttgccctgagcctagagcagggagtcccgaacttctgcattcacagaccacctccacaattgttataaccaaaggcctcctgttctgttatttcacttaaatcaacatgctattttgttttcactcacttctgactttagcctcgtgctgagccgtgtatccatgcagtcatgttcacgtgctagttacgtttttcttcttacacatgaaaataaatgcataagtgttagaagctcaaaaaaaaaaaaaa

SEQ ID NO: 669 - DNA, 2793 bp, Homo sapiens
ccacaccaggagctgaagccatggcctcaaagcctgagaagagggtggcatcgtctgtctttatcaccctggcacccccgcgccgcgatgtggccgtggcggaggaagtgaggcaggcagtttgtgaggcccggcgtggccgcccctgggaggctcctgcccccatgaagacacccgaggctggcttggcggggaggcccagcccctggacaacccctggcagagctgcagccacagtgccggctgcacctatgcagctcttcaatggagacatctgtgccttctgccacaagaccgtgtccccccgagagctggctgtggaggccatgaagaggcagtaccatgcccagtgcttcacgtgccgcacctgccgccgccagctggctgggcagagcttctaccagaaggatgggcgacccctctgcgaaccctgctaccaggacacactggagaggtgcggcaagtgtggcgaggtggtccgggaccacatcatcagggccctgggccaggccttccacccctcctgcttcacgtgtgtgacctgcgcccggtgcattggggatgagagctttgccctgggcagccagaacgaggtgtactgcctggacgacttctacaggaaattcgcccccgtctgcagcatctgtgaaaatcccatcatccctcgggatgggaaagatgccttcaaaatcgaatgcatgggaagaaacttccatgaaaattgctacaggtgtgaggactgcaggatcctcctgtctgtcgagcccacggaccaaggctgctaccccctgaacaaccatctcttctgcaagccatgccatgtgaagcggagtgctgcggggtgctgctgagagtgcccgctgggcagtgaacagaccactagccccggctggggcccttccctgacttggtttcccttcctaacctgctcttgcacactttccttctgagcctccatggagaccagcctgcaagccggcccagcctgtccaggatacagtggggctgagcacccccaggccttccactcctctaccctctgggcaccagaaggctcctggaccatgagcttcacccccagaattccctgctgaccctgccccacttccagggaaaagctgggggaggttggacccctctcactgactagctgtctggtaggggtgctaggaccagcctcgcctgtggggttgagctgtttgaggacaaactccaaggtcccttaaaaagtgccttttagaggctgggcatggtggctcacgcttgtaatcccagcactttgggaggccaaggtgggtggatcacctgaggtcaggagttcaagaccagcctggccaacatggtgaaaccctgtctctactaaaaatacaaaaattagccaggcatggtagcaggtgcctgtaatcccagctactggggaaagctgaggcaggagaattgcttcaatctggaaggcagaggttgcagtgagattgcaccattgcattccagcctgggcaacaagagggaaactccgtctcaaaaaaaaaaaagtgccttttaggccggatgtggtggctcatgcctgtaatcccagcactttgggaggccaaggcaggcagatcacttgaggtcaggagtttgagaccagcctggccaacacggcaaaaccccgtttctactaaaaatacaaaaattagctgggtgtggtggcgtgcgcctgtaatcccagctactcaggaggctgaggcaggagcattgcttgaacccgggaggcagaggttgcagtgagctgagatggcaccactgcactccagcctgggagacacagcgagactctgtctccaaaaaaaaaagtgctttttgaaaatgttgaggttgaaatgatgggaaccaacattctttggatttagtggggagcataatagcaaacacccccttggttcgcacatgtacaggaatgggacccagttggggcacagccatggacttccccgccctggaatgtgtggtgcaaagtggggccagggcccagacccaagaggagagggtggtccgcagacaccccgggatgtcagcatcccccgacctgccttctggcggcacctcccgggtgctgtgttgagtcagcaggcatggggtgagagcctggtatatgctgggaacagggtgcaggggccaagcgttcctccttcagccttgacttgggccatgcaccccctctcccccaaacacaaacaagcacttctccagtatggtgccaggacaggtgtcccttcagtcctctggttatgacctcaagtcctacttgggccctgcagcccagcctgtgttgtaacctctgcgtcctcaagaccacacctggaagattcttcttccctttgaaggagaatcatcattgttgctttatcacttctaagacattttgtacggcacggacaagttaaacagaatgtgcttccctccctggggtctcacacgctcccacgagaatgccacaggggccgtgcactgggcaggcttctctgtagaaccccaggggcttcggcccagaccacagcgtcttgccctgagcctagagcagggagtcccgaacttctgcattcacagaccacctccacaattgttataaccaaaggcctcctgttctgttatttcacttaaatcaacatgctattttgttttcactcacttctgactttagcctcgtgctgagccgtgtatccatgcagtcatgttcacgtgctagttacgtttttcttcttacacatgaaaataaatgcataagtgttagaagctcaaaaaaaaaaaaaa

SEQ ID NO: 670 - DNA, 5287 bp, Homo sapiens
aaaagttaggcagtccttataggtatggaagccgagctaatttccttctgagccccccaaatgcctcctccacatggcgggtccgcaaatggggggatctgcagaggatcaccccccacgaaaaagacatgcagcagaaaagcaaaaaaagaaaacagttatatatacaaaatgctttgaatttgagtcggccacacagcgcccgattgaccgccagcgatacgacgagaacgaggacttgtcggacgtggaggagatcgtcagcgtccgcggcttcagcctggaggagaagcttcgcagccagctgtaccagggggacttcgtgcacgccatggagggcaaagatttcaactatgagtacgtacagagagaagctctcagggttcccctgatatttcgagaaaaggatggactgggaattaagatgcctgaccctgatttcacagtccgagacgtcaaactcctagtggggagccggcggcttgtggacgtgatggatgtgaacacccagaagggcacggagatgagcatgtcccagtttgtgcgttactacgagacgcccgaggcccagcgggacaagctgtacaacgtcatcagcctagagttcagccacaccaagctggagcacttggtcaagcgtccgactgtggtagacctggtggactgggtggacaacatgtggccccagcatctgaaggagaagcagacagaagccacgaacgccattgcagagatgaagtacccgaaagtgaaaaagtactgtctgatgagcgtgaaaggttgtttcaccgacttccacatcgactttggaggcacttccgtttggtaccatgttttccggggtgggaagattttttggctgattcctccaacgctgcacaatttggcgctgtacgaggagtgggtgctgtcaggcaaacagagtgacatctttctgggagaccgtgtggaacgatgccaaagaattgagctgaagcagggctacacatttttcatcccttccggttggatccatgccgtctacacccctgtagactctttggtgttcggcggaaacatcctgcacagctttaacgtgcccatgcagctgcggatctacgagatcgaggacaggacgcgggtgcagcccaaattccgttaccccttctactatgagatgtgctggtatgtcctggagagatacgtgtactgtgtgacccagcgctcccacctcactcaggaataccagagggagtcgatgcttattgatgccccgaggaagcccagcatagacggcttctcttcggattcctggctggagatggaggaggaggcctgtgatcagcagcctcaggaggaggaggagaaggacgaggagggcgagggcagggacagggcacccaaaccgcccaccgatggctccacttcacccaccagcacgccctctgaggaccaggaggccctcgggaagaagcccaaagcacctgccctgcgattcctcaaaaggactttgtctaatgagtcggaggaaagtgtgaagtccaccacattggccgtagactaccccaagacccccaccggctctcccgccacggaggtctctgccaaatggacccatctcactgagtttgaactgaagggcctgaaagctctggtggagaaactggaatccctcccggagaacaagaagtgtgtccccgagggcatcgaggacccccaggcactcctggagggtgtgaagaacgtcctgaaggagcacgcagatgatgaccctagtctggccatcactggggtccctgtggtgacttggccaaagaagactccaaagaaccgggctgtgggtcggcccaaggggaagctgggcccggcctccgcggtgaagttggccgccaaccggacaacggcaggagctcggcggcgccggacgcgatgccgcaagtgcgaggcctgcctgcggaccgagtgcggagagtgccacttctgcaaggacatgaagaagttcgggggccccgggcgcatgaagcagagctgcatcatgcggcagtgcatcgcgccagtgctgccccacaccgccgtgtgccttgtgtgtggcgaggcggggaaggaagacacggtggaagaggaggaaggcaagtttaacctcatgctcatggagtgctccatctgcaatgaaatcatccaccctggatgccttaagattaaggagtcagagggtgtggtcaacgacgagcttccaaactgctgggagtgtccgaagtgtaaccacgccggcaagaccgggaaacaaaagcgtggccctggctttaagtacgcctccaacctgcccggctccctgctcaaggagcagaagatgaaccgggacaacaaggaagggcaggaacctgccaagcggaggagtgagtgtgaggaggcgccccggcgcaggtcggatgagcactcgaagaaggtgccgccggacggccttctgcgcagaaagtctgacgacgtgcacctgaggaagaagcggaaatacgagaagccccaggagctgagtggacgcaagcgggcctcatcgcttcaaacgtcccccggttcctcctctcacctctcgccgaggccccctctaggcagcagcctcagcccctggtggagatccagtctcacttacttccagcagcagctcaaacctggcaaagaagataagcttttcaggaaaaagcggcggtcctggaagaacgccgaggaccgcatggcgctggccaacaagcccctccggcgcttcaagcaggaacccgaggacgaactgcccgaggcgccccccaagaccagggagagcgaccactcccgctccagctcccccaccgcgggacccagcaccgaaggggccgagggcccggaggagaagaagaaggtgaagatgcgccggaagcggcggcttcccaacaaggagctgagcagggagctgagcaaggagctcaaccacgagatccagaggacggagaacagcctggccaacgagaaccagcagcccatcaagtcggagcctgagagcgagggcgaggagcccaagcggcccccgggcatctgcgagcgtccccaccgcttcagcaaggggctcaacggcaccccccgggagctgcggcaccagctggggcccagcctgcgcagcccgccccgtgtcatctcccggcccccaccctccgtgtccccgcccaagtgtatccagatggagcgccatgtgatccggccaccccccatcagccccccgcctgactcgctacccctggacgatggggcagcccacgtcatgcacagggaggtgtggatggccgtcttcagctacctcagccaccaagacctgtgtgtgtgcatgcgggtctgcaggacctggaaccgctggtgctgcgataagcggttgtggacccgcattgacctgaaccactgcaagtctatcacacccctgatgctgagtggcatcatccggcgacagcccgtctccctcgacctcagctggaccaatatctccaagaagcagctgagctggctcatcaaccggctgcctgggctccgggacttggtgctgtcaggctgctcatggatcgcggtctcggccctttgcagctccagttgtccgctgctccggaccctggatgtccagtgggtggagggactaaaggatgcccagatgcgggatctcctgtccccgcccacagacaacaggccaggtcagatggacaatcggagcaagctccggaacatcgtggagctgcgcctggcaggcctggacatcacagatgcctccctgcggctcatcatccgccacatgcccctgctctccaagctccacctcagttactgtaaccacgtcaccgaccagtctatcaacctgctcactgctgttggcaccaccacccgagactccttaaccgagatcaacctgtctgactgcaataaggtcactgatcagtgcctgtccttcttcaaacgctgtggaaacatctgtcatattgacctgaggtactgcaagcaagtcaccaaggaaggctgtgagcagttcatagccgagatgtctgtgagtgtccagtttgggcaagtagaagaaaaactcctgcaaaaactgagttagtccaaggataagtatgtaaatacggggcgggctctgggaggggagagactttacaaaaatgagggcttttattttccatttggaacgtgggacaacagaccacaacgcaattccattttgcaagtctttccaagggagaagctgttcaaccacccgtttgggggatgagtgagccgacactttcctttggtctttctgaatcgtaactgcactgctttctggaccatttctaaggcggcctttacaagaagacattcctgtcggagaggagggtggacttcggagaaattctcatactgaagcatgagcttaggagtttctgttagtggtagtggtgttttggacacttcattccttgcaacaccgaggttttgggtgttgacataaagtggaccacacaccacatctgctgccgtcttgacacttttttttgtttggttggttttgttacatcttacattatgcagaactatttttgtacaaattgtttaaaagttatttatgcaaggtttgaatgcataccagtgtttttattgttttgagattgccaattttcctgatttccttaaggtaggagagaatttaacgtgtacttcatcgacacaacccatctacaaatgtgcccagatctaacaaagtaggctaagaccttccacttaaaagcatgtttaactggaagttgagagtctgctttgtacctcaagagttacatgagcatgttgtggataaatgtaaattatagtcaaagtaagatactctgccaagtttcctctgtagagaattcacttttctcaaattttaaaatttcgacttcagcctttgcactcaggaggttctgctccagcatgagctcttgtacttacatagatctaatttatacagtgagtcaagacgtagaataaatgctcccacatagcctttcttttgcttttgcttctctcctctgaagtgtgagttgagttctcatttaggtttgtaacatggctatttcctagttgtaaagttctgcatttataagtgccattgttgtaaggtggtgtttcctagaccttccctgatgcgattttacctttgttgaatttgtataaacaattgtacaaaaaaaaccactcttgaactttgagggtttctgttctaggagtggactagaagtttaagcccagagtcagtaaacactgttttgaagtccaaaaaaaaaaaaaa

SEQ ID NO: 671 - DNA, 3116 bp, Homo sapiens
agaatgcgagaaagtgaagtcaaattcggacttgtaggcgatcagggctgaagacgctgattagagagaaaacagagggtgatggtggctgcacgtggggaatgggtgacatctcccagggggaatgagcacaaggcccagatcggaaaccccaaactcagattttaaggtttggacaagaagtacctgaggagtggaggagtgagaaagaagtgccagagagcctgaggaggaaaatcagcagactggcattatgaagaatgttgtcagaagtagggagtaggcactagtcacctaagataaggagctggattctgcccaaggcactgttatgtggtatacttgttacatgtcctgaggatccgctgaggtatttagagggaatgatcatggttataatcaaaagtggtcttcagaatcttctttgatgactccggaattgatgataaaagcctgtagcttttatactggacatttagtaaagactcatttttgcacttggagagacatagctcgtacaaatgaaaatgtcgtcctggctgaaaaaatgaacagagcagtgacatgctacaatttcagacttcaaaaatctgtatttcatcactggcactcttatatggaagaccagaaagaaaaacttaaaaatattctattgcggatacaacagatcatctattgtcacaagctaaccattatcctaacaaaatggcggaatacagcaagacataagagtaaaaagaaagaagatgagctgatattaaaacatgaacttcaattgaaaaaatggaaaaataggttaatactcaaaagagctgctgcagaagaatccaattttcctgaacgaagttcttctgaagtctttcttgtagatgagactctaaaatgtgacatttcactgttacctgaaagagcaatattacagattttcttctacctcagtttaaaagatgtgataatatgtggtcaagttaatcatgcctggatgttgatgacacaactaaactcactgtggaatgctattgatttttcctcagtgaaaaatgtgattccagataaatatatagtgtctactttgcaaaggtggcgtttaaatgtgctgcgtttgaattttcgtggttgtcttctccgacccaaaactttcagatctgtcagccactgtaggaacttgcaagagttgaatgtctctgactgcccaacattcacagatgaatcaatgagacacatttctgagggctgcccgggggtcctgtgtctcaatctgtctaacacaactatcaccaacaggacgatgcgactcctgccgaggcacttccacaacttacagaatcttagtttggcttattgcagacggttcacagacaaaggcttacagtacctgaacttggggaatggatgccacaagctcatctatctggacctctctggctgcacccagatttcagtccaaggcttcaggtacattgcaaacagctgcactggaattatgcatcttaccattaatgacatgccaactctgacggacaactgtgtaaaagctttagttgaaaaatgctctcgtattacatcgctggttttcactggtgcaccgcatatctccgattgtactttcagagctctttctgcttgtaaactcagaaagatccgatttgaaggaaataaaagggttactgatgcatccttcaaatttatagacaagaattatccaaatctcagtcacatttatatggctgactgcaagggaataacagacagcagcctcagatccctttcacctttgaagcaactgactgtgttgaatttggcaaattgtgtaagaattggtgatatgggactaaagcaatttcttgatggtcctgcaagcatgaggataagagagctaaatttaagcaactgtgtgcggctaagtgatgcctctgttatgaaactatctgagcgctgccctaatttaaactacttgagtttacgaaattgtgaacatttgactgcccaaggaattggatatattgtaaacatcttttccttggtatcaatagatctctctggaacagacatctctaatgagggtttgaatgtgctttccagacataaaaaattgaaggaactttctgtatctgaatgttatagaatcactgatgatggaattcaggcattctgcaaaagctcactgatcttggaacatttggatgtctcttattgctcccagctgtcagatatgattatcaaagcactggccatttactgcattaacctcacatctctcagcattgctggctgtccaaagattactgactcagcaatggagatgttatcggcaaaatgccattacctgcacattttggatatctctggttgtgtcttgcttactgaccaaatccttgaggaccttcagataggctgcaaacaactccggatccttaagatgcaatactgcacaaatatttccaagaaggcagctcaaagaatgtcatctaaagttcagcagcaggaatacaacactaatgaccctccacgttggtttggctatgatagggaaggaaaccctgttacagagcttgacaacataacatcatctaaaggagccttagaattaacagtgaaaaagtcaacatacagcagtgaagaccaagcagcgtgaccttcagcctcaagcaggaagaacaaaaaatcaagaacttggcaagttttctccatttgttgcaagtatgtttactagctgaatctcaataacaatgtaaacaagcaacaaaccatcttctgattcttattccaactacaaatatttccaaacacatcagtagttcttctgtctaaataatcatgatttaaaaaagaagccaggccaggagcggtggctcacacctgtaatcctagcactttggtaggccaaggcgggtggaccataagtcaggagttcaagaccagcctggccaacatggtgaaaccccatctttactaaaaatacaaaaattagccgggtgtggtggtgggcgcctgtaatcccagctactcaggaggctgaggcaggggacttgcttgaacctgagaggcggaggttgcagtgagcctagatcacgtcactgcattccagcctcggcgacagagcaagactccgtctc

SEQ ID NO: 672 - DNA, 3427 bp, Homo sapiens
aggggaggaggaggcgcccgcctggttccctgcaaagcggccttatttatctgggcacagcctcagcctccccggtgggaggcttggggcggccgatcctctcccaccggggagctcctttccgtgcgctccccatgacgggaggtcgcccggcggacagcgtggcatgagccaggagcccgggccgagagcgtgccaggaagatgtcgagcccgggcatcgacggcgaccccaagcctccatgcttgcctcgaaacggtctggtgaagctgccgggccagcccaacggcctgggtgcggccagcatcaccaagggcacgccagccaccaagaaccgcccctgccagccaccacccccacccaccctcccaccaccaagcctggctgctccactgtcccgggctgccctggctgggggcccgtgcaccccggcaggtggaccagcctcagccttggcacctgggcacccagcggagcggccgccgctggccacggacgagaagatcctcaatgggctcttctggtatttctcggcctgcgagaagtgtgtgctggcccaggtgtgcaaggcctggcggcgcgtgctgtaccagcccaagttctgggcaggcctcacgccggtgctgcatgccaaggagctctacaacgtgctgcctggtggcgagaaggagttcgtgaacctgcagggttttgccgccagaggcttcgagggcttctgcctggttggcgtctccgacctggacatctgtgagttcattgacaactatgcgctctccaagaagggtgtcaaagccatgagcctcaagcgctccaccatcacggacgcaggcctcgaggttatgcttgaacagatgcagggcgtggtgcgtctggagctgtcgggctgcaacgacttcaccgaggccgggctgtggtccagcctgagcgcgcgcatcacctcgctgagcgtgagtgactgcatcaacgtggccgacgacgccatcgcggccatctcgcagctgctgcccaacctggcggagctgagcctgcaggcctaccacgtgacggacacggcgctggcctacttcacggcgcgccagggccacagcacgcacacgctgcgcctgctctcctgctgggagatcaccaaccacggcgtggtcaacgtggtgcacagcctgcccaacctcaccgcgctcagcctctcgggctgctccaaggtcaccgacgacggcgtggagctcgtggccgagaacctgcgcaagctgcgcagccttgacctctcgtggtgcccacgcatcaccgacatggcgctggagtacgtggcctgcgacctgcaccgcctagaggagctcgtgctcgacaggtgtgtacgcatcacggacactggcctcagctatctgtccaccatgtcgtccctccgcagcctctacctgcgatggtgctgccaggtgcaagacttcgggctgaagcacctcctggccctggggagtttgcgcctcctgtctccggcaggctgcccgctgctcaccaccaccgggctgtcgggcctggtgcagctgcaggagctggaggagctggagctgaccaactgccccggggccacccccgagctcttcaagtatttctcgcagcacctgccccgctgcctcgtcattgagtagcgcgaggcccccgccccggtcgcgggaacccggccatgacctgggcgggggcgcggggcgccgccgagccccctcttcccgccttgcgctcgggggagcccccgcgcccccggcccagcgcgggagacggggcgagccgagggaaagcccctccccgaccttcggtccctccgccctcccagccccgccccgggcaggggggcggcgggtgggcccgccccacgcacgcacgcacactcggggactttgtgcatgcccctcgtgcccgcactgcacgccgccctccgccacgccacagccacagccgccgccatcactcgctcgccctcccgcttggggggcggggctcggtccttgggggggctttgagctctccagactgtgcccttaccgccttccccgccacacccgctctgtcttcccactgtccccccaatcccgggcagggcccagtgggattgagggggctgggtcccccaggacacgggcccagaagagccccacgggcttcctgcatcttccaccgcaccatacctggagccctccgaggggtgtcaggggaaacaggccaccgccaaagccatggcccgccgccgagagcccaggccccacccgcacctcctcacccatccagcctgacccacgcggcctctcctcctccttgccgctgtgtggggcagtcccctgtccgccccaaaacccggccttggtccctggccaggctgagagaattgggcagggagagggcggaagggctggcgatcgcttggagtcattaacgtgatccaagctgactccggtcggcctcaacccaggggtggcgcaggcaccttgcaagcctcgagctgtagccaccctcaggcctgggaagaggcctgggccgacctcacacctcagcccttgcacccggccgggctcagttcaggcctgggcaccgagcttcaccctgggtgggtctcctcaggtggagtctgcagagtggacccagccaagggtcagggtcagcactgggtcagcgactccaatcttccagtggccagcacaccctagacaccccgaggagggagggctcctttctagcctgcccccccacccccacttcacccctccccagcttcccaaacttctgtctgcccaaatgggctctgaccgtgctctgtcggcccgagacatttggaagtcctgggggatgctggcaaatctcagctgttgctgaggagggggctgggaccccttcccatcccaaccttgagccccaggagataccgcgcccacacccaatcttgggacactccctatctggttggaagagagtaaccagtttccagagagccagagagtgagagagagaaagagagtgagagagagagagaaagagagagagagatgctgttgaatcagaaacagatcaacagcccaaagattttcctgtccctggagtgccagccccaggaagctccagggctgagtggtcaggagccagtttctccagcccctcctccccacaacccctagtggggaggggcagctgtccatttgcccaaagtattaatgcaactgaagctgtgatatttccaacgactgtaggaggaaaaattaaggggagagaggaaaacaaaaccaaccaacccctaaaatcattttcttattgtacataacgacctcattctcctgtatatgcggaagatataaccttatatttggtaagtgtttcttgtgctattttatcacgtgacctgtttataaaaatatatattaaaaaagttgtaaaaaaaaaaaaaaaa

SEQ ID NO: 673 - DNA, 3673 bp, Homo sapiens
ctcctcctctcagcacctggcgcggcgctacgcggccctggccgccgaggactgcgccgctgctgcccgccgcttcctgctatcctcggccgccgccgccgccgccgctgccgcctcggcttcgtcgcccgcctcctgctgcaaagagttggggctggctgcggccgccgcctgggagcagcagggccgaagtctcttcctggccagcttggggccggtgcgcttcctggggccgcccgccgccgtgcagctcttccgggggccgacaccgtcaccggccgagctccctacgccccccgaaatggtgtgcaagcggaagggggccggggtccccgcctgcaccccctgcaagcagccccgcagccgctctgccctccgccctcttctcccacctccgaaggtgcccccaccgaagctggcggggacgctgtccgagccgggggcaccgcccccttgtccgcccagcagcagcatgaatgtggcgacgcggactgtcgggagtcccccgaaaacccctgcgactgtcacagggagccgccccccgaaaccccagacatcaaccagctgccgccgtccatcctgctcaagatattttccaatttgtcactggatgagcgttgcctttccgcatcattggtttgcaagtactggcgtgacctttgtttagacttccagttttggaagcagctggatcttagtagtcgtcagcaggtcactgatgaattgttggaaaaaattgcatcaagaagtcagaatataattgaaatcaacatttctgattgtcgcagtatgtctgataatggcgtatgtgttttagcatttaaatgtcctggacttcttaggtatacagcctacaggtgtaaacagctttctgacacctctattattgcggttgcctctcactgtcctttacttcagaaagtgcatgtaggcaaccaggacaaactcactgatgaaggactcaagcagctgggctcaaaatgcagagaactcaaagatattcatttcggccagtgttacaagatctcagatgaaggcatgatcgtcatagctaagggctgtctgaaattacaaaggatatacatgcaggaaaacaaattagtgacagatcagtcagtgaaagcatttgctgaacactgtcctgagcttcaatatgtaggcttcatgggttgttcagtcacttctaaaggagtcattcacctaaccaagctaagaaacctttccagcttggacctacgtcatatcactgaactggataatgaaaccgtgatggaaattgtcaagaggtgcaaaaatcttagctctctcaatctctgtctgaactggatcataaatgacaggtgtgtggaggtcattgcaaaggaaggacaaaacctgaaagagctatatttggtgtcctgtaaaatcacagattatgcactgatagccattgggcgatacagcatgacaatagagactgtggatgtcggatggtgtaaagaaatcacagaccaaggagccaccctgattgcacagagcagcaagtctctgagatatttggggctgatgagatgtgataaagtcaacgaagtgacggtggaacagctggtgcagcagtacccccacatcaccttcagcaccgtcctgcaggactgcaagaggaccttggagagagcctatcagatgggctggacccccaacatgtctgccgcctcctcctagcgctcctgcctcgcctagtccactgggatcattcagcagagcagaggagaattgtacatttggggagctgatctctcggaagggttttaactgtcacctgtctgtgtgtgttcaagtatgtgtatttgtgtcttgtttgcatactgcataccaaaagtgcagttgtcatttgttcccaagtgagctggctttttttcttagaaattaaagattatgaaagccacaaactttttagtttttaacttcaaaggcttctttctctttaaaaaaaaattatttttaatatagagtcaaaaaattggatgtattattttgagcttctaattgctgccacttggagatgtccaagtaagaaggccttctttttacatgggatgaattgtgcacttctactgatgatgactacagcagaagtgatgttatacgtacaggcacttacactctctcacatattcacacgtgtgcacatctacaccagggctctgatctactctagatcgtttcctgacagagaagccttcttccaggccactaaggtagcatgttatccactgtggcactgcctaactccgtgtatcctcgggtggccaacttgctatctggtgggtgacttggggactagaaagaataaagccttttctaaatttgttatatagaggcaacagtctgaactctcctggccagctcacgaaagttaattatacattattctacaaatgcattctgttgagcactaaatattttagttggttttatgttaacattgtgttagcttttatttcctggatagtaactggtcaggatatattttaatgatatttgaaactaatcttagcattgaagccaccaatgtaattaatggtgtgcagttattttaaaaactacagatcatttcattattttcttaattttggtaattattaaagtctatttctgagatacgagagggtagtcacattaatagaagattcatgagtgagatataagtagacaatctttctactgttgttgctctttttgctttgctttgggttcttgaacaggttttttggatatatgcatgttgtcattttggactagttctcatgctactgcaaagatctattgctagctaatatatgagttaagaaagaaaattagaaaatctgttcattgaaattctgtttacacttgtcagaaataagcatttctttgtttaattaaggattgccagcttcagttaagacaagacctatcagtaaatgaatatatgttttgatttaacacatctttacaattaattcataatagggactcaggctcaaataactgttcctgtgtctagatttataatgaggacatcagggagcctttttaagctaaagagtgattatctttcacagtagaactagaaacaaaaccctaacttgtgaagttgctatttatttttccctgagtgaatataactgttatttggtctttaacagatatactgaggtttgagtttcactttctttaagtctcacattgctaacatgacattagctgtaagaaacaagatagctttacatttgaatgccatttactgatttctaatgattctctttttttgtaaacaactgtttcctttgattatgtcaacatgtttctgatgtggcatttttgttttaatcccaatcggttaggaaaatctagtcagtaagcgccatgagtattcttcccataactaaatgggtttctaatttaatttgaagggaataaaatttgtgtaagaaaaaagctgtttaacattaataaactatatttcttcttacacattgaactgtatcattttcatatccacttccccaccactgaaatatcttatttcacaatattttaactgatttttaatccaaaactaatttataagacagtatgtatagtaatagtagcttgagtgaatatgcaaaagtttaatttttatatatgtcatactatattttaaatagtt

SEQ ID NO: 674 - DNA, 2378 bp, Homo sapiens
gtcaccaggacaacgggcgtcgccggcgccgtgtgacttcgggctgtgggctcgctcgcggctcttcggccatggttttctcaaacaatgatgaaggccttattaacaaaaagttacccaaagaacttctgttaagaatattttccttcttggatatagtaactttgtgccgatgtgcacagatttccaaggcttggaacatcttagccctggatggaagcaactggcaaagaatagatctttttaactttcaaatagatgtagagggtcgagtggtggaaaatatctcgaagcgatgcggtggattcctgaggaagctcagcttgcgaggctgcattggtgttggggattcctccttgaagacctttgcacagaactgccgaaacattgaacatttgaacctcaatggatgcacaaaaatcactgacagcacgtgttatagccttagcagattctgttccaagctgaaacatctggatctgacctcctgtgtgtctattacaaacagctccttgaaggggatcagtgagggctgccgaaacctggagtacctgaacctctcttggtgtgatcagatcacgaaggatggcatcgaggcactggtgcgaggttgtcgaggcctgaaagccctgctcctgaggggctgcacacagttagaagatgaagctctgaaacacattcagaattactgccatgagcttgtgagcctcaacttgcagtcctgctcacgtatcacggatgaaggtgtggtgcagatatgcaggggctgtcaccggctacaggctctctgcctttcgggttgcagcaacctcacagatgcctctcttacagccctgggtttgaactgtccgcgactgcaaattttggaggctgcccgatgctcccatttgactgacgcaggttttacacttttagctcggaattgccacgaattggagaagatggatcttgaagaatgcatcctgataaccgacagcacactcatccagctctccattcactgtcctaaactgcaagccctgagcctgtcccactgtgaactcatcacagatgatgggatcctgcacctgagcaacagtacctgtggccatgagaggctgcgggtactggagttggacaactgcctcctcatcactgatgtggccctggaacacctagagaactgccgaggcctggagcgcctcgagctgtacgactgccagcaggttacccgtgcaggcatcaagcggatgcgggctcagctccctcatgtcaaagtccacgcctactttgctcccgtcaccccaccgacagcagtggcaggaagtggacagcgactgtgcaggtgctgtgtcattctctgacagcagctgcctgggcccaaggggtgatgaggcatcctttcctctagaagacctgagtcttcctgaccgactccaccatcacccaatctgttgattctccattgggaaaggcatttacaggtaaaagacttctgtatggattgcagttactctggtgatagttttcacctttattctgctgtgaaacaatcaaatcaaagccttgtgtcagttaacacatgacaagtggtctcaatgcagctaggaccatgccagaaacctggatctcttaagagattggtacctacctaggtacgaaagttctacccttggcatactcagcattcctcaaaaagaccatcagtgttagcacaaactgagcagaaaaaataagctgttgattttctacctgatacttaagccagtggcctactttaattcacaattccattttgattagcaggacttttccactttgaagataaatagcaactttatcaaagtgactgtactgcaaattaattcataatgcctgatagttttatatatagagacttatgtggaaggcatgttaataggtttccatgagacaccaaagaaaagaggactctatactgggtggagcagggtcttcacctttttgtttctgtcaacttgtcatatacacctccagggaccaaaaacaaaagcagctcggagtctgtgttgcctgattggaaagtagaagctctggtgtatgctacagcacataacacatttttactaaaggaaaaaagctaattatgtccatgcctctcgtaaaactggggggaaccttaaagagaaagaactaaggcttaagttatctgtagtataatcaattagaagtaatgaatggatgcatgtaaaatggatgtgattttttttcaagcttattttgaaatcttaaaaatcaggttacaccatagctactcaaaagttttacacacttaaaactcagatcagtaagtgttggtaccttttagactcataaaattgaataaaccattgcaatgctttaaaaaaaaaaaaaaaaaa

SEQ ID NO: 675 - DNA, 2423 bp, Homo sapiens
gagagccgagctagcgacgagcagtcgttgcggccgccggcgccgcgggaggtggtggaggcctagccggagccgagaggtctcttgttcccgtcccacggtcccggcgtcacccctccggcgcccagtccccgtcccggaactcccgggcctgtcctgggcccccggtctgtgcactccgctcgccgcagcgcccggcccgggccgcacccgccggccccatgaggagggacgtgaacggagtgaccaagagcaggtttgagatgttctcaaatagtgatgaagctgtaatcaataaaaaacttcccaaagaactcctgttacggatattttcttttctagatgttgttaccctgtgccgctgtgctcaggtctccagggcctggaatgttctggctctggatggcagtaactggcagcgaattgacctatttgatttccagagggatattgagggccgagtagtggagaatatttcaaaacgatgtgggggctttttacgaaagttaagtcttcgtggatgtcttggagtgggagacaatgcattaagaacctttgcacaaaactgcaggaacattgaagtactgaatctaaatgggtgtacaaagacaacagacgctacatgtactagccttagcaagttctgttccaaactcaggcaccttgacttggcttcctgtacatcaataacaaacatgtctctaaaagctctgagtgagggatgtccactgttggagcagttgaacatttcctggtgtgaccaagtaaccaaggatggcattcaagcactagtgaggggctgtgggggtctcaaggccttattcttaaaaggctgcacgcagctagaagatgaagctctcaagtacataggtgcacactgccctgaactggtgactttgaacttgcagacttgcttgcaaatcacagatgaaggtctcattactatatgcagagggtgccataagttacaatccctttgtgcctctggctgctccaacatcacagatgccatcctgaatgctctaggtcagaactgcccacggcttagaatattggaagtggcaagatgttctcaattaacagatgtgggctttaccactctagccaggaattgccatgaacttgaaaagatggacctggaagagtgtgttcagataacagatagcacattaatccaactttctatacactgtcctcgacttcaagtattgagtctgtctcactgtgagctgatcacagatgatggaattcgtcacctggggaatggggcctgcgcccatgaccagctggaggtgattgagctggacaactgcccactaatcacagatgcatccctggagcacttgaagagctgtcatagccttgagcggatagaactctatgactgccagcaaatcacacgggctggaatcaagagactcaggacccatttacccaatattaaagtccacgcctacttcgcacctgtcactccacccccatcagtagggggcagcagacagcgcttctgcagatgctgcatcatcctatgacaatggaggtggtcaaccttggcgaactgagtatttaatgacacttctagagctaccgtggagtctctccagtggaagcaaccccagtgttctgagcaagggttacaaagtgagggagggcagtgtccagatccccagagccacacatacatacacatacacacccttacccccatccactctagctttgtgaccatgggactgaagtttgtgatggcttttttatcaagtagattggtaaaatttaaccattcctgttgaggtgcccataagaaaatcataggccaagatagggaggggcattccagcaaaccccgtgttaatgctactgtggtttttaaatttttgtctaggggtttctttggggattttagaacagcatctgctgtcctccggggtcaagaaaagcatggaaagacaatatatgatgtacccagggaccagaaagaaaatttctttgcatcttagaaatggtagacattcattgtgactaaagagcttctatgcttccttgtttccatgccaacatgctgagcatgctcacaaagaaggctcgtccattcctcctgtgttttagtatttggcccagaggtttcctaaatggttgccttgaaatcactgtggtccaaatgtaattcttacacactcaaattatcactgtctgtagcacacttgtgcacctgtcttacattctctgttgctcccccccacactcttgctcagtctgtcacctgttcagtctgcttactcactcaattgttacccttttgctgttgtcgtgtttacagtttgcattttgaatgattagttgggattaccaaacattttttaaaaagatattatcaataaatatttttttaattctaaattttaaaaaaaaaaaaaaaaaaa

SEQ ID NO: 676 - DNA, 1333 bp, Homo sapiens
acattttctaatgtttacagaatgaagaggaacagtttatctgttgagaataaaattgtccagttgtcaggagcagcgaaacagccaaaagttgggttctactcttctctcaaccagactcatacacacacggttcttctagactgggggagtttgcctcaccatgtagtattacaaatttttcagtatcttcctttactagatcgggcctgtgcatcttctgtatgtaggaggtggaatgaagtttttcatatttctgacctttggagaaagtttgaatttgaactgaaccagtcagctacttcatcttttaagtccactcatcctgatctcattcagcagatcattaaaaagcattttgctcatcttcagtatgtcagctttaaggttgacagtagcgctgagtcagcagaagctgcctgtgatatactctctcagctggtaaattgttccatccagaccttgggcttgatttcaacagccaagccaagtttcatgaatgtgtcggagtctcattttgtgtcagcacttacagttgtttttatcaactcaaaatcattatcatcaatcaaaattgaagatacaccagtggatgatccttcattgaagattcttgtggccaataatagtgacactctaagactcccaaagatgagtagctgtcctcatgtttcatctgatggaattctttgtgtagctgaccgttgtcaaggccttagagaactggcgttgaattattacatcctaactgatgaacttttccttgcactctcaagcgagactcatgttaaccttgaacatcttcgaattgatgttgtgagtgaaaatcctggacagattaaatttcatgctgttaaaaaacacagttgggatgcacttattaaacattcccctagagttaatgttgttatgcacttctttctatatgaagaggaattcgagacgttcttcaaagaagaaacccctgttactcacctttattttggtcgttcagtcagcaaagtggttttaggacgggtaggtctcaactgtcctcgactgattgagttagtggtgtgtgctaatgatcttcagcctcttgataatgaacttatttgtattgctgaacactgtacaaacctaacagccttgggcctcagcaaatgtgaagttagctgcagtgccttcatcaggtttgtaagactgtgtgagagaaggttaacacagctctctgtaatggaggaagttttgatccctgatgaggattatagcctagatgaaattcacactgaagtctccaaatacctgggaagagtatggttccctgatgtgatgcctctctggtaatgggctg

SEQ ID NO: 677 - DNA, 4562 bp, Homo sapiens
tcactcgctccggggacccgcaacaagtggccgccgcgccctccccggggaagccgcgggcgcgcaggggcagccgaaggaggcggtcgagccgcggagcccaggggcctgcccggctcagcgcccaccggaggggatcggggcgggcggatggggacccggcggcggcggcgcggtgagcctctgggcggccccggggcgcgggctgtgcgcggcgctgcgcccgccggcccccagcgcggattgtaagtgctgcagctgtgcccggccccgcctggagccaccgggggtgccaggaggggacgcagcaccccctcccactggagtgcggggacctctccaggccggaggtcggccccggagcttgggggggatgtgcagctaacggtcccgtcgggcgggctttcctcgggccgagcgcgcaggacgtgcgccgcagctatggagtgtcccgggagacggcgggcatgacggctacaggatgggcgcgaacaatggcaaacagtacggcagtgagggcaaaggcagctcgagcatctcatctgacgtgagttcaagtacagatcacacgcccactaaagcccagaagaatgtggctaccagcgaagactccgacctgagcatgcgcacactgagcacgcccagcccagccctgatatgtccaccgaatctcccaggatttcagaatggaaggggctcgtccacctcctcgtcctccatcaccggggagacggtggccatggtgcactccccgcccccgacccgcctcacacacccgctcatccggctcgcctccagaccccagaaggagcaggccagcatagaccggctcccggaccactccatggtgcagatcttctccttcctgcccaccaaccagctgtgccgctgcgcgcgagtgtgccgccgctggtacaacctggcctgggacccgcggctctggaggactatccgcctgacgggcgagaccatcaacgtggaccgcgccctcaaggtgctgacccgcagactctgccaggacacccccaacgtgtgtctcatgctggaaaccgtaactgtcagtggctgcaggcggctcacagaccgagggctgtacaccatcgcccagtgctgccccgaactgaggcgactggaagtctcaggctgttacaatatctccaacgaggccgtctttgatgtggtgtccctctgccctaatctggagcacctggatgtgtcaggatgctccaaagtgacctgcatcagcttgacccgggaggcctccattaaactgtcacccttgcatggcaaacagatttccatccgctacctggacatgacggactgcttcgtgctggaggacgaaggcctgcacaccatcgcggcgcactgcacgcagctcacccacctctacctgcgccgctgcgtccgcctgaccgacgaaggcctgcgctacctggtgatctactgcgcctccatcaaggagctgagcgtcagcgactgccgcttcgtcagcgacttcggcctgcgggagatcgccaagctggagtcccgcctgcggtacctgagcatcgcgcactgcggccgggtcaccgacgtgggcatccgctacgtggccaagtactgcagcaagctgcgctacctcaacgcgaggggctgcgagggcatcacggaccacggtgtggagtacctcgccaagaactgcaccaaactcaaatccctggatatcggcaaatgccctttggtatccgacacgggcctggagtgcctggccctgaactgcttcaacctcaagcggctcagcctcaagtcctgcgagagcatcaccggccagggcttgcagatcgtggccgccaactgctttgacctccagacgctgaatgtccaggactgcgaggtctccgtggaggccctgcgctttgtcaaacgccactgcaagcgctgcgtcatcgagcacaccaacccggctttcttctgaagggacagagttcatccggcgttgtattcacacaaacctgaacaaagcaaatttttttaaaagcagcgtatgtaagcaccgacacccactcaaaacagctctttcttccgggaaggttattaggaatctggcctttatttttcctcatttctcatgggcaacagaggccaaagaaacgaagcaagacaaacagcaaacaggcattttggtcaggtcatttgtaggcagtttctcttctcacaaaagatgtacttaagcaggctgatcgctgttccttgagcaaggcgcttactctcctccgctcaggcccccaaggccgccctttccctcgcacacaggccccacccccacagttccacgccccccccccaaggccacaccctccctccctagagcagcagcgaggatccatcatcagaatcacagtgctctccagacctcctctctaaactgcttcattgacctaagtcactctcttcaatcccacacccatggacattcttgtcaactcaataccatagcactttgcataggcaaaatacttttcaggcctttttaaaaaattcattacagcaaacagctggggaaggacatgcagtcctcccccagctctgtcaatgactatgaccttggccaaagcacttcactgctctgggctgcagcttccagcactgaatcagaggccacacagcccaaagattagcttcatgtccattatagcattgagggagcagagatacccatacacagaagcaccttggcatagagcacccaggcatcgacctcttccaggagaactgattctgtggatggatgtgatttcaggagattgtgcagtgccagcatcagtgcataaagggtcctgtatgtcctttggctgcaaatcacccacttccctgtgtttcagtgggagaatttcctctcccacctcctcacatcctcttttgccaggctggatgctgtcgtctctgtacacaaatactttctgcattcccccctccacaccatcctagcgaggcaccagcacacctaatcacagcaaagcccagatccccccatcagttgcttttactcagtgttttcaaataggagtaaaggcccttgcaatttttaattaacaagcaaggcccaagggaacacatgtcctcaaaagtttttctgatccctcgccttgcacacctggcatgcatcaggcacatctgtcctacagctggcagagacagatgcctcggttctttgtcattcagattgcatttgacctcttctcatctatttatttctttatacatccagacttcatcacatgaagcctattggggttaagtttgtaagtgtttaattgtgcaaattgccaccctgtgtacctcctccatgtctgtctgcgtgttttccaccaaagaatgcaaagcagacttccaggtgtttaaattctgttcactcaacaatgccagatgaatggaagagggaacacactgagatgacttagactctggtccaccaaccagacccttggaaaggaatactaaaatcattacaaggtatggattttaaatggatgaaacttcaaattatcttatttggatagaagtctatattctagcctcatttgcatgaagtcagatagccagaagaaattccattgctggttttcacgaaattcacttgtcttttgctaataaacacatggccctttcccagattattctctagccaagccccacctttgttacgttgaaatccctcatttattttcttctcaaaatgcccattatccaaatgcagaacctctgcatctccaagccagttatgctgaatttgtcaaacttagacacccttgacaactgcactcctactgtaggctcctgtgcatactgtcgtcttctgtgggggatggagaggttagtgtgatgaggtggtgtctgcccaggaggtttctttcaaacatcatggcctcccatccaatcaacatcatcaaattacatgtgtaatcaaggctctgtgccatgggggaaatgaatcatttagctaggccaggatctagtgaaagccacagagtttaaaaccatgaaagaagttgaaggcagcattcctcagctctgtgacttgtgaccctatttgaagtttcaggatttgggtgtcacaaaggattgtccctaatccttggccctggggtcttccgagtgagctggtttaatactctgagaatgagcagggagatccagagaatgaatccctgaccgcatcacctaaactgtcttccaaacatgagacaaagctgactgttcacactgattgcccagcacataccgtcttgccagtttcttcttttctcccagtctcctgttcatccattctgttctcccttggggtgggaatctatgatggaggttactggggaaacagctcagcagatttttggagaccaaaccaaaggtctcactaggaaatttatctgttttaaaacattgcttccttcctggctctgctaaattgaatgctcattgtttgttgttgttgttttttaattctaatgttcaaatcactgcgtgctgtatgaatctagaaagccttaatttactaccaagaaataaagcaatatgttcgt

SEQ ID NO: 678 - DNA, 2154 bp, Homo sapiens
cggccgcgcccggtgcagcaacagcagcagcagcccccgcagcagccgccgccgcagccgccccagcagcagccgccccagcagcagcctccgccgccgccgcagcagcagcagcagcagcagcctccgccgccgccaccgccgcctccgccgctgcctcaggagcggaacaacgtcggcgagcgggatgatgatgtgcctgcagatatggttgcagaagaatcaggtcctggtgcacaaaatagtccataccaacttcgtagaaaaactcttttgccgaaaagaacagcgtgtcccacaaagaacagtatggagggcgcctcaacttcaactacagaaaactttggtcatcgtgcaaaacgtgcaagagtgtctggaaaatcacaagatctatcagcagcacctgctgaacagtatcttcaggagaaactgccagatgaagtggttctaaaaatcttctcttacttgctggaacaggatctttgtagagcagcttgtgtatgtaaacgcttcagtgaacttgctaatgatccaattttgtggaaacgattatatatggaagtatttgaatatactcgccctatgatgcatcctgaacctggaaaattctaccagattaatccagaagagtatgaacatccaaatccctggaaagagagtttccagcagttgtataaaggtgcacatgtaaagccaggatttgctgaacatttctacagtaaccctgcaagatataaaggaagagaaaatatgttgtattatgatactattgaagatgcccttggtggggtacaagaggctcattttgatggacttatctttgttcattctggaatatatactgatgaatggatatatattgaatctccaatcaccatgattggtgcagcacctgggaaagtggcagacaaagttataattgaaaacactagagattcaaccttcgtttttatggaaggctctgaagatgcttatgttggatatatgacaataaggtttaaccctgatgacaaatctgcacaacaccacaatgcacaccactgcttagagattacagtaaattgtagccctattattgatcactgtatcatccgaagtacatgtacagttggttctgcagtatgtgttagtggtcaaggagcatgtcccaccatcaagcactgtaacatcagtgactgtgaaaatgttggactatatataacagatcatgcacagggaatatatgaggataatgaaatttccaataatgcgttagctgggatttgggttaaaaatcatggaaacccaattattagacggaatcatattcatcatggacgtgatgttggtgtgttcacatttgatcatggcatgggttactttgaaagttgcaatatacacagaaataggatagcaggctttgaagtaaaagcctatgctaaccctacagtggttcgatgtgaaattcaccatgggcagactggaggaatatatgtccatgaaaaaggaagaggacaattcatagagaataaaatctatgcaaacaactttgcaggtgtatggattacctcaaatagtgacccaacaataaggggaaattctatatttaatggaaatcaaggaggagtttacatctttggtgatggacgaggccttattgaaggaaatgacatttatggcaatgcattagcaggaattcaaattaggacaaacagttgtccaattgttcggcataacaaaattcatgatggccagcatggtgggatttatgtgcatgaaaagggacaaggagtaatagaagagaatgaagtttatagtaacactctagctggagtctgggtgacaactggcagcactccagtactgagaagaaaccggatacacagtggcaagcaggttggtgtttatttttatgacaatggacatggagtgctagaagacaatgatatctataatcatatgtattcaggggttcagataaggtaaatgttttcatatttggctatcttttgggagggagttaggagtatgtggggtgtgtaaaagaaatttgcttattgtttaatgcccaatctttatccccctattgtatatatattcacattcttaaaataatcttgacttaaattgtcagaatgtagctttccttggtctaggtgaggacagaagccactg

SEQ ID NO: 679 - DNA, 2567 bp, Homo sapiens
cggccgcgcccggtgcagcaacagcagcagcagcccccgcagcagccgccgccgcagccgccccagcagcagccgccccagcagcagcctccgccgccgccgcagcagcagcagcagcagcagcctccgccgccgccaccgccgcctccgccgctgcctcaggagcggaacaacgtcggcgagcgggatgatgatgtgcctgcagatatggttgcagaagaatcaggtcctggtgcacaaaatagtccataccaacttcgtagaaaaactcttttgccgaaaagaacagcgtgtcccacaaagaacagtatggagggcgcctcaacttcaactacagaaaactttggtcatcgtgcaaaacgtgcaagagtgtctggaaaatcacaagatctatcagcagcacctgctgaacagtatcttcaggagaaactgccagatgaagtggttctaaaaatcttctcttacttgctggaacaggatctttgtagagcagcttgtgtatgtaaacgcttcagtgaacttgctaatgatccaattttgtggaaacgattatatatggaagtatttgaatatactcgccctatgatgcatcctgaacctggaaaattctaccagattaatccagaagagtatgaacatccaaatccctggaaagagagtttccagcagttgtataaaggtgcacatgtaaagccaggatttgctgaacatttctacagtaaccctgcaagatataaaggaagagaaaatatgttgtattatgatactattgaagatgcccttggtggggtacaagaggctcattttgatggacttatctttgttcattctggaatatatactgatgaatggatatatattgaatctccaatcaccatgattggtgcagcacctgggaaagtggcagacaaagttataattgaaaacactagagattcaaccttcgtttttatggaaggctctgaagatgcttatgttggatatatgacaataaggtttaaccctgatgacaaatctgcacaacaccacaatgcacaccactgcttagagattacagtaaattgtagccctattattgatcactgtatcatccgaagtacatgtacagttggttctgcagtatgtgttagtggtcaaggagcatgtcccaccatcaagcactgtaacatcagtgactgtgaaaatgttggactatatataacagatcatgcacagggaatatatgaggataatgaaatttccaataatgcgttagctgggatttgggttaaaaatcatggaaacccaattattagacggaatcatattcatcatggacgtgatgttggtgtgttcacatttgatcatggcatgggttactttgaaagttgcaatatacacagaaataggatagcaggctttgaagtaaaagcctatgctaaccctacagtggttcgatgtgaaattcaccatgggcagactggaggaatatatgtccatgaaaaaggaagaggacaattcatagagaataaaatctatgcaaacaactttgcaggtgtatggattacctcaaatagtgacccaacaataaggggaaattctatatttaatggaaatcaaggaggagtttacatctttggtgatggacgaggccttattgaaggaaatgacatttatggcaatgcattagcaggaattcaaattaggacaaacagttgtccaattgttcggcataacaaaattcatgatggccagcatggtgggatttatgtgcatgaaaagggacaaggagtaatagaagagaatgaagtttatagtaacactctagctggagtctgggtgacaactggcagcactccagtactgagaagaaaccggatacacagtggcaagcaggttggtgtttatttttatgacaatggacatggagtgctagaagacaatgatatctataatcatatgtattcaggggttcagataaggactggaagcaaccccaaaattagacgcaacaaaatctggggaggacagaatggtggaattctagtttataattctggtctaggctgtatagaagacaatgaaatatttgacaatgcaatggctggagtctggattaagacagatagtaatcctacactaagaagaaataaaatccatgatggaagagatggtggcatctgtatatttaatgggggtcgaggtattgttgttaattttgcattagtgaaaaatccagttttccattattcttccatatctttaatgatcaatgacattgctaactaagttataaatgagtgaatctcaagtctttttccttatcaagttgaactggtttaggagattagtgcctagagttaagagacaaatgtttacaatacttttccttttgtagccactttgagtctgcagttgtcagtaagcctttttaaagatagaatttgtttacattctctggaccttttaaaattcagaatagtaatatgattataataaacttcaaagtcaagttatagaaatagatgtgagaaattgatctgtaaatatctgaaaatgtctttagtaaacgggtattgcttttgtaa

SEQ ID NO: 680 - DNA, 3891 bp, Homo sapiens
ccccagcagcagccgccccagcagcagcctccgccgccgccgcagcagcagcagcagcagcagcctccgccgccgccaccgccgcctccgccgctgcctcaggagcggaacaacgtcggcgagcgggatgatgatgtgcctgcagatatggttgcagaagaatcaggtcctggtgcacaaaatagtccataccaacttcgtagaaaaactcttttgccgaaaagaacagcgtgtcccacaaagaacagtatggagggcgcctcaacttcaactacagaaaactttggtcatcgtgcaaaacgtgcaagagtgtctggaaaatcacaagatctatcagcagcacctgctgaacagtatcttcaggagaaactgccagatgaagtggttctaaaaatcttctcttacttgctggaacaggatctttgtagagcagcttgtgtatgtaaacgcttcagtgaacttgctaatgatccaattttgtggaaacgattatatatggaagtatttgaatatactcgccctatgatgcatcctgaacctggaaaattctaccagattaatccagaagagtatgaacatccaaatccctggaaagagagtttccagcagttgtataaaggtgcacatgtaaagccaggatttgctgaacatttctacagtaaccctgcaagatataaaggaagagaaaatatgttgtattatgatactattgaagatgcccttggtggggtacaagaggctcattttgatggacttatctttgttcattctggaatatatactgatgaatggatatatattgaatctccaatcaccatgattggtgcagcacctgggaaagtggcagacaaagttataattgaaaacactagagattcaaccttcgtttttatggaaggctctgaagatgcttatgttggatatatgacaataaggtttaaccctgatgacaaatctgcacaacaccacaatgcacaccactgcttagagattacagtaaattgtagccctattattgatcactgtatcatccgaagtacatgtacagttggttctgcagtatgtgttagtggtcaaggagcatgtcccaccatcaagcactgtaacatcagtgactgtgaaaatgttggactatatataacagatcatgcacagggaatatatgaggataatgaaatttccaataatgcgttagctgggatttgggttaaaaatcatggaaacccaattattagacggaatcatattcatcatggacgtgatgttggtgtgttcacatttgatcatggcatgggttactttgaaagttgcaatatacacagaaataggatagcaggctttgaagtaaaagcctatgctaaccctacagtggttcgatgtgaaattcaccatgggcagactggaggaatatatgtccatgaaaaaggaagaggacaattcatagagaataaaatctatgcaaacaactttgcaggtgtatggattacctcaaatagtgacccaacaataaggggaaattctatatttaatggaaatcaaggaggagtttacatctttggtgatggacgaggccttattgaaggaaatgacatttatggcaatgcattagcaggaattcaaattaggacaaacagttgtccaattgttcggcataacaaaattcatgatggccagcatggtgggatttatgtgcatgaaaagggacaaggagtaatagaagagaatgaagtttatagtaacactctagctggagtctgggtgacaactggcagcactccagtactgagaagaaaccggatacacagtggcaagcaggttggtgtttatttttatgacaatggacatggagtgctagaagacaatgatatctataatcatatgtattcaggggttcagataaggactggaagcaaccccaaaattagacgcaacaaaatctggggaggacagaatggtggaattctagtttataattctggtctaggctgtatagaagacaatgaaatatttgacaatgcaatggctggagtctggattaagacagatagtaatcctacactaagaagaaataaaatccatgatggaagagatggtggcatctgtatatttaatgggggtcgaggtctccttgaagaaaatgatattttcaggaatgctcaagcaggtgttctcatcagcactaatagtcatccaatcttaaggaaaaacagaatatttgatggatttgccgcaggtattgaaattacaaatcacgcaactgcaacactagaaggcaatcagatttttaacaaccggtttggaggcttatttttagcatctggtgttaatgtgacaatgaaagataacaaaataatgaacaatcaagatgccatagaaaaggctgttagtagaggccaatgtttatataaaatatcaagttataccagctatcccatgcatgatttctacagatgtcatacttgtaacaccacagatcgaaatgccatatgtgtgaactgcattaagaagtgccatcagggacatgatgtagagtttattagacatgataggtttttctgtgactgtggtgctggaacactgtctaatccttgtacattagctggtgagcctacacatgatacagatacactatatgactctgctccacctatagaatctaatacattgcagcacaactgaattccttccctaaagaaaaagtcctgccattgtaacatcataacttaaaacacttttttggaagaagatttaaaatatttgcccatgctacaggaagagactgtattaaaaatggatacacaaggtcagttgacactatgaagctcaagctaccaaaaagaaagtggcaatatattgactcaggatctcaaagctgggtgttttagcattactgtgtaaagacttgaagggacagaagtgaagaaaataagctgcaattttgtacagataccaacttctgaaaagctggtgtttttacaactagcattgaatgcagtccaatttgcagtagtaatcttcaatagacaagcagctttgttgctgcctttatggacatgggtaccaattgcttttgtaatatggtaaaaatgtgagctagcacttctgcgttccttttgattttttttttttaacatgtattcagattgagaaatatgattttaatgctttaatctcatgtagtttgtttttaatttcaagcaaaatcttactgtacttgaatgtgccctgttttgttagcacacctagacttgctgtaactgtactcatgtcccagtatgtacgttctttctatgaaagagaaaacactaatcttaaattatatccagcaatgtttctggtatcctttaagaaaagttaagactattatttccttcccttccctgtgcagcattcaaaatcacccctagaaaaagtgagtgttttaatgagacttcctaggaagggatgcactgtaaaacaaaagtattcttgtaactcagttttgtgaaaggtaaaaaactactatgttttaagtacactttagaaagtctcttcaaaacaaacagtcctgtatttgaactctgttcatagtttttttttgaacagtttagacaaaactgctggaaattaaaccaatttcctgcattaagctgagacaagtatatatacagccctatacagtttcatagcttttcctcccccatttatgtgtattggtgacagtgggtataaaacagcctgaaagtgtatgcatgtaccataacatctagacttaatatattgtggagtattcaataaccattatgtagaaggtagataagaattaaaagggtttaatttcctagaaagaaaatggaaaaatggtcatttttaaaaaataaagtttattagatcataaaaaaaaaaaaaaaa

SEQ ID NO: 681 - DNA, 3540 bp, Homo sapiens
cagaggaggagctcgctgccgggggacgctgggctgagcggccggcggcgcgggcccggcggcggcggcagcggggtccgggtccggagcgccacatgagacggtttaagcggaagcatcttactgccattgactgccagcatttggctcggagtcacttggctgtgacccagcccttcggtcaaagatggacaaacagagatccgaaccatggtctctatcctaaaccgagaacaaaaagagggagtaggggtcagggaagtcaaagatgcatccctgagttcttcctagcaggcaagcagccgtgcaccaatgacatggccaaaagcaattctgttggccaggacagctgtcaggactctgagggtgacatgatctttcctgcagagagcagctgtgcactgcctcaggaaggcagtgcagggccgggctcaccagggtctgccccgccctccaggaagcggtcttggtcctctgaggaagagagtaaccaggctaccgggaccagccggtgggatggagtttctaagaaagctccacggcaccatttgtctgtgccatgcacaaggcctagggaggccaggcaagaagcagaggacagtacgtctcggctctctgcggagtctggtgaaaccgaccaagatgctggggacgtgggtcctgatcccattcctgactcatactatgggcttcttgggaccttgccctgccaggaagcactgagccacatttgcagcctgcctagtgaggtcctgaggcacgtgtttgccttcctcccggtggaagacctctattggaacctgagcttggtgtgccacttgtggagggagatcatcagtgacccgctgttcattccttggaagaagctgtaccatcgatacctgatgaatgaagagcaagctgtcagcaaagtggacggcatcctgtctaactgtggcatagaaaaggagtcagacctgtgtgtgctgaacctcatacgatacacagccaccactaagtgctctccgagtgtggatcccgagagggtgctgtggagtctgagggaccaccccctcctccccgaggctgaggcgtgtgtgcggcaacacctccccgacctctacgctgctgccgggggtgtcaacatctgggccctggtggcggctgtggtgctcctctccagcagtgtgaatgacatccagcgactgctcttctgcctccggagacccagctccacggtgaccatgccagatgtcaccgagaccctgtactgcatagccgtgcttctctacgccatgagggagaaggggattaacatcagcaataggattcactacaacattttctattgcctatatcttcaggagaattcctgcactcaggccacaaaagttaaagaggagccatctgtctggccaggcaagaaaaccatccaacttacacatgaacaacagctgattctgaatcacaagatggaacctctccaggtggtgaaaattatggcctttgccggcactgggaagacctcaacgctggtcaagtatgcagagaagtggtctcagagcaggtttctgtatgtgacattcaacaagagcatcgcaaagcaggccgaacgcgtcttccccagcaacgtcatctgcaaaaccttccactccatggcctacgggcacatagggcggaagtaccagtcaaagaagaagttgaatctcttcaagttaacacccttcatggtcaactccgtccttgctgaagggaagggtggattcataagagccaagcttgtgtgtaagactctagaaaacttctttgcctcggctgacgaagagctgaccattgatcacgtgcctatttggtgtaagaacagccaaggacagagagtcatggttgagcagagtgaaaaactgaatggtgtccttgaagcgagccgcctctgggataacatgcggaagctgggggagtgcacagaagaggcgcaccagatgactcatgacggctacttgaaactctggcagctgagcaagccttcgctggcctcttttgacgccatctttgtggatgaggcccaggactgcacaccagctatcatgaacatagttctgtctcagccatgtgggaaaatctttgtaggggacccgcaccagcagatctataccttccggggtgcggtcaacgccctgttcacagtgccccacacccacgtcttctatctcacgcagagttttcggtttggtgtggaaatagcttatgtgggagctactatcttggatgtttgcaagagagtcaggaaaaagactttggttggaggaaaccatcagagtggcattagaggtgacgcaaaggggcaagtggccttgttgtcccggaccaacgccaacgtgtttgatgaggccgtacgggtgacggaaggggaattcccttcaaggatacatttgattggggggattaaatcatttggattggacagaatcattgatatttggatccttcttcagccagaggaagaacggaggaaacaaaacctcgtcattaaagacaaatttatcagaagatgggtgcacaaagaaggctttagtggcttcaagaggtatgtgaccgctgccgaggacaaggagcttgaagccaagatcgcagttgttgaaaagtataacatcaggattccagagctggtgcaaaggatagaaaaatgccatatagaagatttggactttgcagagtacattctgggcactgtgcacaaagccaaaggcctggagtttgacactgtgcatgttttggatgattttgtgaaagtgccttgtgcccggcataacctgccccagcttccgcacttcagagttgagtcattttctgaggatgaatggaatttactgtatgttgcagtaactcgagccaagaagcgtctcatcatgaccaaatcattggaaaacattttgactttggctggggagtacttcttgcaagcagagctgacaagcaacgtcttaaaaacaggcgtggtgcgctgctgcgtgggacagtgcaacaatgccatccctgttgacaccgtccttaccatgaagaagctgcccatcacctatagcaacaggaaggaaaacaaggggggctacctctgccactcctgtgcggagcagcgcatcgggcccctggcgttcctgacagcctccccggagcaggtgcgcgccatggagcgcactgtggagaacatcgtactgccccggcatgaggccctgctcttcctcgtcttctgaggacaaggcgcacgttctccgcagtgcagagcagcttgccgaggaccccgcgtgaagaaagccagcgaggggggcttctgctccctgagactctgggttcacccacagcactttctgaggaagaggacaccagcccaagctggacctgccatttctccactccctacagacagccagtctccacttgcctcccctctggatgtatctggtcagggaagtgggggatgttcttttgataaaaaaaaaaaaaaaaatttatgtatttaaacttttattacaagatttcaattaaacaggcaccatagcactggca

SEQ ID NO: 682 - DNA, 3727 bp, Homo sapiens
ctgctttcaaggtgtctagatacagagtgaagaatgtcacagtaggaagtgcactggactaggggagtcaggagacccgggttcttgtgttggcaccatcactcatgagctacgaggtgacttcaggctgccattggacctgtcaagtgcctgagtcatgtgataatgggctacattgcgcagggcccctgggccatctccacaggagatgccagaggacgagtgcccacttgctggtcttcacagagcacgctgaaatgagacggtttaagcggaagcatcttactgccattgactgccagcatttggctcggagtcacttggctgtgacccagcccttcggtcaaagatggacaaacagagatccgaaccatggtctctatcctaaaccgagaacaaaaagagggagtaggggtcagggaagtcaaagatgcatccctgagttcttcctagcaggcaagcagccgtgcaccaatgacatggccaaaagcaattctgttggccaggacagctgtcaggactctgagggtgacatgatctttcctgcagagagcagctgtgcactgcctcaggaaggcagtgcagggccgggctcaccagggtctgccccgccctccaggaagcggtcttggtcctctgaggaagagagtaaccaggctaccgggaccagccggtgggatggagtttctaagaaagctccacggcaccatttgtctgtgccatgcacaaggcctagggaggccaggcaagaagcagaggacagtacgtctcggctctctgcggagtctggtgaaaccgaccaagatgctggggacgtgggtcctgatcccattcctgactcatactatgggcttcttgggaccttgccctgccaggaagcactgagccacatttgcagcctgcctagtgaggtcctgaggcacgtgtttgccttcctcccggtggaagacctctattggaacctgagcttggtgtgccacttgtggagggagatcatcagtgacccgctgttcattccttggaagaagctgtaccatcgatacctgatgaatgaagagcaagctgtcagcaaagtggacggcatcctgtctaactgtggcatagaaaaggagtcagacctgtgtgtgctgaacctcatacgatacacagccaccactaagtgctctccgagtgtggatcccgagagggtgctgtggagtctgagggaccaccccctcctccccgaggctgaggcgtgtgtgcggcaacacctccccgacctctacgctgctgccgggggtgtcaacatctgggccctggtggcggctgtggtgctcctctccagcagtgtgaatgacatccagcgactgctcttctgcctccggagacccagctccacggtgaccatgccagatgtcaccgagaccctgtactgcatagccgtgcttctctacgccatgagggagaaggggattaacatcagcaataggattcactacaacattttctattgcctatatcttcaggagaattcctgcactcaggccacaaaagttaaagaggagccatctgtctggccaggcaagaaaaccatccaacttacacatgaacaacagctgattctgaatcacaagatggaacctctccaggtggtgaaaattatggcctttgccggcactgggaagacctcaacgctggtcaagtatgcagagaagtggtctcagagcaggtttctgtatgtgacattcaacaagagcatcgcaaagcaggccgaacgcgtcttccccagcaacgtcatctgcaaaaccttccactccatggcctacgggcacatagggcggaagtaccagtcaaagaagaagttgaatctcttcaagttaacacccttcatggtcaactccgtccttgctgaagggaagggtggattcataagagccaagcttgtgtgtaagactctagaaaacttctttgcctcggctgacgaagagctgaccattgatcacgtgcctatttggtgtaagaacagccaaggacagagagtcatggttgagcagagtgaaaaactgaatggtgtccttgaagcgagccgcctctgggataacatgcggaagctgggggagtgcacagaagaggcgcaccagatgactcatgacggctacttgaaactctggcagctgagcaagccttcgctggcctcttttgacgccatctttgtggatgaggcccaggactgcacaccagctatcatgaacatagttctgtctcagccatgtgggaaaatctttgtaggggacccgcaccagcagatctataccttccggggtgcggtcaacgccctgttcacagtgccccacacccacgtcttctatctcacgcagagttttcggtttggtgtggaaatagcttatgtgggagctactatcttggatgtttgcaagagagtcaggaaaaagactttggttggaggaaaccatcagagtggcattagaggtgacgcaaaggggcaagtggccttgttgtcccggaccaacgccaacgtgtttgatgaggccgtacgggtgacggaaggggaattcccttcaaggatacatttgattggggggattaaatcatttggattggacagaatcattgatatttggatccttcttcagccagaggaagaacggaggaaacaaaacctcgtcattaaagacaaatttatcagaagatgggtgcacaaagaaggctttagtggcttcaagaggtatgtgaccgctgccgaggacaaggagcttgaagccaagatcgcagttgttgaaaagtataacatcaggattccagagctggtgcaaaggatagaaaaatgccatatagaagatttggactttgcagagtacattctgggcactgtgcacaaagccaaaggcctggagtttgacactgtgcatgttttggatgattttgtgaaagtgccttgtgcccggcataacctgccccagcttccgcacttcagagttgagtcattttctgaggatgaatggaatttactgtatgttgcagtaactcgagccaagaagcgtctcatcatgaccaaatcattggaaaacattttgactttggctggggagtacttcttgcaagcagagctgacaagcaacgtcttaaaaacaggcgtggtgcgctgctgcgtgggacagtgcaacaatgccatccctgttgacaccgtccttaccatgaagaagctgcccatcacctatagcaacaggaaggaaaacaaggggggctacctctgccactcctgtgcggagcagcgcatcgggcccctggcgttcctgacagcctccccggagcaggtgcgcgccatggagcgcactgtggagaacatcgtactgccccggcatgaggccctgctcttcctcgtcttctgaggacaaggcgcacgttctccgcagtgcagagcagcttgccgaggaccccgcgtgaagaaagccagcgaggggggcttctgctccctgagactctgggttcacccacagcactttctgaggaagaggacaccagcccaagctggacctgccatttctccactccctacagacagccagtctccacttgcctcccctctggatgtatctggtcagggaagtgggggatgttcttttgataaaaaaaaaaaaaaaaatttatgtatttaaacttttattacaagatttcaattaaacaggcaccatagcactggcaaaaaaaaaaaaaaaaaaaaaaaaaa

SEQ ID NO: 683 - DNA, 2832 bp, Homo sapiens
agcgacggcggtggcgtcccaagatggcgtcgtggctgccggagactctctttgaaactgtaggacaaggcccgccgcctagcaaagactattaccagttactggtcacccggtctcaggtaatctttagatggtggaagatctctctaaggagtgagtatcgatcaacaaaacctggagaagcaaaagaaacccatgaagacttcctagagaattcacatcttcaaggtcaaactgccttaatatttggtgcaagaatattagactatgtcatcaatttgtgcaaaggtaaatttgacttccttgaacggctctcagacgatttgctcctgactatcatttcttatctggatcttgaagatattgccaggctttgtcaaacatcacacagatttgcaaagctgtgcatgtctgataaactgtgggaacagatagtccagtcgacctgcgacaccatcactcctgacgtgagggccctggcggaggacacaggctggagacagctgttcttcaccaacaagctccagctccagcggcagctccgcaagaggaaacaaaaatatggaaacctgagagaaaagcaaccttaggcacacattttcctaccagcagggagctcaggcatggctgtgtttctcttcagtgtccaaatctcttctgtctccttttcttaagaactaagaggttttgttgatgcgtggagccatttgaaactcgtaggggatttgcacacaaatgcagcagagtctggctccccagtgccttgctagagtcaccgtcattctgaggtcaaatcatggcccgaggacaagggctgtaagacagggagccccataggccatcatcatccttatcccacacccattataaaagaggtttctattgtatataaacaaacaataaatgattattagcaggtttttattagacatctattttatctaggcattagaaagggtaatggggcttttgaattttttcctggcattgtgtcgtctgcgtccagccatgaagctggtggctgagtgtccccaccaggaactgtgaagggcacgtaccacgggaggcactcagggtgggtgcagctgccttcccaactttgttctgctaagtccatattcagggccctatccttgtgagcccaggatgccagggtccatccccgcatgtagacagcttccgacctggtgctggagcatgactggagaagtgcaggcatcctgcttgcggaccttgctcaaagtacaacttcccaggactacttcacattgttaaataaacctataaacatttcttttcttttctttttttttttttttttgtattttctttttagtagaggtggagtttcgccatgtaggccaggctggtcttgaactcctgacctcaagtgatctacctgctctggcttccaaagtgctgggattacaggcatgagccactatgtctggctaaaacctataaacatttcttagagaaatgctgttccccaaaggaatgtgaacagctaccacttttaacaaggatatttaagaaaacagactatgagttaactaagtaaaaatgtaaatatggtttgcatgctgttaacatggcagaggggtaaaaagaatacagtcctggggagaaaggtcacttcactgagaaggcttacttaaaaatgtttttctccctgcactttcatgattattaagtacccctagaaaatgaactcatagcagcaaataatctaatgactccttttaggttacagagcaaagtagctttctacttccacatcacattataatatagccttataatttcttctttcctgcaaccttcactttcctacctaggaaaactcacctccggtgccagagaaacttcccaggatgcactagggccctgtgaacaatacagaagttgtggactctggctctttgtcccacctaagtccttccagaagggctctacagcatggcttagtgacattaaaaaaaaaaactgaacccatgttaatatcaaacaagattttaatcttcattcacacacccttaaaacccagtcacggggctccccggtgccagtttgagaccgtcaacctagccctctctgcttctcattgctggaggtacacacagtcaaaagttttccgtgactgtgaaatccagtgcaatctgcttcccagcagatgaggagcctgacgtggttatgtctggatttagtccaagaacagagcaaagctttaattgtcaagagacccaggcctcattctccacttaggagagtttgctagggcaggtacaggtaaaggtaaccagcaggcagctgagagcaagaaggcacgtgctctgcagagctctagctgccttggctctccctgagctcccagacttcactcatggcctaattttcaatgacagaacgtaggttttatcgtgaggatgcagacacaaccacaattacgtatgtcaacataacttcataaatatgtaactgtaacttattggtaacatcagtgcaagatgattaaagcttcatgtgtagtattttatcaacaaacagattctgaaagcttatggacatgcgcaatagttgattcagcttcaatcaataagaacataaatatggcaatttgaaaacactatgtatatacctactcacatatatattatacttacgatatatacttatatgtagtatataataatattacatataaaaatgttataaaaataaatgctaaagtaaataaaaaaagagccattaatatgttaactattgttaaataatagctaaaataatacagattattaaattattttaatacttaaaaaaaaaaaaaaaaaa

SEQ ID NO: 684 - DNA, 2823 bp, Homo sapiens
gcgggccggggcggggcctcgcttcccaggcaagcgcaggtccaggcggtgcagcttgggcggcccagcggatcgtgccgcggcggccgagcgcagctacaggagggtgtccagaagccacaagccatggctgtggggaacatcaacgagctgcccgagaacatcctgctggagctgttcacgcacgtgcccgcccgccagctgctgctgaactgccgcctggtctgcagcctctggcgggacctcatcgacctcgtgaccctctggaaacgcaagtgcctgcgagagggcttcatcactgaggactgggaccagcccgtggccgactggaagatcttctacttcttacggagcctgcacaggaacctcctgcacaacccgtgcgctgaagaggggttcgagttctggagcctggatgtgaatggaggcgatgagtggaaggtggaggatctctctcgagaccagaggaaggaattccccaatgaccaggttcgcagccaggccagattgcgggtccaagtaccagctgtgcgttcagctcctgtcgtccgcgcacgcgcctctggggaccttccagccagacccggcgaccatccagcagaagagcgatgccaagtggagggaggtctcccacacattctccaactacccgcccggcgtccgctacatctggtttcagcacggcggcgtggacactcattactgggccggctggtacggcccgagggtcaccaacagcagcatcaccatcgggcccccgctgccctgacaccccctgagcccccatctgctgaaccctgactggtaaacaactgctgtcagaaaagggctgggcttgggaaggggaggtggaggccaggtgtccccagacctctaacccttgcccctagcagcctcttctttgtggagcctctcagtgtgggcagccctcgcatgctggggtcgggccagctctccccgaaaggtcttgacctgaatgatggccggggaagcctgcgtgtgcccctttcagagacggagcacctgagatgtgggaggtgcagcatgttcccctgggcccctcagaaagtcgagcttggaggccagcctggatctgtctctcccttcccctcctgggaccattctacctgtgttctttgaccctcggagcagggacaggcaagacaactggcaagcttgcagctgccctgatggtgcaggtgcagggaggtgaccatgtaactctgaccaatctgggaagtggagggtgggctcatgggccgtgctctgcccctgtctgctgctcccagtctctcgctctgcctgcctgctcagaagaggtggctttggcccagaggctcaggccgggactgagatggacagacccagggtggggtggggtccaggtcgggtgtggactgtcctcactgtcagtggagccccagaagctagatgggtaccaggtggggttaggttcccagaggactgagggaatcctgtacaggatgtcccagggtagatggggagcaggattgggacctgctctgacagctggacacatgagccctggatgagtatggtagggggtttgaagaatcccctgtccacctcccaaatccaggcccggccccctctggcttggagagcattccaagcccccaccccacccctagaactgccattcccaagacctctgtctcccagccaaccacccttggaacttgcctcttgtcctgctggaaagatagcagtgttctcctgacttcgccctactgcatgcagccaaataaaaggtgtgcccagtctaacctgtgccctgtggtttctggaaggaaaggcagactttaggtggtcctgcctggacctgcagatggtacaatggcatggcttctgtctaaggtacagaggggttggcatttcaggaaccaggccatcacagaaacaggttcatgggcagacccctcagtgagctgcaggtatctcacctggcagccgtccagtactgctggcttcctctggaggcccagccacaggctggggttggggtgtgtggacatctctgggcagctcttgagtccaccttgtgccagatcagcagtgccacccaggctctgcctcctggtgttactctttgccaacagctttacggacattggatgaagccgaagcatttagaatggtgcctggcacacagttggtgcgtgatatggttaagctttgtgtccccacccacatctcatcttgaatggtaatcctgggtgtttagggagagacctggtgggaagtgattggattatgggagcggttttcccccatgctgttctcatgatagtgagtgagttctcacgagatctgatggttttacaagtgacggtttccccggctccctcctgccgccatgtgaagaaggtcgttgcttccccttcaccttccaccaccatgattgtaagttccttttttcttttcttttcttttttttttttttttttttgagatggagtctcgctctgtcgcccaggctggagtgcagtggcgcaatctcagctcactgcaagctctgcctcccaggttcgcgccattcacctgcctcagcctctggagtagctgagactacaggcgcccaccaccatgcccggctaattttgtttgtatttttagtagagatggagtttcaccatgttggccagggtggtctcaatctcctgacctcgtgatccacccacctcgacctcccaaagtgctgagattacaggcgtgagccaccgcgcccagcgattgtttcttgaggcttccccagccatatggaactataagtcaattaaacctctttccttttataaatca

SEQ ID NO: 685 - DNA, 2948 bp, Homo sapiens
gcgggccggggcggggcctcgcttcccaggcaagcgcaggtccaggcggtgcagcttgggcggcccagcggatcgtgccgcggcggccgagcgcagctacaggagggtgtccagaagccacaagccatggctgtggggaacatcaacgagctgcccgagaacatcctgctggagctgttcacgcacgtgcccgcccgccagctgctgctgaactgccgcctggtctgcagcctctggcgggacctcatcgacctcgtgaccctctggaaacgcaagtgcctgcgagagggcttcatcactgaggactgggaccagcccgtggccgactggaagatcttctacttcttacggagcctgcacaggaacctcctgcacaacccgtgcgctgaagaggggttcgagttctggagcctggatgtgaatggaggcgatgagtggaaggtggaggatctctctcgagaccagaggaaggaattccccaatgaccaggtcaagaaatacttcgttacttcatattacacctgcctcaagtcccaggtggtggacctcaaggccgaagggtattgggaggagctgatggataccacacggccggacatcgaggtcaaggactggttcgcagccaggccagattgcgggtccaagtaccagctgtgcgttcagctcctgtcgtccgcgcacgcgcctctggggaccttccagccagacccggcgaccatccagcagaagagcgatgccaagtggagggaggtctcccacacattctccaactacccgcccggcgtccgctacatctggtttcagcacggcggcgtggacactcattactgggccggctggtacggcccgagggtcaccaacagcagcatcaccatcgggcccccgctgccctgacaccccctgagcccccatctgctgaaccctgactggtaaacaactgctgtcagaaaagggctgggcttgggaaggggaggtggaggccaggtgtccccagacctctaacccttgcccctagcagcctcttctttgtggagcctctcagtgtgggcagccctcgcatgctggggtcgggccagctctccccgaaaggtcttgacctgaatgatggccggggaagcctgcgtgtgcccctttcagagacggagcacctgagatgtgggaggtgcagcatgttcccctgggcccctcagaaagtcgagcttggaggccagcctggatctgtctctcccttcccctcctgggaccattctacctgtgttctttgaccctcggagcagggacaggcaagacaactggcaagcttgcagctgccctgatggtgcaggtgcagggaggtgaccatgtaactctgaccaatctgggaagtggagggtgggctcatgggccgtgctctgcccctgtctgctgctcccagtctctcgctctgcctgcctgctcagaagaggtggctttggcccagaggctcaggccgggactgagatggacagacccagggtggggtggggtccaggtcgggtgtggactgtcctcactgtcagtggagccccagaagctagatgggtaccaggtggggttaggttcccagaggactgagggaatcctgtacaggatgtcccagggtagatggggagcaggattgggacctgctctgacagctggacacatgagccctggatgagtatggtagggggtttgaagaatcccctgtccacctcccaaatccaggcccggccccctctggcttggagagcattccaagcccccaccccacccctagaactgccattcccaagacctctgtctcccagccaaccacccttggaacttgcctcttgtcctgctggaaagatagcagtgttctcctgacttcgccctactgcatgcagccaaataaaaggtgtgcccagtctaacctgtgccctgtggtttctggaaggaaaggcagactttaggtggtcctgcctggacctgcagatggtacaatggcatggcttctgtctaaggtacagaggggttggcatttcaggaaccaggccatcacagaaacaggttcatgggcagacccctcagtgagctgcaggtatctcacctggcagccgtccagtactgctggcttcctctggaggcccagccacaggctggggttggggtgtgtggacatctctgggcagctcttgagtccaccttgtgccagatcagcagtgccacccaggctctgcctcctggtgttactctttgccaacagctttacggacattggatgaagccgaagcatttagaatggtgcctggcacacagttggtgcgtgatatggttaagctttgtgtccccacccacatctcatcttgaatggtaatcctgggtgtttagggagagacctggtgggaagtgattggattatgggagcggttttcccccatgctgttctcatgatagtgagtgagttctcacgagatctgatggttttacaagtgacggtttccccggctccctcctgccgccatgtgaagaaggtcgttgcttccccttcaccttccaccaccatgattgtaagttccttttttcttttcttttcttttttttttttttttttttgagatggagtctcgctctgtcgcccaggctggagtgcagtggcgcaatctcagctcactgcaagctctgcctcccaggttcgcgccattcacctgcctcagcctctggagtagctgagactacaggcgcccaccaccatgcccggctaattttgtttgtatttttagtagagatggagtttcaccatgttggccagggtggtctcaatctcctgacctcgtgatccacccacctcgacctcccaaagtgctgagattacaggcgtgagccaccgcgcccagcgattgtttcttgaggcttccccagccatatggaactataagtcaattaaacctctttccttttataaatca

SEQ ID NO: 686 - DNA, 2082 bp, Homo sapiens
gacaggtctgtgaagcaggcaggttgctcagctgcccccggagcggttcctccacctgaggcagactccacgtcggctggcatgagccggcgcccctgcagctgcgccctacggccaccccgctgctcctgcagcgccagccccagcgcagtgacagccgccgggcgccctcgaccctcggatagttgtaaagaagaaagttctaccctttctgtcaaaatgaagtgtgattttaattgtaaccatgttcattccggacttaaactggtaaaacctgatgacattggaagactagtttcctacacccctgcatatttggaaggttcctgtaaagactgcattaaagactatgaaaggctgtcatgtattgggtcaccgattgtgagccctaggattgtacaacttgaaactgaaagcaagcgcttgcataacaaggaaaatcaacatgtgcaacagacacttaatagtacaaatgaaatagaagcactagagaccagtagactttatgaagacagtggctattcctcattttctctacaaagtggcctcagtgaacatgaagaaggtagcctcctggaggagaatttcggtgacagtctacaatcctgcctgctacaaatacaaagcccagaccaatatcccaacaaaaacttgctgccagttcttcattttgaaaaagtggtttgttcaacattaaaaaagaatgcaaaacgaaatcctaaagtagatcgggagatgctgaaggaaattatagccagaggaaattttagactgcagaatataattggcagaaaaatgggcctagaatgtgtagatattctcagcgaactctttcgaaggggactcagacatgtcttagcaactattttagcacaactcagtgacatggacttaatcaatgtgtctaaagtgagcacaacttggaagaagatcctagaagatgataagggggcattccagttgtacagtaaagcaatacaaagagttaccgaaaacaacaataaattttcacctcatgcttcaaccagagaatatgttatgttcagaaccccactggcttctgttcagaaatcagcagcccagacttctctcaaaaaagatgctcaaaccaagttatccaatcaaggtgatcagaaaggttctacttatagtcgacacaatgaattctctgaggttgccaagacattgaaaaagaacgaaagcctcaaagcctgtattcgctgtaattcacctgcaaaatatgattgctatttacaacgggcaacctgcaaacgagaaggctgtggatttgattattgtacgaagtgtctctgtaattatcatactactaaagactgttcagatggcaagctcctcaaagccagttgtaaaataggtcccctgcctggtacaaagaaaagcaaaaagaatttacgaagattgtgatctcttattaaatcaattgttactgatcatgaatgttagttagaaaatgttaggttttaacttaaaaaaaattgtattgtgattttcaattttatgttgaaatcggtgtagtatcctgaggtttttttccccccagaagataaagaggatagacaacctcttaaaatatttttacaatttaatgagaaaaagtttaaaattctcaatacaaatcaaacaatttaaatattttaagaaaaaaggaaaagtagatagtgatactgagggtaaaaaaaaaattgattcaattttatggtaaaggaaacccatgcaattttacctagacagtcttaaatatgtctggttttccatctgttagcatttcagacattttatgttcctcttactcaattgataccaacagaaatatcaacttctggagtctattaaatgtgttgtcacctttctaaagctttttttcattgtgtgtatttcccaagaaagtatcctttgtaaaaacttgcttgttttccttatttctgaaatctgttttaatatttttgtatacatgtaaatatttctgtattttttatatgtcaaagaatatgtctcttgtatgtacatataaaaataaattttgctcaataaaattgtaagcttaaaaaaaaaaaaaaaaaa

SEQ ID NO: 687 - DNA, 2082 bp, Homo sapiens; identical to SEQ ID NO: 686

SEQ ID NO: 688 - DNA, 1535 bp, Homo sapiens
gcgcgttcgggagcttcggccctgcgtaggaggcgggtgcaggtgtgggtgctgagccgcccgccgcctggagggggagacagcttcaggacacgcaggccgcagcgagggcccgggcccgggggatcccaggccatggatgctccccactccaaagcagccctggacagcattaacgagctgcccgagaacatcctgctggagctgttcacgcacgtgcccgcccgccagctgctgctgaactgccgcctggtctgcagcctctggcgggacctcatcgacctcatgaccctctggaaacgcaagtgcctgcgagagggcttcatcaccaaggactgggaccagcccgtggccgactggaaaatcttctacttcctacggagcctgcataggaacctcctgcgcaacccgtgtgctgaagaggatatgtttgcatggcaaattgatttcaatggtggggaccgctggaaggtggagagcctccctggagcccacgggacagattttcctgaccccaaagtcaagaagtattttgtcacatcctacgaaatgtgcctcaagtcccagctggtggaccttgtagccgagggctactgggaggagctactagacacattccggccggacatcgtggttaaggactggtttgctgccagagccgactgtggctgcacctaccaactcaaagtgcagctggcctcggctgactacttcgtgttggcctccttcgagcccccacctgtgaccatccaacagtggaacaatgccacatggacagaggtctcctacaccttctcagactacccccggggtgtccgctacatcctcttccagcatgggggcagggacacccagtactgggcaggctggtatgggccccgagtcaccaacagcagcattgtcgtcagccccaagatgaccaggaaccaggcctcctccgaggctcagcctgggcagaagcatggacaggaggaggctgcccaatcgccctaccgagctgttgtccagattttctgacagctgtccatcctgtgtctgggtcagccagaggttcctccaggcaggagctgagcatggggtgggcagtgaggtccctgtaccagcgactcctgccccggttcaaccctaccagcttgtggtaacttactgtcacatagctctgacgttttgttgtaataaatgttttcaggccgggcactgtggctcacgcctgtaatcccagcactttgggagaccgaggcaggtggatcacgaggtcaggagacagagaccatcctggccaacacggtgaaaccctgtctctactaaaaatacaaaaaattagccgggcgtggtggcgggcgcctgtagtcccagctactcgggaggctgatgcagaagaatggcgtgaacccggaaggcagagcttgcagtgagccgagatcacgccactgcactccagcctgggtgacagagcgagactctggctcataaaataataataataataaataaataaaaaataaatggttttcagtaaaaaaaaaaaaaaaaaa

SEQ ID NO: 689 - DNA, 4575 bp, Homo sapiens
gtagtcgtggcgctctcgaggccctgccatgagcaagctcttaactcttcaggtctgcacgtcctacgcccaccgtccagtgctactctcagctcggagttcagcttcgggctgccaagagccagcaacctggtgtcagaggctcggtcccacaacgctctgcgggccgcggcgcctgctgggaggtgtagtccccgatctgcgtactgcgttcgccgagggggagggcggagctgccggcggcccgggcgggctggcagctagagtgggtgcgatagccgcctccgcctctgccgcctccgccgtcgcctcctccgcccgggccgttcgctgctgcgcggggagagcgaggcggggccgccggggccgccatggagcccgactcggtgattgaggacaagaccatcgagctcatgtgttctgtgccaaggtctttgtggctaggctgcgccaacctggtagagagcatgtgcgcactgagttgcctgcagagcatgcccagtgtcagatgtctccagataagtaatggaacatcatctgtgatcgtctccagaaagaggccatcagaaggaaactatcaaaaagaaaaagacttgtgtattaaatattttgaccagtggtctgaatcagatcaagtggaatttgtggaacatcttatttcacgaatgtgtcattatcagcatggacatattaactcttacctgaagcccatgttgcagcgggactttattaccgctttaccagagcaaggcttagatcacatagcagaaaacattctttcgtacctggatgccaggtctctgtgtgcagcagagctggtatgtaaagaatggcagcgagtgatctcagaaggaatgctttggaagaagctgattgaacgaatggtacgcactgatcccctatggaaaggactttcagaaagaagagggtgggatcagtacctgtttaaaaacagacccacagatggccctccaaattcattttataggtcattatacccaaagattatccaggatatagagactatagaatctaactggcggtgtggacgacacaacttgcagaggattcagtgccgctctgaaaatagtaaaggtgtctactgtttacagtacgatgatgaaaaaattatcagtggcctacgagataattctattaagatatgggataaaaccagcctggaatgtttgaaagtgttaacaggacacacaggctctgtcctctgtctgcagtatgatgagcgtgtcattgtaactggctcttcagattctacggtgagagtgtgggatgtgaacacgggtgaagttcttaacacattgatccaccacaatgaggctgtattgcacttacgcttcagcaatggactgatggtgacctgttccaaggaccgctccattgctgtgtgggacatggcttctgcgaccgacatcactttacgccgtgtcctggttggccaccgggctgccgtcaatgtagtagactttgacgacaagtacatcgtgtctgcctctggtgacaggaccatcaaagtctggagcacgagcacctgtgaatttgttcgtactctcaatgggcacaagcggggcattgcctgtctccagtacagggatcgcctggttgttagtggatcatcagataataccattaggctctgggatattgaatgtggtgcctgtttaagagtcctagagggacatgaagaattggtccgatgcatccggtttgataacaagaggattgtcagtggggcctatgatgggaaaattaaagtttgggacttgcaagctgctcttgaccctcgagccccagcaagcacattgtgtttgcgcacattggtggaacattctggacgtgtgtttcggctccagtttgatgagtttcagatcatcagcagctcccatgatgacactattttgatttgggatttcttaaatgtgcctcccagtgcccagaatgagacccgttctccctccagaacatacacttacatctctagataacagtctgcactttcacccgtttcagggttttctagtcttgaactactggctacgtggctaccaaatgcctaagggagttcgttcacagctgagttatgaagctggaattggttctagacgctgggtagatgcaaagcagcctaactcttcaagtaccgacatttctcacctctgattccggctctcctttgagaaggagaccttagcttccccggcttcaagtagaacagaagcccgtttccttccctcatcagtgaaaaaatctaatgtttcaaatgtaaattgttcatagaaaaggaacatagaatctgttttacagaagtaaatcgaccgtcaagagaagacttggcctctaatttatattgctttgcactttggtttgatattaagaaacagcattcttcttcagtgaaattttgggtgccaaacacctacccagaatgtccagggctttcattttcaaaagttagcattctccttttgaccgtccaagtcattatgaattctgacttgttgtattaggaacatgttggacagtggaaaattttctctggattgttttagtaatatttttgggattatacttcctttctgtaccaatttcttttaatttaaagaactataagtcagttatattatctaccaacaggtaatatagctctttcttttattaactgttctctgtcccccaaccatctcctgatatttggtagagtaacacctttatacgtgtgcttgcctcctaatttaaaatactgtattcgcatgtagatataatgtacataacagtttaacctcaaagttgctggagtcagggccccctgtgcttgagacactaatacagagtgtgttcgcacttagccatgggctgggctcaagaacctgatacctgggttgatgtggattacctagaacccttcctgcagtattcatacagtgtttttattttgttgttgtcattgcgtgtgtgtggtttgtgtgtgtttttaatgagaatcttgttttaaaatgtaatttctaaggtttaacaccaaaatgttttatttgttgtggagtatatattatacaatagagaggtaccttaaacattttttgttcttattctttttctcataagtactcctgagtacaagtggtcacctcccatagtattcatttggcttcgctgtcaaaaatcattattctgtgcagtcgtggccctgggaaggggaaataagaaggccctgttgacgggctgtcttggctctggaattcatgcatcctggccttgccaaggttctggcagggcctgctggtgtgttggagcctgcagggcaggtcaggctggttcagaggcccatgctgaggggtgggtgctctgaagtggagtgaagcctcaagcccatgaatgccaccccagtcatctctggtgtcagctgctgctgtggccccagcaggttctcaaagctcccaagtcctccctacgacacagcccaaatgtgtaaatggcactgttgccctgacagtgcatggaaaggacgttggcatccaattggcactccttctcccttattcaatattaggtttgatttgcccttcgccattgtttccaaagatcaaggaatgtcaataacattttaaaggaccaataaacagcctcctataaagtaaacctcttcccgtggaagcacactctactactaaagggaaggccctgggctctgatttgtcctttgcattgagaacggtgtggggatcagtgtgtgtgtatgtgatttgtttattgagttggctttgcttttttagtttttcttttaaaaataaaatccttccttcccatgttactaaattaatttatgtttttgagaggttgagtctcaaagtgtaaacaataaacctccattcataaggtggatgttgtaagcttgatggtggttgtgaaagtgatttagctttgaccacttttcatcctacagcttcaatatcaaactggttaggaaagcccagggggaagggagggggcaggggaggaggcaattctgaatgaatgaatggattttttgttgtttttgcatgtttaatatagaagttcccctcgttccttgggagatgatggcctttgaatatgcagacaacctttgaattgtgcctactaaattatagcaggggactttggcacccaaggagttctgactttctgggattataatagtaattcccagccatactctggactttattttgctaaccataactgagcaaatgtaaattactgctatattaatgttttaaagcactgggatagtctaattctaacttgtaattaattatgtttgccaattatctgtttgaaataaatttgtgtctgaacagctattgaaactgttaaattgtacagatattattcatgacagctttgtactgtggaatgtgcttaataaaaaacaaaaaagtttgacttttgtccagtaaattgctaagtaatgtcaataaatcgagtatgggtattatgcagtgcacctaatctggcttcatgcaattgttacttcagctactgattcaaagccaatactcttaataaagtgttgcaatactc

SEQ ID NO: 690 - DNA, 4536 bp, Homo sapiens
gtagtcgtggcgctctcgaggccctgccatgagcaagctcttaactcttcaggtctgcacgtcctacgcccaccgtccagtgctactctcagctcggagttcagcttcgggctgccaagagccagcaacctggtgtcagaggctcggtcccacaacgctctgcgggccgcggcgcctgctgggaggtgtagtccccgatctgcgtactgcgttcgccgagggggagggcggagctgccggcggcccgggcgggctggcagctagagtgggtgcgatagccgcctccgcctctgccgcctccgccgtcgcctcctccgcccgggccgttcgctgctgcgcggggagagcgaggcggggccgccggggccgccatggagcccgactcggtgattgaggacaagaccatcgagctcatgaacacttcagttatggaagatcaaaatgaagatgagtccccaaagaaaaatactctttggcagataagtaatggaacatcatctgtgatcgtctccagaaagaggccatcagaaggaaactatcaaaaagaaaaagacttgtgtattaaatattttgaccagtggtctgaatcagatcaagtggaatttgtggaacatcttatttcacgaatgtgtcattatcagcatggacatattaactcttacctgaagcccatgttgcagcgggactttattaccgctttaccagagcaaggcttagatcacatagcagaaaacattctttcgtacctggatgccaggtctctgtgtgcagcagagctggtatgtaaagaatggcagcgagtgatctcagaaggaatgctttggaagaagctgattgaacgaatggtacgcactgatcccctatggaaaggactttcagaaagaagagggtgggatcagtacctgtttaaaaacagacccacagatggccctccaaattcattttataggtcattatacccaaagattatccaggatatagagactatagaatctaactggcggtgtggacgacacaacttgcagaggattcagtgccgctctgaaaatagtaaaggtgtctactgtttacagtacgatgatgaaaaaattatcagtggcctacgagataattctattaagatatgggataaaaccagcctggaatgtttgaaagtgttaacaggacacacaggctctgtcctctgtctgcagtatgatgagcgtgtcattgtaactggctcttcagattctacggtgagagtgtgggatgtgaacacgggtgaagttcttaacacattgatccaccacaatgaggctgtattgcacttacgcttcagcaatggactgatggtgacctgttccaaggaccgctccattgctgtgtgggacatggcttctgcgaccgacatcactttacgccgtgtcctggttggccaccgggctgccgtcaatgtagtagactttgacgacaagtacatcgtgtctgcctctggtgacaggaccatcaaagtctggagcacgagcacctgtgaatttgttcgtactctcaatgggcacaagcggggcattgcctgtctccagtacagggatcgcctggttgttagtggatcatcagataataccattaggctctgggatattgaatgtggtgcctgtttaagagtcctagagggacatgaagaattggtccgatgcatccggtttgataacaagaggattgtcagtggggcctatgatgggaaaattaaagtttgggacttgcaagctgctcttgaccctcgagccccagcaagcacattgtgtttgcgcacattggtggaacattctggacgtgtgtttcggctccagtttgatgagtttcagatcatcagcagctcccatgatgacactattttgatttgggatttcttaaatgtgcctcccagtgcccagaatgagacccgttctccctccagaacatacacttacatctctagataacagtctgcactttcacccgtttcagggttttctagtcttgaactactggctacgtggctaccaaatgcctaagggagttcgttcacagctgagttatgaagctggaattggttctagacgctgggtagatgcaaagcagcctaactcttcaagtaccgacatttctcacctctgattccggctctcctttgagaaggagaccttagcttccccggcttcaagtagaacagaagcccgtttccttccctcatcagtgaaaaaatctaatgtttcaaatgtaaattgttcatagaaaaggaacatagaatctgttttacagaagtaaatcgaccgtcaagagaagacttggcctctaatttatattgctttgcactttggtttgatattaagaaacagcattcttcttcagtgaaattttgggtgccaaacacctacccagaatgtccagggctttcattttcaaaagttagcattctccttttgaccgtccaagtcattatgaattctgacttgttgtattaggaacatgttggacagtggaaaattttctctggattgttttagtaatatttttgggattatacttcctttctgtaccaatttcttttaatttaaagaactataagtcagttatattatctaccaacaggtaatatagctctttcttttattaactgttctctgtcccccaaccatctcctgatatttggtagagtaacacctttatacgtgtgcttgcctcctaatttaaaatactgtattcgcatgtagatataatgtacataacagtttaacctcaaagttgctggagtcagggccccctgtgcttgagacactaatacagagtgtgttcgcacttagccatgggctgggctcaagaacctgatacctgggttgatgtggattacctagaacccttcctgcagtattcatacagtgtttttattttgttgttgtcattgcgtgtgtgtggtttgtgtgtgtttttaatgagaatcttgttttaaaatgtaatttctaaggtttaacaccaaaatgttttatttgttgtggagtatatattatacaatagagaggtaccttaaacattttttgttcttattctttttctcataagtactcctgagtacaagtggtcacctcccatagtattcatttggcttcgctgtcaaaaatcattattctgtgcagtcgtggccctgggaaggggaaataagaaggccctgttgacgggctgtcttggctctggaattcatgcatcctggccttgccaaggttctggcagggcctgctggtgtgttggagcctgcagggcaggtcaggctggttcagaggcccatgctgaggggtgggtgctctgaagtggagtgaagcctcaagcccatgaatgccaccccagtcatctctggtgtcagctgctgctgtggccccagcaggttctcaaagctcccaagtcctccctacgacacagcccaaatgtgtaaatggcactgttgccctgacagtgcatggaaaggacgttggcatccaattggcactccttctcccttattcaatattaggtttgatttgcccttcgccattgtttccaaagatcaaggaatgtcaataacattttaaaggaccaataaacagcctcctataaagtaaacctcttcccgtggaagcacactctactactaaagggaaggccctgggctctgatttgtcctttgcattgagaacggtgtggggatcagtgtgtgtgtatgtgatttgtttattgagttggctttgcttttttagtttttcttttaaaaataaaatccttccttcccatgttactaaattaatttatgtttttgagaggttgagtctcaaagtgtaaacaataaacctccattcataaggtggatgttgtaagcttgatggtggttgtgaaagtgatttagctttgaccacttttcatcctacagcttcaatatcaaactggttaggaaagcccagggggaagggagggggcaggggaggaggcaattctgaatgaatgaatggattttttgttgtttttgcatgtttaatatagaagttcccctcgttccttgggagatgatggcctttgaatatgcagacaacctttgaattgtgcctactaaattatagcaggggactttggcacccaaggagttctgactttctgggattataatagtaattcccagccatactctggactttattttgctaaccataactgagcaaatgtaaattactgctatattaatgttttaaagcactgggatagtctaattctaacttgtaattaattatgtttgccaattatctgtttgaaataaatttgtgtctgaacagctattgaaactgttaaattgtacagatattattcatgacagctttgtactgtggaatgtgcttaataaaaaacaaaaaagtttgacttttgtccagtaaattgctaagtaatgtcaataaatcgagtatgggtattatgcagtgcacctaatctggcttcatgcaattgttacttcagctactgattcaaagccaatactcttaataaagtgttgcaatactc

SEQ ID NO: 691 - DNA, 9186 bp, Homo sapiens
gcttccgccgggagccgcggagctgagggacgcgcggagatgacgcaggcagcaccggaagccgctcccctgtgaggctgcggaccgggagcagcggccgcaggtccgggcgccatggctgcggagcggacccggccgctgcaaggctctggcggtccgagcgtgcctagtagctgtgaacccggcgcgaggtcccgggccccggggcgctcgctcaggtaaatttttccataaccttatggagagaaaggactttgagacatggcttgataacatttctgttacatttctttctctgacggacttgcagaaaaatgaaactctggatcacctgattagtctgagtggggcagtccagctcaggcatctctccaataacctagagactctcctcaagcgggacttcctcaaactccttcccctggagctcagtttttatttgttaaaatggctcgatcctcagactttactcacatgctgcctcgtctctaaacagtggaataaggtgataagtgcctgtacagaggtgtggcagactgcatgtaaaaatttgggctggcagatagatgattctgttcaggacgctttgcactggaagaaggtttatttgaaggctattttgagaatgaagcaactggaggaccatgaagcctttgaaacctcgtcattaattggacacagtgccagagtgtatgcactttactacaaagatggacttctctgtacagggtcagatgacttgtctgcaaagctgtgggatgtgagcacagggcagtgcgtttatggcatccagacccacacttgtgcagcggtgaagtttgatgaacagaagcttgtgacaggctcctttgacaacactgtggcttgctgggaatggagttccggagccaggacccagcactttcgggggcacacgggggcggtatttagcgtggactacaatgatgaactggatatcttggtgagcggctctgcagacttcactgtgaaagtatgggctttatctgctgggacatgcctgaacacactcaccgggcacacggaatgggtcaccaaggtagttttgcagaagtgcaaagtcaagtctctcttgcacagtcctggagactacatcctcttaagtgcagacaaatatgagattaagatttggccaattgggagagaaatcaactgtaagtgcttaaagacattgtctgtctctgaggatagaagtatctgcctgcagccaagacttcattttgatggcaaatacattgtctgtagttcagcacttggtctctaccagtgggactttgccagttatgatattctcagggtcatcaagactcctgagatagcaaacttggccttgcttggctttggagatatctttgccctgctgtttgacaaccgctacctgtacatcatggacttgcggacagagagcctgattagtcgctggcctctgccagagtacaggaaatcaaagagaggctcaagcttcctggcaggcgaagcatcctggctgaatggactggatgggcacaatgacacgggcttggtctttgccaccagcatgcctgaccacagtattcacctggtgttgtggaaggagcacggctgacaccatgagccaccaccgctgactgactttgggtgccggggctgcgggttttgggtgcaacctctgcggcagccgactgcatgaaccaaagttctcacctaatggtatcatcacgcagtgcacaatcatttatctatgttttgccaggggccagggctcggggtgggggagggcttgttttattgacatacaacgcagcatgctaatggggtacaccattgacttcatttgtacttagttatgttggtcagtgttagaggatgcattttgggttcatctttcttgagtggagtattggttttaagtaaagaaagttaaatgatccattaatctgctaattggttgcctatgaaatcacattgtctgttattaaagctttttaccatagcctttttttcttttgaagttgaagcaaaggtgctatgatgttgttacagcaactttcctcacacggggtttagctcttataagagccagtgttaaaacttccaccaaataccagtttataaacttccaccaaataccagtgctaaggaaagtctgtcttccagttcaaatccaattctgtaaattgaatgttagcaactcattctaaaccttatatcttggcagagtcaaggttggccatgtttaagatgtgagcgagttctgtagtttttgttgccatgtcggggaagctagtccccggcagcctggatgactgcacagcggtgccctggtatagcagaaaagagcagtgagctggaaggttagagaccgggcctcttaccctggaactctgcaccctctctgggtcccagcttccttgtctgtacagccaggtatgaagctcagtgatttctaagattctttctggtccttcacctactgaaatgtgtaaaagttgatcatgtatttttgtctgatccctgattcatggtttctttcaggtcggataatatttaaatgaaatgactgttacagagttttctataagaacatcaattatatgaaaaggatgaataaaagggaaatgtagaaaatatagctgattccacttagacagtttaagtaattggttgaagaaatgctgatagaagccatggtttaaatagggacacagtatgctatactagaaggatacctgaacccaacctaacttcctcctttgcctctaacttaatctgcagcctcaggcaagttaactttctcttctaagaccatcattttcttcatcttttaagtgagggaattgtcctagatgagggctcacaaacccaaatgcctaagggagccgtgcaggtaacataaatgagtaaaacattctggggaggattgtgctgtcccctggaaagttgatctaatagggcagttattcagctctgttttgtcattaggagaagcaagcccagggttggcaggtcttcacattgtttcaggaggagctagaaatccagatttttatttgaaatcctggatttttaaaacgttacaactgattaaagaaaatttgaaataaggtgagccaaacaaaacatgtccctgggttgccagattgtgtcctcctccctctctaaagttaggtaattttgtgattcagcagtggaaatgttagtggtcacaatcagggagagagtagagggagcaagcagtagaaaaatctcagccgctcttcagctgtctccccttgtattacaagggtggtggggagggatgtatttcattcacagaccaataggaaggtagtttgaagatgaacataagaattggaacctcagtgacagcttatgtctgggaacatgagttattccttcttgctgactccagtataaagcatatccattttacaggtgagaaaaagggttgctggcagagctgagaatgatgtgaactctagagtggggacctatctcttgcagaatctgcattagcatagagccagactctggacctctgagtgctgtgaagttgatagaaattaatggtgaatttcaaggacagatatcattaatatccatgttgaaactctgtggggtttaagcaaaagaacaatatcttcccccatcccacaaaatctgggtttaatctatctcacattgagttctgtgcatcagctctgcttagtactctagaaatagaaccggaatcacaactgaatctattttgcagaagccccaggagactttgggcaatgatgatggtaaatgactttttactttattattatttttttttttttgagacagagtttcgctcttactgcgcaggctggagtgcaatggcacgatcttggctcactgcaacctccgcctcctgggttcaagtgattctcctgcctcagcctcctaagtagctgggattacaagcatctgccatgacacccaactaatttttatatttttagtagagacagggttccaccatgttggccaggctggtcttgaactcctgacctcaggtcatccacctgccttggcctcccaaagtgctgggattacaggcgtgagccaccacgcctggccgagtttttactttttatcgagcctgaacagataactattactgatctaatgaccatccccaccctacctcactttcagatctatccaatagcttcaaagggcaagtaattataatcatttgtgggaaaagttttattaaaaagtgacaaacttgaagctgtatatagtatgttctatttcagtttttagtggtgaatacagaagtcatcaaggtggtacttggtgccgctggaattttttttttttcctaggcagtcttgctctgtcatacaggctggagtacagtggcatcatcatgcagctggattttgacagcagaacttcaggcagtaattggagtcctaatgtcagttcttccttatggaggcctttatttggcctgagattttattcaactactttatagatgctgggtttattcatactatcgccagtttttataaaaatggaaaactagctcatcctttttgcaaaagaaagcaaagtggggagtcagaatgagaagtggataggggataactaaaactattctttactctcctttcattgcctttgagagctagctcttgcacacactgactttggcttccttagcgcataggtaagggaattgcctttccctcttttgtgaatattctcatttctgaaaaattctaagtcatgagaagataagccctatcctttcttacaaggattggatttcttgggtgacactgtggtgtggtggaagccagcggcttctttcaggttcataaaggccatcataacaacttcaggcttcatggtgtggacagggatccaggagagctgagtggatgtgtgaagtttctgatagattctgtcatcattccaaaggaatgtagtttcctccagctcaatcatttgaagtaatacacattgccaaatctgactgtaacctgacattttagacctattggagaaataggaagaaagcccctccagtggaaggactggacttggaagaagttctgcaggaaggtgcatgcaattggatagctgttcatgagtgaaacgtggggaacattgctatgaaattgtaaggtttgcacttcatttttcgtagtttaaaaattgctctgttctggctgttgaaaacacttggtgtgaggtttgaatgaggattatataatcattctagtattcataggaaaatgattactgctctctatttgtaaaacaaaagaaataactttcggaaacagtattttagacatgaggaaattgtttgtattaggcattttgatctaacagaatcagctaaggatagtggatcctggctttacacatttctttgaccaaacccagctggcaacttgaagttgttactgtgtggcttccagattgcctagaggtgaatcctaccaacatcactgttttttttgttttgttttgttttttttgtatgtttttgagacagagtcttgctctatccccaggctggagtgcagtggcgtgatctcggcttactgcaacctcagcctcctgggttcaagcgattctcctgcctcagcctcctgagtagctgagactacaggcgcgtgccaccacgcccagctatttttgtatttttagtagagacgaggtttcactatgttggccaggatggtcttgatttcttgacctcgtgttctgcccgcctctacctcccaaagtgccgggattacaggcgtgagctgctgtgcccggccccagcatcacttttatagctttctgtgcctcttcctctgggccttggtgtatgaagccacttgcctttctctgttgggaagcgagcagaatcagattgctactcatgatgcagtccgggcagggcatactgtcacctttgcctgtggacacagttgtcaggataggggagaagccctttaggtccgtcttcttgacacagccctcctacctggttacgctggtgctttcgcttggtttagacaaccaagacacttgagaattatgctgtcctcagaatgtctgatgaaaagaacagattcacttttttgacacaatgcccattagccatctttggcagtgtttctgatcaaaggttccccatgcctgctctaggaaagtaaacttttttcagaataaatcctcaaatggattactgagtagtctttgcaccattcccatcagcctaatcagactgaatggtcacgctcagtgcaaaaagctgttttgctgttaggatgtttcagtgtttcttgtctttcctggaacagttcagttgtttaaatttagtaattcaatcctgaccagtgtaaacccacttaattattgcagcctaaagaattcagctacttctactcttcataaatgtgcccaagtaaatatgtgtttttaatattcaaccctggaaaattagtaattcagatgataaaagctcatgttttggtgtctttgtactcagattgtgaacaggcatatttcactgatttagacttagtatacttgatgagaatgctcaggttgaagagatagttctgtcagcaatccaacatctatagcaatgtggaaaaagtaatcaactcatatttcacgaatttgatgtatgttgtgatttagagggcatgagataaagtttatatttgaactgtgtggggtagggggaagaagaggttgcttaagcaaatagtggggtgattgtggaacaagatgtctctaagatgagaagttattttcttgcatcatagaagcactctttttacccgtgagtgattgtgttaactataaatcatttatatctgtacattaaagcagattccctcaattaggcaaatttggttagccaagcccaagttattgtttgtacttgaaagtaataaagctgcatttccttaaaaatatattctgtagttaagactttgtcttgctttccccccaaccacttcagacattttatccaaccaatgcagggacttttcaaaagtcagtgtgtttttgaaaatagaacaaccccttgagtgatctgaggtggctctgtttttttactgtttctgcatcttctagaaggtaaactcaacaatataaccatttctgaaggtgatccaaaaagcaaaacaataaaggtaaaacacaaggaaataattttggtgaatttcatgaatagttgcaaatgaagggatggggtgggtaaaagtcccattttgcttccagaccttggaatagtcttcctctcttttgcccaaggatgtgtctatccagcacatctttgcatgagttctttcttactaacttaaacttacggggcttcttgtcatttgagtaccacggccctgcacctttgatcccctgacagcatcattaagggcagattgtcattcctgttttacagatgagaaagctgtggcttggtaaagtgattcattgcctagaggagttatagtaagtggtgaggctgaagccctgattttcagcccccacacacctggattttttccatgttttcatgtttgtctgttctttctgtatttcaagtctcttcaaatcccgactgctgccttctgccttcaccacttgtgtgcactgttcaacctgtcttatgctttgcttccagggagtctccccaaccacttctttgagcacttacttgctcttgttcaatcttggtaactctccgttaccatcagggcacatctggattccttaacatcatggagccctagctaatttcttcgagcaaacagttcttgctcctctatttatttccacccttgcgctttgggtgttaatctcccatcctcgtggaaagttcttgatgttcctttccaccagtcctagggccaggctttaatcccattgatctcccactatctttaaagcctctgctgaccaccataccccactccagcctcactgagcatttttgtgtaaggttagtggtgcagttcatttagcaataaatactgttgtaccttttgcagtagacaactattaactttcatccttgattctcagttttttccaaaatacaagtgaatacctggtttccccagcaacattgtaagattgagagtaggaattcattgagattttaatgaattccatggattgtcttaagagctatctaaacttggaagaaaaataacttccagagcatctaaaattgaaaataaaagatcagaagcaaatgaaagatcaattccacacagcttttcctctcttagacgtccctcttctgccatatcctgtaaacatctgaagtgttctgagtacatttggagagaatatttaatgatcacactgtgattagacatgagtagtccctgccagtgggatgttcctgtcctttgcattttaaccacatgttctgtgctctctgtggtaaagataatctaacagtaataaaaacttatggagaaaattacccagagctcctttatcattacgatttttaatactctcttctaatccttatgcacatgtgtatggatttatgtactgcaaatcattgttttgtaatacattctcaaaaatgtgctttaggtttttacaactaccataatattttgtaattttccttcattactgtaatttgctaaaccatttctgttttggtagataattaggtagtttccagttctgctttttagaagatactacagagaacttctttgtgcatatttccttagaacaagttccagtagaagacttactcgcaaaagcagtggaattttttcttagtattttctgttacaggtacagaagagtgcatacaacacacagttttgtcgaatagttatgaagtgaacacttgtctaaccactgcccgagtcaagaaagaacatttctaaacatgtttgccaatttaatagatataaaggaagtatctcaaggttgctttaactgacatttctttaacacatgacaacatttttatgggggaggggactagagagaaaatgacatatttttatgtgtgcttatttgtatctcttgaattctgtctgcatcttttacccattacactttcaaatacttgtgaaatcattggtcgagatgaattatggctataaataaaatttcactaatctaattatcactgatttagaaataatagttcaaccc

SEQ ID NO: 692 - DNA, 4673 bp, Homo sapiens
gcggcggacacttccctgggcgggactgtctcgtggcacccggtggaaccgaggagaacgtggagcgccgggagcggcgaatatggacgactacagcctggatgagttccgtcggcgctggcaggaggagctggcgcaggcccaggcgccgaagaagcggcgacggcccgaggctgccgagaggcgggctcggcggccggagaatgaaatgaatgatgtgcctttctttgatatccaactgccttacgaattggcaatcaatatatttcagtatctggacaggaaagaactaggaagatgtgcacaggtgagcaagacgtggaaggtgattgcagaggatgaggtgctgtggtacaggctgtgccagcaggaagggcaccttccggatagcagcatctctgactattcttgctggaagctcatcttccaagagtgccgagccaaggaacacatgttacgaaccaactggaagaatcgcaaaggtgccgtgagcgagctggagcatgttcctgacacagttttgtgtgatgtgcattctcacgatggtgtggtcattgcgggatatacatcaggggatgtgagagtgtgggacacccgcacctgggactacgtagcccccttcctggaatcagaggacgaggaggatgagcctggaatgcagccaaatgtctcctttgtgaggataaacagctcgttggcagtagcagcttatgaggatgggtttcttaatatttgggatttaaggaccggaaagtaccctgttcatcgttttgagcacgatgcaagaatacaggcactagccctcagccaggacgatgcaaccgtggccacagcttctgcttttgatgtcgtgatgttatcccccaatgaggaggggtactggcagatagctgcggaatttgaagttccgaaactggttcagtaccttgaaatagttccagaaaccagaaggtaccctgtggcagtagccgctgctggagatctgatgtacctgctcaaagccgaagactccgccagaaccctcctttacgcccacggcccgcctgtcacatgtctagacgtctcggccaaccaagttgcttttggtgtacagggtctgggatgggtgtacgaaggaagcaagatcctggtgtatagcctggaagcaggacgccgcctcttgaagctgggtaacgttctccgtgacttcacgtgtgtcaacctcagcgacagccctcccaacctcatggtcagtggcaacatggacgggagggtgaggatccacgacctccgcagtggtaacatcgccctgtcgctctccgcccatcagctcagggtctctgctgtgcagatggatgactggaagatcgtcagtggaggcgaggaaggcctggtgtccgtgtgggattatcggatgaaccagaagctgtgggaggtgtattccgggcacccggtgcagcacatctcattcagcagccacagcctcatcacggccaacgtgccttaccagacggtaatgcgaaacgccgacctggacagcttcactactcacaggagacaccgggggctgatccgcgcctatgagtttgcggtggaccagctggccttccagagccctctccctgtctgccgttcatcctgtgacgccatggccactcactactacgacctcgcactggcctttccctataaccatgtttagggatgtgcctcagttgggagcaaggagaaaaatgggaagaaccagttttatccatcttaaaacgccaggcacctcttcacaggtggtaaacatttaggggaagaaagcagcccagggtgccatgcctgacagcacgcatctccctgacccctgcacttcccccagcgcctggggcaagctggcgtgtgccagggctcgagtcccacgtgctgccaactcaaacatagcctccttccccacccagctggccaccctggcctcagctccctcaggacgcctcagggatctcgctgcgcggtcctatacggtccctgcttagccagcttctgtgtgtccgccctcccagctccagccctgcaggccgtcttttccgtctccagccccttacctcttttcctccgagggcctttggatgtgcttgttcctggcctccaaggcaataacctccatgtccttttccctgtatttacttggggtgctcttctgtgacacttgccaccaccaccttccagtagcaagctggtagagctgtactttttcttcacagcttttaccatggtttataattatatacttatacagtttagtcatcaatgactattttgcttactattgtgtctatgatatgtgatacaaagcaaatattttctaaatattcattgactaaacagccatcaagatgaaacaggacaggagagaactgttcagtgtgatacagagctgccatttccaaagtattctggaagcaagccattgccttactcttgattttcaacagttctaaacagcaacagcatccacctaatataccttcagaatatcaaagcgaaaactgatagaactacaaagagaaataaaatccattctcacggcaggcaaatcagtgagaaaaatgtaaagatctggaggatttacttagtatcgctaacaagctggatccagtagatgcgtatggaatttcaaatacacatagacgatgcacaaaaaaccaccctgtacgaaggccacaaagaacagctcagatgcacaaagattcacaccatacaggccaaattatagaatcccccaaccccaagacactgcaccctatgggctataccctcaggcagggccctgcttttctaggaattgactccaatgcagaatagtgagaaatcaacaaaaagcaaaataagacaattccagacactcctgaatttacttggatttaaagaggttaataaaaacaaactataaactctctagactgggctgacagtaaaagcacagaatacaaaacccaggggatggggctgggaggggctgtgaggggctggcacctcagctcagaaaaggtagcagcaatcccaaagcagcagaaggcaggggttaaatcaggataaaaacagacatcagtggaatcgaaaaccaatagttagttaatataaagccagaaggttttgttttttttcaggtggggtctcgctctgtcacctagactagactggagtgcaatggcctgatctcggctcactgcaacctctgcctcccgagttcaagcaattctcctgcctcagcctcctgagtagctgggattacaggcgtccgctaccacaactggctaatttttacatttttagtagagacgggggatattgctatgttggccaggctggtctcaaacttctgacctcaaatgattgcctgcctcagcctcccaaagtgctgggattacaggtgtaagtcactgtacccagcccaaaagcagtttaaaaaaaaaaaagacaaaatatacaactcttgataaaacataaaggtacagtggtctatgaggaagagaaaaggtacctgaggatgcagaagtacctaccacatgggaaccgtttgtccacactcattccagagaaaaccgagtcctctcagttgcacacgtgtacgtatcagtgggaagtgcttgccattactccaaagcctagaaccttcacgtcatgaaggttctggaaggtttttcagattgcttaagatacgcagccattccatattcatctccaactacacaggggaacggagcagatagagctgcgactgggaagcgtcaccttcccgtccagagcgctttctttcagaccctgcctacctgcaggcagatggaccggagggttttctgcttcctttcaaccagataacttcctaagtggagatggcctgtaggtagcaaatgcaggattttgtttactttcatcatgtcatgtggtggtcagactgctcgctggtggcctcgctttagaaggttttcatcaagccccgccctttctctctcatagtcttaatgcgtctggaccactggggaaaatatttttcttttcaaaaagcagccccttcagtctgcgttcccagttcattttgcaggcgcattcgcccttcctagtttgcagcaattaaagataacggagtgtaaagtcattagacccagaattagagcagccagcagctggcccagtgtaaaaatgtcccaagtgtagcccctcccaccgcagagcctgtttctaacgtacctgccattcgtggaagtcgcctgggttttgtaaaggagaattttttggactcaagctgtcatcttcaagcacgccaacttcaggcagtgttttctactgcaaacctccacatcctggaatcaatcacactgacagggaaaggataaatgctcctttataagccaacatgtatccaaattaagcccccttacctttatccagaccctttcacaaacaagttctgagtttttagccaattgatcctctactttccttctttagtccctctcagggacgcctccatccccggctcccctaaaggtagaagatactcgagcatgctgccaggggagctggatggtgaaacacctgaagatctcatatcgcctctcaaaacactgtcggacttgctttctgctttatgatgtccgtagttgttctaatattaaatgctttgaatttcaaaaaaaaaaaaaaaa

SEQ ID NO: 693 - DNA, 6829 bp, Homo sapiens
cttctctcccagggcggtgcgacccggagctccagcgcccgagtctccacttcgtttgctgaaacttgctttctaccagctaagaaccatgctgcgagtgattgtggaatctgccagcaatatccctaaaacgaaatttggcaagccggatcctattgtttctgtcatttttaaggatgagaaaaagaaaacaaagaaagttgataatgaattgaaccctgtctggaatgagattttggagtttgacttgaggggtataccactggacttttcatcttcccttgggattattgtgaaagattttgagacaattggacaaaataaattaattggcacggcgactgtagccctgaaggacctgactggtgaccagagcagatccctgccgtacaagctgatctccctgctaaatgaaaaagggcaagatactggggccaccattgacttggtgatcggctatgatccgccttctgctccacatccaaatgacctgagcgggcccagcgtgccaggcatgggaggagatggggaagaagatgaaggtgatgaagacaggttggacaatgcagtcaggggccctgggcccaaggggccagttgggacggtgtcggaagctcagcttgctcggaggctcaccaaagtaaagaacagccggcggatgctgtcaaataagccacaggacttccagatccgcgtccgagtgattgagggccgacagttaagtggtaacaacataaggcctgtggtcaaagttcacgtctgtggccagacacaccgaacaagaatcaagagaggaaacaaccctttttttgatgagttgtttttctacaatgtcaacatgaccccttctgaattgatggatgagatcatcagcatccgggtttataattctcactctctgcgggcagattgtctgatgggggaatttaagattgatgttggatttgtttatgatgaacctggccatgctgtcatgagaaagtggcttcttctcaatgacccggaagataccagttcaggttctaaaggttatatgaaagtcagcatgtttgtcctgggaaccggagatgagcctcctcctgagagacgagatcgtgataatgacagtgatgatgtggagagtaatttgttactccctgctggcattgccctccggtgggtgaccttcttgctgaaaatctaccgagctgaggacatcccccagatggatgatgccttctcacagacagtaaaggaaatatttggaggcaatgcagataagaaaaatctcgtggatccttttgtagaagtttcctttgctggaaaaaaggtttgtacaaacataattgagaaaaatgcaaacccagagtggaatcaggtcgtcaatcttcagatcaagtttccttcagtgtgtgaaaaaataaaactaacaatatatgactgggaccgtcttactaaaaatgatgtagttggaacaacatatctacacctctctaaaattgctgcctctggtggggaagtggaagatttctcatcttcgggaactggggctgcatcatatacagtaaacacaggagaaacagaggtaggctttgttccaacgtttggaccttgttacctgaatctttatggaagccccagggagtacacgggattcccagacccctatgatgagctgaatactggaaagggggaaggagttgcctacagaggcaggatcttggttgaattagccacttttcttgagaagacaccaccagataaaaagcttgagcccatttcaaatgatgacctgctggttgttgagaaataccagcgaaggcggaagtacagcctgtctgccgtgtttcattcagccaccatgttgcaagatgttggtgaggccattcagtttgaagtcagcattgggaactatggcaacaagtttgacaccacctgtaagcctttggcatcaacaactcagtacagccgtgctgtatttgatggcaactactattattacttgccttgggcccacaccaagccagttgttaccctgacttcatactgggaggatattagtcatcgcctggatgcggtgaacactctcctagctatggcagaacggctgcaaacaaatatagaagctctaaaatcagggatacaaggtaaaattcctgcaaaccagctggctgaattgtggctgaagctgatagatgaagttatagaagacacgagatacacgttgcctctcacagaaggaaaagccaacgtcacagttctcgatactcagatccgaaagctgcggtccaggtctctctcccaaatacatgaggcggctgtgaggatgaggtcggaagccacagatgtgaagtccacactggcagaaattgaggactggcttgataaattaatgcagctgactgaagagccacagaacagcatgcctgacatcatcatctggatgatccggggagagaagagactggcctatgcacgaattcccgcacatcaggtcttgtactccaccagtggtgagaatgcatctggaaaatactgtgggaaaacccaaaccatctttctgaagtatccacaggagaaaaacaacgggccaaaggtgcctgtggagttgcgagtgaacatctggctaggcttaagtgctgtggagaagaagtttaacagcttcgcagaaggaactttcaccgtctttgctgaaatgtatgaaaatcaagctctcatgtttggaaaatggggtacttctggattagtaggacgtcataagttttctgatgtcacaggaaaaataaaactcaagagggaattttttctgcctccaaaaggctgggaatgggaaggagagtggatagttgatcctgaaagaagcttgctgactgaggcagatgcaggtcacacggagttcactgatgaagtctatcagaacgagagccgctaccccgggggcgactggaagccggccgaggacacctacacggatgcgaacggcgataaagcagcatcacccagcgagttgacttgtcctccaggttgggaatgggaagatgatgcatggtcttatgacataaatcgagcggtggatgagaaaggctgggaatatggaatcaccattcctcctgatcataagcccaaatcctgggttgcagcagagaaaatgtaccacactcatagacggcgaaggctggtccgaaaacgcaagaaagatttaacacagactgcttcaagcaccgcaagggccatggaggaattgcaagaccaagagggctgggaatatgcttctctaattggctggaaatttcactggaaacaacgtagttcagataccttccgccgcagacgctggaggagaaaaatggctccttcagaaacacatggtgcagctgccatctttaaacttgaaggtgcccttggggcagacactaccgaagatggggatgagaagagcctggagaaacagaagcacagtgccaccactgtgttcggagcaaacacccccattgtttcctgcaattttgacagagtctacatctaccatctgcgctgctatgtctatcaagccagaaacctcttggctttagataaggatagcttttcagatccatatgctcatatctgtttcctccatcggagcaaaaccactgagatcatccattcaaccctgaatcccacgtgggaccaaacaattatattcgatgaagttgaaatctatggggaaccccaaacagttctacagaatccacccaaagttatcatggaactttttgacaatgaccaagtgggcaaagatgaatttttaggacgaagcattttctctcctgtggtgaaactgaactcagaaatggacatcacacccaaacttctctggcacccagtaatgaatggagacaaagcctgcggggatgttcttgtaactgcagagctgattctgaggggcaaggatggctccaaccttcccattcttccccctcaaagggcgccaaatctatacatggtcccccaggggatcaggcctgtggtccagctcactgccattgagattctagcttggggcttaagaaatatgaaaaacttccagatggcttctatcacatcccccagtcttgttgtggagtgtggaggagaaagggtggaatcggtggtgatcaaaaaccttaagaagacacccaactttccaagttctgttctcttcatgaaagtgttcttgcccaaggaggaattgtacatgcccccactggtgatcaaggtcatcgaccacaggcagtttgggcggaagcctgtcgtcggccagtgcaccatcgagcgcctggaccgctttcgctgtgacccttatgcagggaaagaggacatcgtcccacagctcaaagcctcccttctgtctgccccaccatgccgggacatcgttatcgaaatggaagacaccaaaccattactggcttctaagctgacagaaaaggaggaagaaatcgtggactggtggagtaaattttatgcttcctcaggggaacatgaaaaatgcggacagtatattcagaaaggctattccaagctcaagatatataattgtgaactagaaaatgtagcagaatttgagggcctgacagacttctcagatacgttcaagttgtaccgaggcaagtcggatgaaaatgaagatccttctgtggttggagagtttaagggctcctttcggatctaccctctgccggatgaccccagcgtgccagcccctcccagacagtttcgggaattacctgacagcgtcccacaggaatgcacggttaggatttacattgttcgaggcttagagctccagccccaggacaacaatggcctgtgtgacccttacataaaaataacactgggcaaaaaagtcattgaagaccgagatcactacattcccaacactctcaacccagtctttggcaggatgtacgaactgagctgctacttacctcaagaaaaagacctgaaaatttctgtctatgattatgacacctttacccgggatgaaaaagtaggagaaacaattattgatctggaaaaccgattcctttcccgctttgggtcccactgcggcataccagaggagtactgtgtttctggagtcaatacctggcgagatcaactgagaccaacacagctgcttcaaaatgtcgccagattcaaaggcttcccacaacccatcctttccgaagatgggagtagaatcagatatggaggacgagactacagcttggatgaatttgaagccaacaaaatcctgcaccagcacctcggggcccctgaagagcggcttgctcttcacatcctcaggactcaggggctggtccctgagcacgtggaaacaaggactttgcacagcaccttccagcccaacatttcccagggaaaacttcagatgtgggtggatgttttccccaagagtttggggccaccaggccctcctttcaacatcacaccccggaaagccaagaaatactacctgcgtgtgatcatctggaacaccaaggacgttatcttggacgagaaaagcatcacaggagaggaaatgagtgacatctacgtcaaaggctggattcctggcaatgaagaaaacaaacagaaaacagatgtccattacagatctttggatggtgaagggaattttaactggcgatttgttttcccgtttgactaccttccagccgaacaactctgtatcgttgcgaaaaaagagcatttctggagtattgaccaaacggaatttcgaatcccacccaggctgatcattcagatatgggacaatgacaagttttctctggatgactacttgggtttcctagaacttgacttgcgtcacacgatcattcctgcaaaatcaccagagaaatgcaggttggacatgattccggacctcaaagccatgaacccccttaaagccaagacagcctccctctttgagcagaagtccatgaaaggatggtggccatgctacgcagagaaagatggcgcccgcgtaatggctgggaaagtggagatgacattggaaatcctcaacgagaaggaggccgacgagaggccagccgggaaggggcgggacgaacccaacatgaaccccaagctggacttaccaaatcgaccagaaacctccttcctctggttcaccaacccatgcaagaccatgaagttcatcgtgtggcgccgctttaagtgggtcatcatcggcttgctgttcctgcttatcctgctgctcttcgtggccgtgctcctctactctttgccgaactatttgtcaatgaagattgtaaagccaaatgtgtaacaaaggcaaaggcttcatttcaagagtcatccagcaatgagagaatcctgcctctgtagaccaacatccagtgtgattttgtgtctgagaccacaccccagtagcaggttacgccatgtcaccgagccccattgattcccagagggtcttagtcctggaaagtcaggccaacaagcaacgtttgcatcatgttatctcttaagtattaaaagttttattttctaaagtttaaatcatgtttttcaaaatatttttcaaggtggctggttccatttaaaaatcatctttttatatgtgtcttcggttctagacttcagcttttggaaattgctaaatagaattcaaaaatctctgcatcctgaggtgatatacttcatatttgtaatcaactgaaagagctgtgcattataaaatcagttagaatagttagaacaattcttatttatgcccacaaccattgctatattttgtatggatgtcataaaagtctatttaacctctgtaatgaaactaaataaaaatgtttcacctttaaaaaaaaaaaaaaaaaaaaaa

SEQ ID NO: 694 - DNA, 6790 bp, Homo sapiens
cttctctcccagggcggtgcgacccggagctccagcgcccgagtctccacttcgtttgctgaaacttgctttctaccagctaagaaccatgctgcgagtgattgtggaatctgccagcaatatccctaaaacgaaatttggcaagccggatcctattgtttctgtcatttttaaggatgagaaaaagaaaacaaagaaagttgataatgaattgaaccctgtctggaatgagattttggagtttgacttgaggggtataccactggacttttcatcttcccttgggattattgtgaaagattttgagacaattggacaaaataaattaattggcacggcgactgtagccctgaaggacctgactggtgaccagagcagatccctgccgtacaagctgatctccctgctaaatgaaaaagggcaagatactggggccaccattgacttggtgatcggctatgatccgccttctgctccacatccaaatgacctgagcgggcccagcgtgccaggcatgggaggagatggggaagaagatgaaggtgatgaagacaggttggacaatgcagtcaggggccctgggcccaaggggccagttgggacggtgtcggaagctcagcttgctcggaggctcaccaaagtaaagaacagccggcggatgctgtcaaataagccacaggacttccagatccgcgtccgagtgattgagggccgacagttaagtggtaacaacataaggcctgtggtcaaagttcacgtctgtggccagacacaccgaacaagaatcaagagaggaaacaaccctttttttgatgagttgtttttctacaatgtcaacatgaccccttctgaattgatggatgagatcatcagcatccgggtttataattctcactctctgcgggcagattgtctgatgggggaatttaagattgatgttggatttgtttatgatgaacctggccatgctgtcatgagaaagtggcttcttctcaatgacccggaagataccagttcaggttctaaaggttatatgaaagtcagcatgtttgtcctgggaaccggagatgagcctcctcctgagagacgagatcgtgataatgacagtgatgatgtggagagtaatttgttactccctgctggcattgccctccggtgggtgaccttcttgctgaaaatctaccgagctgaggacatcccccagatggatgatgccttctcacagacagtaaaggaaatatttggaggcaatgcagataagaaaaatctcgtggatccttttgtagaagtttcctttgctggaaaaaaggtttgtacaaacataattgagaaaaatgcaaacccagagtggaatcaggtcgtcaatcttcagatcaagtttccttcagtgtgtgaaaaaataaaactaacaatatatgactgggaccgtcttactaaaaatgatgtagttggaacaacatatctacacctctctaaaattgctgcctctggtggggaagtggaagtaaacacaggagaaacagaggtaggctttgttccaacgtttggaccttgttacctgaatctttatggaagccccagggagtacacgggattcccagacccctatgatgagctgaatactggaaagggggaaggagttgcctacagaggcaggatcttggttgaattagccacttttcttgagaagacaccaccagataaaaagcttgagcccatttcaaatgatgacctgctggttgttgagaaataccagcgaaggcggaagtacagcctgtctgccgtgtttcattcagccaccatgttgcaagatgttggtgaggccattcagtttgaagtcagcattgggaactatggcaacaagtttgacaccacctgtaagcctttggcatcaacaactcagtacagccgtgctgtatttgatggcaactactattattacttgccttgggcccacaccaagccagttgttaccctgacttcatactgggaggatattagtcatcgcctggatgcggtgaacactctcctagctatggcagaacggctgcaaacaaatatagaagctctaaaatcagggatacaaggtaaaattcctgcaaaccagctggctgaattgtggctgaagctgatagatgaagttatagaagacacgagatacacgttgcctctcacagaaggaaaagccaacgtcacagttctcgatactcagatccgaaagctgcggtccaggtctctctcccaaatacatgaggcggctgtgaggatgaggtcggaagccacagatgtgaagtccacactggcagaaattgaggactggcttgataaattaatgcagctgactgaagagccacagaacagcatgcctgacatcatcatctggatgatccggggagagaagagactggcctatgcacgaattcccgcacatcaggtcttgtactccaccagtggtgagaatgcatctggaaaatactgtgggaaaacccaaaccatctttctgaagtatccacaggagaaaaacaacgggccaaaggtgcctgtggagttgcgagtgaacatctggctaggcttaagtgctgtggagaagaagtttaacagcttcgcagaaggaactttcaccgtctttgctgaaatgtatgaaaatcaagctctcatgtttggaaaatggggtacttctggattagtaggacgtcataagttttctgatgtcacaggaaaaataaaactcaagagggaattttttctgcctccaaaaggctgggaatgggaaggagagtggatagttgatcctgaaagaagcttgctgactgaggcagatgcaggtcacacggagttcactgatgaagtctatcagaacgagagccgctaccccgggggcgactggaagccggccgaggacacctacacggatgcgaacggcgataaagcagcatcacccagcgagttgacttgtcctccaggttgggaatgggaagatgatgcatggtcttatgacataaatcgagcggtggatgagaaaggctgggaatatggaatcaccattcctcctgatcataagcccaaatcctgggttgcagcagagaaaatgtaccacactcatagacggcgaaggctggtccgaaaacgcaagaaagatttaacacagactgcttcaagcaccgcaagggccatggaggaattgcaagaccaagagggctgggaatatgcttctctaattggctggaaatttcactggaaacaacgtagttcagataccttccgccgcagacgctggaggagaaaaatggctccttcagaaacacatggtgcagctgccatctttaaacttgaaggtgcccttggggcagacactaccgaagatggggatgagaagagcctggagaaacagaagcacagtgccaccactgtgttcggagcaaacacccccattgtttcctgcaattttgacagagtctacatctaccatctgcgctgctatgtctatcaagccagaaacctcttggctttagataaggatagcttttcagatccatatgctcatatctgtttcctccatcggagcaaaaccactgagatcatccattcaaccctgaatcccacgtgggaccaaacaattatattcgatgaagttgaaatctatggggaaccccaaacagttctacagaatccacccaaagttatcatggaactttttgacaatgaccaagtgggcaaagatgaatttttaggacgaagcattttctctcctgtggtgaaactgaactcagaaatggacatcacacccaaacttctctggcacccagtaatgaatggagacaaagcctgcggggatgttcttgtaactgcagagctgattctgaggggcaaggatggctccaaccttcccattcttccccctcaaagggcgccaaatctatacatggtcccccaggggatcaggcctgtggtccagctcactgccattgagattctagcttggggcttaagaaatatgaaaaacttccagatggcttctatcacatcccccagtcttgttgtggagtgtggaggagaaagggtggaatcggtggtgatcaaaaaccttaagaagacacccaactttccaagttctgttctcttcatgaaagtgttcttgcccaaggaggaattgtacatgcccccactggtgatcaaggtcatcgaccacaggcagtttgggcggaagcctgtcgtcggccagtgcaccatcgagcgcctggaccgctttcgctgtgacccttatgcagggaaagaggacatcgtcccacagctcaaagcctcccttctgtctgccccaccatgccgggacatcgttatcgaaatggaagacaccaaaccattactggcttctaagctgacagaaaaggaggaagaaatcgtggactggtggagtaaattttatgcttcctcaggggaacatgaaaaatgcggacagtatattcagaaaggctattccaagctcaagatatataattgtgaactagaaaatgtagcagaatttgagggcctgacagacttctcagatacgttcaagttgtaccgaggcaagtcggatgaaaatgaagatccttctgtggttggagagtttaagggctcctttcggatctaccctctgccggatgaccccagcgtgccagcccctcccagacagtttcgggaattacctgacagcgtcccacaggaatgcacggttaggatttacattgttcgaggcttagagctccagccccaggacaacaatggcctgtgtgacccttacataaaaataacactgggcaaaaaagtcattgaagaccgagatcactacattcccaacactctcaacccagtctttggcaggatgtacgaactgagctgctacttacctcaagaaaaagacctgaaaatttctgtctatgattatgacacctttacccgggatgaaaaagtaggagaaacaattattgatctggaaaaccgattcctttcccgctttgggtcccactgcggcataccagaggagtactgtgtttctggagtcaatacctggcgagatcaactgagaccaacacagctgcttcaaaatgtcgccagattcaaaggcttcccacaacccatcctttccgaagatgggagtagaatcagatatggaggacgagactacagcttggatgaatttgaagccaacaaaatcctgcaccagcacctcggggcccctgaagagcggcttgctcttcacatcctcaggactcaggggctggtccctgagcacgtggaaacaaggactttgcacagcaccttccagcccaacatttcccagggaaaacttcagatgtgggtggatgttttccccaagagtttggggccaccaggccctcctttcaacatcacaccccggaaagccaagaaatactacctgcgtgtgatcatctggaacaccaaggacgttatcttggacgagaaaagcatcacaggagaggaaatgagtgacatctacgtcaaaggctggattcctggcaatgaagaaaacaaacagaaaacagatgtccattacagatctttggatggtgaagggaattttaactggcgatttgttttcccgtttgactaccttccagccgaacaactctgtatcgttgcgaaaaaagagcatttctggagtattgaccaaacggaatttcgaatcccacccaggctgatcattcagatatgggacaatgacaagttttctctggatgactacttgggtttcctagaacttgacttgcgtcacacgatcattcctgcaaaatcaccagagaaatgcaggttggacatgattccggacctcaaagccatgaacccccttaaagccaagacagcctccctctttgagcagaagtccatgaaaggatggtggccatgctacgcagagaaagatggcgcccgcgtaatggctgggaaagtggagatgacattggaaatcctcaacgagaaggaggccgacgagaggccagccgggaaggggcgggacgaacccaacatgaaccccaagctggacttaccaaatcgaccagaaacctccttcctctggttcaccaacccatgcaagaccatgaagttcatcgtgtggcgccgctttaagtgggtcatcatcggcttgctgttcctgcttatcctgctgctcttcgtggccgtgctcctctactctttgccgaactatttgtcaatgaagattgtaaagccaaatgtgtaacaaaggcaaaggcttcatttcaagagtcatccagcaatgagagaatcctgcctctgtagaccaacatccagtgtgattttgtgtctgagaccacaccccagtagcaggttacgccatgtcaccgagccccattgattcccagagggtcttagtcctggaaagtcaggccaacaagcaacgtttgcatcatgttatctcttaagtattaaaagttttattttctaaagtttaaatcatgtttttcaaaatatttttcaaggtggctggttccatttaaaaatcatctttttatatgtgtcttcggttctagacttcagcttttggaaattgctaaatagaattcaaaaatctctgcatcctgaggtgatatacttcatatttgtaatcaactgaaagagctgtgcattataaaatcagttagaatagttagaacaattcttatttatgcccacaaccattgctatattttgtatggatgtcataaaagtctatttaacctctgtaatgaaactaaataaaaatgtttcacctttaaaaaaaaaaaaaaaaaaaaaa

SEQ ID NO: 695 - DNA, 4024 bp, Homo sapiens
tgcccctctgtcactgcaagccatgcatgcatgtgtggagttgctgggaggaccacacctggcgcctgcagagcagcaactgcgtgcgcaaagtggccgagaggctggaccaggggctgcaggaggttgagagactgcagcgcaagccggggcctggcgcctgtgcacagctcaagcaggcactggaagtgctggtggctgggagcagacagttttgccacggtgccgagcgcaggacgatgacccggcccaatgccctggatcgatgccgagggaaactcctggtgcacagcctgaaccttttggctaagcaaggactgcgacttctacgcagcctgagacggcgcaatgtgcaaaagaaggtggcactggccaagaagctcctggcaaaactgcgctttctggctgaggagcacaactttgatgaagatgaaatggatgatcctggagattcagatggggtcaacctcatttctatggttggggagatccaagaccagggtgaggctgaagtcaaaggcactgtgtccccaaaaaaagcagttgccaccctgaagatctacaacaggtccctggaggaagaatttaaccactttgaagactggctgaatgtgtttcctctgtaccgagggcaagggggccaggatggaggtggagaagaggaaggatctggacaccttgtgggcaagttcaagggctccttcctcatttaccctgaatcagaggcagtgttgttctctgagccccagatctcccgggggatcccacagaaccggcccatcaagctcctggtcagagtgtatgttgtaaagctaagaaacctttgcaaaatccaaggtcatgaagacttttgcctgttttctgctgctaccaacctggctcctgcagaccccaatggcaaagcagacccttacgtggtggtgagcgctggccgggagcggcaggacaccaaggaacgctacatccccaagcagctcaaccccatctttggagagatcctggagctaagcatctctctcccagctgagacggagctgacggtcgccgtatttgatcatgacctcgtgggttctgacgacctcatcggggagacccacattgatctggaaaaccgattctatagccaccacagagcaaactgtggactggcctcccagtatgaagtgtgggtccagcagggcccacaggagccattctgagtttctggccaaacacattcaagctcacattcccttttgtgtctccagatcctatgatttcatggaaggggaccctcccacccaccgccactgccaaccaagacatagctcagtggtcaagacttgggcttgggagtcgggatcctgtaacgaatgtcacttgaccgctttctttttttatgaaacagtctcgctctgtctcccaggttggagtgcagtggcacgatctcggctgactgcaacctccacctcctgggttcaagcgattctcctgcctcagcctccccagtagctgggattacaggcgtgggcccccatgtccagctaatttttatattttcgctctgtctcccaggttggagtgcagtggcacgatctcggctgactgcaacctccacctcctgggttcaagcgattctcctgcctcagcctccccagtagctgggattacaggcgtgggcccccatgtccagctaatttttatatttttagtagagacagggtttcaccatgttgtccaggctggtcttgaacccctgacctcaagtgatccacccacctctgcctcccaaagtgctgggattacaggtgtgagccaccatgccaggcccacttaacctcttcaagtctgttttctcatctgcaaaacagaggtaataagatcagtatcttcttaatggaagcacctggactacatttttttcattcattgttatcataaatgaggactaacctgtctcccgttgggagttttgaacctagacctcatgtcttcatgacgtcatcactgccccaggcccagctgtgtccctacaccagccccagctgacgcatcttctttttctgcctgtagagatggttacaatgcctggcgtgatgcattctggccttcgcagatcctggcggggctgtgccaacgctgtggcctccctgcccctgaataccgagccggtgctgtcaaggtgggcagcaaagtcttcctgacaccaccggagaccctgcccccagggatctcttcacatgtggattgacatctttcctcaagatgtgcctgctccacccccagttgacatcaagcctcggcagccaatcagctatgagctcagagttgtcatctggaacacggaggatgtggttctggatgacgagaatccactcaccggagagatgtcgagtgccatctatgtgaagaggtaggctgctggccgggcggggcaacggcggtgcactagggggattgcaaatgggtgtgggccctcgggctgagtccagagccccgaccccaggccctccgtggtgctgagagcggggtgaggagtgggttctccatgtagctccagccctgacgctcacccaccccggccccagctgggtgaaggggttggagcatgacaagcaggagacagacgttcacttcaactccctgactggggaggggaacttcaattggcgctttgtgttccgctttgactacctgcccacggagcgggaggtgagcatccggcgcaggtctggaccctttgccctggaggaggcggagttccggcagcctgcagtgctggtcctgcaggtctgggactatgaccgcatctctgccaatgacttccttggtattacaatgcttagccttccccaccctcagcccctgcctccagccctcacctccgcccctgcctccagccctcacttccgtcccccagttccctactctgacccaaccttgaatcttgggattttggacccgaggtgtgaaacctttgctttctggcctaattactgagttaattaggcctagaccacagtaacctccattcccacccagagtctctgattcaactctgatttgaccctagcttgtcaccctgacaccgactccacagcctttggtccttggcactctgatcccgacccttggccctcttccactgggaagtagcaatgggtggaccgctgggctgtggtctgggtggtctatagctgtggcctgaccgcacactgcaacaactttcaatgccccaatttacaaccttggtgtgttgcctcctcacccctggcacaatgagactttgatcccatgcctaatctggtgtgctctggacttgcaggatccctggagttgcagctaccagacatggtgcgtggggcccggggccccgagctctgctctgtgcagctggcccgcaatggggccgggccgaggtgcaatctgtttcgctgccgccgcctgaggggctggtggccggtagtgaagctgaaggaggcagaggacgtggagcgggaggcgcaggaggctcaggctggcaagaagaagcgaaagcagaggaggaggaagggccggccagaagacctggagttcacagacatgggtggcaatgtgtacatcctcacgggcaaggtggaggcagagtttgagctgctgactgtggaggaggccgagaaacggccagtggggaaggggcggaagcagccagagcctctggagaaacccagccgccccaaaacttccttcaactggtttgtgaacccgctgaaggcctttgtcttcttcatctggcgccggtactggcgcaccctggtgctgctgctactggtgctgctcaccgtcttcctcctcctggtcttctacaccatccctggccagatcagccaggtcatcttccgtcccctccacaagtgactctcgctgaccttggacactcacccagggtgccaacccttcaatgcctgctcctggaagtctttcttacccatgtgagctaccccagagtctagtgcttcctctgaataaacctatcacagccactgaaaaaaaaaaaaaaaaaaaa

SEQ ID NO: 696 - DNA, 2931 bp, Homo sapiens
attatccttgctgggctgggaagtggggaaagcaggggagcctgtgctgggtgagattatctgcaatggaccgggttaatgggaggcttgctttggctcgctggaagaacaaatgaagggagttttacttcaaccatttgtgacttctggccaagaggaataaattcagcttttataaggcagcagtacctgtccaaagatcgctttagttccaccttgctccacaagcagcacaaccacactggttggtgagaatgtatctgaagaagaggctcagggagtaaatgggaacaggccagcaaaacactcagctgcaagtccaaagccacaagtgcctccaaagccattacacctgcagaattcaccttcgtccaatatacaccaaacccccaggcataaagctttacctagtgcaaaaccaaggatggaggaaattaaacctgcctctgcttcttgtgtctcaaaagaaaaacccagtaaggtatcagatctcatcagtcgctttgaaggaggcagctcattatcaaattatagtgatttgaagaaagagtctgctgtgaacctaaatgctcctagaaccccaggaaggcatggattgacaaccacacctcaacaaaaactcctctcccagcacttgccacagaggcagggaaatgatgcagataagactcagggtgcacagacttgtgtggccaacggtgtaatggcagcacaaaaccagatggaatgtgaggaggagaaagctgccactcttagctcagatacttctattcaagcttctgaacccttgcttgatacgcacatagtgaatggagaaagagatgaaactgccacagctcctgcatcacccacaacagatagctgtgatggaaatgcttctgacagtagctacaggactccaggcataggcccagtgctccccctagaagaaagaggggcagaaacagaaaccaaggtacaagagagggaaaatggggaaagccctctggaactggagcagctggaccagcaccatgagatgaaggagactaatgagcaaaaacttcacaaaatagccaatgaacttttgcttactgaaagagcttatgtcaaccgacttgacctcttagatcaggtattttattgcaaactgttggaagaagcaaaccgaggctcgtttccagcagagatggtgaataaaatcttttccaatatttcatcaataaatgccttccatagtaaattcctcttgccagagctggagaaacgaatgcaagaatgggaaactactcctagaattggagacatccttcagaaattggcaccattccttaagatgtatggagaatatgtgaaaggatttgataatgcaatggaattggttaaaaacatgacagaacgtattccccagttcaaatcagtggttgaagaaattcagaaacagaaaatctgtgggagcttaactttgcagcatcacatgctagaacctgttcagcggattccccggtatgagatgctccttaaggactatctaaggaaattgcctcctgattccctggactggaatgatgctaaaaaatcacttgaaattatatctacagcagcaagccattctaatagtgcaataaggaaaatggagaacctaaagaaactcttagagatttatgaaatgttgggagaagaagaagacattgtaaacccttcaaatgaactaataaaagaaggacagatcctcaaactagctgctcggaacacttcagcacaagaacgctaccttttcttattcaacaacatgttgctgtactgtgtgcccaaattcagcttggtaggctctaaattcacagttcgaaccagggttggcattgatggaatgaaaattgtagagactcaaaatgaagaatatccacatactttccaggtgtctgggaaagagagaacactggaactgcaggccagttctgcgcaagacaaagaagaatggatcaaggcccttcaagaaaccatcgatgcttttcatcaaaggcatgaaaccttcagaaatgcaattgcaaaggataatgacattcactcagaggtttctactgctgagctagggaaaagagccccaagatggatccgagataatgaagtgacaatgtgtatgaaatgtaaagaacctttcaatgcactgacacgaaggaggcatcattgtcgagcatgtggatatgtggtttgttggaaatgctccgactacaaagctcaacttgaatatgatggtggtaaattgagcaaagtttgtaaagactgttatcaaatcataagtggattcacagacagtgaagaaaagaaaagaaaaggaattttagagattgaatcagcagaagtatctggaaacagtgtggtgtgcagctttcttcagtatatggagaagtcaaaaccttggcagaaagcttggtgtgtgatccccaagcaagaccctcttgtgctgtacatgtatggtgccccccaggacgtcagagcccaggccaccattccacttctgggctatgtggtggatgaaatgccaaggagcgcagacctgccacacagtttcaaactgacccagtctaagtccgtgcacagctttgctgcagacagtgaggaactgaagcagaagtggctgaaagtcatccttttagctgtcacaggtgagacaccaggtggtccaaatgagcatccagccaccttggatgatcatcctgaacctaagaaaaaatcagaatgctgaactcctccaggaccagccatggtgtggaggtctcaggacttacagctcaagacattcccagctcttcttacacatctgctagcactttatgttgaaaaatataggcccataaatgcatcttttgaggactattttcctatgtttatgtactcttagtgaaattagtgtgcagagtcattctaccgataaagttttgaaataatgtg

SEQ ID NO: 697 - DNA, 513 bp, Homo sapiens
atgcgccgccgcctgtggctgggcctggcctggctgctgctggcgcgggcgccggacgccgcgggaaccccgagcgcgtcgcggggaccgcgcagctacccgcacctggagggcgacgtgcgctggcggcgcctcttctcctccactcacttcttcctgcgcgtggatcccggcggccgcgtgcagggcacccgctggcgccacggccaggacagcatcctggagatccgctctgtacacgtgggcgtcgtggtcatcaaagcagtgtcctcaggcttctacgtggccatgaaccgccggggccgcctctacgggtcgcgactctacaccgtggactgcaggttccgggagcgcatcgaagagaacggccacaacacctacgcctcacagcgctggcgccgccgcggccagcccatgttcctggcgctggacaggaggggggggccccggccaggcggccggacgcggcggtaccacctgtccgcccacttcctgcccgtcctggtctcctga

SEQ ID NO: 698 - DNA, 3040 bp, Homo sapiens
ctcgctcccggccgaggagcgctcgggctgtctgcggaccctgccgcgtgcaggggtcgcggccggctggagctgggagtgaggcggcggaggagccaggtgaggaggagccaggaaggcagttggtgggaagtccagcttgggtccctgagagctgtgagaaggagatgcggctgctgctggccctgttgggggtcctgctgagtgtgcctgggcctccagtcttgtccctggaggcctctgaggaagtggagcttgagccctgcctggctcccagcctggagcagcaagagcaggagctgacagtagcccttgggcagcctgtgcgtctgtgctgtgggcgggctgagcgtggtggccactggtacaaggagggcagtcgcctggcacctgctggccgtgtacggggctggaggggccgcctagagattgccagcttcctacctgaggatgctggccgctacctctgcctggcacgaggctccatgatcgtcctgcagaatctcaccttgattacaggtgactccttgacctccagcaacgatgatgaggaccccaagtcccatagggacccctcgaataggcacagttacccccagcaagcaccctactggacacacccccagcgcatggagaagaaactgcatgcagtacctgcggggaacaccgtcaagttccgctgtccagctgcaggcaaccccacgcccaccatccgctggcttaaggatggacaggcctttcatggggagaaccgcattggaggcattcggctgcgccatcagcactggagtctcgtgatggagagcgtggtgccctcggaccgcggcacatacacctgcctggtagagaacgctgtgggcagcatccgctataactacctgctagatgtgctggagcggtccccgcaccggcccatcctgcaggccgggctcccggccaacaccacagccgtggtgggcagcgacgtggagctgctgtgcaaggtgtacagcgatgcccagccccacatccagtggctgaagcacatcgtcatcaacggcagcagcttcggagccgacggtttcccctatgtgcaagtcctaaagactgcagacatcaatagctcagaggtggaggtcctgtacctgcggaacgtgtcagccgaggacgcaggcgagtacacctgcctcgcaggcaattccatcggcctctcctaccagtctgcctggctcacggtgctgccagaggaggaccccacatggaccgcagcagcgcccgaggccaggtatacggacatcatcctgtacgcgtcgggctccctggccttggctgtgctcctgctgctggccgggctgtatcgagggcaggcgctccacggccggcacccccgcccgcccgccactgtgcagaagctctcccgcttccctctggcccgacagttctccctggagtcaggctcttccggcaagtcaagctcatccctggtacgaggcgtgcgtctctcctccagcggccccgccttgctcgccggcctcgtgagtctagatctacctctcgacccactatgggagttcccccgggacaggctggtgcttgggaagcccctaggcgagggctgctttggccaggtagtacgtgcagaggcctttggcatggaccctgcccggcctgaccaagccagcactgtggccgtcaagatgctcaaagacaacgcctctgacaaggacctggccgacctggtctcggagatggaggtgatgaagctgatcggccgacacaagaacatcatcaacctgcttggtgtctgcacccaggaagggcccctgtacgtgatcgtggagtgcgccgccaagggaaacctgcgggagttcctgcgggcccggcgccccccaggccccgacctcagccccgacggtcctcggagcagtgaggggccgctctccttcccagtcctggtctcctgcgcctaccaggtggcccgaggcatgcagtatctggagtcccggaagtgtatccaccgggacctggctgcccgcaatgtgctggtgactgaggacaatgtgatgaagattgctgactttgggctggcccgcggcgtccaccacattgactactataagaaaaccagcaacggccgcctgcctgtgaagtggatggcgcccgaggccttgtttgaccgggtgtacacacaccagagtgacgtgtggtcttttgggatcctgctatgggagatcttcaccctcgggggctccccgtatcctggcatcccggtggaggagctgttctcgctgctgcgggagggacatcggatggaccgacccccacactgccccccagagctgtacgggctgatgcgtgagtgctggcacgcagcgccctcccagaggcctaccttcaagcagctggtggaggcgctggacaaggtcctgctggccgtctctgaggagtacctcgacctccgcctgaccttcggaccctattccccctctggtggggacgccagcagcacctgctcctccagcgattctgtcttcagccacgaccccctgccattgggatccagctccttccccttcgggtctggggtgcagacatgagcaaggctcaaggctgtgcaggcacataggctggtggccttgggccttggggctcagccacagcctgacacagtgctcgaccttgatagcatggggcccctggcccagagttgctgtgccgtgtccaagggccgtgcccttgcccttggagctgccgtgcctgtgtcctgatggcccaaatgtcagggttctgctcggcttcttggaccttggcgcttagtccccatcccgggtttggctgagcctggctggagagctgctatgctaaacctcctgcctcccaataccagcaggaggttctgggcctctgaaccccctttccccacacctccccctgctgctgctgccccagcgtcttgacgggagcattggcccctgagcccagagaagctggaagcctgccgaaaacaggagcaaatggcgttttataaattatttttttgaaataaaaaaaaaaaaaaaaa

SEQ ID NO: 699 - DNA, 2807 bp, Homo sapiens
gaaggcagttggtgggaagtccagcttgggtccctgagagctgtgagaaggagatgcggctgctgctggccctgttgggggtcctgctgagtgtgcctgggcctccagtcttgtccctggaggcctctgaggaagtggagcttgagccctgcctggctcccagcctggagcagcaagagcaggagctgacagtagcccttgggcagcctgtgcgtctgtgctgtgggcgggctgagcgtggtggccactggtacaaggagggcagtcgcctggcacctgctggccgtgtacggggctggaggggccgcctagagattgccagcttcctacctgaggatgctggccgctacctctgcctggcacgaggctccatgatcgtcctgcagaatctcaccttgattacaggtgactccttgacctccagcaacgatgatgaggaccccaagtcccatagggacccctcgaataggcacagttacccccagcaagcaccctactggacacacccccagcgcatggagaagaaactgcatgcagtacctgcggggaacaccgtcaagttccgctgtccagctgcaggcaaccccacgcccaccatccgctggcttaaggatggacaggcctttcatggggagaaccgcattggaggcattcggctgcgccatcagcactggagtctcgtgatggagagcgtggtgccctcggaccgcggcacatacacctgcctggtagagaacgctgtgggcagcatccgctataactacctgctagatgtgctggagcggtccccgcaccggcccatcctgcaggccgggctcccggccaacaccacagccgtggtgggcagcgacgtggagctgctgtgcaaggtgtacagcgatgcccagccccacatccagtggctgaagcacatcgtcatcaacggcagcagcttcggagccgacggtttcccctatgtgcaagtcctaaagactgcagacatcaatagctcagaggtggaggtcctgtacctgcggaacgtgtcagccgaggacgcaggcgagtacacctgcctcgcaggcaattccatcggcctctcctaccagtctgcctggctcacggtgctgccaggtactgggcgcatcccccacctcacatgtgacagcctgactccagcaggcagaaccaagtctcccactttgcagttctccctggagtcaggctcttccggcaagtcaagctcatccctggtacgaggcgtgcgtctctcctccagcggccccgccttgctcgccggcctcgtgagtctagatctacctctcgacccactatgggagttcccccgggacaggctggtgcttgggaagcccctaggcgagggctgctttggccaggtagtacgtgcagaggcctttggcatggaccctgcccggcctgaccaagccagcactgtggccgtcaagatgctcaaagacaacgcctctgacaaggacctggccgacctggtctcggagatggaggtgatgaagctgatcggccgacacaagaacatcatcaacctgcttggtgtctgcacccaggaagggcccctgtacgtgatcgtggagtgcgccgccaagggaaacctgcgggagttcctgcgggcccggcgccccccaggccccgacctcagccccgacggtcctcggagcagtgaggggccgctctccttcccagtcctggtctcctgcgcctaccaggtggcccgaggcatgcagtatctggagtcccggaagtgtatccaccgggacctggctgcccgcaatgtgctggtgactgaggacaatgtgatgaagattgctgactttgggctggcccgcggcgtccaccacattgactactataagaaaaccagcaacggccgcctgcctgtgaagtggatggcgcccgaggccttgtttgaccgggtgtacacacaccagagtgacgtgtggtcttttgggatcctgctatgggagatcttcaccctcgggggctccccgtatcctggcatcccggtggaggagctgttctcgctgctgcgggagggacatcggatggaccgacccccacactgccccccagagctgtacgggctgatgcgtgagtgctggcacgcagcgccctcccagaggcctaccttcaagcagctggtggaggcgctggacaaggtcctgctggccgtctctgaggagtacctcgacctccgcctgaccttcggaccctattccccctctggtggggacgccagcagcacctgctcctccagcgattctgtcttcagccacgaccccctgccattgggatccagctccttccccttcgggtctggggtgcagacatgagcaaggctcaaggctgtgcaggcacataggctggtggccttgggccttggggctcagccacagcctgacacagtgctcgaccttgatagcatggggcccctggcccagagttgctgtgccgtgtccaagggccgtgcccttgcccttggagctgccgtgcctgtgtcctgatggcccaaatgtcagggttctgctcggcttcttggaccttggcgcttagtccccatcccgggtttggctgagcctggctggagagctgctatgctaaacctcctgcctcccaataccagcaggaggttctgggcctctgaaccccctttccccacacctccccctgctgctgctgccccagcgtcttgacgggagcattggcccctgagcccagagaagctggaagcctgccgaaaacaggagcaaatggcgttttataaattatttttttgaaataaaaaaaaaaaaaaaaaa

SEQ ID NO: 700 - DNA, 2458 bp, Homo sapiens
aataagagaagtccgaggcggcttcctcctccctgcccagcaggggcggcggtcagaggcgggcagcaccccagttctccccgcacgccggcactcgcggctgctggagccccggctggctcaccccggggccgggcagaattgggctccaggtctctgacccctcccaaggatcatgccgcagccccactgacccaggagtaggggcctaagggcagggaacctggaatgggctgtgtgttctgcaagaaattggagccggtggccacggccaaggaggatgctggcctggaaggggacttcagaagctacggggcagcagaccactatgggcctgaccccactaaggcccggcctgcatcctcatttgcccacatccccaactacagcaacttctcctctcaggccatcaaccctggcttccttgatagtggcaccatcaggggtgtgtcagggattggggtgaccctgttcattgccctgtatgactatgaggctcgaactgaggatgacctcaccttcaccaagggcgagaagttccacatcctgaacaatactgaaggtgactggtgggaggctcggtctctcagctccggaaaaactggctgcattcccagcaactacgtggcccctgttgactcaatccaagctgaagagtggtactttggaaagattgggagaaaggatgcagagaggcagctgctttcaccaggcaacccccagggggcctttctcattcgggaaagcgagaccaccaaaggtgcctactccctgtccatccgggactgggatcagaccagaggcgatcatgtgaagcattacaagatccgcaaactggacatgggcggctactacatcaccacacgggttcagttcaactcggtgcaggagctggtgcagcactacatggaggtgaatgacgggctgtgcaacctgctcatcgcgccctgcaccatcatgaagccgcagacgctgggcctggccaaggacgcctgggagatcagccgcagctccatcacgctggagcgccggctgggcaccggctgcttcggggatgtgtggctgggcacgtggaacggcagcactaaggtggcggtgaagacgctgaagccgggcaccatgtccccgaaggccttcctggaggaggcgcaggtcatgaagctgctgcggcacgacaagctggtgcagctgtacgccgtggtgtcggaggagcccatctacatcgtgaccgagttcatgtgtcacggcagcttgctggattttctcaagaacccagagggccaggatttgaggctgccccaattggtggacatggcagcccaggtagctgagggcatggcctacatggaacgcatgaactacattcaccgcgacctgagggcagccaacatcctggttggggagcggctggcgtgcaagatcgcagactttggcttggcgcgtctcatcaaggacgatgagtacaacccctgccaaggttccaagttccccatcaagtggacagccccagaagctgccctctttggcagattcaccatcaagtcagacgtgtggtcctttgggatcctgctcactgagctcatcaccaagggccgaatcccctacccaggcatgaataaacgggaagtgttggaacaggtggagcagggctaccacatgccgtgccctccaggctgcccagcatccctgtacgaggccatggaacagacctggcgtctggacccggaggagaggcctaccttcgagtacctgcagtccttcctggaggactacttcacctccgctgaaccacagtaccagcccggggatcagacatagcctgtccgggcatcaaccctctctggcggtggccaccagtccttgccaatccccagagctgttcttccaaagcccccaggctggcttagaaccccatagagtcctagcatcaccgaggacgtggctgctctgacaccacctagggcaacctacttgttttacagatggggcaaaaggaggcccagagctgatctctcatccgctctggccccaagcactatttcttccttttccacttaggcccctacatgcctgtagcctttctcactccatccccacccaaagtgctcagaccttgtctagttatttataaaactgtatgtacctccctcacttctctcctatcactgctttcctactctccttttatctcactctagtccaggtgccaagaatttcccttctaccctctattctcttgtgtctgtaagttacaaagtcaggaaaagtcttggctggacccctttcctgctgggtggatgcagtggtccaggactggggtctgggcccaggtttgagggagaaggttgcagagcacttcccacctctctgaatagtgtgtatgtgttggtttattgattctgtaaataagtaaaatgacaatatgaatcctcaaaccatgaaaaaaaaaaaaaaaaaa

SEQ ID NO: 701 - DNA, 2442 bp, Homo sapiens
tacacacatgagagatcacttagagcaaagggtgagaggggcaggtggggctagggtggagaccaaagcactgatgtgacggaaccatcagccaggcaactggacctggtggatccaggaagactttctggaagaggtctctgacccctcccaaggatcatgccgcagccccactgacccaggagtaggggcctaagggcagggaacctggaatgggctgtgtgttctgcaagaaattggagccggtggccacggccaaggaggatgctggcctggaaggggacttcagaagctacggggcagcagaccactatgggcctgaccccactaaggcccggcctgcatcctcatttgcccacatccccaactacagcaacttctcctctcaggccatcaaccctggcttccttgatagtggcaccatcaggggtgtgtcagggattggggtgaccctgttcattgccctgtatgactatgaggctcgaactgaggatgacctcaccttcaccaagggcgagaagttccacatcctgaacaatactgaaggtgactggtgggaggctcggtctctcagctccggaaaaactggctgcattcccagcaactacgtggcccctgttgactcaatccaagctgaagagtggtactttggaaagattgggagaaaggatgcagagaggcagctgctttcaccaggcaacccccagggggcctttctcattcgggaaagcgagaccaccaaaggtgcctactccctgtccatccgggactgggatcagaccagaggcgatcatgtgaagcattacaagatccgcaaactggacatgggcggctactacatcaccacacgggttcagttcaactcggtgcaggagctggtgcagcactacatggaggtgaatgacgggctgtgcaacctgctcatcgcgccctgcaccatcatgaagccgcagacgctgggcctggccaaggacgcctgggagatcagccgcagctccatcacgctggagcgccggctgggcaccggctgcttcggggatgtgtggctgggcacgtggaacggcagcactaaggtggcggtgaagacgctgaagccgggcaccatgtccccgaaggccttcctggaggaggcgcaggtcatgaagctgctgcggcacgacaagctggtgcagctgtacgccgtggtgtcggaggagcccatctacatcgtgaccgagttcatgtgtcacggcagcttgctggattttctcaagaacccagagggccaggatttgaggctgccccaattggtggacatggcagcccaggtagctgagggcatggcctacatggaacgcatgaactacattcaccgcgacctgagggcagccaacatcctggttggggagcggctggcgtgcaagatcgcagactttggcttggcgcgtctcatcaaggacgatgagtacaacccctgccaaggttccaagttccccatcaagtggacagccccagaagctgccctctttggcagattcaccatcaagtcagacgtgtggtcctttgggatcctgctcactgagctcatcaccaagggccgaatcccctacccaggcatgaataaacgggaagtgttggaacaggtggagcagggctaccacatgccgtgccctccaggctgcccagcatccctgtacgaggccatggaacagacctggcgtctggacccggaggagaggcctaccttcgagtacctgcagtccttcctggaggactacttcacctccgctgaaccacagtaccagcccggggatcagacatagcctgtccgggcatcaaccctctctggcggtggccaccagtccttgccaatccccagagctgttcttccaaagcccccaggctggcttagaaccccatagagtcctagcatcaccgaggacgtggctgctctgacaccacctagggcaacctacttgttttacagatggggcaaaaggaggcccagagctgatctctcatccgctctggccccaagcactatttcttccttttccacttaggcccctacatgcctgtagcctttctcactccatccccacccaaagtgctcagaccttgtctagttatttataaaactgtatgtacctccctcacttctctcctatcactgctttcctactctccttttatctcactctagtccaggtgccaagaatttcccttctaccctctattctcttgtgtctgtaagttacaaagtcaggaaaagtcttggctggacccctttcctgctgggtggatgcagtggtccaggactggggtctgggcccaggtttgagggagaaggttgcagagcacttcccacctctctgaatagtgtgtatgtgttggtttattgattctgtaaataagtaaaatgacaatatgaatcctcaaaccatgaaaaaaaaaaaaaaaaaa

SEQ ID NO: 702 - DNA, 2501 bp, Homo sapiens
ctctgagtgttgcaatggcaatgtttctggcagggtgtgggggacccttgctcaatgacctcctgccctgttgctcagaggataccgctgccagaaaagggttggctcattgtggggcttcccaaggtactctggtagccccagcttctgacctggtcctttctctggtatggggataggaggagagctccggaggtctctgacccctcccaaggatcatgccgcagccccactgacccaggagtaggggcctaagggcagggaacctggaatgggctgtgtgttctgcaagaaattggagccggtggccacggccaaggaggatgctggcctggaaggggacttcagaagctacggggcagcagaccactatgggcctgaccccactaaggcccggcctgcatcctcatttgcccacatccccaactacagcaacttctcctctcaggccatcaaccctggcttccttgatagtggcaccatcaggggtgtgtcagggattggggtgaccctgttcattgccctgtatgactatgaggctcgaactgaggatgacctcaccttcaccaagggcgagaagttccacatcctgaacaatactgaaggtgactggtgggaggctcggtctctcagctccggaaaaactggctgcattcccagcaactacgtggcccctgttgactcaatccaagctgaagagtggtactttggaaagattgggagaaaggatgcagagaggcagctgctttcaccaggcaacccccagggggcctttctcattcgggaaagcgagaccaccaaaggtgcctactccctgtccatccgggactgggatcagaccagaggcgatcatgtgaagcattacaagatccgcaaactggacatgggcggctactacatcaccacacgggttcagttcaactcggtgcaggagctggtgcagcactacatggaggtgaatgacgggctgtgcaacctgctcatcgcgccctgcaccatcatgaagccgcagacgctgggcctggccaaggacgcctgggagatcagccgcagctccatcacgctggagcgccggctgggcaccggctgcttcggggatgtgtggctgggcacgtggaacggcagcactaaggtggcggtgaagacgctgaagccgggcaccatgtccccgaaggccttcctggaggaggcgcaggtcatgaagctgctgcggcacgacaagctggtgcagctgtacgccgtggtgtcggaggagcccatctacatcgtgaccgagttcatgtgtcacggcagcttgctggattttctcaagaacccagagggccaggatttgaggctgccccaattggtggacatggcagcccaggtagctgagggcatggcctacatggaacgcatgaactacattcaccgcgacctgagggcagccaacatcctggttggggagcggctggcgtgcaagatcgcagactttggcttggcgcgtctcatcaaggacgatgagtacaacccctgccaaggttccaagttccccatcaagtggacagccccagaagctgccctctttggcagattcaccatcaagtcagacgtgtggtcctttgggatcctgctcactgagctcatcaccaagggccgaatcccctacccaggcatgaataaacgggaagtgttggaacaggtggagcagggctaccacatgccgtgccctccaggctgcccagcatccctgtacgaggccatggaacagacctggcgtctggacccggaggagaggcctaccttcgagtacctgcagtccttcctggaggactacttcacctccgctgaaccacagtaccagcccggggatcagacatagcctgtccgggcatcaaccctctctggcggtggccaccagtccttgccaatccccagagctgttcttccaaagcccccaggctggcttagaaccccatagagtcctagcatcaccgaggacgtggctgctctgacaccacctagggcaacctacttgttttacagatggggcaaaaggaggcccagagctgatctctcatccgctctggccccaagcactatttcttccttttccacttaggcccctacatgcctgtagcctttctcactccatccccacccaaagtgctcagaccttgtctagttatttataaaactgtatgtacctccctcacttctctcctatcactgctttcctactctccttttatctcactctagtccaggtgccaagaatttcccttctaccctctattctcttgtgtctgtaagttacaaagtcaggaaaagtcttggctggacccctttcctgctgggtggatgcagtggtccaggactggggtctgggcccaggtttgagggagaaggttgcagagcacttcccacctctctgaatagtgtgtatgtgttggtttattgattctgtaaataagtaaaatgacaatatgaatcctcaaaccatgaaaaaaaaaaaaaaaaaa

SEQ ID NO: 703 - DNA, 1095 bp, Homo sapiens
tccccgctctgctctgtccggtcacaggactttttgccctctgttcccgggtccctcaggcggccacccagtgggcacactcccaggcggcgctccggccccgcgctccctccctctgcctttcattcccagctgtcaacatcctggaagctttgaagctcaggaaagaagagaaatccactgagaacagtctgtaaaggtccgtagtgctatctacatccagacggtggaagggagagaaagagaaagaaggtatcctaggaatacctgcctgcttagaccctctataaaagctctgtgcatcctgccactgaggactccgaagaggtagcagtcttctgaaagacttcaactgtgaggacatgtcgttcagatttggccaacatctcatcaagccctctgtagtgtttctcaaaacagaactgtccttcgctcttgtgaataggaaacctgtggtaccaggacatgtccttgtgtgcccgctgcggccagtggagcgcttccatgacctgcgtcctgatgaagtggccgatttgtttcagacgacccagagagtcgggacagtggtggaaaaacatttccatgggacctctctcaccttttccatgcaggatggccccgaagccggacagactgtgaagcacgttcacgtccatgttcttcccaggaaggctggagactttcacaggaatgacagcatctatgaggagctccagaaacatgacaaggaggactttcctgcctcttggagatcagaggaggaaatggcagcagaagccgcagctctgcgggtctactttcagtgacacagatgtttttcagatcctgaattccagcaaaagagctattgccaaccagtttgaagaccgcccccccgcctctccccaagaggaactgaatcagcatgaaaatgcagtttcttcatctcaccatcctgtattcttcaaccagtgatcccccacctcggtcactccaactcccttaaaatacctagacctaaacggctcagacaggcagatttgaggtttccccctgtctccttattcggcagccttatgattaaacttccttctctgctgcaaaaaaaaaaaaaaa

SEQ ID NO: 704 - DNA, 2510 bp, Homo sapiens
tttccgacacaatccgtacacggccttccctcccgcagtgcccgggctgcctccgggcctcccgccggccgtctcctttggctccctgcagggggccttccagcccaagagcacgaaccctgagctgccaccacgactggggccggtgccgagcgggctctcccagaaggggacacagatccccgaccatttccggccacctttgaggaaaccagggaagtggtgtgccatgcacgtgcgtgtggcttacatgatcctgagacaccaggagaaaatgaagggtgactcccacaagcttgactttcggaatgacctcctgccctgccttccggggccctatggggccctgccccctgggcaggagctctcccacccggcctccctcttcactgcgactggtgccgtccacgctgcagccaaccctttcacggcagctcccggggcccacggacccttcctgagccccagcacccacattgatccctttgggcgtcccacaagcttcgcctctttggctgccctctccaacggggcctttggaggcctgggcagccccacattcaactccggcgccgtctttgcccagaaagaaagcccaggggccccaccagccttcgcctccccaccggacccatggggccgcctgcaccgcagtcctctgacctttcctgcctgggtccggccccctgaggccgcccggactccaggctcagacaaggagcggcctgtggagcggagggagccctccatcaccaaggaggagaaggacagggacctccccttctcacggccccagctccgagtttctcctgctactcccaaggcccgggctggtgaggaggggcctcggccaaccaaggaatctgtgcgggtaaaggaagagcggaaggaggaggctgccgccgccgctgccgctgctgctgccgccgccgctgccgccgccgcagcagccactgggccccagggccttcacctgctgtttgagaggccccggccgcccccgtttctgggccctagcccaccagatcgctgtgctggcttcctggagccaacctggttggcagcacccccacgcctggcaaggccaccccgcttctatgaggcgggtgaggagctaactggacccggggccgtggccgctgcccgcctctacggtctggaacctgctcaccccttgctctacagccgcttggctcctccaccaccacctgctgcggccccgggaacccctcaccttctcagcaagaccccaccgggagcccttttgggggcaccacctccgcttgtgcccgccccccggcccagttccccacctaggggccctggcccagctcgggctgacaggtgaggggaacgggggggggtcggggcaaagctccatctccccttcctttaaccaggtcctagggctgaggttttaagccagggctggagggcaaaggtcataacctcaccagccacctctgaggtcatggaacctgggaacagaagcctcaacccccacaagaccaagcatcacatggagtgtagggtcactgggagagcagaggtcacagcctctagagaagggagaggggcgtgtgcatgggagtgtggctcatctcgggggccatggggcctcctgaggtacacctttgcccctgtaagggcctctaggccctgggcctgcctccccaagggctcactaagccagaggccaaagtgccccctcccgttcacctaccacccaagtcctcatgccctccgagggctgggggaggaggggctcaaggaaggggggttccatgtacatatttatcacccctttcacatagccccaagaccttttgtacatttttacaggggtgcccctcccaacagttcccttcctggttaattaaaccctcagactggtgctgtgttcctagcctctggcctctctgtggggaaaggggactgcagggggaagagccgggaagggacagtcaggcttctccctgggaaggtggggccagcaggagatgaccaacagggggcaggacctggggacctgggctggagggaagggcagaagcttcctacttggctgacagccccggttcccccaacatgttcccgttcactctgcccccacccccaaaggctcagcctctaaatctcagactccaccacctcttaatggctcagtccccttcaccccatttccaagtgcccccaggactcctgggccctgcttccctgaaccctgttctccaaaaccctgccccaggctaagggtggccagagaaggtcaccatgtaccacacaccaaagaagggggtcggcccaggggtgggcgacacaggcagcttcttcggcagcctcacggcagcaaccccagccttcccaaagcagcaggcgcctccaggctggggcccaacctagaaggcaggggtcaatctaacaaaaccctaacgttgacttttttccctggtggggcttcttctgtaacatgacttgcgaatatttatataaaaacgagtgttacaatg

SEQ ID NO: 705 - DNA, 4535 bp, Homo sapiens
gggtttgaaattccaacatggcagaggctgcagtccgtcttcccttcaaaaacttggaatgatttcaaatcataggcaccttcacttaaccctagcttccattcatcagcaaacacatcggatcgatgctacgctaacctatcgggttctctctccgcgcgttcaggttaaatgaatacctgacgaaagggcccacgtttcaaggcagtgacatttgatagctgagaggaaaagtggctttaatgaaaagcaacctttggaattcctgcttgtgagaaatccaattcagctttttgtgctgccagcaagaaatgatcagtagcaccagtgtttatggcttgaagatgcagtggacgccagagcatgcccagtggccagaacagcactttgacatcacctcaaccactcggtctcctgcccacaaagttgaagcctacagaggtcatctgcagcgcacctatcagtacgcctgggcgaatgatgacatatctgctctgactgcatccaacctactaaaaaaatatgcagagaagtattccggcattttggaaggtcctgtggaccgacccgtactcagcaactattcggacacaccatcaggactagtgaacggtcggaaaaatgaaagtgaaccctggcagccttccttgaattcagaagctgtttatcccatgaactgtgttccggatgttatcactgccagcaaagctggagtcagttcagccctccctccagcagatgtctctgcgagtataggaagctctcctggggtagccagcaacctgacagaacctagttattcaagtagtacctgtggaagccacactgtacccagtcttcatgcagggctcccatctcaggaatatgccccaggatacaacggatcatatttgcattctacttatagtagccagccagcacctgcacttccttcacctcatccgtctcctttgcatagctctgggctactacagcccccaccaccacctcctccgccaccagccttggtcccaggctacaatgggacttctaacctctccagttacagctatccgtctgctagctatcctcctcagactgctgtggggtctgggtacagccctgggggggcaccgcctccgccttcagcgtacctgccttcaggaattcctgctcccacccccctaccccccaccactgttcctggctacacctaccagggccatggtttgacacctattgcaccgtcggctctgacaaacagttcagcaagttctctcaaaaggaaagctttctacatggcagggcaaggagatatggactccagttatggaaattacagctatggccaacagagatctacacagagtcctatgtacagaatgcccgacaacagcatttcaaacacaaatcgggggaatggctttgacagaagtgctgaaacatcatccttagcatttaagccaacgaagcagctaatgtcctctgaacagcaaaggaaattcagcagccagtccagtagggctctgacccctccttcctacagtactgctaaaaattcattgggatcaagatccagtgaatcctttgggaagtacacatcgccagtaatgagtgagcatggggacgagcacaggcagctcctctctcacccaatgcaaggccctggactccgtgcagctacctcatccaaccactctgtggacgagcaactgaagaatactgacacgcacctcatcgacctggtaaccaatgagattatcacccaaggacctccagtggactggaatgacattgctggtctcgacctggtgaaggctgtcattaaagaggaggttttatggccagtgttgaggtcagacgcgttcagtggactgacggccttacctcggagcatccttttatttggacctcgggggacaggcaaaacattattgggcagatgcatcgctagtcagctgggggccacatttttcaaaattgccggttctggactagtcgccaagtggttaggagaagcagagaaaattatccatgcctcttttcttgtggccaggtgtcgccagccctcggtgatttttgttagtgacattgacatgcttctctcctctcaagtgaatgaggaacatagtccagtcagtcggatgagaaccgaatttctgatgcaactggacactgtactaacttcggctgaggaccaaatcgtagtaatttgtgccaccagtaaaccagaagaaatagatgaatcccttcggaggtacttcatgaaacgacttttaatcccacttcctgacagcacagcgaggcaccagataatagtacaactgctctcacagcacaattactgtctcaatgacaaggagtttgcactgctcgtccagcgcacagaaggcttttctggactagatgtggctcatttgtgtcaggaagcagtggtgggccccctccatgccatgccagccacagacctttcagccattatgcccagccagttgaggcccgttacatatcaagactttgaaaatgctttctgcaagattcagcctagcatatctcaaaaggagcttgatatgtatgttgaatggaacaaaatgtttggttgcagtcagtgataacttctttagaaaaaaaaaatgtaatgaatgttggcacacacacataaaacctgctacatagggaatagagcccctttccagtagagtttaaattgcaaagggtactggggaagatgacgattaagttgcatctttagagtcagggtagatttggaggaaaagtgcatcaaatgagagcttctgatttgaaagccccagatgacagaaagcatatgtggatgctcagttctgttcaagctagacaacactcaccaaggagcaaggtgcaagtgtgttgatttcagaaggacatgaacctcgtgtgttgattccattctgctgttctcgagatttagttgctgtcaagtgcctggagtggtgctttattttttgtttgcctcacaattacattggtggcatgtgctaatataaagagctttaacttcaaacattattggactaaagagatgaacagttgtgttatgacagaaaaccagatttttgccattttaagagcaacagtattcctcaatcctgtctgttctgcagtattaagctaagaacaggtaaaacagggtaacggtaatctggaccttaatttctgcagttcatttcttttaatgttcttgtctgcaaaaactcaggaaagtgattgtgatttgtacagtacctcaaaggaatgtgttgaaagcactatgtactgctgagagtaataggataggcttcaatgttactttatattaaaatgtatgtttacctcaacaattggaaaatagcaaggaaaattactttgaatgtatccagaaaaatactgaagtgtgatacaactgaatatttacagtttaaagtagaaatggaaggatttttttaagttcttttactaattatggggaattaaccagagcagaataattctttatgtcaataactgcaagagttcttagtacattgctccttgataattaagtgaaaatgttcttaaaaggtacactggttaattgaaagctacttattcagtttgtgttagtgtctagacctgtcagccacaagacctgtttaggaccctgaaagtcacagtacctaaaaactatgactgcctttttattgcataggtggtagtggtggtgatggtggtggtagtttgcaagttatctcttaaaactgctgggaatggtgtcattctattcactaatctagcttatagacttgccgtgctgtttgatagaatgcagaggatagcaaccaaaacaaatacacaaataaataaaaacaaaaaccaaccaacaaaccaacttacatacacatatatatatccacaaagaacctctccatctcctccccttctttttgactccactcttgtcagtgcaattttgcttctcattttgaaatctgggctgtagtgctcctgctttatttctacctcagttttgttacatttctcttggaaagtaaagtagaaaattggaagtggacacacacactgcaatgtagcttgccaaacatgttactttgttttcttccatctttcaccgtaaatctagtttccaaagacatcagcatttgtgcttacttccacctcagtctaccagccccacccctacccatggcataagtggcatttttcttaatttcctatttttctcctgctctctgtcaagttgttctttgtatcctttaatgctttatgtgcaacctttcattgatagtgggctgatgtttggcaatgcttctgaactgtcacagagcaggctgtagctttccacagccactgcccatgcataagcagaacagcctggccttttgaatgtattttcctgggttttttccccttttctttttttagtttagagatgcagtaacaaaactgttgcaaagcactggcattttatgtattcaataaataagtgatgtacatttttaaaaaaatttaaataaatgcaatgagaagccccaagaaag

SEQ ID NO: 706 - DNA, 2247 bp, Homo sapiens
taaatgtgccacgtcttctaagaagggggagtcctgaacttgtctgaagcccttgtccgtaagccttgaactacgttcttaaatctatgaagtcgagggacctttcgctgcttttgtagggacttctttccttgcttcagcaacatgaggcttttcttgtggaacgcggtcttgactctgttcgtcacttctttgattggggctttgatccctgaaccagaagtgaaaattgaagttctccagaagccattcatctgccatcgcaagaccaaaggaggggatttgatgttggtccactatgaaggctacttagaaaaggacggctccttatttcactccactcacaaacataacaatggtcagcccatttggtttaccctgggcatcctggaggctctcaaaggttgggaccagggcttgaaaggaatgtgtgtaggagagaagagaaagctcatcattcctcctgctctgggctatggaaaagaaggaaaaggtaaaattcccccagaaagtacactgatatttaatattgatctcctggagattcgaaatggaccaagatcccatgaatcattccaagaaatggatcttaatgatgactggaaactctctaaagatgaggttaaagcatatttaaagaaggagtttgaaaaacatggtgcggtggtgaatgaaagtcatcatgatgctttggtggaggatatttttgataaagaagatgaagacaaagatgggtttatatctgccagagaatttacatataaacacgatgagttatagagatacatctacccttttaatatagcactcatctttcaagagagggcagtcatctttaaagaacattttatttttatacaatgttctttcttgctttgttttttatttttatatattttttctgactcctatttaaagaaccccttaggtttctaagtacccatttctttctgataagttattgggaagaaaaagctaattggtctttgaatagaagacttctggacaatttttcactttcacagatatgaagctttgttttactttctcacttataaatttaaaatgttgcaactgggaatataccacgacatgagaccaggttatagcacaaattagcaccctatatttctgcttccctctattttctccaagttagaggtcaacatttgaaaagccttttgcaatagcccaaggcttgctattttcatgttataatgaaatagtttatgtgtaactggctctgagtctctgcttgaggaccagaggaaaatggttgttggacctgacttgttaatggctactgctttactaaggagatgtgcaatgctgaagttagaaacaaggttaatagccaggcatggtggctcatgcctgtaatcccagcactttgggaggctgaggcgggcggatcacctgaggttgggagttcgagaccagcctgaccaacacggagaaaccctatctctactaaaaatacaaaagtagccgggcgtggtgatgcgtgcctgtaatcccagctacccaggaaggctgaggcggcagaatcacttgaacccggaggcggaggttgcggtaagccgagatcacctccagcctggacactctgtctcgaaaaaaagaaaagaaacacggttaataacatataaatatgtatgcattgagacatgctacctaggacttaagctgatgaagcttggctcctagtgattggtggcctattatgataaataggacaaatcatttatgtgtgagtttctttgtaataaaatgtatcaatatgttatagatgaggtagaaagttatatttatattcaatatttacttcttaaggctagcggaatatccttcctggttctttaatgggtagtctatagtatattatactacaataacattgtatcataagataaagtagtaaaccagtctacattttcccatttctgtctcatcaaaaactgaagttagctgggtgtggtggctcatgcctgtaatcccagcactttgggggccaaggagggtggatcacttgagatcaggagttcaagaccagcctggccaacatggtgaaaccttgtctctactaaaaatacaaaaattagccaggcgtggtggtgcacacctgtagtcccagctactcgggaggctgagacaggagatttgcttgaacccgggaggcggaggttgcagtgagccaagattgtgccactgcactccagcctgggtgacagagcaagactccatctc

SEQ ID NO: 707 - DNA, 1420 bp, Homo sapiens
gtcagcctacatttttttaagtaaggagtcctgatgttcaactattaaatctttattataggttatagactggactttaaaggcatagctgccttaaatgtgggtaatggttgataaatgtcgctaccatcagaggtcgcttcacaaggtgtctaattcagaatcgaagatctctagcggtcttctactcagtcgactgcagagacgaccgcggtaggtttttcaacccggactcaacaaagaagccctcatagcacagccttgacgtcactcaaagacaggccccaatcccgactgctagagcagaggcccgcccctcgacctccgtgagtggccccgccccgccctagggggcggggcgatgccgaactgcggcgggctggctcagtaaagcggaggcagcgggggaagatggcggcggccgttccacagcgggcgtggaccgtggagcagctgcgcagtgagcagctgcccaagaaggacattatcaagtttctgcaggaacacggttcagattcgtttcttgcagaacataaattattaggaaacattaaaaatgtggccaagacagctaacaaggaccacttggttacagcctataaccatctttttgaaactaagcgttttaagggtactgaaagtataagtaaagtgtctgagcaagtaaaaaatgtgaagcttaatgaagataaacccaaagaaaccaagtctgaagagaccctggatgagggtccaccaaaatatactaaatctgttctgaaaaagggagataaaaccaactttcccaaaaagggagatgttgttcactgctggtatacaggaacactacaagatgggactgtttttgatactaatattcaaacaagtgcaaagaagaagaaaaatgccaagcctttaagttttaaggtcggagtaggcaaagttatcagaggatgggatgaagctctcttgactatgagtaaaggagaaaaggctcgactggagattgaaccagaatgggcttacggaaagaaaggacagcctgatgccaaaattccaccaaatgcaaaactcacttttgaagtggaattagtggatattgattgaaatagcagtgcttcagctctaaggatattagcaacaatgataaaacttggccttgaagaaatttacacaactagttagaacttgttactattgtaaaggaagagtcaactggaaaattcaaggagttaataaaatttgtttacttggtcccagcttttgagagataaatcccttatgaatccctggtctaaaatactttcctacagctgtgtaaaatactggtcaaggagaactttttccttttacctcatgttgtaaacttaagtggctcaataaaaattgatccactgtcaaaaaaaaaaaaaaaaaaaaaaaaaaaaaaaaaaaaaaaaaa

SEQ ID NO: 708 - DNA, 4333 bp, Homo sapiens
ggcttcctccagttccggagtccagtggctgaccgccttgctggagcggagatgcagccgccgccccgaaaagtgaagccggcccaggaggtgaagcttcgcttcctggaacagctgagcatccttcagacctggcagcagagggaggcggatctgctggaggacatcagatcctacagcaagcagagggcagccattgaacgggagtatgggcaggcactccagaaactggctggcccattcctgaagagggaagggcaccggagcggtgagatggacagcaggggcaggacagtgttcggtgcctggcgctgcctgctggatgccaccgtggctgggggccaaacccgactccaggcgtctgaccgataccgtgacctagcagggggtacagggcggagcgccaaggagcaggtgcttaggaagggaacagagaacctccagagggcgcaggctgaggtgctgcagtctgtccgggagctgagccgaagtcggaagctgtatgggcagcgggaacgtgtgtgggccttggcacaggagaaggcggctgatgtccaggccaggctaaaccgaagtgaccatgggatcttccactctcggaccagtctccagaaactgagcaccaagctgtccgcccagtcagcccagtactcccagcagctgcaagcagcccgcaatgagtacctgcttaacttggtggctaccaatgcccacctcgaccattactaccaggaggaactgccagctctgctcaaggccctggtcagtgagctgtcagagcacttgagggaccccctgacctccctgagccacactgagctggaagccgcagaggtcatcctggagcatgcccaccgcggggagcagacaacctcccaggtaagctgggagcaagacctgaagctgtttcttcaggagcctggtgtattttcccccaccccacctcagcagtttcagccagcagggactgatcaggtgtgtgtcctggagtggggagcagaaggcgtggctggcaagagtggcctggagaaagaggttcagcgcttgaccagccgagctgcccgtgactacaagatccagaaccatgggcatcgggtactgcaacgactggagcagaggcggcagcaggcttcagagcgggaggctccaagcatagaacagaggttacaggaagtgcgagagagcatccgccgggcacaggtgagccaggtgaagggggctgcccggctggccctgctgcagggggctggcttagatgtggagcgctggctgaagccagccatgacccaggcccaggatgaggtggagcaggagcggcggctcagtgaggctcggctgtcccagagggacctctctccaaccgctgaggatgctgagctttctgactttgaggaatgtgaggagacgggagagctctttgaggagcctgccccccaagccctggccacgagggccctcccctgccctgcacacgtggtatttcgctatcaggcagggcgtgaggatgagctgacaatcacggagggtgagtggctggaggtcatagaggagggagatgctgacgaatgggtcaaggctcggaaccagcacggcgaggtaggctttgtccctgagcgatatctcaacttcccggacctctccctcccagagagcagccaagacagtgacaatccctgcggggcagagcccacagcattcctggcacaggccctgtacagctacaccggacagagtgcagaggagctgagcttccctgagggggcactcatccgtctgctgccccgggcccaagatggagtagatgacggcttctggaggggagaatttgggggccgtgttggggtcttcccctccctgctggtggaagagctgcttggccccccagggccacctgaactctctgaccctgaacagatgctgccgtccccttctcctcccagcttctccccacctgcacctacctctgtgttggatgggccccctgcacctgtcctgcctggggacaaagccctggacttccctgggttcctggacatgatggcacctcgactcaggccgatgcgtccaccacctcccccgccggctaaagccccggatcctggccacccagatcccctcacctgaaggccagggaagccttgacccccagtgatgctgctgtccctatcttcaagctgtcagaccacaccatcaatgatccagagcaacacagccaaaagctggaatcgcccttatttccaccctcacctccaagggtggaaacttgccccttcccatttctagagctggaacccactcctttttttcccattgttctatcatctctaggaccggaactaccttctcttctgtcatgaccctatctagggtggtgaaatgcctgaaatctctggggctggaaaccatccatcaaggtctctagtagttctggcccacctctttccccaccctggctccatgacccaccccactctggatgccagggtcactggggttgggctggggagaggaacaggccttgggaatcaggagctggagccaggatgcgaagcagctgtaatggtctgagcggatttattgacaatgaataaagggcacgaaggccaggccagggcctgggcctcttgtgctaagagggcagggggcctacggtgctattgctttaggggcccaccacgggcaggggcctgctcccagctgccacgctctatcatatggagcgaggtgttggggaaggcggggcaggcagcctgttgcaggcaggggaaggagaagagactgaggggctgtgacctctcctgaggcccccagcctgagactgtgcaactccaggtggaagtagagctggtccctcagctggggggcagtgctgtccagtggaggggagggctttcacgcccacccaccccctggccctgccagctggtagtccatcagcacaatgaaggagacttggagaagaggaagaataacactgttgcttcctgttcaagctgtgtccagcttttcccctggggctccaggaccttccctacctccaccaccaaaccaagggatttatagcaaaggctaagcctgcagtttactcggggggttcagggagccgaaaggcttaaatagtttaagtaggtgatgggaagatgagattacctcatttagggctcaggcagactcacctcacatactccctgctccctgtggtagagacacctgagagaaaggggaggggtcaacaatgagagaccaggagtaggtcctatcagtgccccccagagtagagagcaataagagcccagcccagtgcagtcccggctgtgttttcctacctggtgatcagaagtgtctggtttgcttggctgcccatttgcctcttgagtgggcagccctgggcttgggcccctccctccggccctcagtgttggctctgcagaagctctggggttcccttcaagtgcacgaggggttaggctgctgtccctgagtcctccattctgtactggggggctggctaggacctggggctgtggcctctcagggggcagcctctccatggcaggcatccctgccttgggctgccctcccccagacccctgaccaccccctgggtcctgtcccccaccagagccccagctcctgtctgtgggggagccatcacggtgttcgtgcagtccatagcgcttctcaatgtgtgtcacccggaacctgggaggggagggaacactggggtttaggaccacaactcagaggctgcttggccctcccctctgaccagggacatcctgagtttggtggctacttccctctggcctaaggtaggggaggccttctcagattgtggggcacattgtgtagcctgacttctgccggagctcccagtccaggaggaaagagccaaggcccacttttgggatcaggtgcctgatcactgggccccctacctcagccccgctttccctggagcacctgccccacctgcccacagagaacacagtggtctcccctgtccgggggcggctttttccttccttggagcgtccctgacggacaagtggaggcctcttgctgcggctgcaatggaggcaaggtgctgcagagcccaggtgcactgtgtgatgatgggagggggctccgtcctgcaggctggaggtggcatccacactggacagcagggaggaggggagtgagggtaacatttccatttcccttcatgttttgtttcttacgttctttcagcatgctccttaaaaccccagaagccccaatttccccaagccccattttttcttgtctttatctaataaactcaatattaagatgttaaaaaaaaaaaaaa

SEQ ID NO: 709 - DNA, 2279 bp, Homo sapiens
aactttgattaggaattggatggtgagttgggatcccccagtccttagctttttgctggagttctgtaaatctcaaaatgtcagccacaggccatttcttttggtttatttaagtgtagattttttaaaaaatcactttttccacttcatggctcctttggaccagggtataaaaatagcgatgccaccaggagccaagctctttctggaataatgaagcaggcgaggacggagccttgctcaggacgacagaaggcttgcagcctgcctcaaacgcaactctaatttcagccacttcacttcttccccccgcgctcagacttgcctcaaaggaaggagccgtttatgagacactccgtggcgcgcccaacacggttacccaggcgcctatcacccttctgggacccggccacctgtaagaacctggagggcggagcgggcgaggttgttcggggaagggatccccggcggctgaggacatccaggagcaccgagattcttggggagggcctcgccgggcccagcgcaggagccgccgcgcgtccagcggctccaccgccgcagcctcgggaaccgggcgccccaggtctcaggcgcgccccgccgcggacgcgaatggactcgtccggcctcggcccctgcagcgaagctccgcttcacaccagcgctgggctgtccggccgcaacctgcgcgccgcggggggcgtcttacctgttgatcttgagcgcgaacgcgcggcgctctgcgctcggcagagtggccatggcccgccggcggttcggtggcttctagggtcgcggggtgcggaaagcgggggcctggcgcgccgcagagtagccgcggaacatgcccagccaagcgcaaacctcgtctgtcggtcggcgctggaaacttccgcatttccaccttctaagccgaaatcaccccgggggagggtccgagctcggagcagcgacggccggctccgccacccggcctggcgcgcaggcagcggcgggcgaggagggcgtgggcccagcgcggaactggcctcccgatactggggcagacggcgcgctctgcccggggccgccgacctccggccgaagggagcgcgggcggacgacaggcgaccactgcgcgcaggccggaagctccatctgcccgaagctgcgaggctgccagggaatgtaggcaagtcgggggagccccacaaagctggcgaggtcgggaatcaccccagggattcgtaaggctaggtgttattaagggttgacaccattctcgaagaaggcagccaaaaaaaaagacaaaaaagttagtggaatctatcaggattcaaatcaacttttgcaagcaatatgcccatcatccttcctgagacactaaataaatataatggattcatccaaggaataaacattatgagttctcaaaaaatgttttcgtcacaacctggcgtgaatgcttttctccggagaaacactgaaggcggcgttcttgcgattcaagggtacgctgcgtccaggtttatttcagtttcagactgaggtctgctaagaagcccggcctcaaactcaagataaaaacagaaaagtcccagtgttgacgggagtggaggagcccgtgttcgcttcaaggtgccggcgtgctgctctaacctgtgctatatatactcgagcactctccatataatgcctccatttaccaacttgctcttaaaaaataccaaagcaggccgggcgcggtctcacgcctgtgatcccagcactttgggaggccgaggcgggcgcatcacgaggtcaggagatcgagaccatcctggccaacgtggtgaaaccccgtctctactaaaatacaaaaaattagccgggcgtggtggcgcacgccttagtcccagctacttgggaggctgaggcaggggaatcacttgaacccgggaggcggagcttgcagtgaaccgagatctgccactgcactccagcctggcgacagagcaagtctccgtctaaaagaaaaaaaaaaaaaacaaccaaagcgaagtatttttggttcaaacctgcactatttaatatgatagccactagccacatgtggctattgaccactcggcattatggttagtctgaattgcccactgctggatgtgtaaaatgtacactggaatttaaagacagcgcagaaaacatcgtgtaaaatgtcttgttaatgattttcatgttgattgcatgttaaatgatactttggatataaaaaatatattattaaagttaatttcacctgtttgttttcccctttt

SEQ ID NO: 710 - DNA, 2832 bp, Homo sapiens
agtcgaggtatcttctccccaaccactgctcttattttaattattgcagacggaagttgaagactattgacatagtaaatagctctgggtggcttgaaacgaaagtttaactttgcggacaaacaggacttattgtagggggtggtcaaaatagtcccggcggggcggggccatgacccctgacgtcgccggtccggcgcgcagttcagtttggcggttccggtaccgctctcacattggggcgggatgtgggagcggctgaactgcgcagcagaggacttttattctcgtctccttcagaaatttaatgaagaaaagaaaggaatccgtaaagacccatttctctatgaggctgatgtccaagtgcagttgatcagcaaaggccaaccaaaccctttgaaaaatattctaaatgaaaatgacatagtattcatagtggaaaaagtgcctttagaaaaggaagaaacaagtcatattgaagaacttcaatctgaagaaactgccatatctgatttctctactggcgaaaatgttggaccacttgctttaccagttgggaaggcaaggcagttaattggactttacaccatggctcacaatcctaatatgacccatttgaagattaatctgccagttactgcccttcctcccctttgggtaagatgtgacagttcagatcctgaaggtacttgttggctaggagctgagcttatcacaacaaacaacagcattacaggaattgtcttatatgtggtcagttgtaaagctgataaaaattattctgtaaatcttgaaaacctaaaaaatttacacaagaaaagacatcacttgtctactgtaacatccaaaggctttgcccagtatgagctctttaagtcctctgccttggatgatacaatcacagcatcacaaactgcgatcgctttggatatttcctggagtcctgtggatgagattcttcaaatccctccactctcttcaactgcaactctgaatattaaagtggaatcaggagagcccagaggtcctttgaatcatctctacagagaactgaaatttcttcttgttttggctgatggtttgaggactggtgtcactgaatggctcgagcccctggaagcaaaatctgctgttgaacttgttcaggaatttctgaatgacttaaataagctggatggatttggtgattctacaaaaaaagacactgaggttgagaccttgaagcatgacactgctgcagtcgatcgttccgtcaagcgtcttttcaaagttcggagtgatcttgattttgctgagcaactgtggtgcaaaatgagcagtagtgtgatttcataccaagacttggtgaagtgtttcacattgatcatccagagtctacaacgtggtgatatacagccatggctccatagtggaagtaacagtttactaagtaagctcattcatcagtcttatcatggaaccatggacacagtttctctcagtgggactattccagttcaaatgcttttggaaattggtttggacaaactaaagaaagattatatcagttttttcataggtcaggaacttgcatctttgaatcatttggaatacttcattgctccatcagtagatatacaagaacaggtttatcgtgtccaaaaactccaccatattctagaaatattagtcagttgcatgcctttcattaaatctcaacatgaactcctcttttctttaacacagatctgcataaagtattacaaacaaaatcctcttgatgagcaacacatttttcagctgccagtcagaccaactgctgtaaagaacttatatcaaagtgagaagccacagaaatggagagtggaaatatatagaggtcaaaagaagattaagacagtttggcaactgagtgacagctcacccatagaccatctgaattttcacaaacctgatttttcggaattaacactaaacggtagcctggaagaaaggatattctttactaacatggttacctgcagccaggtgcatttcaagtgaagtgtgctgatgaagtcctctataagcacaagccaaaaagagaaagagaaaaaaaggtaattattgtagaacctgaaaacagcaatgtatggaaaccctcaaagcagaaaagggaggaagatcctgaagattctcttatgaagctccaaaattgataatcctgtctcagctctgcctcctcaggaggagcattagtagaacagcagtgatgaggacacagagggagcagacagtgggtaccacgatctccgtaaccatttgcatgtgacttagcaagggctctgaaatgacaaagagaacgagcaccacaaatgagaacaggatcattttagtaaatacagctttatcccaaaagctttagctgtattgggaaaacttaaaaaatagcatcctcaaattttctgattcttatttgccatgaaatagaacttagtaaattaaatgttatttgaaaatgttataagagctttgtaaatatttcagaaaatatgggataaatgcctgaatttggttcttctacaggtgctataataaagtccatctctcaatacttatactttctaaattcatctcagaatattagcagccatattccacagttcctataatttttactgggggggatttgtgataggaaagtccttgggaaacatttccaatctttcaaaatattattgtgtatcttaagaagtataggaacttgtatgttgaaatgttgtatggtagttcttgtatagttaaataataatctttttaagagttaatgataagcatatgttatgtgcattattaataaaatagtggccactt

SEQ ID NO: 711 - DNA, 3559 bp, Homo sapiens
cctagtacttcctgttctcggctaaccctggcgctgggccgggggctggagagtgaccgtggtctgagtgacctggggcggctgcgtgggccggggtgggcctcaaagccgggcaccagacgggaggggcggcgctcgggccgcgcgctgcccgcgccgggtcctggcgggcggcgaggctggggctgactcctgcctcaggatgccgggggaggaagaggagcgggccttcctggtggcccgcgaggagctggcgagcgccctgaggagggattccgggcaggcgttttccctggagcagctccggccgctactagccagctctctgccgctagccgcccgctacctgcagctggacgccgcacgccttgtccgctgcaacgctcatggggagccccgaaactacctcaacaccctgtccacggctctgaacatcctggagaaatacggccgcaaccttctcagccctcagcggcctcggtactggcgtggtgtcaagtttaataaccctgtctttcgcagcacggtggatgctgtgcaggggggccgagatgtgctgcgattatatggctacacagaggagcaaccagatgggttgagcttccccgaagggcaggaggagccagatgagcaccaggttgctacagtcacactggaagtactgctgcttcggacagagctcagcctgctattgcagaatactcatccaagacagcaggcactggagcagctgttggaagacaaggttgaagatgatatgctgcagctttcagaatttgaccccctattgagagagattgctcctggccccctcaccacaccctctgtcccaggctccactcctggtccctgcttcctctgtggttctgccccaggcacactgcactgcccatcctgtaaacaggccctgtgtccagcctgtgaccacctgttccatggacacccatcccgtgctcatcacctccgccagaccctgcctggggtcctgcagggtacccacctgagccccagtttacctgcctcagcccaaccacggccccagtcgacctccctgctggccctgggagacagctctctttcttcccctaatcctgcaagtgctcatttgccctggcactgtgctgcctgtgccatgctaaatgagccttgggcagtgctctgtgtggcctgtgatcggccccgaggctgtaaggggttggggttgggaactgagggtccccaaggaactggaggcctagaacctgatcttgcacggggtcggtgggcctgccagagctgtacctttgagaatgaggcagctgctgtgctatgttccatatgtgagcgacctcggctggcccagcctcccagcttggtggtggattcccgagatgctggcatttgcctgcaaccccttcagcagggggatgctttgctggcctctgcccagagtcaagtctggtactgtattcactgtaccttctgcaactcgagccctggctgggtgtgtgttatgtgcaaccggactagtagccccattccagcacaacatgccccccggccctatgccagctctttggaaaagggaccccccaagcctgggcccccacgacgccttagtgcccccctgcccagttcctgtggagatcctgagaagcagcgccaagacaagatgcgggaagaaggcctccagctagtgagcatgatccggaaggggaagccgcaggtgcctgtccagaggagatcttctcggctctgcagtactcgggcactgaggtgcctctgcagtggttgcgctcagaactgccctacgtcctggagatggtggctgagctggctggacagcaggaccctgggctgggtgccttttcctgtcaggaggcccggagagcctggctggatcgtcatggcaaccttgatgaagctgtggaggagtgtgtgaggaccaggcgaaggaaggtgcaggagctccagtctctaggctttgggcctgaggaggggtctctccaggcattgttccagcacggaggtgatgtgtcacgggccctgactgagctacagcgccaacgcctagagcccttccgccagcgcctctgggacagtggccctgagcccaccccttcctgggatgggccagacaagcagagcctggtcaggcggcttttggcagtctacgcactccccagctggggccgggcagagctggcactgtcactgctgcaggagacacccaggaactatgagttgggggatgtggtagaagctgtgaggcacagccaggaccgggccttcctgcgccgcttgcttgcccaggagtgtgccgtgtgtggctgggccctgccccacaaccggatgcaggccctgacttcctgtgagtgcaccatctgtcctgactgcttccgccagcacttcaccatcgccttgaaggagaagcacatcacagacatggtgtgccctgcctgtggccgccccgacctcaccgatgacacacagttgctcagctacttctctacccttgacatccagcttcgcgagagcctagagccagatgcctatgcgttgttccataagaagctgaccgagggtgtgctgatgcgggaccccaagttcttgtggtgtgcccagtgctcctttggcttcatatatgagcgtgagcagctggaggcaacttgtccccagtgtcaccagaccttctgtgtgcgctgcaagcgccagtgggaggagcagcaccgaggtcggagctgtgaggacttccagaactggaaacgcatgaacgacccagaataccaggcccagggcctagcaatgtatcttcaggaaaacggcattgactgccccaaatgcaagttctcgtacgccctggcccgaggaggctgcatgcactttcactgtacccagtgccgccaccagttctgcagcggctgctacaatgccttttacgccaagaataaatgtccagagcctaactgcagggtgaaaaagtccctgcacggccaccaccctcgagactgcctcttctacctgcgggactggactgctctccggcttcagaagctgctacaggacaataacgtcatgtttaatacagagcctccagctggggcccgggcagtccctggaggcggctgccgagtgatagagcagaaggaggttcccaatgggctcagggacgaagcttgtggcaaggaaactccagctggctatgccggcctgtgccaggcacactacaaagagtatcttgtgagcctcatcaatgcccactcgctggacccagccaccttgtatgaggtggaagagctggagacggccactgagcgctacctgcacgtacgcccccagcctttggctggagaggatccccctgcttaccaggcccgcttgttacagaagctgacagaagaggtacccttgggacagagtatcccccgcaggcggaagtagctgagggcaagggtcccgatgagggtcccatggcctgctccctcaggaacagctccagcaccaataaagaggcatcttaccaccaaaaaaaaaaaaaaaaaaaaaaaaaaaaaaaaaaaaaaaaaaaaaaaaaaaaaaa

SEQ ID NO: 712 - DNA, 1772 bp, Homo sapiens
gcattgtgggaagggcggccggtgcagccgcagctgccatcttaggggcgcctggcgctacgggtttctcgttggaggcggccttcgtggcagctgtagacgccgggaaaaggcataaagtccgttggccgacacctttctttcctccggcctcggtagaaccgccagcccgcgtccgaaggcggaggcgaggggaactggccgcgtgaggggcctgaggcgagcggttagagcgtctcccggaaggatgggccggtctcggagccggagctcgtcccgctccaagcacaccaagagcagcaagcacaacaagaagcgcagccggtcccggtcgcgatcccgggacaaggagcgcgtgcggaagcgttccaaatctcgggaaagtaaacggaaccggcggcgggagtcgcggtcccgttcgcgctccaccaacacggccgtgtcccggcgcgagcgggaccgggagcgcgcctcgtccccgcccgaccgcatcgacatcttcgggcgcacggtgagcaagcgcagcagcctggacgagaagcagaagcgagaggaggaggagaagaaagcggagttcgagcggcagcgaaaaattcgacagcaagaaatagaagaaaaactcatcgaggaagaaacagcacgaagagtagaagaattggtagcaaaaagggtggaggaagaactggagaaaaggaaggatgaaattgaacgagaagttctccgaagggtggaggaagccaaacgcatcatggaaaagcagttgctcgaagaactcgagcgacagagacaagctgagcttgccgcacaaaaagctagagaggaggaagaacgtgcaaaacgtgaggagctagagcgaatactggaagagaataaccgaaaaattgcagaagcacaagccaaactggccgaagaacagttgagaattgttgaagaacaaagaaagattcatgaggaaaggatgaaactagaacaagaacgacaacgtcaacaaaaagaagaacaaaaaattatcctgggcaaggggaagtccaggccaaaactgtccttctcattaaaaacccaggattaaattgcaaactctgaactttttacaaagaaaaatggaaaaactttgtatggtagcttcatgttgaagtggttttttgtttttgtttttgtttttttaatttgtaaaatctggaaagttagcttgttctaataggggctatgctctgcaattccctttttttttttttttttccttccactaagtcaaatccttatcagatcattgttgtattctaaggagtgacgtatttttcacctgtttggattctatattagtggtctgaggaagagcagatcacattgtaaaactatggatggtctgataaggcttttactgaccccactgacttcagagttatactctgtttgctacatcataatgctggttttgctgactttttgtttttttatatatttataaaaaaagaaaaagttggtgattgcattgggaaattcccagggtattactggacctatgtggtgtattgttaaaccagtgtccttgtgatactgttgctcttgatgttcctgatacaggtaaggaaacagttggtcaactctgatacaaagtatatatacagttcagtattgtctctgttcattttgtttttatttcattgacaaaatcaaaccagcattccccattgtgtaaataaatgattttgctgaataaagtaaagtcttaaattcatatgttgaagcaaaaaaaaaaaaaaaaaaaaaaa

SEQ ID NO: 713 - DNA, 4728 bp, Homo sapiens
catgcaggcaagatggcggaaggggaggacgtgggatggtggcggagctggctgcagcagagctaccaagcagtcaaagagaagtcctctgaagccttggagtttatgaagcgggacctgacggagtttacccaggtggtgcagcatgacacggcctgtaccatcgcagccacggccagcgtggtcaaggagaagctggctattgcagcctgttcccggggcgcttgcttcctctgcccgttctctatacagacggaaggctcctcaggagcaacagagaagatgaagaaagggttatctgacttcctaggggtgatctcagacacctttgccccttcgccagacaaaaccatcgactgcgatgtcatcaccctgatgggcacaccgtctggcacagctgagccctatgatggcaccaaggctcgcctctatagcctgcagtcggacccagcaacctactgtaatgaaccagatgggcccccggaattgtttgacgcctggctttcccagttctgcttggaggagaagaagggggagatctcagagctccttgtaggcagcccctccatccgggccctctacaccaagatggttccagcagctgtttcccattcagaattctggcatcggtatttctataaagtccatcagttggagcaggagcaggcccggagggacgccctgaagcagcgggcggaacagagcatctctgaagagcccggctgggaggaggaggaagaggagctcatgggcatttcacccatatctccaaaagaggcaaaggttcctgtggccaaaatttctacattccctgaaggagaacctggcccccagagcccctgtgaagagaatctggtgacttcagttgagcccccagcagaggtgactccatcagagagcagtgagagcatctccctcgtgacacagatcgccaacccggccactgcacctgaggcacgagtgctacccaaggacctgtcccaaaagctgctagaggcatccttggaggaacagggcctggctgtggatgtgggtgagactggaccctcaccccctattcactccaagcccctaacgcctgctggccacaccggcggcccagagcccaggcctccagccagagtagagactctgagggaggaggcgcccacagacttacgggtgtttgagctgaactcggatagtgggaagtctacaccctccaacaatggaaagaaaggctcaagcacggacatcagtgaggactgggagaaagactttgacttggacatgactgaagaggaggtgcagatggcactttccaaagtggatgcctccggggaggtgagtgggcctggtgggtcagagggaagcgagcctaatggtcctgggtgtgagagctctccccagccagcccagctgtcccctcaggagggtccctgctcctgtctgaggtgacaggtggtgggaaaggagctggagcttcctgctcagacccacaacattggtcatcagcaggctgcacttttcctcagttccagggtggatagagggtcaagttcttgaccttagctctgtatcaaaattgcctgagaaactgcttaagaaaacagatgtcatgctgagcgcggtggctcacacctgtaatcccaacactttgggaggccaaggtgggaggattgcttgaggcgaggagttcaagaccagcctggccaatatagtgagaccccatttctgtttttgaaaaaaaaaaaaaaaggaaaaaagaaaacagacatcaaaccctgcctgaccttctgagttgtggtcctcaggtatgaggcctgagtatatacttggccttggagacaaaagaccagtgtgatcaagggcaagggcaagttacttaacctgagcccctggttcctcatctaaaacatggaattgatcattataagacctggctataagctgtaatgaggtgatccatgtagacaccttagggctattgcctgagacatggtgaccagcactcaggagacattagtgataaaccccacaaaacccattccagttattaagctcaaggaggccttagtactgttattcttcactacctctcagaatcaaaagtggctcatttagattgagaggctggaacagtccaaagctctcccagctaataagtgacaggactgaggctgcaacccagacatctgattcatgtcagcgttagttccactgtcacataagaaccacatgagtccttccatcatgcaacttatgagcctgttagaaagaggtggacagattagagagacatgtgaagggcctcctttttcatgatgggaaactgaagccttgggggagtattttacctactcaggagtattttgcacttgtgactacctcactatacccaggacagagaaagcccatagtgccctgtcaggccgcaggggcttgctggctttttgtgtctttgcagccccctttaaaacctgacgtgcagtacacgtgagcattctagaacctgctataccagggcttagccgacagcaggccaagagtaggaacaaagcaagaaaacgttccgtggggagacttgagctgggaattagggtgttggtgcccctagtgaagacctagtgggcatctgtaggccactgccacctctgcttttggccacagtgccactcaggcagtggcctccattcacccaaagactaagtaacttgcccttgattacactggtcttttgtgtccagggccaagtatctgctcaggcctcctgagttctctgcttctcagagccatggcattatctgctcagcaggaggcaagttctccttaaaggactgaggctgacttggttcctgtaggcagccatcaccttgtggtgtctggtgttggttgggggaagtgtttcctttaggtctgaggtaatcagagcatcaggcccaccccccaggcagagggcagctctgcccctcagacacattccttaagactaggggttcactctcagtgggacctcagagtatggcctggggtaggggatgggaggtggctctgctcagcaagtggaggttaggtctgggcctgactcaggagtaactatgtgtttgtgatttccattaccccctcccatttgcagctggaagatgtagagtgggaggactgggagtgagggagccagagggagcagctcccccacccatggcatctctcgcctccctcgctcgtctcagcccagccctggaagactgagaatgttcccccaaatctcctctgccaaccagagctctgggcacagattctggtggctccctgctggccctcttgggcctctgctcacacctgggaaggggctctctaaatcccggccagaaactctgacttgtgccaacaataggatgacccaagggagaggaaacctatcctcctcaccagaagagcctgtgtttttctgctgaacacccactgttcctgaggactcctgctgggaagtcccaagggatagttctagcccttctgcctgtgtagacagaagctaaaccaccagtctctctcggaggaagctgagacaacatactctgtccatacataagcaggcagggagggccatgccacctacccttggctaaacagggacagtgaacacattttggttcctatcccagtgggtaagaggcacttatctctgggaaatttgcctctcttgggactctccccctcccaggcattttccattcctggaaaggctcctttggggttcagaatccagagaccaaaccctgacccacctccttcctttcctccagcccacactggtctgtccccatgccttcccagggcttcttcatgtcagatgcacccaagtccttagcccagctgtgccacctgcaggagttcgctcttgcgtttcttcccctccccaagaagggagggggctacttcaggcccttctgtgtgttgcctggcaggataccttgtccaaccagctacccacctcaactcccctgtagtttaggacacaaaacagctaccagcggtacagagcggtgatcaaagccgagtacttacaactctggtaagcctagcttctccgcctcagcccttctgcttctggaagagctatcctgggggtgaacttgaaactctcatcaggcttctgcaaaagctcttcttcctgaagacagacccagcctttgtgctctcaccctccactctggtaaagctgcacctctgggggaatgaggggctgcaggaatctctggagagcctggtgcttcacgatgctgctctggtgattcttgtacctaatctggtgtgctcaccaatgagtgaaagggatcgtgggtcagggacaccgagagagtgaggtcacttccacttcaaaccttcagtgagggggtgggatggagagaatgctgaatcttttttttgacgggatggggtttttctctttgtaattatttctttagtttaattaaccttttggttgtttgtgcaatattatatattttaaattataatgcatctccccagagtattttgtagctgggaaaagaaaaaaggaaaaaaagaaaaaaagattctaacagctgttagttttataattaaaaaagaaagaaaaaaaaaaaaaaaaaaaaaaaaaaaaaaaaaaaaaaaaaaaaaaaaaaaaaaaaaaaaaaaaaaaaaaaaaaaaaaaaaaaaaaaaaaaaaaaaaaaaaaaaaaaaaaaaaaaaaaaaaaaaaaaaaaaaaaa

SEQ ID NO: 714 - DNA, 2297 bp, Homo sapiens
agcctcggggcttgacgggattgtggcggtcctctctcccaattcggaagctacagctacctccggacgctctcaagatggcgacctctctgggttccaacacctacaacaggcagaactgggaggatgcggacttccccattctgtgccagacatgtcttggagaaaacccatatatccgaatgaccaaagaaaagtatgggaaggaatgcaaaatctgtgccaggccattcacagtgtttcgctggtgccctggagtccgcatgcgtttcaagaagactgaagtgtgccaaacctgcagtaaattgaagaatgtctgtcagacctgcctcttagacctagagtatggcctgcccatccaggttcgtgacgcaggattgtcttttaaagatgacatgccaaagtcagatgtcaacaaagagtactatacacagaatatggagagagagatttctaactctgatggaacacggccagttggcatgctggggaaagccacatctaccagtgacatgctgctcaaactggcccggaccacaccctactacaaaaggaatcgaccccacatttgctccttctgggtgaaaggagagtgtaagagaggagaggaatgtccatacagacatgagaagcctacagatccagatgacccccttgctgatcagaatattaaagaccgttattacggaatcaatgatcctgtagctgacaagcttctaaagcgggcttcaacaatgcctcggctggacccaccagaggataaaactatcaccacactatatgttggtggtctaggtgataccattactgagacagatttaagaaatcatttctaccagttcggagagatccggacgatcactgttgtgcagagacagcagtgtgctttcatccagtttgccacacggcaggctgcagaagtggctgctgagaagtcctttaataagttgattgtaaatggccgcagactgaatgtgaaatggggaagatcccaggcagccagaggaaaagaaaaagagaaagatggaactacagactctgggatcaaactagaacctgttccaggattgccaggagctcttcctcctcctcctgcagcagaagaagaagcctctgccaactacttcaacttgcccccaagtggtcctccagctgtggtgaacattgctctgccaccgccccctggcattgctccacccccacccccaggttttgggccacacatgttccacccaatgggaccaccccctcctttcatgcgggctccaggaccaatccactatccttctcaggaccctcagaggatgggagctcatgctggaaaacacagcagcccctagcaccttgtcaccactctggggctctgtggaagaaagggcacttaaaactcccagtaaatcttggaataaatatatttttccttcccttgtagtttccatggtagctgaatgtgctcagatgtgagcagtcagagactgacagccatgctttcctatacttgttcaaaggatcgatggaccgtaaataagctgccattaacacatctggttactgctgtaacatgactaataaaaccgaacgcctgttccccttacccgtgtgggggacacgcagatgagtgaattggaatgtccagcagagttaccctcccaattatatgttcattttgtatattttttggtcgggggaaaaattgacctgcagtaaaaaaacctttgaccatttttatgtccattggatactttcctttttatcatcttaaaaaaagataactagtactaatcattgtagtggcctaagtgtgatttaactcttgaagtcacaccctccgaaagatgagtagaaaccagcaccagcacagcccagatcttctctttcctctccttttcctcatttattcctaaaggaatctgaccattttacgtctctacggcccaaaaaaagacaaaaataaaaattcctttttattcctgtcaactggatggaaacacaaatttcatggagctgtgtaccatcgaagaaacctggtgtctggcatgaaattactgtaaagaacttcctgtaaaacacgttctttaacaaactgaaatgaaaagcattggagcgtctgaatgaaagacgtgacctcctgctgggactctgatggtcttcagcattcaccttcgtgtgtcttcagtgtctcattgtcatccctgcttctgtttggtcttagagtgtttggatataactgaattgtagatggtaaaggaaatttgatgtgttttttgtttttaaataattaaaacgggtcaattttt

SEQ ID NO: 715 - DNA, 3711 bp, Homo sapiens
atcttgttcccaggggcagttggcggaagagatcgagctccctggctgccggctcgccttctgcgtggagttctcgcggtctgggtttcgctgtctgctcttggcccggggtcattttgtcggcgtcgggtgccctctcttgcccagctggggcacagcgaggcggccccttctcccgacgacgttcgatggagtagggtcccagaccgttgtcccgaagagcgagatcgagcttggccccctcccccccctccttccctccctccttccttccgccgcaacatggctaacaacagccccgcgctgacaggcaactcgcagccgcagcaccaggcggctgcagctgcggctcagcaacagcagcagtgcggcggcggcggcgctaccaagccggcggtctccggcaagcagggcaatgtgctcccgctctggggcaacgagaagaccatgaacctcaaccccatgatcctgaccaacatcctgtcgtcgccttacttcaaagtacagctctacgagctcaagacctaccacgaggtggtggacgagatctactttaaggtcacgcacgttgaaccatgggagaaaggaagcaggaaaacagcgggccagacagggatgtgcggaggggttcgaggtgttggaacaggaggaattgtttctacagcattttgcctgttatacaaattatttaccctgaagttaactcgaaagcaagtgatgggtcttataacacacacagactctccatatattagagcgcttggatttatgtatataagatatacacagccccctacagatctgtgggactggtttgaatccttccttgatgatgaagaggacctagatgtgaaggctggtggaggctgtgtaatgaccattggagaaatgctacgatcttttctcacaaaactggagtggttttctaccttgtttccaagaattccagttccagttcaaaagaatattgatcaacagattaaaacccgacctagaaaaatcaagaaagatgggaaggaaggtgctgaggaaatagacagacatgttgaacgcagacgttcaaggtctccaaggagatctctgagtccacggaggtccccaagaaggtcaagaagtagaagtcatcatcgggagggccatgggtcttctagttttgacagagaattagaaagagagaaagaacgccagcgactagagcgtgaagccaaagaaagggagaaagaacggcgaagatcccgaagtattgaccgggggttagaacgcaggcgcagcagaagtagggaaaggcatagaagtcgcagtcgaagtcgtgataggaaaggggatagaagggacagggatcgagaaagagagaaagaaaatgagagaggtagaagacgagatcgtgactatgataaggaaagaggaaatgaacgagaaaaagagagagagcgatcaagagaaaggtccaaggaacagagaagtaggggagaggtagaagagaagaaacataaagaagacaaagatgataggcggcacagagatgacaaaagagattccaagaaagagaaaaaacacagtagaagcagaagcagagaaaggaaacacagaagtaggagtcgaagtagaaatgcagggaaacgaagtagaagtagaagcaaagagaaatcaagtaaacataaaaatgaaagtaaagaaaaatcaaataaacgaagtcgaagtggcagtcaaggaagaactgacagtgttgaaaaatcaaaaaaacgggaacatagtcccagcaaagaaaaatctagaaagcgtagtagaagcaaagaacgttcccacaaacgagatcacagtgatagtaaggaccagtcagacaaacatgatcgtcgaaggagccaaagtatagaacaagagagccaagaaaaacagcataaaaacaaagatgagactgtgtgaaaatattttgtaaaagtggatcacattgaatcctataaatgattaaatctgcttttttcccccacgttgagattgtgcagtagttcgcactcctcaagctctccctgtaggctgcattttcatttcctctttcgtgtagggaagtgcctttgtaattccatttattgcattggtgttttcacccaattgttaagtttgatacatgatgcacagattgttcttgcatttttattgtttgtttttgaaatgtacagtctgtacatatgtcctgaaaatgttttaattcctttggcatggttgccatgttggttaaatttgtataaggcaataaactgccactaatctatttttgttttgtaggtgtgggattatggtttgtgtactgaagttagcatggctgtgcttttcgtaatagaatgctaaagactttgagaatggatcttggatgtctattataggagaagtatgtgctgccaatgtacaagaaggcagcattgtaggattaacattcttgtctactgtatattatcttggaaggctcttgttaatatgttacacttaatattctccacagttacctttagagagaatttatgagaagttagtttctgatgcagaggtttttaggctgtgatttcatcaaaagtccttttagcattctacctcaaagggacacttagtatgcctaaaatttattcacttagttttccttttttatttgaaaaaatacatgacatgtaatctttttttcttgaattctttctcagattttaaagtactatattaaagaaaaaaattaatgtctaaagcctagcattcttgcagaaccctatactaacatgtaatggggagagggtggggcagatgagtagagaaacagattcaagcctcaagcttccaaagcatttttataaatggaaaatccttaaattatgaaacagcttgatatagtgtcctttttttaaaattcagaactttttttattgataatggagattgctgtttgagtttttaaacttaatctagaacagaggagtattaaaagtaatgctgtgctgcattatttaagactatcagcaaattatttgatagattgttcttacaacttgtattctgattacagaaccatcatgagtgtggaataaatactggattaaatcctttatcctgggtcttggcttttcccccatttgttaaatttttttagcatatttatattgtggaaattgatgaaacgtcagtagagtcacactttgtgtacagggatgtcttagtgcccagatgacaagtgaattttggagaaatgcatagactgggattgggcatgtggtaatcaataatctttattagaatacttgataatggcagttccctttgtcagtggttgttacatgtgtcatttgattactttgttccatgtcaaagacgtttattgggataccttttacttggacaatatgttagcattttttaaaatttggacttgaaattctttaagataattcacccaattctttttagaaaagaaaatagaggcccaaagtaatgatgtcagtgctagggctaaaactcagtattctgacagtgtagtgaacctggcacgcacattgaggtttgttttatctcactggttatactggccaactaatgcgcactcagaagccaccttgcaaaaatgttaaatggagcaaacgagtacacttgcaagagtcctccatatgtgggcttaacatatgtaccactccattttagaaaaatctcattaaatgaattcttctaaaaaaaaaa

SEQ ID NO: 716 - DNA, 2811 bp, Homo sapiens
cctaggccagccccccccgcaggaagagtccccttcctctgaagcaaagagcagaggacccaccccaccagccatgggcccacgggatgccagacctcctcgaaggagcagccagccatctccaacagcagtgccagcctccgacagccctcccaccaagcaagaggtgaagaaggcaggagagagacacaagctggcaaaggagcggcgagaagagcgggccaagtacctggcggccaagaaggcagtgtggctggagaaggaggagaaggccaaggcgctgcgggagaagcagctccaggagcgccggcgccggctggaggagcaacgtcttaaagccgagcaacgccgtgcagccctggaggaacggcagcggcagaagctcgagaaaacagcaaggagcgctatgaagcagccatccaacggtcagtgaagaagacgtgggccgaaatccggcagcagcgctggtcctgggcaggggccctgcaccacagctctccaggacataagaccagtgggagcaggtgctccgtgtcggcagttaacctgcccaaacacgtggactctataatcaacaagcggctctcaaagtcctctgccacgctctggaactcccccagtagaaatcgcagcctgcagctgagcgcatgggagagcagcatcgtggatcgtctgatgacgcccactctctccttccttgctcggagtcgcagcgcggtcacactgccccgcaacggccgggaccaggccgtgccggtgtgcccgcgctcggcctccgccagccccctgacgccgtgcagcgtcacccgaagcgtgcaccgctgcgcccccgccggtgagcgcggggagcgccgcaagcccaacgccgggggcagccccgctccggtgcgccgccggccggaggcctcgccggtgcagaaaaaggagaagaaggacaaggagcgggaaaacgagaaggagaagagtgccctagcccgggagcgcagcctcaagaagcgccagtcgctgcccgcctccccacgtgcccgcctctccgccagcaccgcctctgagctcagccccaaatccaaggccaggccatcctctccctccacatcctggcacaggcctgcctccccctgccccagcccagggccaggccacactctgcctccaaagccaccgtccccccgaggcaccactgcatcccccaaggggcgggttcggaggaaggaggaggcaaaggagagccccagcgccgcagggcccgaggacaagagccagagcaagcgcagggccagtaacgagaaggagtcagcagccccagcctcaccggcaccttcgccggcgccctcgcccaccccagccccgccccagaaggagcagccccccgcggagacccctacagacgctgctgtcttgacctcacccccagcccctgctcccccggtgacccctagcaaaccaatggccggcaccacagaccgagaagaagccactcggctcttggctgaaaagcggcgccaggcccgggagcagcgggagcgcgaggagcaggagcggaggctgcaggcagaaagggacaagcgaatgcgagaggagcagctggcacgggaggccgaggcccgggcggagcgggaggcggaggcccggaggcgggaggagcaggaggcacgagagaaggcgcaggccgagcaggaggagcaggagcggctgcagaagcagaaagaggaggccgaagctcggtcgcgggaagaggcggagcggcagcgtctggagcgggaaaagcacttccagcagcaggagcaagagcggcaagagcgcagaaagcgtctggaggagatcatgaagaggactcggaagtcagaagtttctgaaaccaagaagcaggacagcaaggagcgcrawcgccaacggttccagcccagagcctgtgaaagctgtggaggctcggtccccagggctgcagaaggaggctgtgcagaaagaggagcccatcccacaggagcctcagtggagtctcccaagcaaggagttgccagcgtccctggtgaatggcctgcagcctctcccagcacaccaggagaatggcttctccaccaacggaccctctggggacaagagtctgagccgaacaccagagacactcctgccctttgcagaggcagaagccttcctcaagaaagctgtggtgcagtccccgcaggtcacagaagtcctttaagagggtttgccttggatccgggcacagttgtgagggctcctctgcatcacctaccaggatgtctggaggagaaaaagacagaacaaagatggaagtggcctgggcccctgggggtgggtcctctctgttgtttttaatctgcaccttatagactgatgtctctttggccggagccagatctgcccctcagtgcattcgtgtgctcgcacgcgcagacatcccttctcccccatacacacatatacactcacagcctctctggcctcttcccttggggaggggccacctgtagtatttgccttgatttggtggggtacagtggatgtgaatactgtaaatagcttgtgctcagactcctctgcgtggagagggtgggtgcaggaggcagaccctccccccaaagccccctggggagatcttcctctctctatttaactgtaactgagggggatcccaggtctggggatgggggacaccttgggccacaggatactggttgcttcaggggtacccatgccccctgccctcgcctggaatcagtgttactgcatctgattaaatgtctccagaaataaagaataattctgccaaaaaaaaaaaaaaaaaaa

SEQ ID NO: 717 - DNA, 3663 bp, Homo sapiens
gtggcactcacggaatctcgggtcttctgacgtgccgggcgggaagatgtcatcattgccaagaagagcgaaagtacaggtccaggatgtggtactgaaagatgaattttcttcattctctgagttatcatctgcctctgaagaagatgacaaggaagatagtgcctgggagccccaaaagaaagttcccagaagccgtaaacagccccctcccaaggaatccaaaccaaagaggatgcctcgggtgaagaagaatgccccacagatcagtgatggctcagaagtcgttgttgttaaggaggagctgaatagctctgtggctattgctgatactgctttagaagacagaaaaaataaattggatactgtacagactctgaaaacagccaagacaaaacagaaatgtgcagcgcagccacatacagttcgaaggactaaaaagctgaaagttgaagaagaaaccagcaaagccagcaacttagagggtgagagtaatagttcagagacaccatccacaagcactgtgtggggaggtacatgcaagaaggaagagaatgacgatgactttacatttggtcagtccgctttaaagaaaatcaagactgagacatatcctcaggggcagcctgtcaagtttccagcaaatgccaatagtactaaagaggaggtggaaatgaattgggacatggtacaggttttatctgagagaactaatattgaaccttgggtttgtgccaacatcattcgtctctttaatgatgataacacaattcccttcattatacgttatagaaaagagctcattaataaccttgatgctgattccttgagagaagttcagcaaaccctagaagagctacgggctgttgcaaagaaagttcatagtacaatccagaaaattaagaaggaagggaagatgtctgagtgcttgttaaaagccatgctgaattgtaaaacttttgaagaactagaacacgtgtctgctccatataaaactggaagcaaagggactaaagcccagagagcaagacagttgggcttagaaggagcagccagggcactgcttgagaaaccaggggagctcagtctgctatcgtacattaggcctgacgttaaagggctttcaacgcttcaggatattgaaataggagtgcagcatattttagcagatatgattgctaaagacaaagacacgcttgacttcattcggaacttgtgccagaagagacatgtttgtatccagtcatctctggcaaaagtatcctcaaaaaaggtaaatgagaaagatgttgataagtttctgctctaccagcatttttcctgcaacataagaaacattcaccatcatcagattctggcaattaaccgtggagaaaatttgaaggtactgacggttaaggtcaatatttctgatggagtgaaggatgaattctgtaggtggtgcatccaaaacaggtggagaccacgtagctttgcaaggccagagttaatgaagatcttatataattcactgaatgattcctttaaacgccttatttatcctcttctctgtagagaattcagagccaaactaacatcagatgcagagaaggaatcagtaatgatgtttggacggaaccttcgtcagctccttttaacaagccctgttccagggcgcaccttaatgggagtggatcctggttataaacatggttgcaaattagctataatttctcctactagtcagatacttcatactgatgtggtttacttgcattgtggacaaggcttccgagaggcggagaaaataaagacacttttgctgaatttcaactgcagcacagtagtgattggaaatggaactgcctgcagggaaacagaagcttactttgctgacctgataatgaagaattattttgcaccactggatgttgtttactgtatcgtcagtgaagcaggagcatcaatctacagtgtcggccctgaagctaacaaagagatgccagggctggaccctaatttgagaagtgcagtttccatagcaaggcgtgtacaagatccattagctgagctagtgaaaattgagccaaagcacattggagttggaatgtatcagcatgacgtatcccagactttactcaaggcaacactggacagtgttgtagaagaatgtgtcagctttgtgggagtggatattaacatctgttcagaagttttgttaaggcatattgcaggactcaatgccaacagggccaaaaatattattgaatggcgagagaaaaatggaccctttatcaaccgagaacagctgaagaaagtgaaagggctgggcccaaaatccttccaacagtgtgctggcttcatcagaatcaaccaggattatatccgaacgttttgcagtcagcaaactgaaacttcaggccaaattcaaggagttgctgtgacatcttcagcagacgttgaggtcacaaatgagaagcagggcaaaaagaagagcaaaactgcagtgaatgttttactgaagccaaatcctttggaccaaacttgtattcatccagaatcatatgacatagcaatgaggtttttgtcatccattggagggacactgtatgaggttggaaagcctgaaatgcaacaaaaaataaattcattccttgaaaaggaaggaatggagaaaattgcagaaagattgcaaacaacagtacacaccttacaggtcatcatagatggtctcagccagcctgaaagctttgactttcgaacagattttgataaacctgatttcaagagaagcatagtatgcctggaagatctgcagattgggacagttcttacaggcaaagttgagaatgccactctctttggaatttttgtggatataggagtggggaaatctgggctgattcccatacgaaatgtaacagaagcaaaactttcaaaaacaaagaagagaagaagccttggactgggccccggagaaagagtggaagtccaagtactcaacattgacatcccccgatctaggattactctggacctcattcgggtgttatgagtatcccacgaaggccagacgctgattttattttctcatttccacagattgacaaggataagtcagttgtttgtaaactctaggtagcagatgagaaataattcacttaatatcagaaatattttccaaacactttcctttattttttcttctgaataaatagaaaaccaacagtttgatttccttttcccttaaaggaaacaactaatacacattcttatatggctttatgtagtaatagttttctgactaaaattttgttttttattttttgtaatttatctttaactccttttgcattttgtataacagattgcttaacttctacttgccaacatctgccttgctggacttgtatgggattgtctccttgatttgaattgtaccgtctttgttgacacagtagggctgggcagtgtttaatccttccattttatagatttttttttaatcaggccttttggactttattcataattttgcaataatctcttttcccttgtcatgcaagccaaaaatataccagtaaaacagattctgacgtgtttgtagttatcaaatgaatggctcgaaacacttctcaaaaggatatacgtattgaccccaacaataaatgtttgtggctagtg

SEQ ID NO: 718 - DNA, 2076 bp, Homo sapiens
gctggagccggcgcggaggagcgggcggccgcggctgtgccctctcctactcctcaccgcgcgcgcgcggggaaccagtagccgcggctgcttcggttgccgcggtcggtggtcgttatggattctccatgggacgagttggctctggccttctcccgcacgtccatgtttcccttttttgacatcgcgcactatctagtgtcagtgatggcggtgaaacgtcagccgggagcagctgcattggcatggaagaatcctatttcaagctggtttactgctatgctccactgttttggtggaggaattttatcctgtctactgcttgcagagcctccattgaagtttcttgcaaaccacactaacatattactggcatcttcaatctggtatattacatttttttgcccgcatgacctagtttcccagggctattcatatctacctgttcaactactggcttcgggaatgaaggaagtgaccagaacttggaaaatagtaggtggagtcacacatgctaatagctattacaaaaatggctggatagtcatgatagctattggatgggcccgaggtgcaggtggtaccattataacgaattttgagaggttggtaaaaggagattggaaaccagaaggtgatgaatggctgaagatgtcataccctgccaaggtaaccctgctggggtcagttatcttcacattccagcacacccagcatctggcaatatcaaagcataatcttatgttcctttataccatctttattgtggccacaaagataaccatgatgactacacagacttctactatgacatttgctccttttgaggatacattgagttggatgctatttggctggcagcagccgttttcatcatgtgagaagaaaagtgaagcaaagtcaccttccaatggcgttgggtcattggcctcaaagccggtagatgttgcctcagataatgttaaaaagaaacatactaagaagaatgaataaatttacgtgatgagctctacaaggccaaaaattttttttcttatctacctgttatattgtgctaatttttctatgtatgtgatgtgaaatgaagactatatatatggaatggaggtgacagaaagaaagaaattctttgtttgagggagacttcccctttctggattgtatttgtagagtgttacgagtgtatcatgtgattatgctttaccggtataagagattctgttgtgattatttgaatagttttatattaataaaagaagacaaaattttttaaatgttagaaaaagcagatctgtcattgcaaagtaacaaaaattttaagcttttaaaaatgtagatttttcatatttttaaaatttgaatctatttgagctttagttcagcagaattaaatttttacttgacattatcattaaaattgctaggtatggagaacaattcctattttattttgaacactgagaagagtaaacttttcctaaaacactttatattataaatgaaaataaattgctagtttatattttagatataaacatcatattttttattaatacctacatcaaatggaaaatatctgaaattttttttccatagcaggtattttctactagaagtagttttactacttttcatttagaacagagtatgagtcttaatctgaagtctttttcatgcccttgttttaaaaaaactactttttttggcctcaaaaaaatcaagggtgtaatttttaataaattgttaatcctatgttttgtaattttcattttaggagcttgacttatttttttctctctcataaaaacacatttgttttaattgtaggagaaattttctcagcattttgcatgttctttctaatctttgttggtctgaatatattggtagtaattactgtaattattcaacaaaaagcatatccgttcaaaaatttttccactatgtcttttttctagtggctactgttttagttttctagttgaatatctctgacaagctttcgtatggttttgttatatcttcatctacatgtaatgtgttattaattttattaaatgaaaactaatcaccttc

SEQ ID NO: 719 - DNA, 2861 bp, Homo sapiens
gtccctcacaccgagagttcctgcgcgtggggagttggagagtttgcgtggcgggaacgcggcggcagtgagagcgagcggcgccggcccttgcgtccggtgcggcgatgctgaccccggcgttcgacctcagccaggatccggacttcctgactatcgccatccgcgtgccctacgcccgggtctccgagttcgacgtctacttcgaggggtctgacttcaagttctacgccaagccatactttctcagattaacccttcctggaagaattgtagaaaatggaagtgagcaagggtcctatgatgcagataaaggaatttttaccattcgcctgcccaaagaaacccctggccagcattttgaggggctgaacatgttaactgctcttctggcaccaagaaaatccaggacagcaaaaccacttgtggaagaaataggtgcttctgagattcctgaggaagtagttgacgatgaagagtttgattgggaaattgagcagacaccctgtgaagaggtatcagaaagtgctttgaatccgcagtgccactatggatttggaaacttacgatcaggagtgttgcaacggttacaggatgaactgagtgatgttattgatattaaggatccagatttcacccctgcagctgaacgaagacagaagcgcctggccgctgagctggccaagtttgatcctgatcattatctagctgacttttttgaagatgaggcgattgaacagattttgaagtataatccttggtggactgacaaatattcaaaaatgatggcctttttggaaaagagtcaggaacaagaaaatcatgctacattagtgtctttttctgaagaagagaagtatcagctacgaaaatttgtcaataaatcttatctgctggacaagagagcctgtcgtcaagtgtgctacagtttgattgatatccttctggcatattgctatgaaacccgtgtcactgaaggagagaagaatgttgaatctgcatggaatatcaggaaactgagtccaacactatgctggtttgagacttggactaacgttcatgatatcatggtgtcttttggaagaagggtgttgtgttacccactctatcgccatttcaagctggtgatgaaggcctacagggacactataaagatattgcaactgggtaaaagtgcagttttaaagtgtctcctggatattcacaaaatttttcaggaaaatgacccagcgtacatactgaatgatctctacatctcagactactgtgtgtggattcagaaagtcaaatccaaaaagttggcagctcttgcagaagccttaaaggaagtctcccttacaaaggcccagctggggttagaactggaagaactagaagcagcagcactgcttgtccaggaggaagaaactgcattaaaagcagcccattcagtttctgggcagcagacactttgctccagctctgaggcaagtgattcggaggactcagacagcagcgtgtcatctggaaacgaagactcaggctcagattcagaacaagatgaactcaaagatagtccatctgagacagtcagttctttgcaaggtccctttcttgaagaaagcagtgcctttcttattgttgatggtggagtacgcagaaacacagccatccaggagtctgatgccagtcagggaaagccacttgcctcttcctggcctcttggagtgtctgggcctctgatagaggagcttggggaacaactgaagactacagttcaggtttctgaacccaagggcaccactgctgtaaaccgcagcaatattcaggagagagacggctgtcagacaccaaataattgactcttaggtggttttattcattgttgagaaatatggtagattgggtttcatttaccgaatgagaattcttcattttcactttgtaatttttcttagtatatagtcagcccactgtatttgtgtgttccacatctgtggattcaaccaactgcagatcaaaaatattgaagaaaaaatcgcatctgtaccaaacatgtacagacttttttcttgttattattctctaaataatacagtatgacaactatttccacagcatttacattgtattgggtaatataagtaatctagtgatgatttaaactgtgcaggaggatgtgggtaggttatatgcaaatactgcaccattttttatcaggggcttgagcatctgaggattttagtatcctcaggagtcctggaaccaaccccccacagatacggggacaactttatgacattgtttttcaaccaatgaatgtttataccttttgttttccttgccgcgactgtgaagataaagttcaaaagtatttttaccaaagtgtagctaatatttcaagctgaaaataatagttctactgcccgtgtctccagaatgtagagcccatcaatatttttattttaggaggtgtacttgacacccaataaactgcacgtatcaaaagtgtacaatgtgttggcgtatgtataccctgcgtaaaactatcaccacaactgaagtgaggaacggacccatcattcccaagtgcccttgtgccctgttattagtttgcatgtcctagaattctatgtaaattgaatcatacaatatgtatcccttttttggtcaggcatattttactcagtatagttattttgagattcatccatgtggtagcatgtgtcacgagtttttgtttttatgtttttcattgctgagtactgcttcattgaatagatttgttcattgacctatcgatggacacctgggttgtttccagtttggggctgttataaataaagctgttatgaacatttgtgtacaaaaaaaaaaaaaaa

SEQ ID NO: 720 - DNA, 2251 bp, Homo sapiens
gacgtcacggtcactgacagcgtgagcccgcggcggctgctgccatggtggctggcggccgggtaagggtctgagtggatctcctgccaggccagagcgccttcgggggccgcggcggaaggccaggagtttgcagccagggcgccgggtttgtggtctgcagtgtcgtgaggctgaggtgcagcatgtctagactgggagccctgggtggtgcccgtgccgggctgggactgttgctgggtaccgccgccggccttggattcctgtgcctcctttacagccagcgatggaaacggacccagcgtcatggccgcagccagagcctgcccaactccctggactatacgcagacttcagatcccggacgccacgtgatgctcctgcgggctgtcccaggtggggctggagatgcctcagtgctgcccagccttccacgggaaggacaggagaaggtgctggaccgcctggactttgtgctgaccagccttgtggcgctgcggcgggaggtggaggagctgagaagcagcctgcgagggcttgcgggggagattgttggggaggtccgatgccacatggaagagaaccagagagtggctcggcggcgaaggtttccgtttgtccgggagaggagtgactccactggctccagctctgtctacttcacggcctcctcgggagccacgttcacagatgctgagagtgaagggggttacacaacagccaatgcggagtctgacaatgagcgggactctgacaaagaaagtgaggacggggaagatgaagtgagctgtgagactgtgaagatggggagaaaggattctcttgacttggaggaagaggcagcttcaggtgcctccagtgccctggaggctggaggttcctcaggcttggaggatgtgctgcccctcctgcagcaggccgacgagctgcacaggggtgatgagcaaggcaagcgggagggcttccagctgctgctcaacaacaagctggtgtatggaagccggcaggactttctctggcgcctggcccgagcctacagtgacatgtgtgagctcactgaggaggtgagcgagaagaagtcatatgccctagatggaaaagaagaagcagaggctgctctggagaagggggatgagagtgctgactgtcacctgtggtatgcggtgctttgtggtcagctggctgagcatgagagcatccagaggcgcatccagagtggctttagcttcaaggagcatgtggacaaagccattgctctccagccagaaaaccccatggctcactttcttcttggcaggtggtgctatcaggtctctcacctgagctggctagaaaaaaaaactgctacagccttgcttgaaagccctctcagtgccactgtggaagatgccctccagagcttcctaaaggctgaagaactacagccaggattttccaaagcaggaagggtatatatttccaagtgctacagagaactagggaaaaactctgaagctagatggtggatgaagttggccctggagctgccagatgtcacgaaggaggatttggctatccagaaggacctggaagaactggaagtcattttacgagactaaccacgtttcactggccttcatgacttgatgccactatttaaggtgggggggcggggaggcttttttccttagaccttgctgagatcaggaaaccacacaaatctgtctcctgggtctgactgctacccactaccactccccattagttaatttattctaacctctaacctaatctagaattggggcagtactcatggcttccgtttctgttgttctctcccttgagtaatctcttaaaaaaatcaagattcacacctgccccaggattacacatgggtagagcctgcaagacctgagaccttccaattgctggtgaggtggatgaacttcaaagctataggaacaaagcacataacttgtcactttaatctttttcactgactaataggactcagtacatatagtcttaagatcataccttacctaccaaggtaaaaagagggatcagagtggcccacagacattgctttcttatcacctatcatgtgaattctacctgtattccagggctggaccacttgataacttccagtgtcctggcagcttttggaatgacagcagtggtatggggtttatgatgctataaaacaatgtctgaaaagttgcctagaatatattttgttacaaacttgaaataaaccaaatttgatgtt

SEQ ID NO: 721 - DNA, 2453 bp, Homo sapiens
aacggatgggcggggagggggcggggccgggcaacccggaaggtccggcgtcccagccgcctacctcgctgggaccctggtcttgctgtcccccgctggcctcctgcccaagcgactgcggccaggatgggccggaaggtgaccgtggccacctgcgcactcaaccagtgggccctggacttcgagggcaatttgcaaagaattttaaagagtattgaaattgccaaaaacagaggagcaagatacaggcttggaccagagctggaaatatgcggctacggatgttgggatcattattacgagtcggacaccctcttgcactcgtttcaagtcctagcggcccttgtggagtctcccgtcactcaggacatcatctgcgacgtggggatgcctgtaatgcaccgaaacgtccgctacaactgcagagtgatattcctcaacaggaagatcctgctcatcagacccaagatggccttggccaatgaaggcaactaccgcgagctgcgctggttcaccccgtggtcgaggagtcggcacacagaggagtactttctgcctcggatgatacaggacctgacaaagcaggaaaccgtacccttcggagatgcggtgctggtgacatgggacacctgcattggaagtgagatctgtgaggagctctggacaccccacagcccgcacatcgacatgggcctggatggcgtggagatcatcaccaacgcctcgggcagccaccaagtgctgcgcaaagccaacaccagggtggatctcgtgactatggtcaccagcaagaacggtgggatttacttgctggccaaccagaagggttgtgacggggaccgcctgtactacgacggctgtgccatgattgccatgaacggaagcgtctttgctcaaggatcccagttttctctggatgacgtggaagtcctgacggccacgctggatctggaggacgtccggagctacagggcggagatttcatctcgaaacctggcggccagcagggcgagcccctaccccagagtgaaggtggactttgccctctcgtgccacgaggacttgctggcacccatctctgagcccatcgagtggaaataccacagccctgaggaggagataagccttggacctgcctgctggctctgggattttttaagacgaagtcaacaggcagggtttttgctgcccttgagtggcggggtggacagcgcagccaccgcctgcctcatctactccatgtgctgccaggtctgcgaggccgtgaggagtggaaatgaggaagtgctggctgatgtccgcaccatcgtgaaccagatcagctacaccccccaggatccccgagacctctgtggacgcatactgaccacctgctacatggccagcaagaactcctcccaggagacgtgcacccgggccagagagttggcccagcagattggaagccaccacatcagtctcaacatcgatccagccgtgaaggccgtcatgggcatcttcagcctggtgacggggaagagccctctgtttgcagctcatggaggaagcagcagggaaaacctggcgctgcaaaatgtgcaggctcgaatacggatggtcctcgcctatctgtttgctcagttgagcctctggtctcggggtgtccacggtgggctcctcgtgctgggatccgccaacgtggatgagagtctcctgggctacctgaccaagtacgactgctccagtgcggacatcaaccccataggcgggatcagcaagacggacctcagggccttcgtccagttctgcatccagcgcttccagcttcctgccctgcagagcatcctgttggcgccggccaccgcagagctggagcccttggctgatggacaggtgtcccagaccgacgaggaagatatggggatgacatatgcggagctctcggtctatgggaaactcaggaaggtggccaagatggggccctacagcatgttctgcaaactcctcggcatgtggagacacatctgcaccccgagacaggtcgctgacaaagtgaagcggtttttctccaagtactccatgaacagacacaagatgaccacgctcacacccgcgtaccacgccgagaactacagccctgaggacaacaggtttgatctgcgaccatttctgtacaacacaagctggccttggcagtttcggtgcatagaaaatcaggtgctacagctcgagagggcagagccacagtccctggacggcgtggactgaggccggttccttcctggaggcctcctgtcctcggggaccccagcacctcatcatcagcattgctggagccaagggtaggagccctacactaggagcccaggatgggacggcgcatcagccgagagggagggaacttttcagtcaaattcctcaaaaagaggctggaataaagcctgggcttaaaaaaaaaaaaaaaaaaaaaaaaa

SEQ ID NO: 722 - DNA, 3396 bp, Homo sapiens
cctttaagagcggctggccaggcacggcctccgcctctcagtacgcggagcgccggcggtcacctggggctcgcggagcggccagatcgcggcggagtcggcgcgcttccccgagggaaggtgggagaggggacccggacgcgaggtgccccgaagccctctcgagcgtaaccgtcccgcgcctctctgaggcggaggatgcgggagcgcatctgggcgccgccgctgctgctgctgctgccgctgctactgccgccgccactgtggggcggccccccggacagcccacgccgggagctggagctggagcccgggcctctgcagcccttcgacctgctctacgccagcggcgcggccgcctactacagcggagactacgagcgagcggtgcgcgacttggaagcggcgctgcgcagccaccggcgcctgcgggaaatccgcacgcgctgtgcccgccactgcgcggcgcgccacccgctcccgcccccgccccccggcgagggccccggcgctgagctgccccttttccgctccttgttggggcgggcgcgctgttatcgcagctgtgagacccagcgcctcgggggccccgcatcccgccaccgcgtcagcgaggatgtgcgcagcgacttccagcgcagagtgccctacaactacctgcagcgggcctacatcaagcttaaccagctcgaaaaagcagtggaagcagctcacacatttttcgtggctaaccctgagcacatggaaatgcagcagaacattgagaattacagggcgacagctggtgttgaagcattgcagttggtagacagagaagccaagccacacatggagagttacaatgcaggagttaaacattatgaggctgatgactttgagatggctatcaggcatttcgaacaagccttaagagaatatttcgttgaagatacagaatgccggaccctatgtgaggggcctcagagatttgaagaatatgagtatttagggtataaggctggtctgtatgaagctattgcagatcactacatgcaggtgcttgtttgtcagcatgaatgtgtgagggaacttgccacccgccctggccgcctctctcccatcgagaattttcttcctctgcactatgattacctacagtttgcctactatcgagttggtgagtatgtgaaagccctggagtgtgccaaagcctatcttctatgccatccagatgatgaggatgtcctagacaatgtggattactatgagagtctgctggatgatagcattgacccggcatccattgaggccagagaggatttaacaatgtttgtgaaacgtcataagctggagtctgagctgataaaatcagctgcagaaggtctggggttttcatacactgaaccgaattattggatcagatatggaggacgacaggatgagaatcgggtcccttcaggagtgaacgtagagggagcagaagttcatggattctcaatgggaaaaaagctatcacccaagatagatcgagacctaagagaaggtggtcctctactctatgagaacatcacattcgtctacaactcggagcagctgaacgggactcagcgggttctcctggataacgtcctgtcggaagaacagtgccgggagctccacagcgtggccagtggaatcatgcttgttggtgatggatacagaggaaaaacttcaccccatacacccaatgaaaagtttgaaggtgcaactgtcctgaaagcactcaaatctggttatgaaggtcgagtcccactgaagagcgctcgtctgttttatgacatcagcgaaaaggctcgaaggattgtagaatcttattttatgctgaactcaactctgtatttttcctatacacacatggtctgccgaacagccctgtctggtcagcaggatagaagaaatgacctcagtcatcccatccatgctgacaactgtttgttggatccagaggccaacgaatgctggaaggagcctcctgcttacacatttcgagactatagtgctctcctatatatgaatgatgactttgaaggaggagaattcatattcacagagatggatgctaagactgtgactgcctctataaaaccaaaatgtgggcgcatgatcagcttctcatctggaggagagaaccctcatggggtgaaggcagtcaccaagggaaagaggtgtgctgtggctctgtggttcaccttggacccactttatagagaattggagcgaatacaggctgatgaagtgattgcaattctggatcaagaacagcaagggaagcatgaactgaatatcaaccctaaagatgagctataaaaatgagaaagaatgttctatcaaatatttatttaaattgttaatcttatgagaacctttttatttttgtacagagccatggtataaattaacaggttaatgtcagtcatcagatcttccttctcttcctaaggatgcttgtgttgcctcaatctatcaatctatctttcttgttttgggttgttttctctctctctctctctctctcttcttagagacatggtctaaccatgttgtctaggatatagggcagtggctattcacagatgtgatgatagcacactggagcctcaaactcttaggctcaggcgatccttcaagcctcccggggagctgggaccacaggcacgtgccaccacacccagctctctttcttggtttttcatcatttcatgtatctatcaaagcccagttcacctcctcccccaaacacacacacacacacacacacacacacacacaattaagttgctgcagattcaaaagcttagagagaataagcttcttggtggtgaaactacaactctcacgtgtgctccagttctaaaattaacctgtgcctggtctctgaagccctttcttgctctgtgcctttcagccacatccttaggtgctaacggccatgagctccgactctccaaagtgagctccactttgggtctgaggagcccctggcagagtccacgctgcctcaggtatcatgggcgtaatgatcacccaggctccgggagatctcatggatgattactgtatgagacagaggggacttcagtctttccagggccttggtggaatttttggctctggtgttttcgccagacaataaacttacactggaagctttgatccaccctccacagtactccagaaaggactgtcctataagttgtacactttaaaaggtcatgtagaggttgtagtagaatggcttttcaccctggtgactttggaagaaactcttgaatactgcctgcatccgggcaccatggccaggttgcctaggagtggggtccactgatgaaaagaggtgttttgtacttacataagaaaaataaatttctgattgatttt

SEQ ID NO: 723 - DNA, 2416 bp, Homo sapiens
ccggcctcaggggtagagtccaggcccgacgcggggcgggccagcggcggcggcagctgaggtgagagacggcggcggcggcgcgggcacccggccccccagcgggaggatgaagcggcggaacgccgactgcagtaagctccgccgccccctaaagcggaaccggatcaccgagggcatttacggcagtacatttttatacctgaaattcctggtggtgtgggcacttgtcctcctagcagattttgtcctggagttcagatttgaatacctgtggccattctggcttttcatcagaagcgtctatgattccttcagataccagggactggccttctcagtattttttgtttgtgtagcattcacgtcaaatataatatgcctgctgttcatccccatacagtggcttttttttgctgctagcacatatgtatgggttcagtacgtatggcacacagaaaggggagtgtgtttgcctacagtgtctctctggatcctctttgtttatattgaagcagccattagatttaaagatctcaaaaactttcatgtagacctttgtcgtccatttgctgctcactgtattgggtaccctgtggtaactttggggtttggcttcaaaagttacgtaagctacaaaatgcggttaaggaagcaaaaagaagtacaaaaagagaacgagttttacatgcaacttcttcaacaagctctccctccagagcaacagatgctacagaagcaagaaaaagaggccgaggaagcagccaaaggattacctgatatggattcttcgatccttatacaccacaatggaggtatcccagccaacaaaaaactctccacaactttgccagagatagaataccgagaaaaagggaaagaaaaggacaaggatgccaaaaaacacaaccttggaataaataacaacaatattctacaacctgtagactctaaaatacaagagattgagtatatggaaaaccatatcaatagtaaaagattaaataatgatcttgtgggaagtacagaaaatctcttgaaagaggactcatgcactgcttcctcaaaaaattacaaaaatgccagtggagttgtgaactcttcacctcgaagtcatagcgccacaaatgggagcattccttcctcatctagtaaaaatgagaagaagcagaaatgcactagcaagagcccaagtacacacaaggacttaatggaaaactgtattcctaataaccagctaagcaaaccagacgcactggtcaggctggaacaagacattaaaaagttaaaggctgacctgcaagccagcagacaagtggaacaagagctccgcagtcagatcagctccctttcgagcaccgagcgagggatccgctcagaaatgggccagcttcggcaggagaacgagctgctgcagaacaagttacataatgctgtgcaaatgaagcaaaaagacaagcagaatatcagccagttggagaaaaagctaaaagctgagcaggaagcccgaagttttgtagagaaacagttaatggaagagaaaaagaggaagaagttagaagaagccactgctgcccgggctgttgcgtttgctgctgcatctaggggagaatgcaccgaaaccttacggaatcggatcagagaactagaagcagagggcaagaagctcacgatggacatgaaggtgaaagaagaccaaatcagagaactagaactaaaagtccaggagcttcggaaatataaggaaaatgagaaggacactgaggtgttaatgtcagccctctcagccatgcaagacaaaacacagcacctggagaacagcttaagtgcagagacgagaatcaagctggacctgttctccgcactgggcgatgcaaagcggcagctcgagattgcccaaggacaaatccttcagaaagatcaggaaatcaaggacctaaaacagaagatagccgaagtcatggccgtcatgcccagcataacatacagtgccgccaccagccccctgagccctgtttccccccactactcttccaaatttgtggagaccagcccctctggacttgaccccaatgcctctgtttaccagcccctgaagaaatgaaggccagctgtgtgttgtgcccaaaaatttggttaccggaaggcattgcaaaggagcgtctctggcagtcaagataaaaaaacagtttctattgtattttgtggaactgtatctgttgtcatttttaaaaaggggggaaaagataacatccaagtctgattagaactgcccatcagtttttcttgtaaatttttagaagacctcacagaactttacagtttatttttctcggccaacacattaaaaccattcttggatttcaagtaaaaaaaaaaaaaaaaaaaaaaaaaaaaaaaaaaaaaaaaaaaaaaa

SEQ ID NO: 724 - DNA, 3017 bp, Homo sapiens
accgcgggcatttacccgtgctttcccaagcctggaagaactcgtcatgctctttgtagcgtggtgcttctgttgctcacagaggtgcctgcttccccttctgccatgattggaagtttcctgaggcctccccagccatgtggaactgacaacttgcctttgatgattttcaagagagttgtgctatgatgtggcaaaagtatgcaggaagcaggcggtcaatgcctctgggagtaaggatccttttccacggtgtgttctatgccgggggctttgccattgtgtattacctcattcaaaagtttcattccagggctttatattacaagttggcagtggagcagctgcagagccatcccgaggcacaggaagctctgggccctcctctcaacatccattatctcaagctcatcgacagggaaaacttcgtggacattgttgatgccaagttgaagattcctgtctctggatccaaatcagagggccttctctacgtccactcatccagaggtggcccctttcagaggtggcaccttgacgaggtctttttagagctcaaggatggtcagcagattcctgtgttcaagctcagtggggaaaacggtgatgaagtgaaaaaggagtagagacgacccagaagacccagcttgcttctagtccatccttccctcatctctaccatatggccactggggtggtggcccatctcagtgacagacactcctgcaacccagttttccagccaccagtgggatgatggcctccctattccctgagacacaacagtattgaaattgggccaattaataactccacagtggcctctcactaaatgtgagaggtgaggaagctgcaggagaaaatttgaagctagcagtgttcatgagatgtaagtaaagaagccatctccataaaagtacaacgtgacgcagcaagtgctgatggagaagctgtagaagttacacagaagatctagcttggaccatcgatgaaagtggctacactaaacaacagattttaaatgtagataaaacagcattttattgaaaaaaagatgccatctaggactttcatagttagagaaactcaatgcctggcttcaaaggacaagctgactcttgtcaggggctagtgcagctgtgactttcagttaaagccaatgctcattgactattctgaaaatcccagggcccttaagatatgctgtataaacgcaacaacaaagcctggatggcgttgggtctgtttacagcctggtctactgagtaagcccactgttgagacctagtgctcagaaaaaatagatttctttcaaaatatggctgggtgcagtggctcacaccggtaatcccagcactttgggaggctggggcgggtggattgcttgatgccaggagttcaagaccagcctgggcaacatggtgaaaccctgtctcaaaaaacaaatccaaaaaaccaaaatattgctactcattaacaatgcacctggttacccaagagctctgatggagatgtacaaggagatgaatactgttttcatgcctgctaacacagtatccattctgctgctgatagatcaagaagtacttttgactttcaaaacttgttatttaagaaatacattttgtggtttctctgatggttctgggcagtcagttcaaaaccttctggaaaggattcaccattctagatgccatcaagagcattcaattcacgggaggaggtcaaaatatcaacattaattggaatttggaagaaatagattccaatcctcatggaggacttggagggtttcaagacttcagaggaggaaggaactgtagatgggctgaaaatagcaagagaactagaagtggaggggcctagagatgtgaccgaattgctgtaacctcaggatcaaacttgtatggatgagaagttccttctcatggacgagcaaagaaggtgatttcttgaaatggaatctactcctggtgaagatgctatgaacattgttgaaatgacaaaagatttagaatattccataaacttagctgtggccagggtttgagaggattgactcctaattttgaagttctactgtgggtaaatgctgtcaaacagcattgcatgccacagaggaatctctcatgaaagagttaataaatgcagcaaacttcactgttgtcttactttaagaaactgccacagtcactgcaggcttcagcaacttatcttttcctaccctcctctcgcatttaaaagtacttttaaattaatgtatgtacattatttttaggcataacactgctgctcatttaaaaaaactacagtatgaaccatgttatatgcagtggaaaggcaaaaaattcatgtgacttacttgcttgtatttggtttattgcagtggtctggaactgaaagtgatgcgtatttctgagttatgcctgtatttaagaagctgagtgaaacccaaagaagtccatgataggacagacttctgaaaactaaagacagaaaaaagcttgaaagcatcaagaaagaagtgaaatcttaactagagggaaaagtaactcagatgacagtggatttctctctggaaaccatggaggccagaaggaagtgagacaagttcttttagtgccagaagaactatcaacttgtggctgggcacggtggctcacacctgtaatcccagcactttgggagaccaaggtgggcagatcacttgaagtcaggagtttgagaccagcctgaccaacatggcaaaaccctgtctctactaaaaatacaaaaattagccaggcatggtggcacatgcctgtaatctcagctacttgggaggctgaggcacgagaattacttgaacccgggaggtggaggttgcagtgagccaagatcctgccactgcactccagcctgggcaacagagcaagactgcctcaaaacaaaactctgtcaactccaaattcctatttggtgaaatgatccttcaggattgatggggtaataaaaacattctcggttgatagaaaact

SEQ ID NO: 725 - DNA, 2273 bp, Homo sapiens
agtgcccgcgcagcgttgagttgcacagcggtattctcaccaggccctgcaatcggtgggccacagtgccggccacagagatggtggaaggaccaggctgtactctgaatggagagaagattcgcgcgcgggtgctcccgggccaggcggtgaccggcgtgcggggaagcgctctgcggagtccgcagggccgcgccttgcggctcgcagcctccacggttgtggtctccccgcaggctgctgcactgaataatgattccagccagaatgtcttgagcctgtttaatggatatgtttacagtggcgtggaaactttggggaaggagctctttatgtactttggaccaaaagctttacggattcatttcggaatgaaaggcttcatcatgattaatccacttgagtataaatataaaaatggagcttctcctgttttggaagtgcagctcaccaaagatttgatttgtttctttgactcatcagtagaactcagaaactcaatggaaagccaacagagaataagaatgatgaaagaattagatgtatgttcacctgaatttagtttcttgagagcagaaagtgaagttaaaaaacagaaaggccggatgctaggtgatgtgctaatggatcagaacgtattgcctggagtagggaacatcatcaaaaatgaagctctctttgacagtggtctccacccagctgttaaagtttgtcaattaacagatgaacagatccatcacctcatgaaaatgatacgtgatttcagcattctcttttacaggtgccgtaaagcaggacttgctctctctaaacactataaggtttacaagcgtcctaattgtggtcagtgccactgcagaataactgtgtgccgctttggggacaataacagaatgacatatttctgtcctcactgtcaaaaagaaaatcctcaacatgttgacatatgcaagctaccgactagaaatactataatcagttggacatctagcagggtggatcatgttatggactccgtggctcggaagtcggaagagcactggacctgtgtggtgtgtactttaatcaataagccctcttctaaggcatgtgatgcttgcttgacctcaaggcctattgattcagtgctcaagagtgaagaaaattctactgtctttagccacttaatgaagtacccgtgtaatacttttggaaaacctcatacagaagtcaagatcaacaggaaaactgcatttggaactacaactcttgtcttgactgattttagcaataaatccagtactttggaaagaaaaacaaagcaaaaccagatactagatgaggagtttcaaaactctcctcctgctagtgtgtgtttgaatgatatacagcacccctccaagaagacaacaaacgatataactcaactatccagcaaagtaaacatatcacctacaatcagttcagaatctaaattatttagtccagcacataaaaaaccgaaaacagcccactactcatcaccagagcttaaaagctgcaaccctggatattctaacagtgaacttcaaattaatatgacagatggccctcgtaccttaaatcctgacagccctcgctgcagtaaacacaaccgcctctgcatcctccgagttgtgaggaaggatggggaaaacaagggcaggcagttttatgcctgtcctctacctagagaagcacaatgtggattttttgaatgggcagatttgtccttcccattctgcaaccatggcaagcgttccaccatgaaaacagtattgaagattggacctaacaatggaaagaatttttttgtgtgtcctcttgggaaggaaaaacaatgcaattttttccagtgggcagaaaatgggccaggaataaaaattattcctggatgctaatatctgtagattctctggcatttagtctcttcaaactgtgtataatgtttggtcctcctctgtttcatagaaaagtcatagaatatctatgatacattgaaaagttactgcaatatttgagaactgttctttttttttcttgtgtgtgccatctttccattgttggctacgtcttttcttttgccttgatgaacgttctatgtatttcatcggatatacagcatattccatttaggatgtgtatttaatgcatttagtaatgacgataaagtgtttttagtatgcttttagtctcttgtaactggggagaagcagtgttttttttttaggaaaggattatgcgacacaataaaataagatattctgtctgtagtg

SEQ ID NO: 726 - DNA, 2563 bp, Homo sapiens
ggcgctgccgggtctcggttcgggttcgttgccccggtgccgggaccgggccggtctctccggccgccccagccgggcgcagcagccggaggtgtcgggaccctctggacccaccctagcgggccccgccggcggtcggcctccggtccgggctcccagtcgcgccgtcctcgccgccccatggagtcccagtgcgactactcgatgtacttcccggccgtgccgctgccgccgcgcgcggagctggcaggggatccgggccggtaccgggcgctgccccggcgcaaccatctgtacttgggggagactgtccgttttctgctggtgttgcgctgccggggcggtgcggggtccggcaccgggggcggcccgggcttgggctccagaggagcctgggcagaactggcaaccgccctggccgccctggcctcggtcagcgccggaggcgggatgccggggggcggcggcgccggcgaccaggattcggagcccccagggggaggggatcctgggggtgggggtttgttccgaggctgcagcccccttctcacccacggcccgggccctgctacctcagggggagcgaccacgctgcctgtggaggaaccgattgtgtccacagatgaggtcatcttcccactcaccgtttcactggatagactgcccccagggacacctaaggccaagattgtagtgactgtgtggaagcgggagattgaggcaccagaggtcagagatcaaggctacctgcgattgctgcagacccgatctcctggggagacattccggggcgagcagagcgctttcaaggcccaagtgagcacgctgctgactctgctgccccctccggttctgagatgccggcagttcactgtggctggaaaacacttgaccgtgctcaaggtgctgaacagctcctctcaggaggaaatctccatctgggatatccgaatcctccccaacttcaacgccagttatctacctgtcatgcccgatggctctgtgctgctggtggacaatgtctgtcaccagtctggggaagtctccatgggctccttctgccgcctacccgggacctctggctgcttcccctgcccgctgaatgccctggaggaacacaacttcctgtttcagctgagagggggtgagcagccccctccaggggccaaggagggcctggaagttcccctgattgctgtggttcagtggtctaccccaaagctgcccttcactcagagcatctacacccactaccgcctgcccagtgtccgcttggaccgcccgtgttttgtgatgaccgcttcttgtaagtcccctgttcggacctacgagcgtttcactgtcacctacacgctgcttaacaatctccaagacttccttgctgtgaggctcgtgtggaccccagagcatgcacaggctggaaagcagctgtgtgaggaggagcgccgggccatgcaggctgccctggactccgtcgtctgccacacgcccctcaacaaccttggcttttcccggaagggcagcgcgctcaccttcagtgtggccttccaggctctgaggacggggctcttcgagctaagccagcacatgaaactgaagctgcagttcaccgccagcgtgtcccaccctccacccgaggcccggcccctctcccgcaagagcagccccagcagccctgctgtccgggacttggtggagaggcatcaggctagcctgggccgctcccagtccttctcccaccagcagccttcccgaagccacctcatgaggtcgggcagtgtgatggagcgcagagccatcacgccccctgtggcctctcctgttggccgccccctctacctgcccccggacaaggctgtgttgtctctggacaagattgccaagcgcgagtgcaaggtcctggtggtggaacccgtcaagtagcaccgtgccagctctgttccctcttacactccagagacccaacgcccccagaggggatccctgctcctgggctgtgcctcccctgggatgcctcccagacgggggtgaagaggcctggcagagctgcctgtcttgtgtctgctgatgagggatgggggaagaagctgtgaagtgggcgggcatggctgggactaagccaccagtattccccgagttcctgtggggggggctggccccacccctaggccagggcaagggttcccagagctcccttgtccccggccctttaccctggttctgagtttacaaagtctcttcctcattcccgttgagttctttcccacctctgacattccctccctccctcccgcagggctgagattagagggtggtgatggctaagggcccctgacagtgaccttcctgtctcaggggttggggacagggccaggtagcctcctgccccttatgtttacgtttgcagcctgaagcactttaatttttttttttttggtctgttcctgtaacttattttccaactattgcttccaactgaaataagactattaaatgcctgttcaggagggagaaaaaaaaaaaaaaaaaaaaaaaaaaaaaaaaaaaaaaaaaaaaaaaaaaa

SEQ ID NO: 727 - DNA, 6794 bp, Homo sapiens
ggcggcggcggcggcagagggagtttccgctttgcactccaccccggtagcagctccgcggcagggacagcttcctccggacgcttggcgggcttcgctctcgccttacgacagcccggtcggatcatggggttgcccagggggccggagggccagggtctcccggaggtggaaacaagagaagatgaagaacaaaatgtcaagttgactgaaattctggagctcttggttgcagctgggtatttcagggcaagaattaaaggcttatcaccctttgacaaggtagtaggaggaatgacttggtgtatcaccacttgcaactttgatgtagatgttgatttgctctttcaagaaaactctacgataggtcaaaaaatagctctgtcagaaaaaattgtctcggtcctgccaaggatgaaatgcccacaccagctggagccccaccagatccaggggatggattttattcacatatttcctgttgttcagtggctggtgaaacgagctatagaaacaaaagaagagatgggtgactatatccgctcctactctgtatcccagttccagaagacttacagtctccctgaggatgatgacttcataaagagaaaagaaaaggccatcaagacagttgtggacctctcagaagtgtacaagccccgtcggaaatacaaacgccaccagggagcagaggagctacttgatgaagaatctcgaatccatgctacacttttggaatatggcaggagatatggatttagccgccagagcaaaatggagaaggctgaggacaagaaaacggcacttccagcagggctgtcagctacagaaaaagctgatgcccacgaggaagatgagcttcgagcagctgaagagcagcgtattcagtcgctgatgaccaagatgaccgctatggcaaatgaggagagccgtctcaccgcaagctccgtgggccagattgtgggactctgctctgctgagatcaagcagattgtgtccgagtatgcagagaagcagtctgagctatcagctgaagaaagtccagaaaaattaggaacctcccagctacatcgccggaaagtcatttccttgaacaaacagattgcgcaaaagaccaaacatcttgaagagctgcgagcaagtcacaccagcctacaagccagatataatgaagccaagaaaacgctgacagagctgaagacttacagtgagaaactggacaaagagcaagcagccctcgagaagatagaatccaaagctgatccaagtatcctacagaacctgagagcacttgtagccatgaatgaaaatctgaaaagtcaagaacaggaatttaaagcacattgtcgagaggagatgacacgactacagcaagaaattgaaaacctgaaagctgagagagcaccacgtggagatgaaaagaccctctccagtggagagccgcctggtaccttgacctctgcaatgactcatgacgaagacctagacagacggtataatatggagaaagagaaactttacaagatacgtttactacaggctcgaagaaatcgagaaatagcaattttgcaccgcaagattgatgaagtccctagccgtgccgagctaatacagtatcagaagagatttattgaactctaccgccagatttcagcagtgcacaaagaaaccaagcagttcttcactttatataataccctggatgataaaaaggtttatttggaaaaagagattagtctgctgaactcaattcatgagaacttctcacaggccatggcctcccctgctgcccgggaccagtttttacgtcagatggaacagattgtggaaggaattaagcaaagtagaatgaagatggaaaagaaaaagcaagagaacaaaatgagaagagaccagttgaacgaccagtacttggagctgttagaaaagcagaggctatactttaagactgtgaaagagttcaaggaggagggccgcaagaacgagatgctgctgtccaaggtgaaagcgaaggcctcctgaacatccccagccgtggctgtatgtcattgattttacttttaagcaccgtatatcacctacaagatcatgaaatggttctgaaagcgacagtagagagatgcagttgtgatgatttcaacaacctggatgttttctttctcctctttgcttccattcatctctgttggctgctgttgatggagtcagacagtaaacacgtggcttggataacacccatcatcctatgaagaatatagggagtacttgttctctgttgattcaacttttatgtctccagtaacattgcgcttatgaaggtacctgtatttgtatggactctgaataaagaagaattcatttgtttagcaagtattagttcagcaaccactgagaaataagcactgaggaagattcagagacgtgtaaaacacagttcctactgcacaagtacccagcaggtggcccagggaggcagatacagcacacttgaccgcagaactgggctatccaagatgtttttcagtaaacagaaggcatttagctgaaatgatcagcccatgtagtgttggtcacttgggcctttcacctgccatggtaccttttgttcccagctcctccaggtgccagccagcaggcttggtggtgacagcaactggaacgaaagttcagtgttgttttaatttttatacgttactcaagttgatttctcagaaaattgaaaacagaccttgtgctgaggacacgtcaataaaaattataccttcccctgccccaatgttcatgtgagtcacagcatgcagaggggctgtgcatccccctcattgaaggcacatttgatgaggctacgctgcagatgggtcatggtctgagccaggagagagatagacactgttccctgcactcaaggcaagtagggtgtcaggaggaagagcagtagggtttgcagagatccagggaaacttcctggaggaggcagcatttgagccctatctaaagggagaatcggatgttgataggaagactgttttaaatgaaaatacactatgattaaaaacccaagagagtgcagaggagtacaaggcatgcatgttgggaaaggagggaataagctagtctctgcaggaggcttcagagacccgtctgggaagtagggctgagactaggctttggagggccttgaagggcagctgagggttgattttaatccttggaaatgaccagtgcagatcaaacatggagctcctgctgccctggtcctcaggagtctggtaactcagtcatgttctgtaggtttgtgctccattttgcataaatcttgcaaacataccaggtggcaggtttgcacagtaacacaaaagcttaaacatgtcaagcaagtggggcattcagcagccacagaaatgtgttcatttttagtccctaatggatgtgattaagcagggctgatgtgtacagatttaaaaacacacacacgtgctggattaaaaacagccactggtttcagtgccagggccagcaaggcctacctgagccaggcggaagcagcagcttgcaaatagaaactgccacctgcgagcgcttcttgggtcatgtgcagctccacctcagctggtccctgagccgtggtcatgtgggggttttgaagggctaagttgaagcaagtaattgcaaaagaacaggtggcactctgagggcaggggaaggagacagaagtttgactgcgtttgaaattatttcagtcagggaaacatctgcgttgtcttgttaagcagcttgtaggcccacccctggctaactgaactttgtgagcagttggggcagttatttgaatatttgtccaaaggtggtagggaggcagatgacattctggggttactggagtccacctctgtgctgatggggaaagtatggcatgatgaatccaaagcaaccagtaattctttttgaaagtgcaggcatttattttgagctgtatttcataggagtttcatttggtttggttttggtatagagaggtgtccatagatctctattccctttttttttttatcgacaaggcctactacggataaatcagtttttgttgcctgaatacactttgaattagactacagaagccagtttgagctcaaatttcacacttgctgcagacaactctcagtgtggacagtgcctttctgagtaattaggatgttacatgactttttggtgaagccgtatagggtaaggagatgccccaaggcccctgatcatttcagaagccacctggagcaccagaaggggtcatcttcccagggctatggctctgtgtgcttagacagacatagtatggaattgtgctctaagcccacaggcttctccggagttaaaaggaagcaagaacatccttaagttactttttcaaaatatgcgcttcaggaggaaccaggtttccccaggagagagaggctccctgctcaatcagcacagggagttgctagcgggcaggctgcccagtgctgtggaatctccgccagcctctgggttgggggctccctcccacttcttgcttcttatggagtacatgggactgctctgctttaagccgcgatcagagctgttgtgagcaggacaagattgcgtgatcacgaggtgcgtggggagatgctaggacatttgttgatgtctttgacctgtgctccgtctctgttggatgactgggttagctaacaccactagagggaggtacagaatgttaaacagtcgtcagagtcacactgagggttgttttaacagagggcaaattcccagtttgtcaagcatatctctgttagagtccgaagttcatggttttaatggttctagctcgtagcccttaatattttcaggatagctgggtcctgccagtgtccgctgagtccatcagcacaaccagaaggtccagggtccaggcatgggaagcattctctgacaataccgagccctcgggacctcctgaaaccttgagcagaggctggagaagaccttcagacagtccttttactacctcacaaagtgccatgcccgggacctcagacctcagggttgtgacgttgttgatgttgtcaggccccagtacgtctctagtgaccgaagcagacctgcctgaaagggcactccggacagtgagccctggctctaacctgtgccctcatatttctgctgcctcatatggtcttgtttgcccactctgtaggtgactgatcaccctaaaagggaggtaggtatctagcagtagcacagttactttgagcctgaccacttgttctgaagtgcagatgttgaaacatgcattgaggaagaacactttaaggaagcactttatgatttactcatggctggtgttggcctcaaagtaaaagaacatcttaatgcagaacagtacaataaagagccccataggatggatgccatcatctgtccccatggttgggattgccaaggaaagtgccttgttctgtgcatcttcagaatcccccaggccctctcttgatccttttcatgaagtccagagcattccttctattacaggctgaagatgcattgtaaaaggtaatgctataatagtattccctcttctcaataaatgtgcaaaactggagaatctggtgctgatctgcagcatacttgacaacacagggaataccgtggatgttccacgccagccttacatccgtccccattgcctgcccatgtccagtggccctgcgcaacaaaagtaagggcttgtcttaccacactctccccagcatctagctcaaggtagatgactgactgggaaattccggttggataaaatggcttttccacattgcaactttgcatctctattaggaaaatttagattgaacctttcctctacttgatgcttagtttgagaacagttttcacaactttagagggtctctctcagagtatgttatactgtaaccttgaagtttgagatgaaacaaggtgtcagaggttttgaatctttcaaaggaattgccttttacagatttttttttttattccctaagaagggaaaaagagagggaagaactacactaatgttagagataaggtatgttttggctcaaaatgtgtcatgaacctaaaggtaacttgatgggcagaaatgtctcagccatgtgaaccaagaagtgggaccacagtgcaaggctgtgggtggcagcactagatacggtggtggcaggagtgtgacatgtaggcactccatgggggacagctggacggtgtctatcaaaagtgcaaatgcataagctctttgaactagcaatgctactcctaagaattgtacctgtgtacaaggtacttgtgtacaagagtttttgttgaaacattgtaatagcaaaaagttggagagtgccaccaatacaggggaatggttaaatacattatggccagcttaaacaatggaatagtttgtagaaatttaaaacaatggatcctgtgtgtgtgtactaccatagaatgggccccaagatgcatgattaagtgaggaaaaaagcccatggtatcctaatgtttggaatggagaaagtgtgtagatgtatgtgtgtgcatatgttttcacacagacgtatacacgtgtatatcatatgtccacctgcatatgcctaggatgtctctgggaggatatctagcagcccggcagcctgaattgcctctgggaagaggggtgggaatgacttttcaatgtacaccttttgtaccttttgaattttgtaccatgtacatgtattatctattaaaaaatagttcttaatttttaa

SEQ ID NO: 728 - DNA, 2352 bp, Homo sapiens
agctgtgcgacgcgccgggcctcctcgcctttgtgccatccgggtctctcgcgcgagcgatttagtctgaggcgaagcttcggagcggccggtactgttgaaagcgacaagtggaggcgccgctctagcggccgggactctgaactatggcggctagtgatacagagcgagatggactagccccagaaaagacatcaccagatagagataagaaaaaagagcagtcagaagtatctgtttctcctagagcttcaaaacatcattattcaagatcacgatcaaggtcaagagaaagaaaacgaaagtcagataatgaaggaagaaaacacaggagccggagcagaagcaaagagcgtgcttatgcgcgaagagactgaactgaagacgctgcagactcagatagcaaaataataagcctacttcatgataagaaccaacttcttcttaaaacagggaagaagacatgaatccaaagataaatcctctaagaaacataagtctgaggaacataatgacaaagaacattcttctgataaaggaagagagcgactaaattcatctgaaaatggtgaggacaggcacaaacgcaaagaaagaaagtcatcaagaggcagaagtcactcaagatctaggtctcgtgaaagacgccatcgtagtagaagcagggagcggaagaagtctcgatccaggagtagggagcggaagaaatcgagatccagaagcagagagaggaagaaatcgagatccagaagcagggaaagaaaacggcggatcaggtctcgttcccgctcaagatcaagacacaggcataggactagaagcaggagtaggacaaggagtaggagtcgagatagaaagaagagaattgaaaagccgagaagatttagcagaagtttaagccggactccaagtccacctcccttcagaggcagaaacacagcaatggatgcacaggaagctttagctagaaggttggaaagggcaaagaaattacaagaacagcgagaaaaggaaatggttgaaaaacaaaaacaacaagaaatagctgcagctgcagctactggaggttctgttctcaatgttgctgccctgttggcatcaggaacacaagtaacacctcagatagccatggcagctcagatggcagccctgcaagctaaagctttggcagagacaggaatagctgttcctagctactataacccagccgctgttaatccaatgaaatttgctgaacaagagaaaaaaaggaaaatgctttggcagggcaagaaagaaggggacaaatcccaatctgctgaaatatgggaaaaattgaattttggaaacaaggaccaaaatgtcaaatttaggaaattgatgggtattaagagtgaagatgaagctggatgtagctcagttgatgaagaaagttacaagactctgaagcagcaggaagaagtatttcgaaatttagatgctcagtatgaaatggcaagatcacaaacccacacacaaagaggaatgggtttgggtttcacatcttcaatgcgaggaatggatgcagtttgaaaatgatcacacttgtaaagtttgggacttatagacttcttgttctgatgtcacgtccttgttcaccaaacagctagcactctagcttgcatgggtgttgcattgactttaatttattgaaaaatacaaatttttgtaaatatcagatcagtgatactggtgttagtgttgtaatcaggttaaacccacttccattaaacttgacaggactatagaaggataatattttttagttcatgaattctacttttcaaatatataaaagctgcaggtggggataaaatctcatacatggattttttcgtgtccgctgtcttgtgtacttttgtacttaaccttgtacagttattttcatctcttgaaacatgaaagaaatgttatgtagatgttctttagaagatctggccatttggtacataatccagcacagataagctgggtggtaatgataataaaaatggttttctcaaaactggtgttaatttaagttacctgggatgtttctttgaatttgttttatagtttctgtagcatttggcaattgctgttagaaaacactagctagaaatcccctccccaccaccctttttaaggccagttaactatactacagtcaataccgtggtgagcaaaaatgtaaaaggtggaaggagaaaacttactaaaatagtatgttttcctattataagggacagacttggtattcagtatttgtcaaatattacatgtgttattcaggagatagattaatgcattaaagggatgtaagcacttttattttaataaagtgccttataacaa

SEQ ID NO: 729 - DNA, 2252 bp, Homo sapiens
agctgtgcgacgcgccgggcctcctcgcctttgtgccatccgggtctctcgcgcgagcgatttagtctgaggcgaagcttcggagcggccggtactgttgaaagcgacaagtggaggcgccgctctagcggccgggactctgaactatggcggctagtgatacagagcgagatggactagccccagaaaagacatcaccagatagagataagaaaaaagagcagtcagaagtatctgtttctcctagagcttcaaaacatcattattcaagatcacgatcaaggtcaagagaaagaaaacgaaagtcagataatgaaggaagaaaacacaggagccggagcagaagcaaagagggaagaagacatgaatccaaagataaatcctctaagaaacataagtctgaggaacataatgacaaagaacattcttctgataaaggaagagagcgactaaattcatctgaaaatggtgaggacaggcacaaacgcaaagaaagaaagtcatcaagaggcagaagtcactcaagatctaggtctcgtgaaagacgccatcgtagtagaagcagggagcggaagaagtctcgatccaggagtagggagcggaagaaatcgagatccagaagcagagagaggaagaaatcgagatccagaagcagggaaagaaaacggcggatcaggtctcgttcccgctcaagatcaagacacaggcataggactagaagcaggagtaggacaaggagtaggagtcgagatagaaagaagagaattgaaaagccgagaagatttagcagaagtttaagccggactccaagtccacctcccttcagaggcagaaacacagcaatggatgcacaggaagctttagctagaaggttggaaagggcaaagaaattacaagaacagcgagaaaaggaaatggttgaaaaacaaaaacaacaagaaatagctgcagctgcagctactggaggttctgttctcaatgttgctgccctgttggcatcaggaacacaagtaacacctcagatagccatggcagctcagatggcagccctgcaagctaaagctttggcagagacaggaatagctgttcctagctactataacccagccgctgttaatccaatgaaatttgctgaacaagagaaaaaaaggaaaatgctttggcagggcaagaaagaaggggacaaatcccaatctgctgaaatatgggaaaaattgaattttggaaacaaggaccaaaatgtcaaatttaggaaattgatgggtattaagagtgaagatgaagctggatgtagctcagttgatgaagaaagttacaagactctgaagcagcaggaagaagtatttcgaaatttagatgctcagtatgaaatggcaagatcacaaacccacacacaaagaggaatgggtttgggtttcacatcttcaatgcgaggaatggatgcagtttgaaaatgatcacacttgtaaagtttgggacttatagacttcttgttctgatgtcacgtccttgttcaccaaacagctagcactctagcttgcatgggtgttgcattgactttaatttattgaaaaatacaaatttttgtaaatatcagatcagtgatactggtgttagtgttgtaatcaggttaaacccacttccattaaacttgacaggactatagaaggataatattttttagttcatgaattctacttttcaaatatataaaagctgcaggtggggataaaatctcatacatggattttttcgtgtccgctgtcttgtgtacttttgtacttaaccttgtacagttattttcatctcttgaaacatgaaagaaatgttatgtagatgttctttagaagatctggccatttggtacataatccagcacagataagctgggtggtaatgataataaaaatggttttctcaaaactggtgttaatttaagttacctgggatgtttctttgaatttgttttatagtttctgtagcatttggcaattgctgttagaaaacactagctagaaatcccctccccaccaccctttttaaggccagttaactatactacagtcaataccgtggtgagcaaaaatgtaaaaggtggaaggagaaaacttactaaaatagtatgttttcctattataagggacagacttggtattcagtatttgtcaaatattacatgtgttattcaggagatagattaatgcattaaagggatgtaagcacttttattttaataaagtgccttataacaa

SEQ ID NO: 730 - DNA, 1559 bp, Homo sapiens
acttttgggcaggtgtcagcgcccgtgtcaccgccacgtcgcggacatggtgatttcagaaagtatggatatactcttcagaataagaggaggccttgatttggcttttcagctagctactcctaatgaaatttttctcaagaaggcactgaaacatgtgttgagtgacctgtcaactaagctgtcttcaaacgcccttgtgttcagaatttgccacagttcagtgtatatatggcctagcagtgacataaacaccattcctggagaactgactgatgcttctgcttgtaagaacatactgcgctttgttcaatttgagccagaagaagatataaaaagaaaattcatgagaaagaaggacaaaaagttatcagacatgcatcaaatagtaaatatagatcttatgctggaaatgtcaacctccctggcagctgtaacgcccatcattgaaagggaaagcggaggacaccattatgttaatatgactttacctgtcgatgcagttatatctgttgctccagaagaaacatggggaaaagttcgtaaactcctggttgatgcaattcataatcaactaactgacatggaaaaatgtattttgaaatatatgaaaggaacatctattgtggtccctgaaccactgcactttttattaccagggaaaaaaaatcttgtaacaatttcatatccttcaggaataccagatggccagctgcaggcctataggaaggagttacatggtcttttcaatctgcctcacgacagaccctatttcaaaaggtctaatgcttatcactttccagatgagccatacaaagatggttacattagaaatccacatacttaccttaatccacctaacatggagactggtatgatttatgtggtccagggcatatatggctatcatcattatatgcaggatcgcatagatgacaatggctggggctgtgcttatcgatctctgcagactatctgctcttggttcaaacatcagggatacacagagaggtccattccaacacacagagaaattcagcaggctctagtcgatgccggggacaaaccagcaacatttgtcggatcgcggcaatggattggatctattgaggtgcagctggtactaaaccaattgatcggtataacgtcaaaaatcctgtttgtcagccaaggttcagaaattgcctctcaaggacgggaactggctaatcatttccaaagtgaaggaactccagttatgatcgggggaggagttttggcccacacaatactaggagttgcatggaatgagattacagggcagataaagtttctgattctagatccacattataccggtgctgaagacctgcaagttattttggaaaagggctggtgcggatggaagggcccagatttttggaacaaggatgcatactataacttatgtcttcctcagcgaccaaatatgatttaaaatatcttggagtcaaagactgcagtagagtggtattataaatttgtgaataaagaatcagtttaatttttcacattaaatcctggttctagtttgaccattt

SEQ ID NO: 731 - DNA, 2601 bp, Homo sapiens
ggccatggatgggcttggataaagcaccataagttcttcctctaggccatggactccccctggaactggcagcctggcccccaggcttcaggctgtccctgggttgaaggtggtgtttcacctgggacctgcccctttctgcccaggagcctgtctgcctcctgctaccatcaacatggcatccacagcacccaggctgtgcatgctgagggacgcctgcaggcctgcactgagctgccctcagtctcctcttggcttccctcctgtgcctgtcggtgaccaaagtctggagggggccaagatgacaggggtcttgcatgtcaacaccacccagagtacatacacacccagctgggttgcgacagcacccaggctcagtttcaactttgctccaaaaatcagagtggacactgggagtggtgagatgccagggagcgggagcaggcaattacaagcctgcatgacaggggggcttcctgggtccccaagagcagagggatgcctgggtccagagctgtggctaggtagctgcagctgtgcctgggagctcagggctcctgccctgccaacttgatagaaggcagggttcccacctgttcctggtccctgccagctctgtggagcatgcagccccagctatgcctcccctgctgcagctggcatccccacagcagctgctccagataggccactgctgccatcactgacaattctttcagctcacaaaggtagccatgaattaggaaagttgggtcaggctccaggcagcctgcgttcaggcaagctcaagagctgaggatgcccacctttgcaaacatggcaactctacccatccctgtgtctcctagacactagagcccccaccctctgctattattctaccatactcattccccagccagagtctgggacctgggctcctgcagataattctacatcaaaaacaggggaagtagaaaagttcatgaaggctcctaagtctctccaaccacccagggccacaaaatccatgtagaggcctcatgaagggttttgtctaatcaaatagtttgctccaaccagccagcatctttcttttgatctagatgtctgtctccatagaaaaggacatctattgagggtcagggacctaatggcttgtgggttcctgagatacaattatgtgttacggagaaacaaagaaaattttgagacttttaggcaacagagaaaccactgcaaaaccctgtaattacagggcaagaagaaaaaagtgagctgccacagtgcctggggtagaaatagcctgacgttgcttcctggatggacctagaatgttgcacaaggtgacgtcagagtggttgcttagaagagaggtcattggatgcagttttccagctgagtacagtgggtggggtgcactgttgttcctggggcagagtgggcgagggagctgtggggagagatgaggaagcaggacaggaaaccacatttgctgaaggccaagggctgtgacaggcagacactgagacatatcgctgcactcagttctcagaacaactcagcgaagtcaggccttgtacccctagtcactagacaagaaaacagagggtcagagaggtgaggagacttgcccaagctcacctgatccctgacctgactgattgaaggcccagggcacccatccatgctaactaaggtgcaagttcgtactgtcacttctttgtgaaggggctgctctttaacaaaggataaaatgagaggttgttctactctgaggggaggggaggcagagagaaagaggggagagacttgcctctgtttgcctacaggtgccaagccaaaagaggggcttgagcttgtggagaaagcattgagttggaaatcgaatcacccagcttcaaattctgcctctactaatgccatgtggtctggggccaattactttagttctctgtgcaacaatgtcggcatcgggagtaaaggggttgaggtggtggggtgagaagtgtccactcttggtccctgcaagtctgaatcctttacactgcatgtcagcttagaataatgacggttatgagcaaggagcctggaatcagattgccaggttcaaatcccaactttgccctaagctacagtgtgacgtcaggcaagccacagatctgtgactcagtttaccctgtgtaaaatgaggataatgataatattcacaacctaggttgtcatgacaattaaatgacatcatgtgcgtgcaaccaaaatagcatttggctcatcctaggcacgggagaactatatgccaggactcagcccatggctcacgcagagctggagaagatctgggggaaggaaaaacagcttgcttgctgggcggtcccagactgcaaggtctccacctaccccagctcgcatcataactccttgaagtcaatccagatgggctctggccaccccaggggactgagcccattcccatcgagagctcattaaaattacccagaaatgggctgggcgtggtggctcacgcctataatcccaccactttgggaggccaaagtgggcagatcgaagtcaagagattgagagtatcctggccaacatggtgaaacctcatctctactg

SEQ ID NO: 732 - DNA, 4222 bp, Homo sapiens
ttgttaactttgtcaaagatcaggttgttgtaggtttttggctttatttctaggttctctactttgtttcatttgtctatgtgtctgtttctataccagtaccatgctgtttttgttactgtactcttctagtatagtttgaagttaggtagagtgacacttccagcttttttttttttttcttaaggttggcttggctatttgggctcttttttggttccatatgaactttaaaagtttttatttttctaattctctgaagaatgtcagtagttcaatgggaatagcattgaatctatgaattacttagggccatatgcccatattcatgatactgattcttcctctccatgagcatggaatatttctccatctgttttgtgtccactctgatttctctgagcagttgtttgtggttctccttgaagaggtccttcactttctttcttagctgtattcctaggtatttttttctctttgtagcaaatgtgaatgaaagttcattcatgatttgtctccctgcttgcctgttgtttgtgcatgggaatgctagctacttttgcacattgattttatatcctgagattttgctactgttgcttatcaccttaagaagctttgggcctgagacaatgaggttttctagatgtaggatcaggtcatctgcaaacaaagataatttgacttcctctctttctattagaatactctttatttcttcctctggcctgattttcctggccaaggcttctgatactatattgaatggtagtggtgaaagagggcattcttttcttgtgccagttttcaggtggaacgtttctagcttttgcacattcagtatgatattggctgtgggtttgttgtatatggctcttattattttcaggtatgtttcttcacttcctagtttattgagaattttaaacctgaaagaatgctgaattttattggatgctttttctgcatttattgagataatcatgtggtttttgtatttagttctctttatgtgatgagtcacatttattgatttgcatatgttgaatcaaccttgcatcctggggacaaagccaactccattgttgcggatgaactttttaatgtgctgctggatttgttttgccagtattttattgaggatttttgcacagtgtttaccaaagacattggcatgatgtgttgttgttgttgttgttgttgtagtatctatgttaggttttggtatctggatgatgctggcctgatagaatgagttagagagaacttctttgtcttcaattttttttggatggttttaggagaaaaggtaccatctcctctttgtacctctgctcaaattcagcttgcttggtaggctagtttttactgcctcagtttcagaacacattattgatctattcagggttcagtcttgtggagggtttattttgcaaggaaattgtctatttcttctagattttctggtttatgtgcatacatatgtttatagtgttctctgattgttgttcatatttccatgggatcagtgatgatatctcccttattatttctaattgtgtttggttctcctttcttttcttatttatttgcctagctagtgttccatctagtttattaatttttttcataaaaacagctcctggatttgttgacttttttttttggaagagttttcagtgtctctatctccctcagctctactttgatcttggttatttcttgttttctgctacctttctggttagttttcacttggttttctagttcttttcatcaagatgttaggctgttaattttagatcttctagtttctcttttttttcttcttgtggcagagtctcactctgtcacccaggctggagtacagtggcatgatctccgctcactgcaacctccacttctcagttttaagtgatttctgctgtctcagcttcctgagtagctgggattacagatgtgcatcacaaaaaccagctaatttttgaattttttttgtagaggtggggttttgttgtgtggtccagactggtcttgaacatctggccttaagtgatttgcctaccccagcctcccaaagtgctggaactacaggcatgagccaccacacccagccctttctatctttttgatgtggacattagtgctataaatttccctcttttcttggtttccagtgattattttattctatcttggtgagtcatcagggaaataatcttaaatttacaatcaacatatagtttaaatccatataattgtgtgagaagaaccctttgttatttgaaggtgatgtttgaaagattttctaacggtgccttttagttagtcttaaatttctaattgtagttaaaaacatgccattgtcatttctgacattttaagtatatggtttagaagtggttagtatagttctattgttttgcagtaggttttagataatttgtgtcttacaaaagtaaaagtgaatactcattacttatgaaagaagttagttagcttgccttaggtagatagcaagagaagagtccctggaaagtccctggtcagtgcctcatccctgcataacatataaagaagcctggaaaaaatcaagctgcagacactaacaagggaactagcatatgttgttgtgcttggggacatgcccgtggctgcacagatagaaaaacctctggcccatttggataaaaacttgtagaaacctccagctcactcagataaaggaacaagaacgacctagcatagaaatgcctttgtttggccaggcacggtggatcatgcctgtaattccaacaatgtcggaggcagctgtgggcggatcatctgaggtcgggagtttgagaccagcatgaccaagatggacaaactctgtctttactaaaaatacaaaactagccaggcatggtgctgcatgcctataatcccagctacttgggaggctgaggcaggagaatcgctagaacccaggaggcggaggtttctgtgagccgagatcgcaccattacactccaggctgggcaacaagagcaaaactgcaaaaaaaaataaaaataaataaaaaaagaaagtacatctcaaaaaaaagaaagacaagaaaaagaaaaaaaagaagcacttttgtctttgtacagtcagtgggctcccaggaaaatgttccttctctttttgttggcatgggcactgtgggatctggtgcattccggtcgacactctcgtttatttggactgtaagtctgacctctatgaataattacttcagaccctgagtgctcccgggccaagctccttggccaaactttcaccttagcttctgataagtcttgggccaagctaagcagcatctatcaatcatcccttcagctcctgattgatcccgggccaaaggcctgggccaagctgagccacacgtttttcaagacagcctgtgaactaggcacatatccttcccttcccagtccataaaaaccctggacccagcctcgtagagggcaccactttcagacacctatctctgctggcaaagagctttcttctcttgcttcttaaactttcactccaacctcacctttgtgttcacgctccttaatctccttagaggtagaacaaagaactctggatgttatctcagactacgagagactgttacatcttggtgcactgctgagactacgacacttggtttctttgagtttgactaaatattttacatgagtgtaattatacagctttcctttttgactgtcttattttacttaacagaatgttttgaagatttgtccttattgtagtacttttcaagatttccttatttttaaggctgaatgctatcccagtgattgtacgtgccctgtttgctgaatctactcatccttaagggtacatttgcttccaggtaacatgtttgtgagtaatactacaatgtgcatatatctattccatgttctgctttgtctgtttgggatatttttcatacactgattcagtaccttgtgtattcccttgcttttgttgtctcatccgttgatgctacgtcccccaaattattgccacgaccagttgtaatgaagcttcacccttctgtattgtgctaggaattttacagctataggttttacattatagtcttcattcattttttaaaattgacacatgtaattgtgcatattttggggaaacaattatatatatgtgttgtataacaataaaaatcagtacttct

SEQ ID NO: 733 - DNA, 3059 bp, Homo sapiens
actacgcgccagaacctgcgccgggaagcgtcgcacagcgactgcatcaccatggagccgagggcaggtgtctccaaacaggacatacgtgaacaaatttggggctacatggaatcacaaaatttagctgactttccccgacctgttcatcacaggatacccaactttaaggggtcttatctggcttgccaaaacatcaaagacctagacgtttttgccagaacacaggaagttaaagtggaccctgataaaccactggaaggcgttcggctgctggtgctgcagagcaaaaaaacattgttggttccaacaccacgactgagaacgggattgtttaataagatcacaccaccccctggggcaactaaagacatcttgagaaaatgtgccacctctcagggtgtgaggaactacagtgtccccataggcttggactccagagtcctcgtggatttagttgtggtgggatccgtcgccgtttctgaaaaaggctggagaatcgggaagggagaaggctacgccgatctggaatatgccatgatggtatccatgggcgccgtcagcaaggagacgccggtggtcaccatcgtccacgactgccaggtcgtggacatccctgaagagcttgttgaggagcacgacatcactgtggactacatcctcactccaaccagagtcatcgccacaggctgcaagcgcccaaagccaatgggaatcacctggttcaagatcagcctggagatgatggagaaaatccccatactgaggagcctccgcgcccgagagcagcaggctgggaaggatgtcaccctccagggtgagcaccagcaccttccggaaccaggctgccagcagacagtgcccctgagtgttggcaggaggcccccggacacacccggaccagaaaccaattccatggaggcagcccctggctccccaccaggggagggtgccccgcttgcagccgatgtttacgttgggaacctccccggggacgcccgtgtgagtgacctgaagagagccctgcgggaactcggctccgtgcccctgcggctcacctggcagggcccgcggcgcagagccttcctccattacccggactctgccgcagcccagcaggccgtctcctgcttgcagggcctgcgcctgggcaccgacaccctgagggtggcgctggccaggcagcagagggacaagtgacctcgtggacagccacggagctcactgcagactcgccatccccgtcccctgccgctccggttccgatggcactcgagaggcctgcgtggcaagacgtgtcggagccaccgcctgagctgctcgggtctcaattcttctcagaagtcaccgctcagtgaacgcccaggccctcctgtgagtggggaagccgccctgcggttcatctcacagcgcgcagagactgcagcctcccaatcgtgcaggctcgggccttgagtcggtttctgtttctctggagggacagagcagaggggccagggactgagtgagtggctaagcaggggagggtgatgtgaaggtgatctcgagtttgccaggggtgggctgaacaggagaagatgaacaaaggatccggctctcaaaaggccctggcagggactggatgctgggtacagaagcgcgcccttgggcttcaggctcctgagctggcagcacggcagggagagctccatccatgtcgcaggagcccaggaagctcagcccctgggtaaaaagtgctcactgcagctcagatcagtcctcaggtcacatttcggggagccagcctcccctcttcccctccccagccccgctcctccctctgtggacacactccgggccctcagccagctggctgcatgaggagcagctttgtgctgtgggagagaccggctctgggagaatgggtttcatcccagcctacgtcacatttgcccagtgccttatgttttctgggtttttttcctccagttctgtttctaaaaaccagcttgagtttggctgaactgtcctttctcaacagaagcgcttttgcaattgatcccgggcaacaagtcaaaataagcttttaagtggagattttgtttttttcaaatgtatatgctttggaaattttgattttttagccagagggttttaccaagtgttctttgaagcacattacgatgcctcgagagggcggcccgtgcacgcgctttcaagaaaatgttctcgggacactcggtcttctctttgaaaggacattttctcattggttttgccgtgaaaatcctgtggagacttcgcaaagaaaacgcagccttacatttgctcattaaagacagatttccttcccaagtcgccatgaataaaatgagagagtagaaacgtctggaagcgccacacctggccctgggccctcggccctctgtgtccttggccttgcccccgcccgcacggctggtcacgtttgtcattgggcattcagctcagcgtcagaggctgactcagtccccagttcagagtagtcacctggttacactgaactcctcaccttcttttctctctttttttaaaaaatacttctttttctgaaagattcttatttttttttttttgtttacctttttcctgtggatttgctgccgttagaatagcaactccaggagaagagcaagtgagtcagccccccttctccactccctgccccaccggcagtgggcacagccctgcagacaggagcaaggacttcggggaatagacccactggggccgggagagggagaagctggattctgaccccaccactggcactcctgtgtccagccatgcctgacgcccaccccaccctcagacggcgggattaaaccaggcagtacagggttactcggggaagccagactgctgggatttcctgtcgctttagccagaataatccaggtatatggatatacagataatctgaaagagtttctcatttttatatttgtggaacatcgtgtaagaaaaactgaagagcaagtgcctgaaataaaatcccccacatgtatcagcctgcaaaaaaaaaaaaaaaaaaaaaaaaa

SEQ ID NO: 734 - DNA, 3026 bp, Homo sapiens
caccgtccggcagactactctcccccatggcggacttcgctgggccgtcttctgccggccgcaaggccggggctccccgctgctctcgaaaagccgcaggtactaaacagacaagtactttgaaacaagaagatgcttctaaaaggaaagctgaactagaagcagctgtgagaaagaagattgaatttgagagaaaagctctacatattgttgaacagcttttagaggagaatattacagaagagttcctaatggagtgtgggaggttcattacacctgctcactacagtgatgtcgtggatgaacgttctattgtcaaactctgtggttatcctttatgtcagaagaagctgggaattgtaccaaaacagaaatataaaatttctaccaaaaccaataaagtctatgatattactgaaagaaagtctttttgcagcaatttttgttatcaagcatctaagttttttgaagcacaaattcccaaaactccagtatgggttcgagaagaagagaggcatcctgattttcaactgctaaaggaagaacaaagtggccattctggagaagaagtacagttatgcagtaaagccattaaaacatcagatatcgacaatcctagccactttgaaaagcaatatgaatctagttcttctagcactcacagtgatagtagcagtgacaatgagcaagactttgtttcctccattctaccaggaaacagaccaaattcaacaaatattagaccacagctgcaccaaaaaagcataatgaaaaagaaagctggtcacaaagctaactccaaacacaaagacaaagaacagacagtagtagatgtcactgagcagttaggcgattgcaaattagatagtcaggagaaagatgctacatgtgaacttcctttacagaaagtaaatactcagagttcttcaaatagcactttgcctgaaagattaaaagcgtcagaaaattctgaaagtgaatacagtaggtcagaaataactctagtaggcataagtaagaaaagtgcagagcattttaagagaaaatttgccaaatcaaaccaagtgtctaggtcagtgtctagttcagtgcaggtgtgtcctgaagttggaaagagaaacttacttaaagttttgaaggagactttgattgagtggaagacagaagaaacattgaggtttttgtatggccagaattatgcttctgtgtgtctgaaacccgaagcctctctggttaaagaagaacttgatgaagatgacataatctcagatccagatagtcatttccctgcctggagggaatctcagaacagcttggatgagtctttaccttttaggggctcaggtacagccattaaaccactgccaagttacgagaatttgaaaaaagaaactgaaaagttaaatctgaggatcagggagttttgcagaggacggtatgttttgggtgaagaaaccaccaaatcacaagactcagaagagcatgattccacctttccactgatagactcaagttcccagaaccagattagaaaacgcatcgtacttgaaaagttgagtaaagtgttgcctgggcttctggttcctcttcagattacattgggagatatttacacacaacttaaaaatcttgttcgaactttcaggttaacaaatagaaatattatacacaaacctgcggaatggactttaattgctatggtgttgctgtcattactgaccccaattcttggcattcagaaacattctcaggaaggtatggtgtttacacggtttctagacaccctccttgaagaattacatctaaaaaatgaagaccttgaaagtctaaccatcatatttagaaccagctgtttaccagagtgatatattccatgaagacaaaatagaagatgaacttctattcaccgtttctggaattctagccgccatgatggtctggtggtgactgataactagttttattccaagacatacctttacctctttaagtttcaatctcccatctcccagtccttcagtccccaactgcagaggatgacctccccagatagaggagaatcattactccaacaagaataaccaagtctttgtatccctagtacaagacatagtatttttattcgaaaatgaatgtttaagtattaaattgaaacttgaatgaatattcaagaaaatataatgatctctactttttctggatgatttccagccatcatatcagtttgccaaaaaaattgagaaagttatgattttgacctcccaacctaaactctaaattctaaagatcagtaagcaattaggtcaataaatacatacaatttaagatgaagccctttggaagtctagtccaaaacaggaaaatctcagaactttctggactcaaggaaatgctttaaatggaatctgtagtttgtttgcaggagagacaatttctagaatttagattgcttttcaaaatgtttatcaggtaggcaagttagcagttgaggcggaacacagacaacttggggagctttactggaaggccaagaaaatactcttggacactggaggaaatgacagctactaaagcccaatcatggaaaaggaccagaaagcagcccactggaatggggagcttagtgggcaaggaggtagggatataatttctcttcttggctccaccagtaattagctctgtggcccagtcacctaaactttctggacttcagttcaggttgtatggcagtaggccatagaattggctactgccatacaatctctatgggaaaggactgcaaaaactaaattttatctctgtatgggcaaaggctactgtcatcctgttgttggtctggggccactctgacaattttttttaacctcatttgattgtgtaagggtctaaccacaacaaaaaatcatagtgtaatagaattaatcaagttcagcaaggtcacaggctagatcaatatacagaaaatcaattgtatttttctgttcagaaaactccaaaaatgaaataaagaaaattgtgttcacaat

SEQ ID NO: 735 - DNA, 3497 bp, Homo sapiens
gcggccgccgaggcctgggtggaagttggcgctgctgccgccgccctgcagcccactcgctgcctcggcagcgcgctgctcttctaagatggctgccgctaccggtgcggtggcagcctcggccgcctcgggtcaggcggaaggtaaaaagatcaccgatctgcgggtcatcgatctgaagtccgagctgaagcggcggaacttagacatcaccggagtcaagaccgtgctcatctcccgactcaagcaggctattgaagaggaaggaggcgatccagataatattgaattaactgtttcaactgatactccaaacaagaaaccaactaaaggcaaaggtaaaaaacatgaagcagatgagttgagtggagatgcttctgtggaagatgatgcttttatcaaggaaattgaagctcaagaaggtgaagatgatacctttctaacagcccaagatggtgaggaagaagaaaatgagaaagctcttcaaaggaatctaaagacagcaagacatcatctaaagatgacaaaggaagtacaagtagtactagtggtagcagtggaagctcaactaaaaatatctgggttagtggactttcatctaataccaaagctgctgatttgaagaacctctttggcaaatatggaaaggttctgagtgcaaaagtagttacaaatgctcgaagtcctggggcaaaatgctatggcattgtaactatgtcttcaagcacagaggtgtccaggtgtattgcacatcttcatcgcactgagctgcatggacagctgatttctgttgaaaaagtaaaaggtgatccctctaagaaagaaatgaagaaagaaaatgatgaaaagagtagttcaagaagttctggagataaaaaaaatacgagtgatagaagtagcaagacacaagcctctgtcaaaaaagaagagaaaagatcgtctgagaaatctgaaaaaaaagaaagcaaggatactaagaaaatagaaggtaaagatgagaagaatgataatggagcaagtggccaaacatcagaatcgattaaaaaaagtgaagaaaagaagcgaataagttccaagagtccaggacatatggtaatactagaccaaactaaaggagatcattgtagaccatcaagaagaggaagatatgagaaaattcatggaagaagtaaggaaaaggagagagctagtctagataaaaaaagagataaagactacagaaggaaagagatcttgccttttgaaaagatgaaggaacaaaggttgagagaacatttagttcgttttgaaaggctgcgacgagcaatggaacttcgaagacgaagagagattgcagagagagagcgtcgagagcgagaacgcattagaataattcgtgaacgggaagaacgggaacgcttacagagagagagagagcgcctagaaattgaaaggcaaaaactagagagagagagaatggaacgcgaacgcttggaaagggaacgcattcgtattgaacaggaacgtcgtaaggaagctgaacggattgctcgagaaagagaggaactcagaaggcaacaacagcagcttcgttatgaacaagaaaaaaggaattccttgaaacgcccacgtgatgtagatcataggcgagatgatccttactggagcgagaataaaaagttgtctctagatacagatgcacgatttggccatggatccgactactctcgccaacagaacagatttaatgactttgatcaccgagagaggggcaggtttcctgagagttcagcagtacagtcttcatcttttgaaaggcgggatcgctttgttggtcaaagtgaggggaaaaaagcacgacctactgcacgaagggaagatccaagcttcgaaagatatcccaaaaatttcagtgactccagaagaaatgagcctccaccaccaagaaatgaacttagagaatcagacaggcgagaagtacgaggggagcgagacgaaaggagaacggtgattattcatgacaggcctgatatcactcatcctagacatcctcgagaggcagggcccaatccttccagacccaccagctggaaaagtgaaggaagcatgtccactgacaaacgggaaacaagagttgaaaggccagaacgatctgggagagaagtatcagggcacagtgtgagaggcgctccccctgggaatcgtagcagcgcttcggggtacgggagcagagagggagacagaggagtcatcacagaccgaggaggtggatcacagcactatcctgaggagcgacatgtggttgaacgccatggacgggacacaagcggaccaaggaaagagtggcatggtccaccctctcaagggcctagctatcatgatacgaggcgaatgggtgacggccgggcaggagcaggcatgataacccaacattcaagtaacgcatccccaattaatagaattgtacaaatcagtggcaattccatgccaagaggaagtggctccggatttaagccatttaagggtggacctccgcgacgattctgaaaatgagctctctgccaaggttttaagataatttattgaaatctcctgtaaactttacttgactacttatgaagaggacctctgacttgcttgagagttctgtcagacttttctttttaaaaatttaacatgattgcttttctcaattttggagaagatgtttaaatagttctgttgtaacttttaatagttttgtgtatcattcaactttttttcttgcagcaccgaggcacatttgaaaagatggaattgaagtcgttttgtttaacgctgtgtgaatataaagagtagtttgcagctgtgtggtagtggtttaatttgcagccttagctctgtggtgtctggctctagagttacttctttttaccaagcattttcagcctccattttgaaggctgtctacacttaagaagtcttagctgtctaatttttagagaataagattgttcattgcatttctgagtattatgtaacctatttttgcagaaggtactgttacattaagtgcatctgtgtatcctggtttaaaaaaatgtaatcttttttgaaataaaccttcatattctgtatagttgctaaagtgttgagaacctttttaattgtaaaatgagaaccgattttcagtttagtgtagcagcacacttgttcaggtttgcatggtatgaaaccaaatagattcatgaaaccttggccatgaggtttgtttcacaaggttcttagaccgagttgtgcaggtaagtgcacttttaggtaatctgcactgtttgtttgatggataaattccatctctgggaattgtgtgggtattaatgtttccatgttcccaactatgttgagaagtggaaaaaaacccaggttctagatgggtgaatcagttgggttttgtaaatacttgtatgtggggaagacattgttgtctttttgtgaaaataaaaatccacacctggaagtgtaaaaaaaaaaaaaaaaaa

SEQ ID NO: 736 - DNA, 4230 bp, Homo sapiens
gtgcagacgtcggcaagctgcgccgccgcttcgggttgcttccggatctggtacttgggcagagctccccggggttcattgtcttcgcttcacaggatctgtttgagtcctgtccaccggatcctacggggggtaccttcgaaaaaaaacgggctatgctgctgttgcgtgtgggtaccctctcctgacgcctccgccgcccgggtcatgtggaccctcgtgggtcggggctgggggtgcgcacgcgctctcgcgccacgagccactggggccgcgcttctggtggccccggggccccggtccgcgccgacccttggggctgctccagagtcctgggctaccgacaggctctacagctccgcagaattcaaggaaaaacttgacatgtctaggtttcctgttgaaaatattagaaatttcagtattgttgcacacgtggatcatggcaaaagtactttagctgacaggctcctagaacttacagggacaattgataaaacaaagaataataagcaggttcttgataaattgcaagtggaacgagaaagaggaatcactgttaaagcacagacagcatctctcttttacaattgtgaaggaaagcagtaccttttaaatctcattgatacaccgggccatgttgattttagttatgaagtatccaggtcactttctgcttgccagggtgttttacttgtggttgatgcaaatgagggaattcaagcccaaactgtagcaaacttctttcttgccttcgaagcacagctatcggtaattccagttataaataagatagatctgaagaatgctgatcctgaaagggttgaaaaccaaattgagaaagtgtttgatattccaagtgatgaatgtattaagatttctgctaaacttggaacaaatgttgagagtgttcttcaggcaattattgaaagaatcccccctcctaaagtgcatcgcaaaaatcctctgagagctttggtatttgactccacctttgaccagtatagaggtgtgatagccaatgtagcattatttgacggagtggtttccaaaggagataaaattgtatctgcacatactcaaaagacatacgaagttaatgaagtaggagtcttgaatcctaatgagcagccaactcataaattatatgcaggacaggtgggctatctgattgctgggatgaaagatgtcactgaagcgcaaataggagatacattatgtttacataagcaaccagtggagcccttgcctgggtttaaatcagcgaaaccaatggtatttgcaggaatgtatcctctagaccaatctgaatataacaatctgaagagtgctatagaaaaactgactttaaatgattccagtgtgaccgttcatcgggatagtagccttgctctgggtgctggctggaggctaggatttcttggacttttgcacatggaagttttcaaccagcgactggagcaagaatataatgcttctgttattttaacaacccctactgttccatataaagctgtactgtcatcatcaaaattgataaaggaacatagagaaaaagaaattacaattatcaatcctgcacaattccccgataaatcaaaagtaacagaatatttggagccagttgttttgggcactattatcacaccagatgaatacactggaaaaataatgatgctttgcgaggctcgaagagcagttcagaagaatatgatatttattgatcaaaatagagttatgcttaaatatctctttcctttgaatgaaattgtggtagatttttatgactctttgaaatccctatcttctggatatgctagttttgattacgaagatgcaggctaccagactgcagaacttgtaaaaatggatattctactgaatggaaatactgtagaggagctagtaactgttgtacacaaagacaaagctcattcaattggcaaagccatatgtgaacggctgaaggattctcttcctaggcaactgtttgagatagcaattcaagctgctattggaagtaaaatcattgcaagagaaactgtgaaagcctataggaaaaacgttttggcaaaatgttatggtggtgatattacccgaaaaatgaagcttttgaagagacaagcagaagggaaaaaaaagctgaggaaaattggcaacgttgaagttccaaaagatgcttttataaaagttctgaaaacacaatcttctaaataattggtgggaaaacaaagaattttcattgcaatttgtaatatgctgacaacagaaagaaaattataaaatttgcttgttactttcagggtattcaggttcaaataacctactagtctttcgttgaaagggagtagttagtgggtaggcaagagcttagattttgaagccatgttgcctgttctcaaatatctgttccaaccactcactagtaaggtgaccgtggccagattaacctttgtttcctcttcagtaaaatcgagattatactactacctacataagttgttgttgtgaagattaaatgaggtaatacgttaaatattcagaggtgcaagacacatagtaagcactcaattgtaactacagttaagtccttaaatgccatcgaaaggttcttagaaactgactttaagcaaaatgacacgtagcacaatgttcttgaatgatgtcatttccttaagtggtttgtaacatcgatgaggaaaaaaaattggtttatgcgtcatttcattttatttttatttattttttgagacagagtcttgccctgtcgcccaggctggagtgcaatggcacaatctcgactcactgcaacctctgcctcctgggttcaagagattctcctgcctcagcctccattacaggcgtgcaccaccatgctcggctaattttttgtatctttagtagagtcggggtttcaccatgttggccaggctggtcttgaactcctgacctcgtgatccacccaccgtggcctcccaaagtgctgattacaggtgtgagccaccatgcccagccatgtcatttcatttaaagtcacaatttccatgaatctcaacaagtgaggacctgctatattttgttgcatgcagtttttctttacggacactaaaaggccccatacttaagattccatctactttaagtttaaaggattttcagaatcaccttaagtgtcaaatttgttagcaggattaattgatatgaattcacttattaaacagtaaactcaaataacatagacatcaaataacagacatctgctctagttaatgataaaatgtttatagattttatcaggtggttagtttgaaactaaatggtttacatctaaattaagggcaggagctgtctttcagacattcaaaacgcatttgtgtaaaatgacaggtgtttggtattaccaggaactcataatgacattttaataattattgtctaaatttcataatcgaagcgattttagagtagttaacttgagatttcacagccagtaaatggctgtatttctccagagctctcagctcccatgtttattcagccaacgaacaaaccagactgcagactgtattagagcaagacaacatcatttagccattgatttttatcttctaccttgaatgaattgaatgaagaaaatgtcttttagggataaacactatcaaggatgaattttatactaaggttatatgaaagaaaaatctcaaaaccactaagccaaagggaagtcaagctgggaactgattgaggcaaacctgcctcccattttattcctaaataagacagccacaaagataaaatttgctcacaagggaattccttatggacaaagaactcaaagtcttcacatgaaacaaatgcataaatgattgctttctctgtttcatgtttcactaagccagattaaggtataactgactattcctctactctcctctcacatgtaaattgtatattcagtgaaaggctaatcagaaactcaaaaaaatgcaaccctttctctcttacctgcctatgcttgaagcccccgcccctcttcaagttgtcctgcctttcaagaccaatgtacaccttacacatactgattgatgtctcatgtctctctaaaatgtgtaaaaccaagctgtgccccaaccaccttgggcacatgtggtgaggacctcctgaggctgtgtcatgggcacaccttaaccctgggaaaataaactttctaaactgaaaaaaaaaaaaaaa

SEQ ID NO: 737 - DNA, 2649 bp, Homo sapiens
gaaagggagaaaaagattctacagccctggccacagtactttggtgacacttttcgtggggctctctggaggacttttcccaaggcagatggagaaaacttcgtgaaacccactccttgctattaaaggaaatgttgtggaatataattggacttaggttttgcagagcttgagcatggcctttttgtcctcccaccttctggttcttgaagacattgccggtgacctggccccagactaacacaaggcgggcgtataccgtcagcctgcctggcgtccccttgcctcagcacacacagagacctcttgcaagatgcttctctgccgccataggctggaggttccccgggaactttcccttccttcctagctgaggaagatccctcacttccgctcgccgcgccaccggtcccacctccccgccccccgctgggtcctagcgccggcccctgtttggcagggtccgggctccgtcggtgcgaggagccgacgccgacgccacggagtcagcacaagtctcatcagagaaaccccgttcaccaaggccatggaagtggaggctgcagaggcccggtccccagcccccggctacaagcgctcgggccgccgctacaagtgcctgtcctgtaccaagacatttccaaacgcgcccagggcagcgcgccacgctgccacacatgggccggcagactgctctgaagaggtggccgaggtgaagccaaagccagagacagaagctaaggcagaggaagccagtggggagaaggtgtcaggctccgcggccaagcctaggccctatgcgtgtccgctatgccccaaggcctacaagacggcacccgagctgcgcagccacgggcgcagccacacgggggagaagccctttccgtgccccgagtgcggccgccgcttcatgcagcccgtgtgcctgcgcgtgcacctggcctcgcacgctggcgaactgcccttccgctgtgcgcactgcccgaaggcctatggcgcgctctccaagctcaagatccaccagcgtggccacacaggcgagcggccttacgcctgcgccgactgcggcaagagctttgctgacccttcagtgttccgcaagcaccggcgtactcacgctggcctgcggccctacagctgtgagcgttgcggcaaagcctatgcggagctcaaggacctccgcaaccatgagcggtcccacaccggcgagcgccccttcctctgctccgagtgcgggaagagcttctcccgctcatcctcgctcacgtgccaccagcgcatccacgcggcacagaagccctaccgctgcccggcctgcggcaagggcttcacgcagctcagttcctaccagagccacgagcgcacgcactcgggggagaagcccttcctgtgcccgcgctgcggccgcatgttctccgacccctcgagcttccgtcgccaccagcgcgcccatgaagaggtgaagccataccactgcgagaagtgcggcaaggacttccggcagccggcggacctggccatgcaccggcgtgtgcacacaggcgaccggccgttcaagtgcctgcaatgtgacaagacgttcgtggcgtcctgggacctcaagcggcacgcgctggtgcactctggccagcggcccttccgctgtgaggagtgcgggcgagccttcgccgagcgtgccagcctcacgaagcatagccgggtgcactcgggggagcgccccttccactgtaacgcatgtgggaaatcctttgtggtgtcgtcgagcctgaggaagcacgagcggacccatcgaagcagtgaggccgcgggtgtgccccctgcacaggagctggtggtggggttggcgctgcctgtgggcgtggcaggtgagagttcagccgccccggcagcaggggcggggctgggggaccctccagcagggctgctagggctgcccccggagtcaggtggtgtgatggccacacagtggcaggtggtgggcatgacggtggagcatgtggaatgccaagatgctggtgtccgggaggctcctggtcccttggaaggggcaggcgaggcggggggtgaggaggctgacgagaagcccccccagtttgtgtgccgagagtgcaaggagaccttctccacaatgacgctgctgcgtcggcacgagcgctcacacccggagctccggcccttcccctgcacccagtgcggcaagagcttctctgaccgggctgggctgcgcaaacacagccgcactcacagctcagtgcgcccctacacctgcccccattgtcccaaggccttcttgagtgccagcgacttgcgcaagcatgaacgcacccaccctgtgcccatggggacccccacacccctggagcccctggtggctttgctaggaatgcctgaagaggggccggcctgaagcccatgaccccccagcaccacactccgggagcccagcccccatcgggggcttcctgtacctccttttgcctggctctgctctttagactccagatccctacccctcagcaactagctcccctgtcggccagctaagagagctgggacagtggaggctggcagaagctgagacgtgactgtctaggagtaacactcattaaagctttcattttggcaaaaaaaaaaaaaaaaaaaaaaaaa

SEQ ID NO: 738 - DNA, 4088 bp, Homo sapiens
cgaccaggccgggcacctccgagcgcaaggacagcgcgaggtccgcgcagcccagcgcagccatggagccccgcgcggactcactctatgatgtccctgtcggtgcggccgcagcgccgtctgctcagcgcccgggtcaataggagccagtccttcgcaggcgtcctcggcagccacgagcgggggcccaggagtttcccggtcttcagcccgccggggcccccacggaagccccccgcgctctcccgagtgtccaggatgttttccgtggctcacccagccgccaaggtgccgcagcccgagcggctggacctggtgtacacggcgctgaagcggggcctgacggcctacttggaagtgcaccagcaggagcaagagaaactccaggggcagataagggagtccaagaggaattcccgcttgggcttcctgtatgatctggacaagcaagtcaagtccattgaacgcttcctgcgacgactggagttccatgccagcaagatcgatgagctgtatgaggcatactgtgtccagcggcgtctccgggatggtgcctacaacatggtccgtgcctacaccactgggtccccgggaagccgagaggcccgggacagcctggcagaggccactcgggggcatcgcgagtacacggagagcatgtgtctgctggagagcgagctggaggcacagctgggcgagtttcatctccgaatgaaagggctggctggcttcgccaggctgtgtgtaggcgatcagtatgagatctgcatgaaatatgggcgtcagcgctggaaactacggggccgaattgagggtagtggaaagcaggtgtgggacagtgaagaaaccatctttctccctctactcacggaatttctgtctattaaggtgacagaactgaagggcctggccaaccatgtggttgtgggcagtgtctcctgtgagaccaaggacctgtttgccgccctgccccaggttgtggctgtggatatcaatgaccttggtaccatcaagctcagcctggaagtcacatggagccccttcgacaaggatgaccagccctcagctgcttcttctgtcaacaaggcctccacagtcaccaagcgcttctccacctatagccagagcccaccggacacaccctcacttcgggaacaggctttctataacatgctgcgacggcaggaggagctggagaatgggacagcatggtccctgtcatctgaatcttcagacgactcatccagcccacagctctcaggcactgcccgccactcaccagcccctaggcccctggtgcagcagcccgagccccttcccatccaagttgccttccgcaggcctgagacccccagctctgggcccttggatgaggagggggccgtggccccagtcctggcaaatgggcatgcaccctacagtcggactctgagccacatcagtgaggctagtgtagatgctgccttggctgaggcttcagtggaggccgttggcccagaaagcctagcctggggacctagcccacctacacacccagctcccacccatggagagcaccccagtcctgttcctcctgccctggaccctggccactctgccacaagctctaccctcggtacaacaggctctgtccccacatctacagaccctgccccatctgcacacctagactcagttcataagtccacagactctggcccttcagaactgccaggccccactcacaccactacaggctctacctatagtgccattaccactacccacagtgctccaagccccctcactcacactactacaggctccacccacaagcccataatctctacccttactactacaggccctaccctcaatatcataggcccagtccagactaccacaagccccacccacactatgccaagccctacccataccacagcaagccccactcatacttccacaagccccacccatacccccacaagtcccacccacaaaaccagtatgtcacctcccaccactacaagtcctacccccagtggtatgggcctagtccagactgccacaagtcccacccatcctaccacaagccccacccatcccaccacaagccccatccttataaatgtaagcccttccacttctctagaacttgctaccctctccagcccctccaaacactcagaccccaccctcccaggcactgactcccttccctgtagtcccccagtctccaattcctacactcaggcagaccctatggcccccagaactccccacccaagtcctgcccattccagtaggaaacccctcacaagccctgccccagatccctcagagtctacggttcagagtctaagccccactccctcacccccaacccctgcaccccagcattcagacctttgcctggccatggctgtccagaccccagtcccaacggcagccggagggtctggggacaggagcctggaggaggcactgggggccctaatggctgccctggatgactaccgtggccagtttcctgagctgcagggcctggagcaggaggtgacccgcctagaaagtctgctcatgcagagacaaggtctgactcgcagccgggcctccagtctcagcatcactgtggagcatgccttggagagcttcagcttcctcaatgaagacgaagatgaagacaatgatgttcctggggacaggcctccaagcagcccggaggctggggctgaggacagcatagactcacccagtgcccgccccctcagcacggggtgtccagctctggatgctgccttggtccggcacctgtaccactgcagtcgcctcctgctgaaactgggcacatttgggcccctgcgctgccaggaggcatgggccctggagcggctgctgcgggaagcccgagtactggaggcagtatgcgagttcagcaggcggtgggagatcccggccagctctgcccaggaagtggtgcagttctcggcctctcggcctggcttcctgaccttctgggaccagtgcacagagagactcagctgcttcctctgcccggtggagcgggtgcttctcaccttctgcaaccagtatggtgcccgcctctccctgcgccagccaggcttggctgaggctgtgtgtgtgaagttcctggaggatgccctggggcagaagctgcccagaaggccccagccagggcctggagagcagctcacagtcttccagttctggagttttgtggaaaccttggacagccccaccatggaggcctacgtgactgagaccgctgaggaggtgctactggtgcggaatctgaactcggatgatcaggctgttgtgctgaaggccctgagattggcgcccgaggggcgtctgcgaagggacgggctgcgggccctcagctccctgctcgtccatggcaacaacaaggtcatggctgctgtcagcacccagctccggagcctgtcactgggccctaccttccgggagagggccctcctgtgcttcctggaccagctggaggatgaggacgtgcagactcgagtggctggctgcctggccctaggctgcatcaaggctcccgagggcattgagcccctggtgtacctctgccaaactgacacagaagctgtgagggaagctgcccggcaaagcctacagcagtgtggagaagagggacagtctgcccatcgacggctggaggagtccctggacgccctgccccgcatctttgggcctggcagcatggccagcacagcattctaaactattcacccatgggttcctggtgcccctttccccccactttcagggctcaccaggcactggcagggagggtaagggctggctccagatacccctcccccacagattcctagcaatgaaaatctaatatattcttctgttgcccctggggttggagagtcagtgcctgcagtcaagtgcctcccagcctcggctcagcacatcccttgccacaaatcagtgtctggggcttggccaccctgccgctgcccagccacatcccttggttttgtattttatttacagagttttacagaaaataaaaaagcaaaatgtctttcctaaaaaaaaaaaaaaaaaaa

SEQ ID NO: 739 - DNA, 2582 bp, Homo sapiens
gcagagcagggaagccaacctgagcaaacacagcagcccgagtgttcccaaggccaaaatgctgagaacgtccactcctaatctgtgtggtggtctgcattgccgggccccctggctctcttctggcattctctgcctctgcctcatattcttgttgggccaggtgggcttgctgcagggacacccccagtgcctggattacgggccccctttccagccccctctgcaccttgagttttgctctgactatgagtccttcggctgctgtgatcagcacaaggaccgccgcatcgctgcccggtactgggacatcatggaatattttgatctgaagagacatgagctgtgtggagattacattaaagacatcctttgccaggagtgctcgccctacgcagcccacctctacgacgccgaaaacacccagacgcctctccggaatctcccgggcctctgctctgattactgctctgccttccattctaactgtcactcagccatttccctgctgaccaatgaccgcggcctccaggagtctcatggaagggacggtacccgcttctgccacctcctggaccttcctgacaaggactattgcttccctaatgtcctgaggaacgactatctcaaccgccacctgggcatggtggcccaagatcctcagggctgcctgcagctctgcctgagcgaggtggccaacgggctgaggaaccccgtctccatggtccatgctggggacggcacccatcgcttctttgttgccgagcaggtaggagtggtgtgggtctacctccctgatgggagtcgcctggagcaacccttcctggacctcaagaacatcgtgttgaccaccccatggatcggggatgagagaggcttcttggggttggcttttcaccccaaattccgccacaatcgcaagttctatatttattattcgtgcctggacaagaagaaggtagaaaagatccgaattagtgagatgaaggtttctcgggctgatcctaacaaagctgacctgaaatcagagagggtcatcttggagattgaagaaccagcctcaaaccataatggcggacaacttctttttggcctggatggctatatgtacatattcactggggacgggggacaggctggagatccctttggcctgtttggaaatgctcagaacaaaagttccctgctgggaaaagttttaaggatcgatgtgaacagggcaggctcacatggcaagcggtaccgagtcccctcggacaatccatttgtttctgagccaggggcccaccccgccatctatgcctatgggatcaggaacatgtggcgttgtgctgtggaccgaggggaccccatcacgcgccagggccgaggccggatattctgtggggacgtgggccagaacaggtttgaagaggttgacctcattttgaaaggtggaaactatggctggagagcaaaggaagggtttgcatgttatgacaaaaaactttgtcacaatgcctctttggatgatgttctgccaatctatgcttatggccatgcagtggggaagtcagtcactggaggttatgtctatcgtggttgtgaatccccaaatctcaatggcctgtatatctttggagacttcatgagtggtcgacttatggctttgcaggaagatagaaaaaacaagaaatggaagaagcaggatctttgcctgggcagcaccacgtcctgtgccttcccagggctgatcagcacccatagcaagttcatcatctcctttgctgaagatgaagcaggggagctgtatttcctggcgacctcttacccaagtgcctatgcaccacgtggatctatttacaagtttgttgacccctcaaggcgagcacccccaggcaagtgcaaatacaagccagtgcccgtgagaaccaagagtaagcggatcccgttcagaccactcgccaagacagtcttggacttgctaaaggaacaatcagagaaagctgctagaaaatcttccagtgcaaccttagcttctggcccagcccagggtttgtctgagaaaggctcctccaagaagctggcttctcctacaagcagcaagaatacattgcgagggcctggtacaaagaagaaagccagagtggggccccacgtccgccagggcaagaggaggaagagcctgaaaagccacagtggcaggatgaggccatcagcagagcagaagcgagctggcagaagtctcccttgacctattggtcaaggtggccgacagggtgacgtgagagaggagagccacctcatcaaatgaaagtcactgctgaataaagaccttagaagtctgggaagccagggtagaggtggggcagggcggttttcctctccctgggaaatcttgctgtctactgaataaataaatgcaccttctctgtatgcagtgcttctgtgggagaccatatcccagattgctggtgcacctgggttatggtaagcactagtccatgagcctgcttggaatcacactggatgtctccgttttgtcttgtaaatgcctacaacctgaggtaataaatcaacatttgctcaaactggaaaaaaaa

SEQ ID NO: 740 - DNA, 2255 bp, Homo sapiens
agctggacggccccgggaggccgcagaccgccgggctccccgaggacacctcgcaccggaggaggagaggaggcagcgcccggccaggctgggagcacctacggccgcgcgggggcgggagccaggtggcctcggcgcgcccgcctcgcccgggcaccgagcaggaagtggctgcggcgcggcctcctcgcggtgcaacagggcggggaggcggccgcagcccgagccggagcccgagcgccgggagcgagacctcatggcagcggtggcgcccgcgggccccggggactccgcctcggccgccctggacgagctgtcactgaatttcacgtacggggcaccaggcgccggcaacggctccctctcgggcgactggtaccgcaggaaccagattcacctttttggagttttgctggctattttaggaaacttggtgatcagtatttctctaaatattcagaaatattctcaccttcagctggcacaacaagagcacccaaggccatacttcaagagtgtgctgtggtggggtggtgtcctgctgatggccgtgggagagacggggaactttgcagcctatggatttgctcccattactctgatcgctccgttaggctgtgtgtctgttacaggtagtgccattatttctgttacatttctgaaagacaatttgagagcctcagacttactcggtacgacactggcatttgcaggaacatatttactggtgaactttgctccaaatataactcaggcaatctcagcaagaacagtacagtattaccttgtcggatggcagttcctgatctatgtgattttagaaatattaattttctgcattctcctgtatttctataaaagaaaaggaatgaagcatatggtgattctgctaaccctggtggcaattctagcctcattgactgttatttcagtaaaggccgtctcaggcatgatcactttttctgtgatggataaaatgcaactaacttaccccattttctatatcatgtttatcatcatgatagcatcttgtgttttccaagtcaagttcctgaatcaagccacgaaactctacaatacgacaacagtggtgccagttaatcatattttctttacaatcagtgccatcattgcaggtatcatattttatcaggaattccttggtgctccttttctcactgtatttatatatctttttgggtgttttctgtcattccttggtgtatttttggtcacaagaaatcgagaaaaggaacatctgcaacagtcttatattgattttggaaatattcctgacacaaccccagagagaaaggcttggagggaaacaaatgttggacaaaatacaaccagattcacatagcttatcctatggaactttgcctgatggaagtgactcaacaaagagccaaagtggagagaagaaagaggtctaaatgctgagaaggatggctgttggcctgttattcgataccacctttttaaaaaattgcacatgttcaatttgtgtcagcagctcttttataagctaacatgtgctagcattcatttcagtcctttcccccacctcagcgtctatggacaatcggggacttcctaagctctgacagtctaatatttccatggaatgtgatttggagtgttccccacaccctggacctctccctagtgattatctagccagctacaccttactcagagcccggctgctctagcaggaatgttgcacagaaacatacatttgcggtttggccacaggtcgcataggtggcttctcccacgggtagtgtcagttgcttcactttaaaaagtcacttcagccccacaacctcactcccaaaagaaaggtttgagagcgctcattttttttctaagacaccttttataagcctccctataaaaatctcacctttcaagtactaagttagaattgcaagtcatcttttctgaaaactaatgctatcaaagtcctcctttgaaaattaagggtctctttaaaattagaatttataaatggcattcagtgatagtgtacaccaaaattaaaagaccttgactggtgggctttttacgtgtaaggaagaggaagtttaagaagtaggactctgcttgtttcagtagcccatgtactaaaataggaacaatgcagagattagcacagcccctgcacaaggctgacacataaattcatgaagcgttagagacaaaaagtaggactaatgtttgtttattttttaataaaaatctagaatggt

SEQ ID NO: 741 - DNA, 2895 bp, Homo sapiens
catgtcagtcatctactttttttctttgaaatctgcatatgggttacaaaaactctgttaggttttgaaaattccattaagttggaaaccttggttaaaaatgtaggtgcctggcccatggttaccctggattcaggtctctcatgattatatttggggatttacgttcctaactgctaagcaacatctttgacaactagtaattcatactctactagtagtcacatgtcatatagtaaaataaatagggctttagttcttaagtaattctataggattttaccctgaaatccagggtgttcagatttcaaaaaggataatttatcagtattttctcatccagtcaaacttcagctgacattgatacaggtcaaaatgcgtagatgctttttggtgttggaaataagtgtctgtcttatggtcatcattgtcttcttagatttttgggtaggggggccaggtagggggagactcagaaataaaagcgttccccagataacttcaatctggaaagaattttttgtatagagtccatctctccctcaagactgaccacaggtttcatgagaaggtccctgaaaacatcacatttctctgaagaaccatcaacttgtcttttcttgaaccacaggaatggttctacagaccctactataattcttcacatttcagaacccatgtttaatggagggaagagagaaatgcatgggaaaagaacacctccttttctcctttctcttaaattcaaagacgtttgctttggaatgccctcacttctccctattcacaggcttctaaaatcattaatttactcaaggcacatgtgccttctttgccccaaatgcatcactttccttttagttatggctgattttgggtgtgtgtgtgtaagacatgcagtcaacaatgagatgaaggccattgcatagatctcatgcagatagtgatggattcagaaagtaggttccagtggcgtcactaccttcttgtaagccagtatacactggctatttgtggaaatctctttgggagatcaaatagagtattatgccactgtgagtgtttataaactggaaggaacaagtacctgtgtttcttgggacacaaagcactcagatcctgagtggatgcagacatgagagtaaatgtcagcccaaattaggcccctcgacctacagacatttcatgggttttatttaatcacaccccatggtttggggctacatgaggaagttggtaatgagctgaatttcttattcagtggaaaaaactgaaactgtctaaaaacacgggatatattttagaggcaattgtggaagcggagagaatgagatgatggtgttcagagggaccagcttctttttcagttgtctttagaactcaagaataatcaataatttagtgccccttcaacagccatactcagcaagaagaatcagaagcttgatcctctaacagaaatagaagagggtagctttgcccattgccactgtctttactgccccttctgcccctccacccacatccacattcagcatcactccaaggatgtgtcagcatcttgcccatgcaggtagaaatttgtgagtaggcctccatacttcctcgggggaagaaagagaaactagtgctggttttaagaatgtagctggcttttcatcagaacccttatgctaacctgaccacacttgctctcggggaagttcaagcctgtgatgtgcataaactccaacaagcctggctttggtgttcagcatgcacattccataaatatctcttgcaggcataccccacagctagactgcaggattaaaataacttccaaaaggtgctggattggagtttgttcaaatttctcattaaccactaatgttaattcataccaaatgcaaagtattctaaaccagctgatgctgtcagtgttcaagttttaagtgacttcaaacacaatggaagtgtttcaatgggagccagatctcatgagtaaaaatccattttataatagctctgtgatatatcagtgggagatgattcataggggagagatttgaacaagcagaattaagtgttagcaaaaatgctgcattgctttgattcatgtttaaagacctaaatttctatgcacaaggaataaagggcctacttaccaagtgtaaatcacaacataggctaccaaaatatttcttatttgctaggagaacaaagctgtcacggtgcatgatagctggacagagatggctaaaaaagaggcaaattcagatttggaaacagggtggcctcttcattatttattgccaagatctgaaaatcttcaacatcttataagacaacaatgaagtagcccctgaacagcatggagttgctgtgagtttgttcgttgcagacctttgtgttgggtcctgggaatctaagctttgttccctgtgcatggtggataattgaaaccaagaggacatgggatagaccttgtgacagaccaattctgtgacccctgtcttctgggtcacattattcattgttgatttaaatacaggactaccaaacagtacaaatctatcatgagtctggtagaaaagtaaaagtaaaagctgcacacgttacatactgtttattgttctaatgtacaactaactatttgcatataatgtgatttaatttattgctgttttgtgtagaaaaggagaactaatgactgtggatataacccatgttttgtataatatattttatttcttgtgcgaactggtcatttaaaatatctacttcatttgatgtttggatataaatgtgtatgtgtccttgtaaatgtttctatcaagcaagaatgccacgtactcagagtataacaatgtgttctcattaaaaaatacatcccgaaaaaaaaaaaaaaaaaaa

SEQ ID NO: 742 - DNA, 3268 bp, Homo sapiens
cggtctcgggagatggaggaaaaggagatgttacggcggcagatccgcctactgcagggtctgattgatgactacaaaaccctccacggcaatgccccggcccctggtaccccagcagcttctgggtggcagccacccacttaccacagtggcagagcctttagtgcccgctaccctcgtccaagccggaggggctactcttcccaccatgggccttcgtggcgcaagaaatactccctcgtgaatcggcccccgggaccctcagaccctcctgccgaccatgctgtgcggccgttgcacggggcccgggggggccggcctcctgtcccgcagcagcatgtccttgagagacaggtccagctcagtcagggtcagaacgtggtcatcaaagttaaaccgccatcaaagtctggctctgccagtgcctcaggggcccagcggggctctttggaagaatttgaggaaaccccctggagtgaccaaaggccccgggaaggtgaaggtaagccccctcggggacagctgcagccctcgaggccaacaagagccagggggacctgcagtgtggaagatcctcttctggtctgccagaaggagcctggtaagcccaggatggtgaagtcagtgggcagtgtgggcgacagcccccgggagccccgccggacagtcagtgagagtgtgattgccgtcaaggcgagcttcgcatcctccgctctgcccccacgcactggcgtggccctgggccggaagctgggttctcattccgtggccagctgtgctccacagctccttggggacaggagagtagatgctggccacacagatcagccagttccgtctggctcagtggggggccccgccagaccggcctcaggacccaggcaggcccgggaggcctcgctggttgtgacctgtcgaactaacaagttccggaaaaacaactacaaatgggtggctgcctcctcgaagagtccccgggttgctcggagggccctcagtcccagagtggctgcagagaatgtgtgcaaggcctctgctggcatggcaaacaaggtggagaagccgcagctcatagctgacccagagcccaagcccaggaagccagccacgtcctccaagccagggtctgcccccagcaagtacaagtggaaggcctccagcccctctgcctcctcctcttcctccttccgttggcagtcggaggccagcagcaaggaccatgcctcccagctctccccagtcctgtctaggtccccgtcgggggacagaccagcagtaggacacagtggcttgaagcccctctctggggagaccccgctctcggcttacaaagtgaagagccgcaccaagatcatccggagacgcggcagcacaagccttcctggagacaagaaaagcggcacctcacctgccgccaccgccaagagccacctcagcctccggcggagacaggccctcagggggaagagcagccctgtcctgaagaagacccccaacaagggcctggtacaggtcaccacgcaccgactatgtcgcctgccaccgagccgggcccacctccccaccaaggaagcgtccagcctgcatgccgtgcggactgcacccaccagcaaggtgatcaagacccgctaccgcattgtcaagaagacgccggcctcgcctctcagcgccccgcccttccccctgtctctgccctcctggcgggcccggcggctctcactatccgggtccctggtgctgaaccacctgcgtccagttgccagcgggggtgggaaagcccaaccgggctccccttggtggcggagcaaaggctaccgctgcatcggaggggtcctctacaaagtatctgccaacaagctctccaagacctccggccagcccagtgatgcgggcagcaggcccctcctgcgcacaggctggctggatcctgcaggcagctgtagccgttccctggccagccgggcagtgcagcgcagcctggccatcatccggcaggcgcggcagcgcagggagaagaggaaggagtactgcatgtactacaaccgcttcggcaggtgcaaccgtggcgagcgctgcccctacatccacgatcccgagaaggtggccgtgtgcaccaggtttgtccggggcacctgcaagaaaacggatgggacctgccccttctcccaccatgtgtccaaggagaagatgcgggtgtgctcctacttcctgaagggcatctgcagcaacagcaactgtccctatagccacgtgtacgtgtcccgcaaggccgaggtctgcagcgacttcctcaaaggctactgccccctgggtgcaaagtgcaagaagaaacacacgctgctgtgccccgactttgcccgcaggggggcgtgtccccgcggcgcccagtgccagctgctccaccgtacccagaaacgccacagtcggcgggcagccacgtcccccgccccagggcccagcgacgcaaccgccaggagcagggtctcggccagccacgggcccaggaagccttcagcatcccagcgccccaccaggcagacgcccagctcggctgccctcactgcggctgccgtggctgcacctccccactgcccaggggggtcagcctctccctcatcctcgaaggcttcgtcctcctcctcctcctcctcatcccctcccgcttccttggaccacgaggcaccatctctccaggaggctgccttagcagcagcgtgctccaacaggctctgcaagctgccttccttcatctccctgcagtcctcgccgagcccaggagcccagcccagggtccgggcccctagggcccccctcaccaaggactcagggaagcctctgcacatcaaaccacgtctgtgaggaccccagggaccggcctgcacctacctcagaccctcatccttggagaggaaagaggctctgtccaccactctaccccacaggagggccgcccgccaccaagcctcacctgggggccacagggacactgctctgcctgcctggccctcaaccttccatgaccagcgtgtgcgcagggcctggtcttcctcccccaagccaggcccctgtccccaccccaccaccttccagggtgccaggcagggctggcctccaggcctgtccccgactgccattggcaacagtggccctgcagcccccagccctccccacccaggttttcggcccagtgaagaggccactggccaggcctcccaggcaggtgttttatgttcagcaataaaggttctatccgaaaaaaaaaaaaaaa

SEQ ID NO: 743 - DNA, 2229 bp, Homo sapiens
aatgaaccaaattcacaatcaaaatttccaatttttcggtttccttcatcattctcttctcccgttggaatggtatttcatccccgaagccactttttgtatgcttatggcaatcaggaatgggaagatacagtgcagtcggaagtgttactgagagaattttcacattatactatgatcacttgggattcctacataagctgactctgggtcgctttgaagctagtggaccacccacagcctttggaaattctagaaatctttttggacagcctccagatatgggctttgagactgcgcttgccccacagcacacctccttagatgaaattatcttttttgcatatgtacctgagaacgaaccccaggaaacgatctacagcaagaagttcggcaatatacactatggaaaagtgatacactctgggaaaactggaagagcttacataagaaaggtattgcaacatacgactcctaaaggatttttgtcctcagttattgcagaaatgaaagagccctttggattagaagaagtgaatgagagctcttgtttgtctagttcccttttgattaataaagctggaaatgtctataaactcactcttgattcacaagttgttcaggccttgtttgaagatacagatatagagaagactgtagtgcttcccgggtacagcagcttcctcatcacaagcattttagataataagaatgcattagccattgctaccatgcctgaaagtgcacccaacaatatgacctttctaaagagcacatggttcttatacaactttgggcaaaggaatggacgaacatggaaaatatattcaaaaccatgtaattattggtttcaacatgatgattcaccatccctcaacattgtgaaatacattgatctgggaaactcttatgttttaaaagctaaggtcatacggaatgcaaaaggttttcgaatgcttgaaataccactactgactgtgtttgttggaaaccctaatttgttggaagttacagctgaagtcacttttgatgatactgacagttatgtaataacaatttctgcagctagcaaagttttacatcagggttcaacttcactggcatttattatgtggtcagcctctactgagtgctttgttacgacaatggtgccaacactgaaaagcagctgtagttatctcagatctatgcatcacattcctagcaaatttatcccatttgaagactggattagtggagttcataaagacagtcagggttttaacctcatcaaaactttgccgataaactacaggcctccatctaatatgggaattgctattccactcacagataatttttatcatgcagatcctagcaaacccataccaagaaacatgtttcacatgtcaaagaaaaccggtaaattcaaacagtgtgctaatgtttccactcgggaggagtgtaactgcacaaaggatcagaagttttcacatgctgttgctttctcggattgcagggaaaaagttcctcgctttaagtttccaattacacaatatccagtttctttggaaattatcaacgaggatggacgtgtcccattgcaatctccatatctggttactgtgactgaagtgaacatgaggcacaactggaaactgaaacacactgtgccagaaaatattaaaagaatgaaacaattagtagaaccaattcttggtgctgcagtgtataatccttcaggtctcaacttaagcataaagggctctgaacttttccactttagagtgaccgtcatttcaggagtaactttttgtaacttaattgaagaatttcagatttatgttgatgaggcaccattgccattcccaggacacacgcttattgccgtggcaacagcggtagtgctagggggattaatttttatagcatttatgtttcaactgcaaggcatccatccgtggaggacattccaaagatggattagaagaaaccaagagaagttttcaagtatctctctcagtgagctgattcatagatcaaagtctgaagagtgaacacatggtgatcataatttctctttattttctagttttatcagccaattcctagaacaatatatttaaatgttaaatatgcaagctacataaaatcctaaagaattgtcattataattcaaactgctacttgtcaatatattcaccatttccttttcttattttgaatacatagaaaatgtcttatgccagg

SEQ ID NO: 744 - DNA, 3204 bp, Homo sapiens
acagagctgggtgtgtccctccgagtgccccccgctagggactgtgcaggccggagctaggcagggacagcggggcgaaccgggctgatagagtcggtccctgctcctgtgaggctctcaccgaatccctgctgtttccgggcagctgaagagcgctgggccctcgcgtcgcgggcgtggctgtggccgtgtctcctggtagtctgagcccactgtgcgtgtggatccacgtgggagctgggttccagagcctggtcctgaggaggagccgagccggggcttccccttctcagaatcctgctcttcctccagagagattcccaggagaagagggaacaaccaattcattcctgaaagccaggcctcgggacctgatgacatttgaagatgtggctgtggaattcagccagtgggagtgggggcagctgaaccctgctcagaaggacctctacagggaggtgatgctggagaacttcaggaacttggccattctgggccttctagtatccaaaccatatgtgatctgccagttggaggaagggggtgagcccttcatggtggagagagaaatctcaacaggagcccactcagactggaagagaaggtctaaatccaaggaatcaatgccaagttggggaatttccaaagaagaattattccaggtagtatcagtggaaaaacacattcaagatgtgctgcagttctcgaagttgaaagcagcctgcggttgtgatggccagttagagatgcagcagataaaacaggagagacacctgaaacaaatgtcaaccattcacaaatctgccaccacccttagcagagattataaatggaatggatttgggagaagcttaggtttaagatcagtccttgttaaccaacacagcattctcatgggagaaggatcttataaatgtgatacagaattcaggcagactttagggggaaacaactctcagagaacccacccagaaaagaaatcttgtaaatgtaatgagtgtgggaagtcctttcacttccagtcagaacttaggcgccatcagcgatgtcacactggagaaaagccgtatgaatgcagtgactgtggaagagcctttggtcatatttcatcccttattaaacatcaaagaactcatactggagaaaagccctatgaatgcagtgaatgtgggagagccttcagccagagttcgtctcttgttctgcactatagatttcacactggagagaaaccctacaaatgtaatgaatgtggacgagcctttggtcacacttcatcccttattaagcatcagaggactcatactggagaaaagccctatgaatgccgggaatgtgggagaaccttcagccagagctcatcactcattgtgcattacagatttcatactggagagaaaccttacaaatgtaataaatgtgggagagccttcagccagagttcatctctcactcaacattacagatttcacactggagagaaaccctacaaatgtaatgagtgtggaagggcctttgctcatactgcatcccttattaaacatcagagaagtcatgctggaaaaaaaaccctataaattcagtgaatatagaagggctttcagctggagtgcagacatcactggaacttaaagaattcatatcagagagagatcctaaaggtgtaatgtatgtgggaagaccacatcttgttccacatcaggcaataattactaaagagaatccctgtcaatgtcaagagggggtgggcttcccctctcttaccaaacatgggagaatccatactagtgagaaaccacgtgaatgtaatgaatgtgggaacgctttgatcagaggatgcatattattcagcatcagacagccgacactggggaggagccttatcaatgcagtgagtgtggcaagccttcagttacatactgattctttaagaaaatcagataacttgtactggagagaaatcctacaagtgtggtaagtatggaaaaatcttcagttgtatctcttcctttactaagcatcaagaacacatactagagagaggccctatgaaagcaggaaatagaggaaggccttcagtcagggctcatcccttattaagcatcagaaaattcatacctgagaaaaacctgtgaatgtgggtaatgtgggagagccttcagccaaacctcattgctttataaaccccttagaactctccctactagctggaaactctggtgacgtgatgaatgtgggaagggctttggtggatgttccaccaaaacacgttagagaatttgtacattagagaatttgtgctagagcaactcttcaaatttagtgaaactgggaaaacccattagtagagttcaagcttcagtattcatctcaaagagaaaccttgggaacatgatgaatgtgaggaaagttcctttccaacttgagatgtataaaactagagctgaaaagaagctgagaaatcaccttgtctggtgattttctgcctggtggggccatttgtataacgacacttgtgcattgcctcctcatgctgttactgacggggcagggtgtcatgcatgggtgcagaggatggaggctgagaaaggtagacagctacccatgatctagcccagtcgtattttagagctaataaaactgatgttcagaaagtgacatgccttggcctatagtcctaactgggctgggcctctttcctgtggttcacagctgtagtatggagattaatagacaggatctttgcagtacaacacctctatgcacttctttctctgtagcacatgttacctttctttgtgaggcaatggagtggtctaggattgagcaaaaagcaatttttgttacatctttatgctaatagatttggaatttttgaaatgaaatgaaaccttgtttaaacattaaaattactaaaataggctgggcgcggtggctcacgcctgtaacctcagcactttgggaggccgaggcggacagatcacgaggtcaggagttcgagaccatcctggctaacacagtgaaaccctgtctctcctaaaaatacaaaaaaattagccaggcatggtggcgggcgcctgtagtcccagctacttggaaggctgagacaggagaatggcgtgaatcggggaggcagagcttgcagtcagccgagatcacgccactgcactccagcctgggagacagagtgagactccgtctcag

SEQ ID NO: 745 - DNA, 3983 bp, Homo sapiens
gtgccaaggcggctgggggcggcgagcggggccgcgggcgcgcaccgactcaagagccgactgtcagcctcggcgggccggagttctccggcgctgggacaggggcgctgggacaggggcgctgggggcgagccctggcgggggccaggtccgaggaccctgggcgcggcggccccgccaggaggtccggccgcgagcgtgacctcacggggaggggccagcgcggcggcctgggcgctgagccgagcgccgggagagcagcgcagaagccgagccgcgaggagcgcactccgtggccccgatggagcggtacaaagccctggaacagctgctgacagagttggatgacttcctcaagattcttgaccaggagaacctgagcagcacagcactggtgaagaagagctgcctggcggagctcctccggctttacaccaaaagcagcagctctgatgaggagtacatttatatgaacaaagtgaccatcaacaagcaacagaatgcagagtctcaaggcaaagcgcctgaggagcagggcctgctacccaatggggagcccagccagcactcctcggcccctcagaagagccttccagacctcccgccacccaagatgattccagaacggaaacagcttgccatcccaaagacggagtctccagagggctactatgaagaggctgagccatatgacacatccctcaatgaggacggagaggctgtgagcagctcctacgagtcctacgatgaagaggacggcagcaagggcaagtcggccccttaccagtggccctcgccggaggccggcatcgagctgatgcgtgacgcccgcatctgcgccttcctgtggcgcaagaagtggctgggacagtgggccaagcagctctgtgtcatcaaggacaacaggcttctgtgctacaaatcctccaaggaccacagccctcagctggacgtgaacctactgggcagcagcgtcattcacaaggagaagcaagtgcggaagaaggagcacaagctgaagatcacaccgatgaatgccgatgtgattgtgctgggcctgcagagcaaggaccaggctgagcagtggctcagggtcatccaggaagtgagcggcctgccttccgaaggagcatctgaaggaaaccagtacaccccggatgcccagcgctttaactgccagaaaccagatatagctgagaagtacctgtcggcttcagagtatgggagctccgtggatggccaccctgaggtcccagaaaccaaagacgtcaagaagaaatgttctgctggcctcaaactgagcaacctaatgaatctgggcaggaagaaatccacctcactggagcctgtggagaggtccctcgagacatccagttacctgaacgtgctggtgaacagccagtggaagtctcgctggtgctctgtcagggacaatcacctgcacttctaccaggaccggaaccggagcaaggtggcccagcaacccctcagcctggtgggctgcgaggtggtcccagaccccagccccgaccacctctactccttccgcatcctccacaagggcgaggagctggccaagcttgaggccaagtcttccgaggaaatgggccactggctgggtctcctgctctctgagtcaggctccaagacagacccagaagagttcacctacgactatgtggatgccgatagggtctcctgtattgtgagtgcggccaaaaactctctcttactgatgcagagaaagttctcagagcccaacacttacatcgatggcctgcctagccaggaccgccaggaggagctgtatgacgacgtggacctgtcagagctcacagctgcggtggagcctaccgaggaagccacccctgttgcagatgacccaaatgagagagaatctgaccgggtgtacctggacctcacacctgtcaagtcctttctgcatggccccagcagtgcacaggcccaggcctcctccccgacgttgtcctgcctggacaatgcaactgaggccctcccggcagactcaggcccaggtcccaccccagatgagccctgcataaagtgtccagagaacctgggagaacagcagctggagagtttggagccagaggatccttccctgagaatcaccaccgtcaaaatccagacggaacagcagagaatctccttcccaccgagctgcccggatgccgtggtggccaccccacctggtgccagcccacctgtgaaggacaggttgcgcgtgaccagtgcagagatcaagcttggcaagaatcggacagaagctgaggtgaagcggtacacagaggagaaggagaggcttgaaaagaagaaggaagaaatccgggggcacctggctcagctccggaaagagaaacgggagctaaaggaaaccctactgaaatgcacagacaaggaagtcctggcgagcctggagcagaagctgaaggaaattgacgaggagtgccggggcgaggagagcaggcgcgtggacctggagctcagcatcatggaggtgaaggacaacctgaagaaggctgaggcagggcctgtgacgttaggcaccaccgtggacaccacccacctggagaatcccaaagctgtcacacctgcctctgccccagactgtaccccagtcaactctgcaaccacactcaagaacaggcctctctcggtcgtggtcacaggcaaaggcactgtactccagaaagccaaggaatgggagaagaaaggagcaagttagaaaacaagcttcatctaaagactctcatgtcaatgtggaccttggtgacaatcctgctttgttaaagcaaaaactatgcgaaagggtgagtctgtttagaagaaaaagcaaagactgaggtactgtgaatggagagcttcagctaagaggaggctctgtcccttttcagagccaaaggaaataatacaacaaaaaggaggcttctttggagacctaagtctattggatgtaaacaagacgttgtatttagggatgttctgtgtttctttcttttttgaagttgtcatcaattgctttactaagatttttaaatagtgaaaacctcctgtttagactttggtggaagatgaatcaaggaagcagggccctgtcttatgggtcacatgtctttggtgagtgagaagacctaaactcctggccatcatctcttatccaatacttagcagttggggattaaaccatccttgccttcagttctctccaatattaccaggcccaactcagtcttcagtgattttaaacagcattgacatcatctgtaaaaccatcatctgtaaaaccatctatgacatgagttttgagaaacaataatggggaaaatatttgggaccaagctgaagcactaatcccactaagttaaagacttctttccagtccaaggcaggcctgaatcaactgtctttaaataaaattttaagtgatgctgtattatatataggaaaaaatgcttaaaatcctgtcatttagaacagtgaaaagtatcttttgagattaaagtgactctttactgtaggaaaaatattactctgtgtttacagattcattgctgtggtcaggccatttttaagggaagagttatttaatataaatagtctctgattttaagttctgtttaatgttcattctccttccaagaacaaagtggtgatttttggttagggtgatcgccctcttaaaattggcagtgctgttccttgtgctgcccctgtcttttcctctgatggcatttttttttttttttttttttaacacaggttgaaacatttcatctattatctctgcctcatttctggagggttgtgtatcagttctctaacacttgttcctgagaactaaatgtcttttttattcttatttcctctctcataaacatttggtgaccttttaccaagtggtgagttaggttttttaaaataaaatgttcattgtatttgaaaaaaaaaaaaaaaaaaaaaaa

SEQ ID NO: 746 - DNA, 3312 bp, Homo sapiens
cccgcccctgacgccgccggtaactgcgagagtcggggtcggtgcggtttgataagtggtcggttcctggagctgcggtcttctgctagcctgatccgcagcttcagcctccgccgcctcctcagccctcggcgccgccgctggcgccgccgcctgacccgcaggccgccgcgggccgcagagcccatgagggcgcgggcaccgccgccgcctccgcggcgtcgccgtcgtcccggagcgccccgggctggcgcgggcatggccgcggcatgagcgtggagccgccgccggagctggaggagaaggcggcgtcggagcccgaggcgggagccatgccggagaagcgcgcgggcgcgcaggccgcggggagcacctggctacaaggctttggccgaccaagtgtgtaccatgctgctattgtcatcttccttgaattctttgcgtggggcctgttgacaactccaatgttgactgttctacatgaaacattttctcaacacacattcctcatgaatggtctcattcaaggtgtaaagggcctgctctcttttttgagtgccccactcattggtgccctgtctgatgtgtgggggaggaagccctttctcctcggcactgtattctttacctgcttcccaatcccactgatgaggatcagcccatggtggtattttgcgatgatttctgtgtctggagtcttctcggtcacgttttctgttatatttgcctatgtagctgatgtcactcaggagcacgagcgaagtacagcttatggatgggtctcagccacctttgcggctagtcttgtcagcagcccggccattggagcatatctttctgccagttacggagacagcctcgttgtgctggtggccacagtggtggctcttctggacatctgcttcatcttagtggctgttccagaatctctgcctgagaaaatgagaccggtttcctggggagctcagatttcttggaaacaagcagacccttttgcgtcgttgaagaaagttggaaaagattctactgtcttactaatctgcatcaccgtgtttctttcataccttcctgaagctggacagtattcaagtttttttctctatctcaggcaggtcataggttttggatctgttaaaattgcagcattcatagctatggtaggaattctgtctattgtggctcagacggcctttcttagcatcttgatgagatcattaggaaataagaatactgtcctccttggcttgggcttccagatgctccagttagcctggtacggttttggatcacaggcctggatgatgtgggcagcagggaccgtggctgccatgtccagcatcacgtttccggcaatcagtgccctcgtctctcggaatgcagagtcagatcagcaaggagttgcccaggggatcataactggaataagaggactatgcaatggcctggggccagcactgtatggcttcatattctacatgttccatgtggaactgactgagttgggcccgaaattgaattctaacaacgttcccctgcagggagctgtcatcccaggcccgccgtttttatttggggcatgtatagtccttatgtcttttctggttgccttattcattcctgaatacagtaaagccagtggagttcaaaaacacagtaacagcagcagcggcagcctgaccaacaccccagaacggggcagtgatgaggacattgagccactactgcaagacagcagcatctgggagctctcttcatttgaggagcctgggaatcagtgcactgagctgtaaactcggcagaaagtgggattctgcatacgccatctctgagagccatggagggagccacacccctggtgacttcatggtgctggatgggagacgctagcggcatccttcagggccaagtttgataaataccaccgccatcattctgctcatcctcctcctgttttttttttttctcttacattctttttttttttcctgtttatacattagaacaagataagatttgaaatacttccttgcaaataatgtgcaactcccaaggtgaaactcaaatagaaaaagtcatctctctggtagaaaggatggctttcctgtaatgactatagagtaagagtggcagcaatctttccatgcccttttcagcagaaggcacagaacagtagcgggactgccatctctggcaagatttcaggtaaagaatctcttcttaatttctaccttcctgtttctctgaatcagcccataggtgttgatgagtggccactcttaaagagtcactcagtatcagggatctactgtctttgttcaaaggtcaaataaaaacctagtctccttttattctactttctattcttagctagaatgaaactcagcatatatacacttctggacataataatattgaatagtaattacctttactagatgaaagaaattttcattacaaacttaaatcatgtaaaactcaacaactcagattcctggacctggtgtcctggttgggtccaaggtgattttacagaagaaaaaaacaactcaagcattctggtggcaacatagagattgtaggctgcttctaagaaagttattaacaatttggaaattcctaagtaggatgagagttagtaactggatacgagtgaagtttatatccaagttcagactcaaaggcattattatgatttgcttcttcccatgtcttccatgtcctgcttctcaaagtttttctcatccatcacactcctgccttaactgctctgagtatgcatttgttttcaattcatctttatttcaatctgtttaacttttgaatcgcatgggaatacgcacattaagttcctttctaaaataaggttttatgaagctgagtttcacgataagtgtcttgctattttttgagatgttttatggacaaagaaaactttacagatttatatgtattttgctgcaccagtaaatggaccattaactagggcccacctttaacagagcacccctttgaaagttttataggtatgaaatatatgtagatatttgtaaagggttttaattttttttttttgatggggtgctgtgtaaatcttgtatttataaatgtaatgaaggtattgacagaaaaaaatatatacaacttttataaaggattgtgtactgactgaatacatttaaaagaaaatatattttgaaacctgttctgctatgaacagagataacatatctttttactatgctattggtttttaggttaagcttcctaatgcataataaatttacagtggttacttttaaaaaaaaaaaaaaa

SEQ ID NO: 747 - DNA, 2679 bp, Homo sapiens
gggtggaagtgacgctgcccccgctgcccaaaatgtcggcgcccagagggaggtagagagcccccacataccactgtattccccgccaccatggatgacgtccccgccccaacccctgcaccagcaccgcccgccgctgccgcccccagggtcccgtttcactgcagtgaatgtggcaagagcttccgctaccgctcagacctgcggcgccactttgcccggcacacagcgctcaagccccacgcatgtccgcgctgcggcaagggtttcaagcacagcttcaacctagccaaccacctgcgctcgcacaccggggagcggccctaccgctgctctgcctgccccaaggggttccgcgactccaccggcctgctgcaccaccaggtcgtccacactggtgagaaaccctactgctgcctggtctgcgagctccgcttctcctcacgctccagcctgggccgccacctcaagcgccagcaccgtggggttctcccctctcccctgcagcccggccctggcctgcccgccttgagtgcgccctgctccgtctgctgcaatgtggggccctgctcggtgtgcgggggctcaggggccggcggcggagagggccccgagggggcaggcgcgggtctgggcagctgggggctggcagaggcggcagctgcggccgcggcctccttgcccccatttgcgtgcggcgcctgcgcgcggcgcttcgaccacggccgcgagctggcggcccactgggcggcgcacaccgacgtgaagcccttcaagtgcccgcgctgcgagcgcgacttcaacgcgcccgcgctgctggagcggcacaagctgacgcacgacctgcagggcccgggcgcgcccccagcgcaggcctgggccgcggggccaggcgcagggcccgagacggcgggcgaaggcaccgctgcggaggcgggcgacgctcctctggcttcggaccgcaggctgctcctgggccccgcggggggcggcgtgcccaagctcggggggctgctccccgagggcggtggggaggcgcctgcacctgcggcggccgccgagccctcggaagacaccctgtaccagtgcgactgcgggaccttctttgcgtcggccgcggccctggccagtcacctggaggcccactcgggcccggccacctacggctgcggccactgcggggctctgtacgcggcgctggccgccttggaggagcaccggcgggtcagccacggtgagggcggcggggaggaggcggcgaccgccgcccgggaaagggaaccggcgtccggggaacccccgtctggctccggccgcggcaagaagatcttcggctgctccgagtgcgagaagctgttccgctcaccgcgagacctggagcggcacgtgctggtgcacactggcgagaagccgttcccgtgcctggagtgcggcaagttcttccgccacgagtgctacctcaagcgccaccggctgctgcacggcaccgagcggcccttcccttgccacatctgcggcaagggcttcatcacgctcagcaacctctccaggcacctgaagctgcaccggggcatggactgactgccaggctgcgtgcgccctgccctccacccagcctcctggactcggcctggaccaggggacctcgggactgcgcgtgaggccccggccctccaaatccaaatccagacgcaggccctgaaatgaggggaccctgactggagaggtgggggccaccaaaaacccacaaaggccccggagctgggggaccacaaacaaacagggtccttagctggggcaggggagcccaaatctagggagagactcctgagcctgaggtccctggaatgagtgtgggtagccgtaagtccccaagacatggggactttgcagtgagcaatgggtctccacaagtacctctcatcttgagagccctaatactaaaagatgggcacccacccccaccaagggaagactgccccattccctgagagccatcattcctaacgaccttgatctggagaatgtggagggagcatgtccctgaattttcctagatccctccaaatgccacccaccagagtcactggtgaccccagaaaatggatatagccgaaatctgcctttcccctttttcattccctgtgctgaaagagggaccagggtagatgccccctgccctcgaatcccccctccccgactgtggaatggatcgaccctaacgatcttccccgccccaaacactagaatagactggcctgaaatccccttgcccagtagaatggactgatctatgtgcacacacccccatcacatggaatgggctggtctaggctgtggcctgccaccttccttagagtgaatagggcggacactcctctcttttcctgtagcgtgtggaccggtccacgcaattctttatcctgtgaactcatctgagtgggaggtggtggacactggggtttccttccctctctccgtagcatccgttggtctttctctccatctctgttggtttgtctgtctctgtcttcctcccaatccctaggggaagggggcatttggctagggggtgcccctgtgagcctcgaccttgccccctcgtccctctccccagtgtttccaggacccccaataaaccttgtcctgtcagtcgctgaaaaaaaaaaaaaaaaaaaa

SEQ ID NO: 748 - DNA, 1098 bp, Homo sapiens
tggtcgcctaagctgtttagtgaaacttcttccacctttctccattcctctaggtgctttttctgaacctggatgtgaggcattaaaggatccgacggaaatagaattgaaggcattctaaaatggctaaccgtacagtgaaggatgcgcacagcatccatggcaccaaccctcaatatctggtggagaagatcattcgaacgcgaatctatgagtccaagtactggaaagaggagtgctttggacttacagctgaacttgtagtcgataaagccatggagttaagaaacgctatgtattagaggaagctgagcaactggagcctcgagttagtgctctggaagaggacatggatgatgtggagtccagtgaagaggaagaagaggaggatgagaagttggaaagagtgccatcacctgatcaccgccggagaagctaccgagacttggacaagccccgtcgctctcccacactgcgctacaggaggagtaggagccggtctcccagaaggcggagtcgatctcccaaaaggagaagcccctcccctcgccgagaaaggcatcggagcaagagtccaagacgtcaccgcagcaggtcccgagatcggcggcacagatcccgttccaagtccccaggtcatcaccgtagtcacagacacaggagccactcaaagtctcccgaaaggtctaagaagagccacaagaagagccggagagggaatgagtaatggactcagtttggttttagtccacatggcctcctgtggatatgaggatatctgtatgtggaaggattaagatctcccccaggcagctataagaatattttagtttttttcttatcaagtttctcaacctttatttttaatgaaggaggtgctgagttttgtatctttttaatcataatcaacatcagtttttgacccaactaaccttgactgtattcaaacttatgagagtataaaggatctggaggttggggatatgactgacaaggaaaggctgtggccacctgatgaccctttccctttttattaaaccggacacacctgtttcccataaaaaaaaaaaaaaaaaaaaaaaaaaaaaaaaaaaaaaa

SEQ ID NO: 749 - DNA, 1539 bp, Homo sapiens
ataaagccgggggtactgggcctcaggtcaggcctatggccatggccttcacagacctgctggatgctctgggcagcatgggccgcttccagctcaaccacacagccctgctgctgctgccctgcggcctgctggcctgccacaacttcctgcagaacttcacggccgctgtccccccccaccactgccggggccctgccaaccacactgaggcctccaccaacgactcgggggcctggctgagggccaccatacccctggaccagcttggggcccctgagccctgccggcgcttcaccaagcctcagtgggccctgctgagccccaactcctccatcccgggcgcggccacggagggctgcaaggacggctgggtctataaccgcagtgttttcccgtccaccatcgtgatggagtgggatctggtgtgtgaggcccgcactctccgagacctggcgcagtccgtctacatggccggggtgctggtgggggctgccgtgtttggcagcttggcagacaggctgggctgcaagggccccctggtctggtcctacctgcagctggcagcttcgggggccgccacagcgtatttcagctccttcagtgcctattgcgtcttccggttcctgatgggcatgaccttctctggcatcatcctcaactccgtctccctggtggcttccagagtcatcccgctggctcctcctgcatggcaagtcccagttagctgtacagaatctgcagaaggtggctgcaatgaacgggaggaaggaggaaggggaaaggctgaccaaggaggtgatgagctcctacatccaaagcgagtttgcaagtgtctgcacctccaactcaatcttggacctcttccgaaccccggccatccgcaaggtcacatgctgtctcatggtgatttggttctccaactctgtggcttactatggcctggccatggacctgcagaagtttgggctcagcctatacctggtgcaggccctgtttggaatcatcaacaccccggccatgctggtggccaccgccaccatgatttacgtgggccgccgtgccacggtggcctccttcctcatcctggccgggctcatggtgatcgccaacatgtttgtgccagaaggcacgcagatcctgtgcacagcccaggcagcgctgggcaaaggctgcctggccagctccttcatctgtgtgtacctgtttaccggcgagctgtaccccacggagatcaggcagatggggatgggctttgcctctgtccacgcccgcctcgggggcctgacggcgcccctggttaccacacttggggaatacagcaccatcctgccacccgtgagctttggggccaccgcaatcctggctgggctggccgtctgcgtcctgaccgagacccgcaacatgcccctggtggagaccatcgcagccatggagaggagggtcaaagaaggctcttccaagaaacatgtagaagagaagagtgaagaaatttctcttcagcagctgagagcatctcccctcaaagagaccatctaa

SEQ ID NO: 750 - DNA, 1758 bp, Homo sapiens
agtctttggcggcgggccgggccgaacgtcctctgagccgcccgcaggcctccgggtgtccggggaggaagagaccgagaacgttgggggcgcgaaccgccaccccaggacgtccccgaagacgtcaagctgcggcgtcgtccaccggccggaacgggaggctctggagaacgagcccggccctcaagggacgctgtctggggccgggagccgcaggggggcgccgggtgcagagcacgaaccttccctgtcctcccggcacaagaacccggcgccgcccgagggcaagccctcctccgggagggactgccgtcgagggggaccaggcggcgggatggatgttgagcagcaggaggaggaagacaacgacgaggaggcggccgcgggcagcagagccggccgctcgttctccagccgtcttcaggacagccgcagcctggacgggctgagcgaggcgtgcggtggcgccgggtcctcagggagtgccgagtccggcgcgggcggcggacgccgcgccaccatctccagtcccctgaagctcgaaggcacagtgagccgccacggcgaccttacccactttgtcgccaacaacctgcaactcaagatccgtctgagcggcgcgcctccacccccgccttctgcccctgcgcggccctgcccagcgcctgcacccacacccacaccggccattcccccaatcgaccccgaggtgctgcgggatctggagcggttgagtcgggagctgggaggccgggtggaccgtctgcttcgcggtctgggtggcgcggtgcaggagctgacggcgctgagcgtgggttgcatccagacctaccgcgatgctgtggactccttaggtgaagccgtggacatgagcatcaagggcatgtacaccctgctggcgcgctgcgaggagctggagcgggctctgcagccggttcgggggctggcgcgccaagtccgggatatccgacgtactctggaggtgttggaggccctgtgcaagtgaccaggaggacaggagaggccggtcctggccagggcagggcccagcaggaccctaaggactcttcagggagtcctggtgggaagtgcccactgaggggaggcctgtgtgttggaggctcttccagatgcgttcagctggcccgtgcccactcgctgggccttaggctggtgtatgtggggaagttctaacggctctcctggtgggaagggatgttgctctgcttgtattcagttggccatctgtagctaccctgttcttcccaactctcctccctagctagagcaccagccctgggaacacggggctttaggtctgcttgaaaggtgaggacgtgactcccacatgtaatcaggagaaagggacagaggaagccccagcccccactgtggctatcctgatccagtggccacatctcaggtgccaggggctgtgggagcttgtgccgtccttggccaaacaccccgcaggcaaagatgcacccctgctgatggagagccttctgcttctgccctctggccctctaccataccacttccccagccagaaccggcgtgcagctaggaggaatgggttgcacggcggagggggtgaggtgggaggcgtctcactgctctcagggttcaggtagaatgttgctggttttgaggctcacctgttgtggagtgttctaatcagttttggctttctgagtttttgtggaattaaagtgctgctgctgcgaaggctgaggctgaaaaaaaaaaaaaaaaaaa

SEQ ID NO: 751 - DNA, 2476 bp, Homo sapiens
aaaaagccggacgcttccggtggaagggagctgttgcggggcttgctgggatcatggcggagaatcactgcgagctcctgtcgccggcccggggcggcatcggggcggggctggggggcggcctgtgccgccgctgcagcgctgggctcggcgccctggcccagcgccctggcagcgtgtccaagtgggtccgactcaacgtcggcggcacctacttcctcaccactcggcagaccctgtgccgggacccgaaatccttcctgtaccgcttatgccaggccgatcccgacctggactcagacaaggatgaaacaggcgcctatttaatcgacagagaccccacctactttgggcctgtgctgaactacctgagacacggcaagctggtgattaacaaagacctcgcggaggaaggagtgttggaggaagcagaattttacaatatcacctcattaataaaacttgtaaaggacaaaattagagaacgagacagcaaaacatcgcaggtgcctgtgaagcatgtgtaccgtgtgctgcagtgccaggaggaggagctcacgcagatggtgtccaccatgtccgacggctggaagttcgagcagttggtcagcatcggctcctcttacaactatgggaacgaagaccaagccgagttcctctgtgtggtgtccaaggagctgcacaacaccccgtacggtacggccagcgagcccagcgagaaggccaagattttgcaagaacgaggctcaaggatgtgagggacacagtattgacagctgaagaaatgatttacgttttcccgagatgtaatgaactgccatgtccaggaagcttggctgtgagaagaaacctgcttttgatcatttttctagagatctgggtgtgaatccttttttgcctctgaggtgggtggtgagagacgggcccagctgtccaaggccagacgtccccaagttgggggagcacggcggccgggtgggcgctgcctcttgggggggcctcgctctgttttttccaagtgccacgtgggactgaggcagacactcccagtcagcccgctcgatcctgaagatcgtgtgaaggaagcgttcttggtgctacacacagtctggaaaagcagcctgggcttcactggcaggaagcggccgcagccgcgtcagtgtccagcacgtcgtggcctctggtccgaccaccaggccctagtctcggtcagggagtctgctctgcctcccaggcgggatcgctggtttctctcgacctcgcagagctcctgacaaaggcggcttctgcgtcgtcactgcttcccggcgccattccgaggccgggccttcttctgacacgggctccaaccccacctgaccaagcccgggacagtcaaggcttctcaatttgtactttccaggcaagagaactttgtaccccttctctgtgtggatagactccccagcgtttttcctctggaaatgcccacagggcttgccgcgtggagactgatctgttccatccgttagcgcgaggtagcagtgtcgcctcgcccctcccactgcgggctcacggggagctggcgtctgtcagtgccttgtcacgcctggcatagaggttgggctggaggcctgtccactggcttctggagctgaaggtctgcgtcacggtgaaaattcgggatgtttacagagcatcacaaatgcctctctctcgccgctctctcattttctttgtataactatgcagccttccctctctttctgggatgtttgggacttcactcgacctgcacgggctctgcccgacatgccgtgggagctgctgggattcctttagaaaccgctgcccgcatgctttgaaaacagacctttctcagctggctgtggggacctgtcagagtctggggactcggcgtgcagggcgggctccaagcgctttgcttccggaactccggcttcccaaggggtactgtgcagactgaccaccggcctcccgcctgcaggtcagaggctctgacactgtctggtttccaatgcttctggagacttcctgcctaggcctcatcctcctctttgccagtcacctgattaaccaattctccagcattaggacttacctccttctttttgtaaggtctcttgtatgttgttaaatgtttggcttaaacaattataaaagcctttctagaaggcagacttagccccagcagagcctgggaggaaggcggccgctggggctcctgggcatcctctctggggagctgctggccgcttagcgttgtttgatttttgaccttgacatagtagataggcttgtggtttttttaatttaaagatattaagacttaattcactaaaatttattctaaggggatatttatacttttatacttttttaggtatcgtattttatcagcttacagtttaatgcctaagtttcccctggaaatagcaaataaaattgtgtatttatgaaaaaaaaaaaaaaaaaa

SEQ ID NO: 752 - DNA, 3514 bp, Homo sapiens
tgagcctagagctggagactagcgttaaccggcggggcggccggttttatgaatgaagctatggctacagattccccaagaagacccagtcgttgtactggtggagttgtggttcgcccccaggctgtcacaaagcagtcctacatggaaagtgttgtgacttttctgcaggatgttgtgccccaggcttacagtggaacacctctaacagaagaaaaggagaaaatagtctgggtcagatttgaaaatgcagatttaaatgatacatcaagaaatctggaatttcatgaaatacatagtactgggagtgaaccgcctttgttgattatgattggctacagtgatggaatgcaggtctggagcatccctatcagtggcgaagcgcaagagctcttctctgttcgacatggcccaattcgagcggctaaaatcttgcctgctccacagtttggtgctcaaaaatgtgataactttgctgaaaaaagacccctccttggtgtttgtaagagcattggatcttctggcacaagcccaccgtactgttgtgtggatctgtattcacttcgtactggggagatggtcaagtccattcaatttaagacacctatttatgatctccattgcaataaacggatccttgtcgtagtcttgcaggagaaaattgctgcctttgatagctgtactttcacgaagaaattctttgttacaagctgctatccatgtccagggccaaacatgaatcctattgctcttgggagccgctggcttgcttatgcagaaaacaagttgattcgatgtcatcagtcccgtggtggagcctgtggagacaacattcagtcttatactgccacagtcattagtgctgctaaaacattgaaaagtggcctgacaatggtagggaaagtggtgactcagctgacaggcacactgccttcaggtgtgacagaagatgatgttgccatccacagtaattcacggcggagtcctttggtcccaggcatcatcacagttattgacaccgaaaccgttggagagggccaggtgcttgtgagtgaggattctgacagtgatggcattgtggcccacttccctgcccatgagaagccagtgtgctgcatggcttttaatacaagtggaatgcttctagtcacaacagacacccttggccatgactttcatgtcttccaaattctgactcatccttggtcctcatcacaatgtgctgtccaccatctgtatactcttcacaggggagaaactgaagccaaagtacaggacatctgcttcagccatgactgtcgctgggttgtggtcagtactctccggggtacttcccacgttttccccatcaacccttatggtggccagccttgtgttcgtacacatatgtcaccacgagtagtgaatcgcatgagccgtttccagaaaagtgctggactggaagagattgaacaagaactgacgtctaagcaaggaggtcgctgtagccctgttccaggtctatcaagcagcccttctgggtcacccttgcatgggaaactgaacagccaagactcctataacaattttaccaacaacaaccctggcaaccctcggctctctcctcttcccagcttgatggtagtgatgcctcttgcacaaatcaagcagccaatgacattggggaccatcaccaaacgaaccggcaaagttaaacctcctccacaaatttcacccagcaaatcgatgggcggagaattttgtgtggctgctatcttcggaacatccaggtcatggtttgcaaataatgcaggtctgaaaagagaaaaagatcagtccaaacaagttgtagttgagtccctgtacattatcagttgctatggcaccttagtggaacacatgatggagccgcgacccctcagcactgcacccaagattagtgacgacacaccactggaaatgatgacatcgcctcgagccagctggactctggttagaacccctcaatggaatgaattgcagccaccgtttaatgcaaaccaccctctgctcctcgctgcagatgcagtacagtattatcagttcctgcttgctggcctggttccccctggaagtcctgggcccattactcgacatgggtcttacgacagtttagcttctgaccatagtggacaggaagatgaagaatggctttcccaggttgaaattgtaacacacactggaccccatagacgtctgtggatgggtccacagttccagttcaaaaccatccatccctcaggccaaaccacagttatctcatccagttcatctgtgttgcagtctcatggtccgagtgacacgccacagcctcttttggattttgatacagatgatcttgatctcaacagtctcaggatccagccagtccgctctgaccccgtcagcatgccagggtcatcccgtccagtctctgatcgaaggggagtttccacagtgattgatgctgcctcaggtacctttgacaggagcgtgaccctgctggaggtgtgcgggagctggcctgagggcttcgggctgcggcacatgtcctccatggagcacacggaggagggcctccgggagcgacttgccgacgccatggccgagtcacctagccgggacgtcgtgggatccggaacagaacttcagcgagagggaagcatcgagactctgagtaacagctcaggctccaccagcggcagcataccaagaaactttgatggctaccgatctccgctgcccaccaatgagagccagcccctcagcctcttcccgactggcttcccgtaggtaccagcaacctgcttctgactggccagccccctcccctgctggaggaggggagaagccccgctctggtcctacccttcagtctctgctcttccttcatcaaccaccttccccaagcttagtgacagcagccgcccatcctacctggatggagaagagacccttctccaagcacctcagcgcacttgccctctgccacacctgtcggtggaggctgtggccaggagagactgtagaagctcggtccctgtgtatgtttgcatatgacatcctgcattggatccgcttttgtattttttaaccatacccacggtggggcgggtggggggagcctggaacagtgaccagatctgggggcctgagtggggacagagttgatcgtccacctggccattttgaccctgagtggacagtcacagcctcagctcatgtctggctgtgacacacactgcccccagcttcccttggtcagccccactccagcacggggtgaacggaggcccagagtactagggaaggaggaagggaggacatgcctcttcttcctcctttctttccccatctgttcctgggaagagtttgtctttcttatctttaagcccctttaccctggtcctgtactgatcagtgaaggaaaccgtggttactgaggccctgttgaaaagtgcacgtcttgtccaataaatcacgctgcagttggtgtccaaaaaaaaaaaaaaaaaaa

SEQ ID NO: 753 - DNA, 1453 bp, Homo sapiens
agtcacagccaggtaaccctggagtgaagcggtttagttagaagggagcagataaactcgtcactctagtagctttaaccctcaccctgaggcaccttagcaatcagccattgcctgcaagcctccaaagcttgtctttgcctaatatggagcccaaagaagccactgggaaagaaaacatggtcaccaagaaaaagaatctggccttcttgaggtctagactctatatgctggagagaaggaagactgacactgtggttgagagcagtgtttctggggaccactctggcaccttgaggaggagccaatctgacaggaccgaatacaaccagaaattacaagaaaagatgactccacagggtgagtgttctgtagctgagaccttaaccccagaggaagagcatcatatgaagaggatgatggcaaagcgggaaaagatcattaaggagctgatacagacagaaaaggattatctcaatgatctagagctgtgtgttagggaagtggttcagcccctgagaaataaaaagactgataggctggatgtggatagcttgtttagcaacattgagtccgtgcatcagatatcagccaagctgctgtcattgttggaagaggccacaacagacgtggaaccggccatgcaagtaattggagaagtattcttgcagattaaagggccactggaagatatttataaaatctactgctatcaccatgatgaagcacatagtatactggagtcctatgaaaaggaagaagagctgaaggaacatttgagccactgtatccagtccttaaagtaaggccttttcaaatgatgattcccatctcctctcagttgcctagcagggaacattttaaatggatgtagatgaaaggtctcacataaatcctatgttttatgagacttgctgggagctctgctttgcattccctttataaaaagctgacatgccagaagccctgattgactttttttccccctgcgagaatgactaaaaataacatggaagaagatttagagctctgcagcgattgaaaaatgcaatatcaaaatataaaatgtggaagaaaagcctcttcttaaagctattgtaacttgcctggccccacgtagttcaaggattatgtgagataacacgtggccccatgaccactggagcacatgggttaatggagttaggggaatggcctacaactctgcatggccgtcttctttccccaaactcactgtggggagatgggtgaagacaagtcaggccttgttaaagttagtttcagaacaattactcatgccttcctttctcatccctaaaacattggtgggggagctacacaatgtactttttcttttctagaggaagtatctattcactgtgaaaatctgaaaaatataacaaagtatgtgtaagataaaaaccccttgctatttcaaaaaaaaaaaaaaaaa

SEQ ID NO: 754 - DNA, 4738 bp, Homo sapiens
tttccgtggaatcaggccggctgaatggaacaaaagtgggacttttaaaatgttgccctgtaagaagagaagaactacagtgacagagtccctacagcataaaggcaatcaagaggaaaacaacgtagacctagaatcagccgttaaaccagaatctgaccaggttaaggacttgagttcggtgtcactatcctgggatccaagtcatggcagagtagctggcttcgaagtacagtctttgcaggatgcaggaaatcagcttggtatggaggatacatctctgagctctggaatgctcacccagaacacaaatgtaccaattctagaaggtgttgatgtggccatctctcagggaatcaccctaccttccttggagtcttttcacccccttaatatacacattggtaaaggaaaactccacgctactggctcaaagagagggaaaaaaatgacactcaggcctgggccagttacccaagaagacagatgtgatcatcttaccctaaaggagcctttttcaggagagcctagtgaagaagtcaaggaagaaggagggaaacctcaaatgaattctgaaggggagataccttccctgccatcaggcagccaatctgcaaaaccagtaagccagcccaggaaatcaacccagccagatgtttgtgcctctcctcaagaaaagccactcaggactctgtttcaccaacctgaggaagagatagaagatggtggactcttcattccaatggaagaacaagacaatgaagaaagtgagaaaaggagaaaaaagaaaaagggtaccaagaggaaacgagatggaaggggtcaagaagggaccttggcatatgacctgaaactggatgacatgcttgaccgtaccttggaggatggtgccaagcagcacaatctaacagcagtcaatgtccgaaacatccttcatgaagtaatcacaaatgaacacgtggtagctatgatgaaagcagccatcagtgagacggaagatatgccaatgtttgagcctaaaatgacacgctctaaactgaaggaagtagtggaaaaaggagtggtaattccaacatggaatatttcaccaattaagaaggccaatgaaattaagcctcctcagtttgtggatatccaccttgaagaagatgattcctcagatgaagaataccagccggatgatgaagaagaagatgaaactgctgaagagagcttattggaaagtgatgttgaaagcactgcttcatctccacgtggggcaaagaaatccagattgaggcagtcttctgagatgactgaaacagatgaggagagtggcatattatcagaggctgagaaagtcaccacaccagccatcaggcacatcagtgctgaggtagtgcccatggggcccccgccccctccaaagccgaaacagaccagagatagtactttcatggagaagttacatgcggtagatgaggagctggcttccagtccagtctgcatggattctttccagcccatggatgacagtctcattgcatttcgaacgcgttctaagatgcccctgaaagatgttcccctgggccaattagaggcagagctccaagctccagacatcactccagatatgtatgaccccaatacggcagatgatgaggactggaagatgtggctggggggacttatgaatgatgatgtggggaatgaagatgaagcagatgatgatgatgatccagaatataatttcctggaagacctcgatgaaccagacacagaggatttccggactgaccgggcagtgagaatcaccaaaaaggaagtaaatgagctgatggaagagctgtttgaaactttccaagatgagatgggattctccaacatggaagatgatggcccagaagaggaggagtgtgtagctgagcctcgtcctaactttaacacccctcaagctctacggtttgaggaaccactggccaacctgttaaatgaacaacatcggacagtgaaggagctatttgaacagctgaagatgaagaaatcttcagccaaacagctgcaggaagtagagaaggttaaaccccagagtgagaaagttcatcagactctgattctggacccagcacagaggaagagactccagcagcagatgcagcagcacgttcagctcttgacccaaatccaccttcttgccacctgcaaccccaacctcaatccggaggccactaccaccaggatatttcttaaagagctgggaacctttgctcaaagctccatcgcccttcaccatcagtacaaccccaagtttcagaccctgttccaaccctgtaacttgatgggagctatgcagctgattgaagacttcagcacacatgtcagcattgactgcagccctcataaaactgtcaagaagactgcgaatgaatttccctgtttgccaaagcaagtggcttggattctggccacaagcaaggttttcatgtatccagagttacttccagtgtgttccctgaaggcaaagaatccccaggataagatcgtcttcaccaaggctgaggacaatttgttagctttaggactgaagcattttgaaggaactgagtttcctaatcctctaatcagcaagtaccttctaacctgcaaaactgcccaccaactgacagtgagaatcaagaacctcaacatgaacagagctcctgacaacatcattaaattttataagaagaccaaacagctgccagtcctaggaaaatgctgtgaagagatccagccacatcagtggaagccacctatagagagagaagaacaccggctcccattctggttaaaggccagtctgccatccatccaggaagaactgcggcacatggctgatggtgctagagaggtaggaaatatgactggaaccactgagatcaactcagatcgaagcctagaaaaagacaatttggagttggggagtgaatctcggtacccactgctattgcctaagggtgtagtcctgaaactgaagccagttgccacccgtttccccaggaaggcttggagacagaagcgttcatcagtcctgaagcccctccttatccaacccagcccctctctccagcccagcttcaaccctgggaaaacaccagcccgatcaactcattcagaagcccctccgagcaaaatggtgctccggattcctcacccaatacagccagccactgttttacagacagttccaggtgtccctccactgggggtcagtggaggtgagagttttgagtctcctgcagcactgcctgctgtgccccctgaggccaggacaagcttccctctgtctgagtcccagactttgctctcttctgcccctgtgcccaaggtaatgctgccctcccttgccccttctaagtttcgaaagccatatgtgagacggagaccctcaaagagaagaggagtcaaggcctctccctgtatgaaacctgcccctgttatccaccaccctgcatctgttatcttcactgttcctgctaccactgtgaagattgtgagccttggcggtggctgtaacatgatccagcctgtcaatgcggctgtggcccagagtccccagactattcccatcactaccctcttggttaaccctacttccttcccctgtccattgaaccagtcccttgtggcctcctctgtctcacccttaattgtttctggcaattctgtgaatcttcctataccatccacccctgaagataaggcccacgtgaatgtggacattgcttgtgctgtggctgatggggaaaatgcctttcagggcctagaacccaaattagagccccaggaactatctcctctctctgctactgttttcccgaaagtggaacatagcccagggcctccactagcagatgcagagtgccaagaaggattgtcagagaatagtgcctgtcgctggaccgttgtgaaaacagaggaggggaggcaagctctggagccgctccctcagggcatccaggagtctctaaacaaccctacccctggggatttagaggaaattgtcaagatggaacctgaagaagctagagaggaaatcagtggatcccctgagcgtgatatttgtgatgacatcaaagtggaacatgctgtggaattggacactggtgccccaagcgaggagttgagcagtgctggagaagtaacgaaacagacagtcttacagaaggaagaggagaggagtcagccaactaaaaccccttcatcttctcaagagccccctgatgaaggaacctcagggacagatgtgaacaaaggatcatcaaagaatgctttgtcctcaatggatcctgaagtgaggcttagtagccccccagggaagccagaagattcatccagtgttgatggtcagtcagtggggactccagttgggccagaaactggaggagagaagaatgggccagaagaagaggaagaagaggactttgatgacctcacccaagatgaggaagatgaaatgtcatcagcttctgaggaatctgtgctttctgtcccagaactccaggtgagagctggagaatattctcaagtatttcgtggactcagtaatatgtatcacttattgatatgccacctgcttgcttgctgcactatggatagtcctaaaatcatttgtatttgatttgtgaatgcattatgggacatgattgtggagttgaggtgaaatgagatggaaaggatgaaattttacttattatattaaactcgtttacacattaaa

SEQ ID NO: 755 - DNA, 2626 bp, Homo sapiens
cgaggacgccaacagcagcggagaaacgtttctctttcctctcagtttgcgcacaccatggcggcccctgcccagcagactactcagcctggcggcgggaagcgcaaaggcaaggctcagtatgtgctggccaagcgcgctcggcgctgcgacgctggcgggccccgtcagctagagcccgggctacagggcatcctcatcacctgcaatatgaacgagcgcaagtgcgtggaggaggcctacagcctcctcaacgaatacggcgacgacatgtatgggccagaaaagtttacagacaaggatcagcagccctctggaagtgagggagaggatgatgatgcggaggctgccttgaagaaagaagttggtgacattaaggcatctacagagatgaggttaagaagattccagtcagtggaaagtggagcaaataacgttgtcttcatcaggacacttgggatagagcctgagaaattggtgcatcatattctccaggatatgtacaaaaccaagaaaaagaagactcgagttattttgcgaatgttacccatctcaggcacatgcaaggcttttttagaagatatgaaaaaatatgcagaaacatttttggaaccctggtttaaagctccaaacaaagggacatttcagattgtgtacaaatctcgaaataacagtcatgtgaatagagaagaagttatcagagaattggcaggaatagtgtgcaccctcaattcagaaaataaagtggatctcaccaatccacagtacacagtggtagtagaaatcatcaaagctgtctgttgcctgagtgttgtgaaagattacatgttgtttagaaaatacaatctccaggaggtggtgaagagccctaaggatccgtcacagcttaactcaaagcagggaaatgggaaagaagctaaactggaatctgcggacaaatcagaccaaaacaacacagcagaaggaaaaaataaccagcaggtaccagagaatactgaggagctggggcagacaaaaccaacgtctaatccacaggtggtaaatgagggaggagccaaacctgaacttgcaagtcaagccacagaaggatccaagtcaaatgaaaatgacttctcataggaagtcatttggtgttggaggtgggtttctcacctggggctctacgagatgttgctggggctccaccttaaattgtgactaaaaacagttttttatttgtgtgctgcattatgctgttctcacagtagtgagcaatgattgcgcagccctgttaacagtttttttagggatctttcagcctttatggtattacgtagaggcagacccatgtgctgctgttgcaaagaggggaggataggagggggatgttggcctctcccaggctcctcttctgcagtgccagctgacttaagggagtgaactacctgtgaagtagaaaatcagagggaagttttcattctaaggaaggagtttttacatgccacagctcagctgtctgcctgccactttgttgtaaacattgcaaaaatgtggatcatgtaggttagaagtgaattgtttagtgaagtttttgtacttttgtgattttcttgtttatgtctgttttttttttttttttttaacatttgtgtgtaatatagctgacagtccagtgtcgcaattttggaaggcaagatgtgagagagacgagaaccattttaggcatagaactacagacatttctgaaaaggttggtgatgaagaacttcagtcttctgagtatacttcagtatactagtgcaacaagggacacaaagaaattctgtcttaataaagaaagctacttctcaagggtattatgtggactcagtccaagctctcctgtcccattgtgcattgtctgtgacatgcaacttacaaaactagcaattgtaacaataaatcacagccacttgacaagaaaggatattcattattttcaaatggcttttggactatcaaaaacagtaaggcttttgttcagaaatcacctttagtcaaaaggtttaagaagcaaattatttagtagcagaacttatctcaggaaaggaaaatatgcatggttggtgagaatctaataacattaaaatgctggggcaagatgcagtacaaagttgaagagactttattctcaataagttgatttactgatgatatgtcatatgatgcaaaaaaggttttgtgtcattaactgaaaagtagcagcttctctatccaggatgatgagtcaacaggtttcactaatatttgtcatgctgtagcatttgtaagatttgtaaatgatgaaattcaaagaaaactttttctattgctaggagcctgccagaacaaaggccaatatataatgttgtgacatcatatctgataaccagaggtctggtatctacactcctggtgccccatcagtggttgtctccataagtcattttgcgttattaaaaaaaaaaaaagaaatcctgatgttgacattatagcacactgctttctccacagagatgctgatatcaaaaacttgaagatacagtgaagttctgaataatgttacaaaactggttacctgtatcaaagacccatttatgcaaaaatgttaaaaaaaaaaaaaaaaaaa

SEQ ID NO: 756 - DNA, 2094 bp, Homo sapiens
ggttttgctccgctttagcagcggcgaagggaggacccccgggagccggtccccggcgtccggtcgcccagcccttttcaggcttgggcccgcatggaggggaccgtggagtcccagacgcctgacctgcgggatgtggagggtaaggtgggcaggaagacccctgaagggctgctccgcgggctgcgaggcgagtgtgagctgggaacctctggcgccctgctgctcccaggggcgtctagcaccggccacgacttgggggacaagatcatggcgctgaagatggagctggcttacctgcgagccatcgatgtgaagatcctgcagcagctggtgaccttgaatgagggcatcgaggcagtgcgctggctgttggaggagcgggggacgttgaccagtcattgcagcagcctcaccagcagtcaatatagcctgacaggcgggagcccaggccgctcaaggcgaggcagctgggacagcctgccagacaccagcaccaccgaccggctggacagtgtctctattggcagcttcctggacacagtggcccccagcgagctggatgaacagggcccacctggggctccacgttccgagatggactgggcaaaagttatagctggtggagagagggccaggactgaggtggatgtggcagccaccaggctagggagcttgagagctgtgtggaagcccccaggggagaggcttcaaggtggaccacctgagtcaccagaggatgagagtgccaagctgggcttcgaggcccactggttctgggagcagtgccaggatgatgtgaccttcttgtaacaactattccacccttttgtaatcctgtggctcttttatccattagatgtggtctcccccaaaattgactctccctcagtctgagactaggaagaggctgcactgaaatcagttaccatggaaacctggctcatcatttctctagtccctagggagtctctgcctttatccctcaattattgggtccctagagctagcttgctctttctttctttctttctttttttgagacagggtcttatgctgttacccaagatagagagcagtggcatgatcacagctcactgcagccttgacctcctgggctcaagcgatcctcctatttcagcctcccccatagttgggaccacaggcatgcaccaccatgcccagctaattgtttatttatttattttttttttgtagagatagggtttccctgtgttgcccaggctggtctcaaactcctgggctcaagggatcctcccgcctcagcctcccaaagtgctgggattatgcccagcccctagagatacttctatagagatattgactctaaaggattgacctatggcttttggtatttagtatctctcactactccccccagctaagtaaggatttaaggaatttaggactccctggagttaacagatgaagagatgggggcataattacttcacccaaagtctagaagccttggcctctctcttggccaagatggaggattgaggagggacatggaccttcaggactaaccctctatggattggccctcccagaagcgtttgggctggtagacccaccccttcctacctgctgagtgatgtcatttcctgccaggatgggtagccctttgtacgggtccttggatggtagtaggtcatataggggcatctgagcccctgctgctaagtgagatcacattatttatcgtccataccattacttcttgtgaacagtaacatgtcactcctcctggcaggaaagtttctcattgtcagatgtttgtgcttcttttcaggtcttactttttaaatagagtgttctcattttatcctaggggatctcacttcctctgtggctccatccctgcatccctgtctgggccagcactcctgactgcttttagggagagaagctttcaggggcctccatttatttctctcaagtctgtttggctcaccctgccatggtcccctgtcttaccctgtccctgtgttgcccctattcctgtattccatttttttgttttgttttgttgttttttttgagatagggtgacagagcaagactccgttt

SEQ ID NO: 757 - DNA, 4548 bp, Homo sapiens
cggaagtagcgtcggcgcgggagctgagcggagtggccttgccaccggaggggaagggctgctggcgttaggcctggctgggtcgtgcggctgagcgtgaggctagaaagaaaaagcgatcctccaagagtgagaacgggagatctgccgaggataacaacctcccttgtggccgaagggcgggggatccccacacgagggctccgcttcgagagacggcgacaaaggaaagttcgtagcgcgttccggaggcccggccacctctgagaagggagacgacgctgctgggtccgctgagcggggcgacccgagcttatatagaattggtgataggatcacaacttctgaggtcccagcaagagtcctaacatctagcagctctaccaccaggacaggccccctaaaactaattccaacaagcacctctgaagtcttctcattcacaggttaaggctacctttccagataatccaacagctaaatcaccagtttccaagggcatttgcatcacctatggaaagcatcggatccttatacaccagatgttcttgacagctcatcccgtcattcccccctgcacaaaagttgctataccagcggacaagcaagacaactactgagcttcttttgattgtcaagtagatataatatcactgccagcaaaacagcacaaaaagtgtctcttcacagtatcactaccagttgggactatgctaagtaaatcagcttgcctagatgaggaccccttctattcttgggtagccaggatttgaaggagatactctgacctgtgccagtggtaagtgactaatacttttacacactgaactggtcctggaaactgagatgtcttctttgtaagtgaagaatatacaacataatcttgaagaacggcacagtggtatgggccacaagcatactttatgtgtgtaacggactgaaagacaaattaatcttggtgaaaggatttttcatctcttatttctatttgccagtgttagtcagtgttctgctggcttagattattacctttttctggttccttactgtgttttattctgatgggtcctagaaatccctctcctgaccacttgtcagaatcagaaagtgaggaagaagaaaatattagttacctaaatgagagttctggggaagagtgggattcctctgaagaagaggactctatggtgcccaacttatcgcctcttgagagtcttgcctggcaggttaagtgccttttaaaatattccacaacttggaaacctttaaatcctaattcctggttgtatcatgctaaactgttggatccaagcacaccagtccatatacttcgagagataggtctaagactctcccattgttcccattgtgtccccaaactggaaccaattcctgaatggccccctctggcctcttgtggagtcccaccttttcaaaagcctcttacaagtcccagccggctctctagagatcatgccactctaaatggagcactgcaatttgccaccaaacagctaagccgaacattgagtagagccactcccatacctgaatacctaaaacagatccctaattcatgtgtttctgggtgttgctgtggctggctgactaaaacagttaaggaaacaactcgtactgaacccatcaacactacttattcttacactgacttccaaaaggcagttaacaaactcctaactgcatcactgtaaagatctaccatttgctctgatatctctgatgttgctaattgagaaagtggtacaaagttagtcattacacagcccactaatgccttctcagtcaaactctcttatgccctggcaagccaatgaggataccctttgacaaaccctgtggataaaatgataatatcaaggtcaggcatggtggctcacacctgtaatcccagcactttgggaggctgaggcgggtggatctgctgaagtcagaagtttgagaccagccttgccaacacagtgaaaccctgtctctactaaaaataaaaaaattagccgggcgcagcagtgcacgcctgtaatccctgctactcgggaggctgaaacaggagaatcacttgaacccaggagacggaggttgcggtgagttgagattatgccactgtactccagcctgggtgacagagcgagactcagtctcaaaaaaaaaaaaggagaattagttaaggggaccatattacaaaagatagttgaatattcttcacactcacttctcaccctccccaccccaatttactctgcctttctgaatggctttaatgagatacctgattattaatgaagaaaagtagaccaccaccccttttgttatccagactttagaacagccattgttgaaagcaagaagttagctacccacaataatacctttctgagcatactcttctctaacatacatttctgtggaagtagttgaattaaattgagtaactacacaaaggaaaatggcagggctatgaatttctttcccagcttttatatagatgtgcctacatatgacactctttagggttccttttattttttctttttttttttttttgaggtagttgaattaaactgggtaactacacaaaggaaaatggcagggatatgaatttctttcccagcttttatatagatgtgcctgcatatgacactctttagagttcctttcactttttcttttttttggaagggggcggggaggcaggaggagtgcagttttaagcctagcctatactactacaaacttattatggtacttaaaattacagcatgaacgttctatatcggagtctcccaccaggctgtctctgactaaatcagcctataagatcatcccttgggattaaacaaacacctgttctgtagggaatgtgtttcctgaatcttggtactcagacttttgtcaagagtaaataacatttcaaaagatgaatggaaaaatgattaagagagcatttctgctttcagcattaactgctaatggattaaaattttaatctgtatagcatttcctggagtaaaagctcaagtactttccacatccattgcaaacttttcaggaacccttctaattttttttttttttttttttttgagacggagtcttgctctgtcgcccaggctggagtgtagtggcatgatctcagctcactgcaagctctgcctcccgggttcgtgccattctcctgccctgcctcccgaatagctgggactacaggcgtccaccaccactcctggctatttttttgtatttttagtagagacagggtttcaccgtgttagccaggatggtcttgatctcctgacctcgtgatccacctgcctcggcctcccaaagtgctgggattgaacccttctaattttaaagaaccttgttattagaaaatctcagcctaatacaatctgaagttaagagttttagcagcattgtttttctaagtagatttagctatagattttcttctggccaaacaaggaagagtatatgcccttgtaaatgagtcttgttttgtttatttaaatagtcagtcaaaacgtagaaatcagtatacgtaaaataaaatgcatgagactattaaatcttttcatatactctacaaataaaatgaaatctgtgtgtggtcctggttgactgggcatctaaagggaatcagaaaagagattgtgaaaagttatatatatatcctcttccttattttagttttgctttttcctattttccataattaagtgccgtttacaaagtggcatcaaaaaattgaagcaggccaggcatggtggctcatgcctgtaatcccaacagtttgggaggctgagggcaggtggatcacttgagatcaggagttcgtgaccagcctggccaacatggtgaaagcccatctctactaaaaatataaaaattagccgggcgtggtggcatgtgcctgtaatcgcagctacttgggaggctaagacaggagaattgcttgaacctgggaggtggaggttgcaatgagctgagatcgcgccactgcactccagcctgggcaacagtgagacaccgtctcaaaaaaaaaaaaggttaggaatcacaaattgtgtaaatatatagcaactttaagaagagagaagaatgcttataacctagtgaatatttctgctgagccttagttgtcttgtctaaaggaaaaaagagggaattgtagaataaaagtatttgttagtggaaattattgacctgaaaccatatcatattgttagtgtaactgaatgtatcagaaattgttcctatgtaggtattctgtgaaactggtttctaaaatgttacaggaaactgtttcctttttttttgtttgtttgtttaagtggaggtgggaggaggtagggaagaggtctgaatattaaaatatgtttatgttcatgtgttcataatacgttcctttttctctctgtgtgtgtataaaagtgccttgctcatgaatgcatttttgctattcacttcgaaaggaagcctttccccagcttggcagctgaataaaccaatagctttgtacatgctgaa

SEQ ID NO: 758 - DNA, 3001 bp, Homo sapiens
atttacccgacccgacgccggcgtgatgtggcttccgctggtgctgctcctggctgtgctgctgctggccgtcctctgcaaagtttacttgggactattctctggcagctccccgaatcctttctccgaagatgtcaaacggcccccagcgcccctggtaactgacaaggaggccaggaagaaggttctcaaacaagctttttcagccaaccaagtgccggagaagctggatgtggtggtaattggcagtggctttgggggcctggctgcagctgcaattctagctaaagctggcaagcgagtcctggtgctggaacaacataccaaggcagggggctgctgtcatacctttggaaagaatggccttgaatttgacacaggaatccattacattgggcgtatggaagagggcagcattggccgttttatcttggaccagatcactgaagggcagctggactgggctcccctgtcctctccttttgacatcatggtactggaagggcccaatggccgaaaggagtaccccatgtacagtggagagaaagcctacattcagggcctcaaggagaagtttccacaggaggaagctatcattgacaagtatataaagctggttaaggtggtatccagtggagcccctcatgccatcctgttgaaattcctcccattgcccgtggttcagctcctcgacaggtgtgggctgctgactcgtttctctccattccttcaagcatccacccagagcctggctgaggtcctgcagcagctgggggcctcctctgagctccaggcagtactcagctacatcttccccacttacggtgtcacccccaaccacagtgccttttccatgcacgccctgctggtcaaccactacatgaaaggaggcttttatccccgagggggttccagtgaaattgccttccacaccatccctgtgattcagcgggctgggggcgctgtcctcacaaaggccactgtgcagagtgtgttgctggactcagctgggaaagcctgtggtgtcagtgtgaagaaggggcatgagctggtgaacatctattgccccatcgtggtctccagcgcaggactgttcaacacctatgaacacctactgccggggaacgcccgctgcctgccaggtgtgaagcagcaactggggacggtgcggcccggcttaggcatgacctctgttttcatctgcctgcgaggcaccaaggaagacctgcatctgccgtccaccaactactatgtttactatgacacggacatggaccaggcgatggagcgctacgtctccatgcccagggaagaggctgcggaacacatccctcttctcttcttcgctttcccatcagccaaagatccgacctgggaggaccgattcccaggccggtccaccatgatcatgctcatacccactgcctacgagtggtttgaggagtggcaggcggagctgaagggaaagcggggcagtgactatgagaccttcaaaaactcctttgtggaagcctctatgtcagtggtcctgaaactgttcccacagctggaggggaaggtggagagtgtgactgcaggatccccactcaccaaccagttctatctggctgctccccgaggtgcctgctacggggctgaccatgacctgggccgcctgcacccttgtgtgatggcctccttgagggcccagagccccatccccaacctctatctgacaggccaggatatcttcacctgtggactggtcggggccctgcaaggtgccctgctgtgcagcagcgccatcctgaagcggaacttgtactcagaccttaagaatcttgattctaggatccgggcacagaagaaaaagaattagttccatcagggaggagtcagaggaatttgcccaatggctggggcatctcccttgacttacccataatgtctttctgcattagttccttgcacgtataaagcactctaatttggttctgatgcctgaagagaggcctagtttaaatcacaattccgaatctggggcaatggaatcactgcttccagctggggcaggtgagatctttacgccttttataacatgccatccctactaataggatattgacttggatagcttgatgtctcatgacgagcggcgctctgcatccctcacccatgcctcctaactcagtgatcaaagcgaatattccatctgtggatagaacccctggcagtgttgtcagctcaacctggtgggttcagttctgtcctgaggcttctgctctcattcatttagtgctacgctgcacagttctacactgtcaagggaaaagggagactaatgaggcttaactcaaaacctgggcatggttttggttgccattccataggtttggagagctctagatctcttttgtgctgggttcagtggctcttcaggggacaggaaatgcctgtgtctggccagtgtggttctggagctttggggtaacagcaggatccatcagttagtagggtgcatgtcagatgatcatatccaattcatatggaagtcccgggtctgtcttccttatcatcggggtggcagctggttctcaatgtgccagcagggactcagtacctgagcctcaatcaagccttatccaccaaatacacagggaagggtgatgcagggaagggtgacatcaggagtcagggcatggactggtaagatgaatactttgctgggctgaagcaggctgcagggcattccagccaagggcacagcaggggacagtgcagggaggtgtggggtaagggagggaagtcacatcagaaaagggaaagccacggaatgtgtgtgaagcccagaaatggcatttgcagttaattagcacatgtgagggttagacaggtaggtgaatgcaagctcaaggtttggaaaaatgacttttcagttatgtctttggtatcagacatacgaaaggtctctttgtagttcgtgttaatgtaacattaataaatttattgattccattgcttt

SEQ ID NO: 759 - DNA, 3950 bp, Homo sapiens
gagagcggcgcctgatgacgaccgggagggcggggcccgtctggggcgccggcgggtgcgtttgaatctggtccgagcgcgggaaacggcgggtccccgagcccagggttacaaaataaatgccatttgaacagtgccatctgtcatggaaaaacgtgagacgtttgtacaagccgtgtctaaggagctggttggagagtttttgcaatttgttcaacttgataaagaggcctctgatcctttcagcctaaatgaattactagatgaattatcaaggaaacagaaagaagaattatggcaaaggctgaagaatttattgacagatgtgttgttagaaagcccagtggatgggtggcaggtagtggaagcccagggtgaagacaatatggaaaccgaacatggctcaaaaatgagaaaaagcatagaaataatttatgcaattacatctgtgattcttgcttctgtgtctgtaataaatgaaagtgagaactacgaagccctactggaatgtgttattatattaaatggtattttatatgcattacctgagtctgaacgaaaactacagagttctattcaggatttgtgtgttacctggtgggagaaaggcctgcctgccaaggaagacacaggaaagacagcctttgtcatgttactaaggaggagtctggagactaagacaggtgcagacgtatgtcggctttggcgtatccatcaagctttatattgctttgattatgatttggaggaaagtggagaaattaaagatatgttacttgagtgcttcataaatattaattatatcaagaaagaagagggaagaagatttcttagttgtctcttcaactggaatatcaacttcatcaaaatgatccacgggaccattaaaaaccagttacagggattacaaaagtctttgatggtatacattgcagaaatttatttcagagcttggaaaaaggcttcagggaaaatactggaggcgattgaaaatgattgcatccaggacttcatgttccacgggatacaccttccgaggaggtctccagtgcattccaaagtgcgggaggttctgagttactttcaccatcaaaagaaagttcggcagggagtggaagagatgctttatagattatataagcccatcctttggagaggattaaaggccagaaactctgaagttcgatcaaatgctgcattgttgtttgttgaagcatttcctattagggatccaaaccttcatgctattgaaatggatagtgaaatccagaaacagtttgaagagctctatagccttttagaagatccttacccgatggtccgttccacagggatccttggtgtttgtaaaataacttctaagtactgggaaatgatgcccccgaccattcttattgacctcctgaagaaggtgactggggaactggcatttgacacgagctcagctgatgttcgttgttctgtctttaagtgtctgccaatgattttggacaacaaactgagccacccattgttagagcagctccttccagctctcagatacagtctccacgacaattcggagaaagtgagggtagcttttgtggacatgctgttgaagatcaaagctgtgagggctgctaagttttggaaaatatgtcccatggagcacattctggttcgtctggaaactgattctcgacctgtgtctcggcgcctggtgagcctcatctttaattctttcctgcctgtgaatcagccggaggaggtctggtgcgagcgctgtgtcaccctggtgcagatgaaccacgccgctgccaggaggttctatcagtacgcccacgaacacaccgcctgcaccaacatagcaaagctgattcacgttattcgtcattgcttaaatgcctgtatccagagggcagtgagagagcctccagaggacgaggaggaagaggacggaagggagaaggagaatgtgactgttctggacaaaacactgtcagtaaacgatgttgcatgcatggcaggtttactagaaatcattgtgattctctggaaaagtattgacagaagtatggaaaataataaagaggccaaactttacacgattaacaagtttgcctctgtgcttccagagtatctgaaagtatttaaggatgatcgctgcaagatccctttattcatgctaatgtcctttatgccggcctctgctgtccccccattcagctgtggtgtgatttccacgctgagaagccgggaggagggcgctgtggacaagagctactgcactttgttggattgcctctgctcctgggggcaggtggggcacattctggagcttgttgacaactggctgcccacagagcatgcccaggccaagagcaacacagcttctaaaggtagggtgcagatccatgacacacgcccagtcaaacctgaattggcattggtctacattgagtatctgctgactcatccaaagaaccgcgagtgcttgctctctgctcctcggaagaaacttaaccatcttttgaaagcccttgaaacgtcaaaggcagatctggagtcacttctgcagacaccgggtgggaagcctcgtggcttcagtgaagcagctgccccgcgagcctttggtctccactgtcgcctgagcatccatcttcagcacaagttctgctcagaaggaaaggtgtatttgtccatgttggaagacactggcttttggttagaaagcaaaattttatcttttattcaagatcaagaagaagactacctgaagcttcatagggtcatttatcagcaaattatccagacctacctgactgtgtgtaaagatgttgttatggtaggccttggtgaccatcagtttcagatgcaactcttacagcggagtcttggaatcatgcaaacagtgaagggatttttttatgtttcattacttcttgacattctgaaagagataactggaagttccttgattcagaaaacagattcagatgaagaagttgcaatgctgttggacacagtccagaaagtatttcagaaaatgttggaatgtattgcacggagcttcaggaagcagccggaagaaggcctgcggctgctttattctgttcagaggcctcttcatgagttcattactgctgttcagtctcggcacacagacacccctgtgcaccggggtgtactttctactctgatcgctgggcctgtggttgagataagtcaccagctacggaaggtttctgacgtagaagagcttacccctccagagcatctttctgatcttccaccattttcaaggtgtttaataggaataataataaagtcttcgaatgtggtcaggtcatttttggatgaattaaaggcatgtgtggcttctaatgatattgaaggcattgtgtgcctcacggctgctgtgcatattatcctggttattaatgcaggtaaacataaaagctcaaaagtgagggaggttgcagccactgttcacagaaaactaaagacattcatggaaattactttggaagaggatagcattgaaagatttctctatgaatcatcatcaagaactctgggagaacttttgaattcataaccaagccaacatctccagacatgtaaaaatagggaaaagtgattcaaattgaaatgcctgtgtattttcctattgtttttaatgttaataacccatataatagggaaagggtgggatttttttgtgggaatgtgggaaggtgggggttatggaggagataactcaaaacttcttcaattttgcctagtgcctgcgtaaataatatatttaatataaaggactccaggtatgaatggtgtagaaatccatgattccaagaaaaaacacttttctagcaaacctggttgtttttaaaatgacttttatatatgtaatattgcttggaaactatgagtaataaagcaatgacaacatcaaaaaaaaaaaaaaaaaa

SEQ ID NO: 760 - DNA, 3424 bp, Homo sapiens
tgaccggcgacgcgggcaagatggcggcgctgggggtggcggaggccgtggcggccccacacccggctgagggggccgagacggctgaggcggtggagctgagccgcgccctgagccgcctgctgccggggctggaggccgacagcaagccgggccggcggcgcgccttggaggccctgcggcgcgcgctggaggagccaggccctgccgccgaccccaccgctttccagggcccctgggcgcgcctactgctgccgcgcttgctgcgctgcctgagcgaccccgccgagggctgccgcgcgctggcagtgcacctgctggatctgggcctgcgccgcgccgcgcggccccgcgatgccctgccgcgcctgctgcccgcgctcgccgcgcgcttggccggccccgtgcccgcgcgccgcccgcccgaggcctgtgaggagctgcgcctggcgcttgtgcagctgctgggcctggccgtggacctgtgcggcgccgcgctcgcgccccacctggacgacgctctgcgcgcgctgcgctgctccctgctcgaccccttcgccgccgtgcgccgcgagagctgcagctgcgccgccgccctggcgcaggccacgcccgaccacttccacatgcagtcggagtctctgatcgggcccctgatgcagaccatctcccaccagcactggaaggtccgtgtggccgccattgaagccacaggcgcagtgatccattttggcaacgggaagtccgtggacgacgtgctttcccattttgctcagcgactgtttgatgacgtcccgcaggtccggcgggcggtggcctccgtggtgggcggctggctgctgtgtctgcgtgaccgttactccttcttccacaagctcatccctctgctgctcagtagcctcaacgacgaggtgcctgaggtcaggcagctggctgccagcctctgggaggacgttggcctgcagtggcagaaggagaatgaggaggacctgaaggacaagctggactttgcccctcccaccccaccccattaccctccacatgagcgccgccctgtgctgggctgccgggagctcgtcttcaggaacctctccaagatcctccctgccctgtgccacgacatcaccgactgggtggtggggacccgagtgaagtcggcacagctgctcccagtgctgctgctgcatgccgaggaccacgccacgcagcacctggaggtcgtcctccggaccctgttccaggcctgcaccgacgaggaggcagccgtggtccaaagttgtaccagatccgcagagctcgtcgggacgtttgtcagccctgaggtgtttctgaagctgatcttatcgacgctgaagaagacgccctctgcctccggcctcctggtgctggcctccgccatgcggggttgcccccgagaagccctccagccgcacctggcagccatcgccacagagctggcacaggcccacatctgccaggcatctgaaaacgacctctacctggagcgcctgctgctgtgtgtgcaggctctggtgtctgtgtgtcatgaggactgtggcgtggccagcctgcagctcttggacgtgctgctgacaatagtggccctcgcaggtgctaccggcctgagggacaaggcacaggagacgatggactcactggccatggtggagggtgtcagcagctgccaggacctctaccgcaagcacattggtcccctcctggagcgggtgaccgcgtcgcaccttgactggaccgcacactcgccggagctcctgcagttcagtgtcatcgtcgcacagtcaggccctgccctgggagaagccctgccacacgtcgtgcccacgctgagggcctgtctgcagccctcccaagacccgcagatgcgcctgaagctgttctccatcctgtccaccgtgctgctcagagccacggacaccatcaactcccaggggcagtttcccagctacctcgagacggtgacaaaggacatcctggcccccaatctgcagtggcatgcggggaggacagccgcggccatccgcacggctgccgtgtcctgcctctgggcgctcaccagcagcgaggtcctgtcggcagagcagatacgggacgtgcaggaaacactgatgccccaggtcctgaccaccctggaggaggattcgaagatgacgcgactgatctcatgccgtattatcaacacgttcttaaaaacctcgggcggcatgacggatccagagaaactcatcaggatttatcctgaactcttaaaacgcctagatgacgtgtccaacgatgtgaggatggcagccgcctccaccttggtcacctggctgcagtgtgtcaagggtgccaacgcaaaatcctactatcagagcagtgtccagtacctgtaccgagagttgctggttcaccttgacgatccagagagggccatccaggatgcaattttagaggtcctcaaagagggcagcgggctgttcccagatctcctggtgagggagacggaggccgtcatccacaagcaccgctcggccacctactgcgagcagctcctgcagcatgtgcaggccgtgccagccacacagtgaccacgctggtttcagccacggcacacccttgtccccacctgagccagagtttgtggcctttaaatctcataaacaaggcacctctgtgccagcagtgagactgtgacagcaagaatgtactcctcaggacacctgcccactctttccctggaataacagcctctgagtggattctgcatgttatgtgatttgttctgttcatcgagagggctcccaaacatctgcagctgatttgaaattaaaagtaagtcgcagccgctcctcccgcagccacttcagcagcatcttagattttaagcctcacgtgcgcagctggttcatgaactattggctgcatcctgcttaggtgcccaccaagaaggtttttacctacttaacaaaaaagaaagaagccaaagtgattagaaagaaatgaaatctctttttgggttctgtctactgaaatttaatatctcagtgaacagactaaaaggaatttagaatcctaacaacttatcagatttctcctgttttaaatatactgggactttaaaggttatatgtccggtcaccgtatgttttaagtcggtgttaatgctaacagtgttgaaaacaatatttcatgagatctaattgtggttgcccctataggtagcaggaaagtaaagttgcatttccctctcgcacattctacacccaagtgcctaaaagatctcattgtaagtgggtagtgttaccggaagccattgtgttcacacgggggaaatgccgtatatatttttcaacaaatattaacgtttatactttcatgtttgaaaatttaattaaaaatgtttgttttaatgataaaaaaaaaa

SEQ ID NO: 761 - DNA, 2513 bp, Homo sapiens
ctgcacctggagagagtgagagacaccagcctccactgccaggaaggcccagggtcctcagggaccaagacgcaggagacggccgctgccagggtcctcgggacttctgtgtggccttcgctaccggagccctgaggcgccatccccatgtgcccttcgggctggtccaggaggaggccctgcggcggccacagactggggggacaaagccccaggaactcagaaccttgtgggttttggaagaggagccgcgcagcaaggtcccgacgcctgcagggagctgaacggggagccgcgcgaggaagggagtgcagcagacccagtacgcaaatgctgaccctacaaaacgcaccgcgggttctcgagccgtggggatcccggcggtgctctccagagaccgcagctgcaggagctgggcggtccccggcaggtgccacgagggtgcgatctcggccgagaaccaccaggcgtccacgtccacggagggactcattctccgtgcccatctcacagggagcaaaggaggcggagggagccccggactcactgggttctgacccagacccttctcttctgcagggtggagtcctcctcccagagaagcccagacgttcgtttgggagacccagggacactcggggccatcacctgcccctcactggggctcccaggggagacttcacgcagtgcccagtgtcctcccgctgggatcctcctgcccccgaggggcgcccgtgtcccccagcaccccaaggaagagaatgagctgtctttggcgggtgctgtgctattttctgtccttatttcacctagaatggccatttccagaactcaatccctgcaaatgaatttcttctaacgccccttttcagtatcaaggagcaggaagcaatatcctttaaaaaccgatcggccatacatttctgctcattaaataaatatttttactttggacccgattgatttttcagacacacggaacaatgggactgactcacctgtgtgcagctgggagcctccttcctccccggggacctttgaagtcacagtgaggcggccacacctggtgcacaggtggagcccggccgataggcacctgaattctcaccaacttcacagggtgttcagaaacgggctcgcactcggccgacacgcccccttcctggatccctggggtgggatgcccagtgtggctgcaccggagaaagggtgaaaaccagcggagagagggccgggaaaggctcccccacaggcatgtcaaggagagaacctgcagttccaccacaccctccagccccctcccaggcaatctccccactccagcccctgacccctgaccaccttgctccttggtatccagagccaggccggaactcagggagggccgcgccgttcacttctgtaagggagcctccgttcagtcagtcattcaacaaacatgaatccagagccgcatgcactgctggtcccgtcccagctgctggtcacggagcggagaaagcttgaaggccgtggtgtctactgagaggcagatgacaaaccaggagcacgagtcacagcacacactggcgcagctgcagggagctgggcagagccgggcctggcacatggggcaggaggctgtggccctaacgccatggtgggcgccacagaccttgtcagaaggggtctgagcagagacattgatttggtttcattatcatatagaacagaatagaaaactcagacatgaagctgcacacatacacccgtctggtctttgacaagaccaacgaaaacaagccgcggggaaaggactccctgtccgatagatggtgctgggataagcagctcagtcacaggcagaagaaggaaactggactcttacccttccgcatagacgaaaatcaactctagatggattaaagactcaaatgcaagacgtcaaactataaacatcctggaagacaacgtcttcttgactttggcgttggcaaagaacgctggctaagtcctcaaaagcaattgcaacaaaaacaaaaatagacaagtgatacctaattaaactgaagagcttctgcacagcagaagaaactgccaacggaggaaacagacaccctacagaatgggagaaaatgtctgcaaactatgcatctgacaaaggcctaatatccagcatctataggacgcttacacaaatcaacaagcaaaaaacaaccccattaaaaaatgggcggccgggcgcggtggctcatgcctgtaatccgagcacttcgggaagctgaggcgggcggatcacaaggtcaggagatcgagaccatcctggctaacacggtgaaactccgtctctactaaaaaatattaaaaaattagctgggcgtggtggtggccgcctgtagtcccagctactcgggaggctgaggcaggagaatggcgtgaaccagggaggaggagcttgcagtgagccgagattgcgccactgcactccagcgtgggctacagagtgaaactctgtctcaaaaaaaaaaaaaaaa

SEQ ID NO: 762 - DNA, 2772 bp, Homo sapiens
aaggttccgcgccgggcgtggacggtgtggggcggtcccggccccgcagatcctcgttcctagctgcctgccagcgtcctcggcccggccctgaggatggacccaggagatcccgctggtgaccctgccgctggcgagcgccaccgcatgggccgggaccccctcctgctcctgcaggccctgcagaccctgtggtccacgcgggagcggaagcagctccgggaggaagcctggcgggggtttgctgccttggacgaccccctggccgggcttctggacatgctggagagctgccggggccagcggggagagggcccctccctggcggcctggatctcccaccagctgcagtgctggctacaggcacagccatgcccgagcctggcccagcacagcctgaggctgaagcggctgcaggcccgagcggtcaaagtcctcactgagagcccccccagccttgcggcaccactggccagcatcttccagctgcaggatgcagacaggagctgcctgctggcacacgtccaccgcctccaccacgagggcaggttcagagaagcagccacgctgggcacgacgttgaagctgcagtcggagcttggcgttgaaaagatgagcatcccactgctcctccaggacaaggtggccctcgtggagcgctatgtggccggcttcccggacctccagaggaggctgctggtcctcatggattcctggtgccagcccggctttgacatcaaggacgttgccagacagtaccctgaggtgacctccttgagcctggagaagctgagtccgaaggcgctgagcaggcaggtcttgcgtctgcaggagcggtacagcgtagccccagcgctgtgtcccaacgcggccattcagcagcgcctggcggccctgcggcacctgtgccacaagcggtttgtggagaagagcctgtcacaggagaactggaccgaccatgtgcagggcctggtggggcagagcccgtggcttcaggagcagctgtctcagctgctggtctcccacagtgacccagtcacggccgcccagtgtgccatggacctcttgctgcccgaggagcggctgccggctgcggtggctgtggaactccgccggttcaggctccaggggagggcgactgaggctgactcgaggctggaggtgaaggacatgaaggaccgttactaccagctgcccatccccagggagaacgtccacctcctggcctcgtgggaagacctgaccagacacgagggtgcactcctgcagtgccaccaagtggttggtgtagacgtggagtggacacctgtgtttgttgctgggggccggcctcggccgtcactcctgcaggtggccgtggagggccacgtgttccttctggacgtcctggcactctcgcagccaccaacagggcagggagcccaggccttttcccggctggtggcccagctcctctcggacccctctatcaccaagctgggctacgggatggtgggggacctgcaaaaactgggcacgtcctgccccgccctggcccatgtggagaagcagattctgggcggcatggacctgctgctggtgcacagacagatgcgggtggcgagcgtgccagccccagccgtggacagggccagggagctgaggggcctgagcctcctggtgcagcaggtgctgggcacagccctggacaagacgcagcagctgtccaactgggaccggaggccgctctacgaggagcaggtcatctacgcagctgccgacgcctactgcctgctggaggtgcaccaagccctgtgcagagagcccgcccgcttccacctgtcggaggacctggctgggagccggaggcccaggcacagagagagaccaggggcacggaagccacccggcctgcagaaagcgtcagcaccggccgcacccaggcaggtccctgtggctgtggctgtgtctgagggcgctgcccctcagattccggccagggccttccgtgtggtgtgtgacaacatgctgcaggggctggcacggagcctccgctgtctcggtgtggatgcacgcatgctgggcaatggtgaagaccaccgcagggcggccgaggttgccaggcaggaggggaggatcattctgacgtcggggcagccattccacaagctccgggcccaggtcggggctgggcgctgcctctcggtcgactgctccctgaaggcccagcagcaggccaaggctgtgctcaagcatttcaacgtgcgtgtcacccacgcagacatcttcagccgctgccaggcctgtaactgtgaccagtacctaaaggtctccagggacatgatgaagcagctcatgtggctcagcagtcaccaggaggggcccaggagctgaggtgacgaggccacccagagccaggcggtgcaggagccaggcccagccccagacgcagcccctgagggctgcacctatgaccgcccctgccgctggctgcagatggctgacctgcgggcggagacaccggacatgctggccgacggcacccggctgcagctggcaggggtcccggtgggtgtgctgaggacacctgggctgcggtgcttctactgctgcacgggctgtggaaaggtcttctgggacggctcccacctgggtcgtgttgccacccacttccgagacatgctggagagcgcccccagcccctgcgagccgagcccagcccccagcccggccagcagtcccttctgaggacagccagacaataaacatggaaagtgcccgactgctgggccc

SEQ ID NO: 763 - DNA, 1795 bp, Homo sapiens
gggtgagtgcaccgcgttctcgcacgcgtcatggcggtcctcggagtacagctggtggtgaccctgctcactgccaccctcatgcacaggctggcgccacactgctccttcgcgcgctggctgctctgtaacggcagtttgttccgatacaagcacccgtctgaggaggagcttcgggccctggcggggaagccgaggcccagaggcaggaaagagcggtgggccaatggccttagtgaggagaagccactgtctgtgccccgagatgccccgttccagctggagacctgccccctcacgaccgtggatgccctggtcctgcgcttcttcctggagtaccagtggtttgtggactttgctgtgtactcgggcggcgtgtacctcttcacagaggcctactactacatgctgggaccagccaaggagactaacattgctgtgttctggtgcctgctcacagtgaccttctccatcaagatgttcctgacagtgacacggctgtacttcagcgccgaggaggggggtgagcgctctgtctgcctcacctttgccttcctcttcctgctgctggccatgctggtgcaagtggtgcgggaggagaccctcgagctgggcctggagcctggtctggccagcatgacccagaacttagagccacttctgaagaagcagggctgggactgggcgcttcctgtggccaagctggctatccgcgtgggactggcagtggtgggctctgtgctgggtgccttcctcaccttcccaggcctgcggctggcccagacccaccgggacgcactgaccatgtcggaggacagacccatgctgcagttcctcctgcacaccagcttcctgtctcccctgttcatcctgtggctctggacaaagcccattgcacgggacttcctgcaccagccgccgtttggggagacgcgtttctccctgctgtccgattctgccttcgactctgggcgcctctggttgctggtggtgctgtgcctgctgcggctggcggtgacccggccccacctgcaggcctacctgtgcctggccaaggcccgggtggagcagctgcgaagggaggctggccgcatcgaagcccgtgaaatccagcagagggtggtccgagtctactgctatgtgaccgtggtgagcttgcagtacctgacgccgctcatcctcaccctcaactgcacacttctgctcaagacgctgggaggctattcctggggcctgggcccagctcctctactatcccccgacccatcctcagccagcgctgcccccatcggctctggggaggacgaagtccagcagactgcagcgcggattgccggggccctgggtggcctgcttactcccctcttcctccgtggcgtcctggcctacctcatctggtggacggctgcctgccagctgctcgccagccttttcggcctctacttccaccagcacttggcaggctcctagctgcctgcagaccctccaggggccctgaggtctgttcctggggcagcgggacactagcctgccccctctgtttgcgcccccgtgtccccagctgcaaggtggggccggactccccggcgttcccttcaccacagtgcctgacccgcggccccccttggacgccgagtttctgcctcagaactgtctctcctgggcccagcagcatgagggtcccgaggccattgtctccgaagcgtatgtgccaggtttgagtggcgagggtgatgctggctgctcttctgaacaaataaaggagcatgccgatttttaaaaaaaaaaaaaaaaa

SEQ ID NO: 764 - DNA, 1950 bp, Homo sapiens
gctctggcggctcccgcggctccggctggcggcttcgggccctgcacctgtgactctcggccgcgctcgccctcggcccgcccggcgccgcagccccatggccccgtccaggctgcagctcggcctccgcgccgcctactccggcatcagctccgtggccggcttctccatcttcctcgtctggacggtggtctaccgacagccggggaccgcggccatgggagggctcgcaggggtgctggcactgtgggtcctggtgacgcacgtgatgtacatgcaagattattggaggacctggctcaaggggctgcgcggcttcttcttcgtgggggtcctcttctcggccgtctccatcgctgccttctgcaccttcctcgtgctggccatcacccggcatcagagcctcacagaccccaccagctactacctctccagcgtctggagcttcatttccttcaagtgggccttcctgctcagcctctatgcccaccgctaccgggctgactttgctgacatcagcatcctcagcgatttctgacccagggggtgaggtctctgcaccctgggggggccttaggacctggactcagcctctgagatgttgggagaggctactcccaccccctggtgaccccagaactgtggcagaaaatacacagcaggacgagtgtggtctcccaggaagctgtcctgcccgtcccctttcgaggaaacctgagtgtggtagagaggggatcctgccatgttgctcctcatcagcctggccagagggcagctttagaccttttcaaatgaatctgttttcttttctttcttttttttttcttttttttttttttttgagatggagtcttactctgtcacccaggctggagtgcagtagtgcgatctcagctcactgcaacctccgcctcccaggttcaagcaattctcctgccttggcctctcaagtagctgggattacaggcatctgccaccatgcccggcaaatttttgtgtttttagtagagacagggttttgccatgttggccaggctggtctcgaactcctgatctcaggtgattcacccgcctcagccttccaaagtgctgggattataggtgtgagccaccgtgcccggcctggatctgttttcttagcacgcagtgaggaatctttgtacttaaggccagggcaacaaagtcaagaggtcaaggtgtagggccatgaggcctggacctatgctgcaggcaagggtttccatccccgctgccctaggcactctcttcccaaggccaggttgggcacctggggaggtcagttcagaaatatctagcagagacctcttaaacccccatcccagcaccccatcctgttgttcccagagctggtctcccatgagtgtgctagagccagatagccgtggccccccacccatctcactcacacacacaggcatccatacaccccagaagacttcccaaatgaggccagactcagggtcacggggaatgtgcttctgcccctgtaagggctttggggaagggggcaacatagtagaggctggaaagagcccccaaacctgtgcccatgcccctccagccctgcgtttccattctgccttctcagagtgcccttgctgcacccagaccaccggccaggagagaccttctctcccactccagcccctctcactgcccttcaactagagctttcacctttttacatttcccttctgaaggacacaaatctgcttttctgcccatacactggcccaagggctcacctaacttgggagggaaggggctgttggtacaaggatgattttctgttaggctgccattttgcacggtctccccctccccatctgatgtgtcctgcccctcagctctttgccttatctgtgtcactgtcactttagcaaaaatacagcggccatttgtatcaaaaaaaaaaaaaaaaaaaaaaaa

SEQ ID NO: 765 - DNA, 3215 bp, Homo sapiens
cgggcgtccgcggtggctgcagtcccgtcggtctccctgctgtccggcgcgagctcttcgagtcttgcttgggatgtttcagcagcccctgagaaggaagaggaggaagctgagggcccgctgagggcgcaggacctgagggagtcctacatccagctcgtccagggtgtgcaggagtggcaggatggttgcatgtaccagggggagtttgggttgaacatgaagcttggatatggcaaattctcttggcccacaggcgagtcataccatgggcagttttaccgggaccactgccatggcctgggtacctacatgtggccagatggctccagtttcacgggcacattttacctcagccaccgagaaggctacggcaccatgtacatgaagacacggcttttccaggggctatacaaagcggaccagcggtttgggccaggtgtcgagacctaccccgatggcagccaggacgtggggctgtggttccgagagcagctcatcaagctgtgcacccagatccccagtggcttctccctcctcagataccctgagttctccagcttcatcacccacagccctgccaggatcagcctctcagaagaggagaaaacggagtggggactgcaggagggacaggatccctttttctatgactataagcggtttcttctgaatgacaacctaacgctgcctccagaaatgtatgtctactcgaccaacagtgaccacctgcccatgacaagctctttccgcaaagagctggacgcccgcatcttcctcaatgaaattcctccgttcgttgaggatggagaaccatggttcataatcaatgagacccctttgttggtcaaaatccagaagcaaacttacaagttcaggaacaagccagctcacaccagctggaacatgggcgccatcctggaggggaagcgcagtggctttgcaccctgtgggcccaaagagcaactttccatggagatgatcctaaaggctgaggaagggaaccacgaatggatttgtaggatcctgaaggacaactttgctagtgctgacgtggcggacgcaaagggctacactgtgcttgctgcggctgctactcactgccacaacgacattgtcaaccttctcctggactgtggggccgacgtgaacaagtgctcagatgagggtctcacggcactcagcatgtgtttcctcctccactaccccgcccagtccttcaagcccaatgttgctgaacggaccatacctgagccccaggaacctccaaaattcccagttgttccaatcctttcatcatcatttatggacacaaacctggagtctctgtactatgaggtgaacgtgccttcccagggtagctatgagctgaggccaccgccagcaccactgctcctgccacgcgtctcaggcagccacgagggcggccacttccaggacaccgggcagtgtggggggtccatggaccacaggagcagctctctgaagggggactccccgttggtgaagggcagccttggccatgtggaaagcgggcttgaggacgtgttgggaaacacagaccggggcagtctgtgcagtgctgagacgaaatttgagtccaacgtgtgtgtgtgcgacttctccatcgagctctcgcaggccatgctggagagaagcgcccagtcccacagcttgctgaagatggcctcgccctcaccgtgcaccagcagcttcgacaaagggaccatgcggaggatggcgctgtccatgatcgagcggaggaagcgctggcggaccatcaagctgctgctgcgccggggcgcggaccccaacctgtgctgcgtgcccatgcaggtcctgttccttgctgtgaaggccggggacgtggatggggtgaggctgctgctggagcacggggcgaggaccgacatctgctttccgccgcagctgagcaccctgacaccactccacatcgctgccgcccttcctggggaggagggggtacagattgtggagctgctgttgcatgccatcaccgatgtggacgccaaggcatccgacgaggacgacacttacaagcccggcaagctggacctgctgccctcaagtctgaagctcagcaatgagccaggccctccccaagcctactacagcacggacacagccctcccggaggaggggggcaggacggctctgcacatggcctgcgagcgggaggatgacaacaagtgtgccagggacatagtccggctccttctatcccacggagcaaatcctaacctgctgtggagtggccactccccgctctccctgtccattgccagtgggaatgagctggttgtgaaggagctcctgacccagggagctgaccccaacctgcccctgaccaaaggcttgggcagtgccctgtgtgttgcctgtgacctgacctacgagcaccagaggaacatggacagcaagctggccctgattgaccgactcatcagtcacggggccgacatcctgaagcctgtaatgctcaggcagggagaaaaggaggcagtgggcacagccgtggactatggctacttcagattcttccaggaccggaggattgcccgctgccccttccacacgctgatgccagcagagcgcgagacgttcctggcgcggaagcggctcctggagtacatgggcttgcagctacggcaggctgtctttgccaaggagagccagtgggaccccacgtggctgtacctgtgcaagagagcggagctgatccccagccacaggatgaagaagaagggccccagcctgcccaggggcctggatgtgaaggagcaggggcaaattcccttcttcaagttctgctaccagtgtggccgctccatcggggtccgcctcttgccctgccctcgctgctacgggatcctgacctgcagcaagtactgcaagaccaaggcctggaccgagttccacaagaaggactgcggggacctggtggccatcgtgacacaactggagcaagtttccaggaggagagaagaattccagtgaagcagcagctgcacgtccgaggcttggggaggacccaggactgtgtgggtttcttacctgcctgagccacctcagggaatcttccagcctaatgcaggcatttctgcacctttggggtcatgctttgtagcagtgtctcccttgcgacctcgcaataaattggccccacggggtgattttgacagtcaaaaaaaaaa

SEQ ID NO: 766 - DNA, 2482 bp, Homo sapiens
gtaggcgcagggctggcaagcagtcgggacgggagcgcgggcgtccgcggtggctgcagtcccgtcggtctccctgctgtccggcgcgagctcttcgagtcttgcttggttggaagaccacagacatggaaggggcccatgcctcccttagcttagaggacgaagtctctggggctggcagccgccaacgcccgctagaggggaagggcggcgagacccctgctgccgaggagccggggtccctgaagaactacgctgtcttcgccacaagggatgtttcagcagcccctgagaaggaagaggaggaagctgagggcccgctgagggcgcaggacctgagggagtcctacatccagctcgtccagggtgtgcaggagtggcaggatggttgcatgtaccagggggagtttgggttgaacatgaagcttggatatggcaaattctcttggcccacaggcgagtcataccatgggcagttttaccgggaccactgccatggcctgggtacctacatgtggccagatggctccagtttcacgggcacattttacctcagccaccgagaaggctacggcaccatgtacatgaagacacggcttttccagactcactgccacaacgacattgtcaaccttctcctggactgtggggccgacgtgaacaagtgctcagatgagggtctcacggcactcagcatgtgtttcctcctccactaccccgcccagtccttcaagcccaatgttgctgaacggaccatacctgagccccaggaacctccaaaattcccagttgttccaatcctttcatcatcatttatggacacaaacctggagtctctgtactatgaggtgaacgtgccttcccagggtagctatgagctgaggccaccgccagcaccactgctcctgccacgcgtctcaggcagccacgagggcggccacttccaggacaccgggcagtgtggggggtccatagaccacaggagcagctctctgaagggggactccccgttggtgaagggcagccttggccatgtggaaagcgggcttgaggacgtgttgggaaacacagaccggggcagtctgtgcagtgctgagacgaaatttgagtccaacgtgtgtgtgtgcgacttctccatcgagctctcgcaggccatgctggagagaagcgcccagtcccacagcttgctgaagatggcctcgccctcaccgtgcaccagcagcttcgacaaagggaccatgcggaggatggcgctgtccatgatcgagcggaggaagcgctggcggaccatcgagctgctgctgcgccggggcgcggaccccaacctgtgctgcgtgcccatgcaggtcctgttccttgctgtgaaggccggggacgtggatggggtgaggctgctgctggagcacggggcgaggaccgacatctgctttccgccgcagctgagcaccctgacaccactccacatcgctgccgcccttcctggggaggagggggtacagattgtggagctgctgttgcatgccatcaccgatgtggacgccaaggcatccgacgaggacgacacttacaagcccggcaaggttgtgaaggagctcctgacccagggagctgaccccaacctgcccctgaccaaaggcttgggcagtgccctgtgtgttgcctgtgacctgacctacgagcaccagaggaacatggacagcaagctggccctgattgaccgactcatcagtcacggggccgacatcctgaagcctgtaatgctcaggcagggagaaaaggaggcagtgggcacagccgtggactatggctacttcagattcttccaggaccggaggattgcccgctgccccttccacacgctgatgccagcagagcgcgagacgttcctggcgcggaagcggctcctggagtacatgggcttgcagctacggcaggctgtctttgccaaggagagccagtgggaccccacgtggctgtacctgtgcaagagagcggagctgatccccagccacaggatgaagaagaagggccccagcctgcccaggggcctggatgtgaaggagcaggggcaaattcccttcttcaagttctgctaccagtgtggccgctccatcggggtccgcctcttgccctgccctcgctgctacgggatcctgacctgcagcaagtactgcaagaccaaggcctggaccgagttccacaagaaggactgcggggacctggtggccatcgtgacacaactggagcaagtttccaggaggagagaagaattccagtgaagcagcagctgcacgtccgaggcttggggaggacccaggactgtgtgggtttcttacctgcctgagccacctcagggaatcttccagcctaatgcaggcatttctgcacctttgggtcatgctttgtagcagtgtctcccttgcgacctcgcaataaattggccccacggggtgattttgacagtcaaaaaaaaaaaaaaaaa

SEQ ID NO: 767 - DNA, 1295 bp, Homo sapiens
ggagttcccgagtatcgcgagaagcgcgcttagtctgcacgccgaggtccgcgctgtgtcccgtgttttctgcgtgagaggaaaagatgctagaaccacaggagaatggcgtgattgacctaccagattatgagcatgtagaagatgaaacttttcctcctttcccacctccagcctctccagagagacaagatggtgaaggaactgagcctgatgaagagtcaggaaatggagcacctgttcctgtacctccaaagagaacagttaaaagaaatatacccaagctggatgctcagagattaatttcagagagaggacttccagccttaaggcatgtatttgataaggcaaaattcaaaggtaaaggtcatgaggctgaagacttgaagatgctaatcagacacatggagcactgggcacataggctattccctaaactgcagtttgaggattttattgacagagttgaatacctgggaagtaaaaaggaagttcagacctgtttaaaacgaattcgacttgatctccctattttacatgaagattttgttagcaataatgatgaagttgcggagaataatgaacatgatgtcacttctactgaattagatccctttctgacaaacttatctgaaagtgagatgtttgcttctgagttaagtagaagcctaacagaagagcaacaacaaagaattgagagaaataaacaactggccttggaaagaaggcaggcaaagctgctgagtaatagtcagaccctaggaaatgatatgttaatgaatacacccagggcacacacggttgaagaggttaatactgatgaggatcaaaaggaggagtcaaatggattaaacgaagacattctggacaatccatgtaatgatgctattgccaatactttaaatgaagaggaaacactgctggaccagtcttttaaaaatgtgcaacagcaacttgatgctacatccagaaatattactgaagctagataagtttccattaagagaaaatgtatctgttaagtcatcgtcctgcaagcttggcgttactatgtattttttcttcttggagtgaaaatccttagatagtaaaactgttatagattattgtttaaaatctgataatctggtatttatttataattatgcttgtcactttagttaaatctatttgttctctttagtgtttgtttttatataggtatttcttcataaaatgattaggaggtaataagcagtttctgctgctggtctgtcattgaatgccttgttttcactaagaaaaaaaaaaaaaaa

SEQ ID NO: 768 - DNA, 2147 bp, Homo sapiens
gcctgcgcagtgcatcaccgcaggcgggcctcgcgggtccgggagcgcggcggagacgatgcctgagatcagagtcacgcccttgggggccggccaggacgtgggccgaagctgcatcctggtctccattgcgggcaagaatgtcatgctggactgtggaatgcacatgggcttcaatgacgaccgacgcttccctgacttctcctacatcacccagaacggccgcctaacagacttcctggactgtgtgatcattagccacttccacctggaccactgcggggcactcccctacttcagcgagatggtgggctacgacgggcccatctacatgactcaccccacccaggccatctgccccatcttgctggaggactaccgcaagatcgccgtagacaagaagggcgaggccaacttcttcacctcccagatgatcaaagactgcatgaagaaggtggtggctgtccacctccaccagacggtccaggtagatgatgagctggagatcaaggcctactatgcaggccacgtgctgggggcagccatgttccagattaaagtgggctcagagtctgtggtctacacgggtgattataacatgaccccagaccgacacttaggagctgcctggattgacaagtgccgccccaacctgctcatcacagagtccacgtacgccacgaccatccgtgactccaagcgctgccgggagcgagacttcctgaagaaagtccacgagaccgtggagcgtggtgggaaggtgctgatacctgtgttcgcgctgggccgcgcccaggagctctgcatcctcctggagaccttctgggagcgcatgaacctgaaggtgcccatctacttctccacggggctgaccgagaaggccaaccactactacaagctgttcatcccctggaccaaccagaagatccgcaagactttcgtgcagaggaacatgtttgagttcaagcacatcaaggccttcgaccgggcttttgctgacaacccaggaccgatggttgtgtttgccacgccaggaatgctgcacgctgggcagtccctgcagatcttccggaaatgggccggaaacgaaaagaacatggtcatcatgcccggctactgcgtgcagggcaccgtcggccacaagatcctcagcgggcagcggaagctcgagatggaggggcggcaggtgctggaggtcaagatgcaggtggagtacatgtcattcagcgcacacgcggacgccaagggcatcatgcagctggtgggccaggcagagccggagagcgtgctgctggtgcatggcgaggccaagaagatggagttcctgaagcagaagatcgagcaggagctccgggtcaactgctacatgccggccaatggcgagacggtgacgctgcccacaagccccagcatccccgtaggcatctcgctggggctgctgaagcgggagatggcgcaggggctgctccctgaggccaagaagcctcggctcctgcacggcaccctgatcatgaaggacagcaacttccggctggtgtcctcagagcaagccctcaaagagctgggtctggctgagcaccagctgcgcttcacctgccgcgtgcacctgcatgacacacgcaaggagcaggagacggcattgcgcgtctacagccacctcaagagcgtcctgaaggaccactgtgtgcagcacctcccagacggctctgtgactgtggagtccgtcctcctccaggccgccgccccttctgaggacccaggcaccaaggtgctgctggtctcctggacctaccaggacgaggagctggggagcttcctcacatctctgctgaagaagggcctcccccaggcccccagctgaggccggcaactcacccagccgccacctctgccctctcccagctggacagaccctgggcctgcacttcaggactgtgggtgccctgggtgaacagaccctgcaggtcccatccctggggacagaggccttgtgtcacctgcctgcccaggcagctgtttgcagctgaagaaacaaactggtctccaggctgtcttgcctttattcctggttagggcaggtggtcctagacagcagtttccagtaaaagctgaacaaaagactacttggtactctcaaaaaaaaaaaa

SEQ ID NO: 769 - DNA, 1984 bp, Homo sapiens
ttgcgcctgcgcagtgcatcaccgcaggcgggcctcgcgggtccgggagcgcggcggagacgatgcctgagatcagagtcacgcccttgggggccggccaggacgtgggccgaagctgcatcctggtctccattgcgggcaagaatgtcatgctggactgtggaatgcacatgggcttcaatgacgaccgacgcttccctgacttctcctacatcacccagaacggccgcctaacagacttcctggactgtgtgatcattagccacttccacctggaccactgcggggcactcccctacttcagcgagatggtgggctacgacggccccatctacatgactcaccccacccaggccatctgccccatcttgctggaggactaccgcaagatcgccgtagacaagaagggcgaggccaacttcttcacctcccagatgatcaaagactgcatgaagaaggtggtggctgtccacctccaccagacggtccagattaaagtgggctcagagtctgtggtctacacgggtgattataacatgaccccagaccgacacttaggagctgcctggattgacaagtgccgccccaacctgctcatcacagagtccacgtacgccacgaccatccgtgactccaagcgctgccgggagcgagacttcctgaagaaagtccacgagaccgtggagcgtggtgggaaggtgctgatacctgtgttcgcgctgggccgcgcccaggagcatctgcatcctcctggagaccttctgggagcgcatgaacctgaaggtgcccatctacttctccacggggctgaccgagaaggccaaccactactacaagctgttcatcccctggaccaaccagaagatccgcaagactttcgtgcagaggaacatgtttgagttcaagcacatcaaggccttcgaccgggcttttgctgacaacccaggaccgatggttgtgtttgccacgccaggaatgctgcacgctgggcagtccctgcagatcttccggaaatgggccggaaacgaaaagaacatggtcatcatgcccggctactgcgtgcagggcaccgtcggccacaagatcctcagcgggcagcggaagctcgagatggaggggcggcaggtgctggaggtcaagatgcaggtggagtacatgtcattcagcgcacacgcggacgccaagggcatcatgcagctggtgggccaggcagagccggagagcgtgctgctggtgcatggcgaggccaagaagatggagttcctgaagcagaagatcgagcaggagctccgggtcaactgctacatgccggccaatggcgagacggtgacgctgcccacaagccccagcatccccgtaggcatctcgctggggctgctgaagcgggagatggcgcaggggctgctccctgaggccaagaagcctcggctcctgcacggcaccctgatcatgaaggacagcaacttccggctggtgtcctcagagcaagccctcaaagagctgggtctggctgagcaccagctgcgcttcacctgccgcgtgcacctgcatgacacacgcaaggagcaggagacggcattgcgcgtctacagccacctcaagagcgtcctgaaggaccactgtgtgcagcacctcccagacggctctgtgactgtggagtccgtcctcctccaggccgccgccccttctgaggacccaggcaccaaggtgctgctggtctcctggacctaccaggacgaggagctggggagcttcctcacatctctgctgaagaagggcctcccccaggcccccagctgaggccggcaactcacccagccgccacctctgccctctcccatccctggggacagaggccttgtgtcacctgcctgcccaggcagctgtttgcagctgaagaaacaaactggtctccaggctgtcttgcctttattcctggttagggcaggtggtcctagacagcagtttccagtaaaagctgaac

SEQ ID NO: 770 - DNA, 4425 bp, Homo sapiens
aggctggtcggcttcttccgcgcgttccgctttgcttcactgctttctcccccattcttgggcctgtggacctgtcctgaggcagaggccgagatgcgcgcaaccgcgggagcagccaagtggactggactcttttcttgacttagctaccaggagctagagatgctgttattctattgtatgtgagaagtcggcccagagatggaaaactttattctgtatgaggagatcggaagaggaagcaagactgttgtctataaagggcgacggaagggaacaatcaattttgtagccattctttgtactgataagtgcaaaaggcctgaaataaccaactgggtccgtctcacccgtgaaataaaacacaagaatattgtaacttttcatgaatggtatgaaacaagcaaccacctctggctagtggtggaactctgcacaggtggttccttaaaaacagttattgctcaagatgaaaacctcccagaagatgttgtgagagaatttggaattgacctgattagtggattacatcatcttcataaacttggcattctcttttgtgacatttctcctaggaagatactcttggaagggcctggcacactgaagtttagcaacttttgcttggcaaaagtggaaggtgaaaatttggaagagttctttgctttggtggcagcagaggaaggaggaggtgataatggggaaaatgtcctgaagaaaagcatgaaaagtagagtcaaaggatctcctgtatatacagcaccagaagttgtgaggggtgctgacttttccatctccagtgacctctggtctttgggctgtctgctttatgaaatgttttcaggaaaacctccattcttctcagaaagtatttcagaattaactgaaaagatcttatgtgaagatcctttgccacctattccgaaagattcttctcgtcctaaagcttcttcagattttattaatttgcttgatgggttacttcaaagagatcctcagaaaagattgacttggacaaggctactgcagcattcattttggaagaaagcttttgctggagcagatcaggaatcaagcgtcgaagatctcagtctcagcagaaacactatggagtgttctgggccacaagattccaaggagcttttgcagaactctcagagtagacaagcaaaagggcacaagagtggtcaaccactaggtcactctttcagactagaaaatccaactgagtttcggcctaagagtactcttgagggtcaattgaatgaatccatgtttcttctcagttctcgtcctactcccagaactagcactgcagtggaagtaagtcctggtgaggatatgactcactgttcaccacagaagacttctcctctgaccaagattacaagtggacacctgagtcagcaggacctggaatcccagatgagagagcttatctacacggactcagatcttgttgtcacccccattatcgacaatccaaagataatgaaacagccaccagttaaatttgatgcaaaaatattgcatctaccaacatattcagtggataagttattatttctgaaagatcaagattggaatgactttttgcaacaagtgtgctcgcagatcgactccactgagaagagcatgggggcctcccgagccaagctgaatctcctttgctatttgtgcgtggtggctggtcaccaggaggtggccaccaggctcctccattcccccctgttccaattgctaatccagcatttgcggatagctccaaactgggatatacgggccaaggttgctcacgtaattggtttactggcttcgcacacagctgagctccaggaaaatacacctgttgttgaggcaattgttctcttaactgaattaattagggaaaacttcaggaacagcaaattaaaacagtgccttttaccaacccttggggagctgatctatcttgtagccacccaggaagaaaaaaaaaagaaccctagagagtgctgggctgttcccttggctgcatacacagtgctaatgaggtgccttcgggaaggggaagagcgtgttgtgaatcacatggcagcaaaaattattgaaaatgtctgtaccaccttttctgctcagtcccagggctttattacaggagaaataggacccattttgtggtacctattcagacactccactgctgattctcttaggataacagcagtatcggccttgtgtagaatcactcgccattctcctactgccttccagaatgttattgaaaaggtgggactgaactcagtaataaactccctggcctctgccatctgcaaagttcagcagtacatgttgaccttattcgctgccatgttgtcctgtgggattcatcttcaaagactaatccaagaaaagggttttgtctccacaattatccgtttacttgacagcccctcaacatgcattagagcaaaagccttcctggttcttctatatattttgatttataaccgtgagatgttgctgctcagttgccaagcaagactggtgatgtacatcgagagagacagcagaaagaccactccaggcaaggagcagcaaagtggcaatgaatacctgtccaaatgcctggatcttctcatctgtcacattgtgcaggagctgccacgaatcctgggtgacattcttaactccttggctaatgtttctggacgtaaacacccatcaacagttcaagtgaaacagctgaagttgtgtctccccctgatgcctgtagtgcttcacctcgtaacttcacaggtatttcgacctcaagttgtgacagaagagtttcttttcagctatggaactattcttagtcatattaaatctgtagactcaggagaaacgaacatagatggagccataggactgacagcatcagaagaatttatcaagatcacattgtcagcttttgaagcaataatacagtatcctattttattgaaagactatcgctccacggttgttgactatatactgccacccttggtgtccttggttcaaagccaaaatgtggagtggagactctttagcttgcggttgctctcagaaaccacatctctactcgtgaaccaggagtttggggatggcaaggagaaggccagtgttgattctgacagcaatcttctggctctcattcgagatgtcttacttccccagtatgagcacattcttttagaacctgacccagtaccagcatatgctctgaaactgctagtcgcgatgactgaacacaacccaactttcacaagacttgtggaagaaagcaaactgatcccactcatttttgaagtaactctggaacatcaggagagcattctgggtaataccatgcaaagtgtgattgcattactcagcaatctagttgcctgcaaagattcgaatatggaactactttatgaacaaggacttgtcagtcacatctgtaacctgctcactgaaactgccacactgtgcttggatgtggacaataaaaacaacaatgagatggcagctccactgctcttttccctgcttgatattttgcacagcatgctgacctatacctccggtattgtacggctggctttgcaggcccagaagtctggctcaggagaggaccctcaggctgcagaagacctgctgctgctcaacagacctctgacagacctgattagcctgctcattccactgcttcctaatgaagatcctgagatttttgatgtttcatccaagtgcctgtctatactggttcagctgtatggaggggaaaacccggacagcctctctcctgaaaatgtggaaatttttgctcatttactgacatccaaggaggacccaaaggagcagaagcttctgttaaggattctcagaagaatgatcacctccaatgagaagcacttggagagcctcaagaatgcaggcagcctcctgcgggctctggagcggctggcccctgggagtggttcatttgccgacagtgcggtggctcccttggccctggaaatcctccaagccgttgggcactaggcaagaaggtgcttagcacaagcccgccctgtggccccagccctcggatgcataagcaaggtcagctcccagacacctttgccacatcccctcacagctgtctttggacctaataaagtcagcttaacccagaacctggtggcccaagtgctcactaaccccagggcctagaaaactgactcagaatggacttccttggttcctgtggaatgcatctgggaagcccaggtttgttagctgttctcagaaatgttctttccctctctgtgtgggccaggtgggctaaggttagcactgcctgtggtaataaagcagtggatgcaaagcacaaaaaaaaaaaaaaaaaaaaaaaaaaaaaaaaaaaaaaaaaaaaaaaaaaaaaaaaaaaaaaaaaaa

SEQ ID NO: 771 - DNA, 7115 bp, Homo sapiens
gcggccgcgggatttggagcggccggggaggcgggggtggccggggccggcttggaggcctggcgccacccttcggggcctgcaaggacccagttgggggggcaggagggggccggaggatggttggttgtgggatttctactttgccttttcctccttatgccgccttagtgaggggcgggagctctggcggcagccccggggtggggagacgagctccggagtcggaagagctgggttttcttccgggcctagccaccagttggcggagtgaccttaggcgagtcactctgtaatttgtctgcgcctcagtttcctcctctgcctatcaatgtgtgtggggttgaaatcgctttgtaaactataaagcgtgggtgtacgtaaaggatggttattgtttataattttttttgagttgtaagaaaacttagcagttccccaatccttgggttttgaacctgggaaccttggattggagttggggatccccaaacttcctgaaattgtgggaatgtgcggtttgggggaatgatgggaatttgtgggaatgtgcgttttaggggaatgatgatccatcgctagcaagttttccaagggggctgtgacccagaagagttaagaatcacaatttcttcatgctacagagaggaaactgaggcctagatgtcatttgggacccttcacaaccattttgaagccctgtttgagtccctgggatatgtgagctgtttctatgcataatggatattcggggttaacaacagtcccctgcttggcttctattctgaatccttttctttcaccatggggtgcctgaagggtggctgatgcatatggtacaatggcacccagtgtaaagcagctacaattaggagtggatgtgttctgtagcatcctatttaaataagcctattttatcctttggcccgtcaactctgttatctgctgcttgtactggtgcctgtacttttctgactctcattgaccatattccacgaccatggttgtcatccattacttgatcctactttacatgtctagtctgtgtggttggtggtgaataggcttctttttacatggtgctgccagcccagctaattaatggtgcacgtggacttttagcaagcgggctcactggaagagactgaacctggcatggaattcctgaagatgtttggggtttttttctttcttaatcgaaagttaacattgtctgaaaagttttgttagaactactgcggaacctcaaaatcagtagatttggaagtgattcaaagctaaactttttccttggccctccttgtgttctaattgcttgcaagtgtaatactaggatgtccaagatgccagtttttgcttctttgttagttgtcagctgcttttatcaaatttcaggccattatccaacaaacactataaaaatgtttgaacaattggatttcaaacattttcgttttgtggagtggtgctcaccaagtggtacagccctaagcaagtgaacacaaacacatttaagtgtattttgtctgattagatgttagccagttatgctatttcattcaaatgtctgaaaaaatcaattgactattcccttttcctaaagggcagagacagataatctcacttccagagaaatgacttggagaaaaaaaagtgttggtctttttgctcttttgtaattaaatccggatgtacctcaaaagacttaagactgtggtgataagatgctttcctcagcagaaaggagggaaaaaaaacaactggaactcaaagcttgaaattctgtggcaaaacatgagatgtccaggattggaggttgaaaagatttcactacagtgttctgcaatagttggagcagataactttcagtgtagccacagccatggactccagatttccagattttcaagacctggacctggaacccgaaagagcttgtcacgatgcggcaggaacactggaggtagatttttttttatttttgaattttgggactgttgaccttgctgtgagaaaagagacaacgactgagcaagcactaccaccagcactgttactgggaattagaagacctgagtttctgtccagaccctcagtgcaaactgaggatgctccatccaaagtgaattatgtcctgtgcctcctgattgctgagtgttcacctggaccttctgactaccttccctgtgctattccatcagcctacagacctggtacctggatttttgcccgagatgattcctaccaccttactactgacgaagacacccattccagtggaccactgtgacccaggaggcattcagccatcatgatgtggcctttacctccactcctgtcttgttctacccagattcagcacagccctttatagtgaagtcagagtcctcaagccaaatagctaaagctgttttatcacaacaaaggcctagtttgttccatgagtgtgcatttcatttcttcagttaaagccttcagagacacacaataaatttggaccaggggattttttagttattaatgctctctgaagaaaggcaacatctttttgagagcagcattggaccacaccccacaatctcaaatgattgaaattcatgaacatctaggatcccgtgaaggtcactggaccctgttttttctacttcaaatcctgtagtagcctactgaatgagaaaacatattctgacccattgggatcaaatcaaaggcacagtgaactcctcatagcatcttctttggaattactcaggaaccagaactttttacacaaatgtaagaaattctaccaaggagtccccttacctaacagcatctcacaaggctgcaccagattccagaaaaggcttctcttgatacatcaaggtagaacctctatgcattttgtgaccgacttattcttagatcattggttttccaaaggctttgtggccatgaagccctttgagtgaaaactgtgcagaagcccagagtaaaagtgaagctgctctggatgaagtagtgaagcaagagtaggggcctgaatcctgctacaactatcttcctttaccaccgtggtgacacctaaggggacttccttacaacaccttgaactcttccgaacacagtttgaaaaccactgccccagacagcaatatgtttgacctgaatggcattccaatcttttctgtacctccactcagcacagttcatgttcagtagatgctgaacattcttagaaatactgtgtgtgaacttagaaaagtgcaagaagacaggcatgtctttgaccccaggaatgatcatttgctgaagatggtgtcaagtgaacctagattaacagccctccactccagatggatatccagtgattcctagaatgggatatagccagagaacaattctatgcaccctacactgacagactcccttaagcaacaccagatgctctactggtacttgaagtacatgactttgaagtcttgaccctccatgaatacctgaattatcagcaagcgggttttgaagctggtgcctcattgaggccatattagagcaacttgtacatttgacctcttgttatcagccatggtactctacttcgtgtgcaagagataactatgaaagccaaattcaaatactggcaacatttcctaaaggggctcaatatctatcattcgtcttcttttccaaactacacatcactgtatgactcaaccagtagcagttatattgccccttggtttttattcagtttaactactgtttccaagataaatgagctaataagctttaaaaaaaaaaaaaaaaaaggctgaattcttttttcttcatcactggcatatctgcctattctccagaattattatgactattcagctcactttaacagttgaacttcaagcgacaatctttgaacaccccttctcatgtgatttaaaatgaaaccatttggaaaagtttcttctagccagtaatagattttttttttaattgctctgccttgtgccgagagatgttcttttaagatgaatcttttgatgtctgataccaccaaatataggtggtagggagagttggaggctggccctttgagcaggccattagcttacttgctgggcatttccgatagcttattgcctacctttttgctggaaacaaactgatttgaaaaacaaaatctatgaagactgcagctaaggattttatcggtagacttaagagcttttgtccttgtggatattttagtggaaccacatcagtctcaatactgtcattttacactgactcagagcagctgacttcattccttgccatgatatatatttaaggcaggcattgtaacagacataaagacaacttatctgtttcagcaggaaggattcagtttatgaactctcagaccagatcatgttgaacaaggagactttgatgtgtgtcatgagaaaactcattctttacttcccagtcaatttaaaggccagctatcctgagctactcgaatgaatgcactggttaaacattggaaatagtttgtttatatccttgtctctctctaggccaattgtgattacatgactcgactctacatctcgtcaaacaaggcctaggtctggttgctgtagactgctcgccctcaacaaataaaatctggttgactagcctccttgtatatacaactattatttgttaagaagaaattatcgtcaattttctactaccttccaattgtcagctctttttttcctctctggtttttcctatactttacagaaaaagacattgatctatactgccattccctctaatcctgccatactcagtcaaaaggaatgacttaagatgaagatgatcatctgctcgagtctaaaatatacattgtatataagaattggtgattagaaaagcaaaaaacctaaaacttaaatctaggagtctgtatactgtctccatgtctccatgcctcagatctcatctaaatctttgaacagcaccattcaaccaatctgaggccttgacttgcttgtaagatgattctcagagatcggctgagttaaaaaagatgacgacttgattaccaaagaaagtagggccaactttgacaaatctggctctgctgaccctgtcactcccagatgtagcatagactcctaaacagaacctcaagtctgattgaggataaggccttctcctgagctgaaagttctttggcagatgagcaagaaactgaaagctgatgtacctgactggctctgtaagatcagaaaactgtatccagaataagccctatggattaacccctgagtacccagagtaaaaactaatttacagaacttccttattgatctgctggttcttccagatcatattctggctattggtatggctggcctttctgaaggtaccctgcttgtctattttcctgactcagctcttgcctgcctttttcacatgttgctgcaattagactcaccgtgaggactacagtcaatttcagtctatcttgtgcccaatacaacaaggatttttaatagtaacaacccacacctcacccactaggactcaatgttcacaacaggaaggaccattgctgcatactccttgaccagcaacttttttgaagatatttttaagtgcagagtaggcctctattcctgtatgtaattgttcattttcagcacctggaacctcatctatcgggtctggaaggaatacagcagttcgaaagccgcgtccatttctctccttcagtagtgcagaaatgagtccgattcaccagtacacacagaactgtaccagttcaacctagcaaaagaagaaaagtttccactgtacttaaaatttacagctgactcaaattgcctcacagaattatttgatgtagaaggctagttgtcttacttcagatcagcaggacagttgggctctcagactcatgaccactgagtttgcttgtgttgaaactgtggtttcatccaacatatgctattggacatgattattattccattcaaatggattacagacttcttgaggacaggacaaacttatctctcatggtgtttttttagaatacttttataaccaaggaagaaaccatgccagctgttaccattcaacttcttaagcagagattaagctttttcatatctgttcttatcctggacatcagtagtttttaattgcccagcatccgttccatcttgtaacaactccctgatgtttcttaaaaccacctcttcctattttcagtctgtggtttggacagtctgacccaaccttgagctttgtgggtgaacatgtaattcagacctcatcaatcagcaaatccatctgaactgtggaggagaagctctctttactgagggtgctttagctttgtaggatgaaaacctcaaactaacagggcctaccatgtagagaatgaagccagtgcaggggaaagcagagccaaaatatggagagacttgaatcctgatgacagcgtttgtgcccctggatccaaccgtgcctgaagctagaatatcccctggacttttcagttatgtgaaccaataaatacccttttttgcttaagttactttgagttgggtttctgttacttgaaattgaatccacactaatatatctaccaacattgagacttgacagatccaagtatttattaagctagaggtcatggtcactgaaattactttccaaagtggaagacaaaatgaaacaggaactgagggaatatttaagatcccacagaagcgtaaaaatgacatggtagaaagtaatagaaaacctaaatgtctgtcattaaaggataggttaaggtgtggttcagccatataggaatatctcgtatctgttaaaatgaataaagtacattcattgtgtatggaaaaatggccatgatacattaggtgaaacaagttattaatagaaaagtgtacagtgtgaactcattttaaaatgtgtgtgcttatgtttataaatgcatagaaaggtctattcacagctttctttgaacagtgtagatcacatgaaactttcaactttatacatttctgtattaatattttacactacccacattatttttaaactttattttaaataaagaatttttaaaattaaaaaaaaaaaaa

SEQ ID NO: 772 - DNA, 1236 bp, Homo sapiens
caggcgctgacgaggagcccggctgagggaggatgcgccgctgacgcctgcgggagccgcgcgcctggggcgggaggatgctccagaggggcctctggccgtggcgcacgcggctgctgccgacccctggcacctggcgcccagcgcgcccgtggccgctgccgcctccgccccaggttttgcgtgtgaagctgtgtggaaatgtgaaatactaccagtcacaccattatagtaccgtggtgccacctgatgaaataacagttatttatagacatggccttcccttggtaacacttaccttgccatctagaaaagaacgttgtcaattcgtagtcaaaccaatgttgtcaacagttggttcattccttcaggacctacaaaatgaagataagggtatcaaaactgcagccatcttcacagcagatggcaacatgatttcagcttctaccttgatggatattttgctaatgaatgattttaaacttgtcattaataaaatagcatatgatgtgcagtgtccaaagagagaaaaaccaagtaatgagcacactgctgagatggaacacatgaaatccttggttcacagactatttacaatcttgcatttagaagagtctcagaaaaagagagagcaccatttactggagaaaattgaccacctgaaggaacagctgcagccccttgaacaggtgaaagctggaatagaagctcattcggaagccaaaaccagtggactcctgtgggctggattggcactgctgtccattcagggtggggcactggcctggctcacgtggtgggtgtactcctgggatatcatggagccagttacatacttcatcacatttgcaaattctatggtcttttttgcatactttatagtcactcgacaggattatacttactcagctgttaagagtaggcaatttcttcagttcttccacaagaaatcaaagcaacagcactttgatgtgcagcaatacaacaagttaaaagaagaccttgctaaggctaaagaatccctgaaacaggcgcgtcattctctctgtttgcaaatgcaagtagaagaactcaatgaaaagaattaatcttacagttttaaatgtcgtcagattttccattatgtattgattttgcaacttaggatgtttttgagtcccatggttcattttgattgtttaatctttgttattaaattcttgtaaaacagaaaaaaaaaaaaaaaaaaaaaaaaaa

SEQ ID NO: 773 - DNA, 2625 bp, Homo sapiens
agacgacgcgccgtgcgcctgcgcacggcttgcccatgtgtgctgcagccgtcagccggcccagctgagcagcagcaacggaccttgttaacggcgcggcagcctccaccgcctgctgttgccctcctctctcggtggtctgtccgcccagcgcacgtcaccatgggcaagagccggacgaagcgcttcaagcgacctcagttctcccctacgggcgactgtcaggccgaggcggctgcggcggcgaatgggaccggaggcgaggaggacgacgggccggcggcggagctgctggaaaagctccagcacccgagcgccgaggtccgcgagtgcgcctgcgcagggctggcccggctggtgcagcagcggccggcactcccgggcctggcgcgacgagacgccgtgcgccgcctcgggccgctgctgctagaccccagcctggccgtcagggagactgcagccggcgcgctgagaaatctcagtgcttgtggaggttttgaagtttgtgatgacatggtgactaaggatatcatgacccctctggttgcgctgctaaaagagtgtagtgctggactggattcaaatgagatgtctctgcaggagaaaaaagatcagaacagaaattctattgagaacatagccaatgagactgtgaacgtgctgtggaatatatgtgaatgcagtagtagagcagtgtctatattcaacaaagaagggtgtttggagattgtgttaaagtatttaagtaggtttcctaccaatgttgacctggctatttcagtagcatattgtttgcagacagtgactgaggataacccagagctgctgaagtctttcagtgctacagcattgaacatgctggaatcagcactgctttctcctgtcagttccatggaatctcttctattgaagacattggtagcaggcacaatttggaatctaaaggacattattccatgcaagagtcaagcagaaatcataaatgccttactaaagatcttatctgaagttttgggaatggatgctggtgaaatggttattcaaatgaaagaggctgaaacgcaaaggttaaaaactgctgcagaggctgaggaaatattagagaacactaatggggatgatttgattgaagatgatgaaatggaaggaatttctcataaaagaagagtcagaaggaaaactttcgtttcagatttacttccgcccactgacaaggaactgagagagactatagcattgctgacagcccaacagactgctctggaaattattgtcaacatgtgctgcaatgaagatccctctgatgacgaatgggaagagctttctagcagtgatgaaagtgacgcatttatggagaattccttcagtgagtgcgggggacagctgttttctcccctctgcctctcccatgaagttcacacggctctcaccaactacctcatcccaaagaagatttttgagaaaactgcctttccaaacagcattgcagttgacctatgttctaggaaccctacttggaaacctttgattagaaaaatgaacactattcagtgcagagccctcttctgtctccagagtcttgtgtccctcctggatgtggagcacctgggaggagccgcagcccttcagacgcttgcacagcatctgtcacagctgcttttttctcaaccagattttgctaaacatgttgactttctagaagccataagtagtgctttgagggcccttttgcaaacaatggcctccaagaacatttcccagtgcatgactcctgatcagctgatgacattatgcaaagcaggcattcatagtagtaatgtcggggttagagtgaatgtcgttagcattttaggaatcactggcagcgtccttgccaaagaagatggtacacttgaaactcttaagaacattgggtgctttctgcttgaagttaccaccaaagatccttcccttgtggtagcaggagaagctttggatgccctctttgatgtttttgcagatggtaaagaagccgaaagagcctcgattcaaattaaattattatctgctctgaaagaattccagccggtctttaaaatgaagatacgtaaagaagggagaggtaactatagcacagatcagctgtgtgttcttgacaatgtgaaaatgaatttgcgaagatttattgcttatcaagaaactgttgagaaaagactgacttcttaaacaatccaaaaaagaaaccagttcttcccccaaagtattcaatgcttagaatactaaaaggttttctttgaatgtatatgtttctgaaagtcattttttaatgattacattctgtacattctgtaaaaacttcaaaacctggccaggcatggtggctcacgcctataatcccagcaccttgggagaccgaggcgggtggatcacttgaggtcaggagtttgaggccagcctggccaacatggtgaaaccgcatgcataagcatggtggcacatgcctgtgatcccagctactcgggaggctgagggaggagagtcggttgaacctgggagacagaggttgcagtgagctgagatcacgctactgcactccagcctgggtgacagagggagaccctgtctccaaaaaaaaaaaaaaaaaaa

SEQ ID NO: 774 - DNA, 1999 bp, Homo sapiens
acgcgctcttagaccatggcgacccaggcgaagcgtccacgggtggcggggcccgtggacggcggcgacctggatcctgtggcctgcttcctgagctggtgccggcgggtggggctggagctgagtcccaaggtggcggtcagccggcagggcacggtggccggctacggcatggtggcccgggagagcgtgcaggccggagagctgctgttcgtggtgccgcgggccgcgctcctgtcgcagcacacctgctccatcggcggcctgctggagcgagagcgagttgcgctgcagggccagtcgggctgggtgccactgctgctggcgctgctccacgagctgcaggccccggcctcacgctggaggccctactttgcgctctggcccgagctgggccgcttggagcacccgatgttctggccagaggaggagcgccggtgcctgctccagggcacaggcgtacctgaggccgtggagaaggatttggccaacatccgcagcgagtaccagtccatcgtgctgcccttcatggaagcccaccccgatctcttcagcctcagggttcgctccctagaactctaccaccagctggtggcccttgtgatggcctatagctttcaggtaccactggaggaagaagaggatgaaaaggagcccaactcccccgtgatggtgcctgctgcagacatactaaaccacttagccaatcacaacgccaatctagaatactctgcgaattgtcttcggatggtagccactcagcccattcctaaaggccatgagattttcaacacttatgggcaaatggctaactggcaactgattcatatgtacggttttgttgaaccatatcctgacaacacagatgacacagctgacattcagatggtgacagttcgtgaggcagcattacagggaacaaaaactgaagctgaaaggcacctagtgtacgagcgctgggatttcctatgcaaactggagatggtaggggaagagggagcctttgtgatagggagggaggaggtgctgactgaagaggagctgaccaccacactaaaggtactgtgcatgcctgctgaggagttcagagagcttaaagaccaggatggagggggagatgataaaagggaagagggcagcctgacgatcacaaatattcccaagctcaaagcatcgtggagacagctgcttcaaaacagtgttctactgactttgcagacctatgccacagacttaaaaactgaccaaggtttactcagtaataaggaagtctatgcgaaactcagctggagggaacagcaagccttacaggttcgctatggtcagaagatgatcttacatcagttgttggaactgacaagttagcagtttccctgttccctgaaggaacagcaataagaactttattctaagctaatactcattgatgtttgaaaaagaggaaaatttggatctttcttttgcttactaaacaccaagaggaaaagtagcaaagttggtgtgctaggattaactcaggtaagggtgatgtgttttaggattgagaacagcagacttgggaatcactgctaattgttacttaaagcatgttacagctgttttgttctcagttttaaccaaagccagtggacatacggtagtaataactaagtcttgttgtgtttcagcatttaataatagactttggaggtagacccctggtttaaatctaagtctagtttgaggaagtcacttaacctttattgaaaagactctggatttaataagctgtgtaactggtactcgatagttacccaaagttcagtctagatggcacaaaccacctctcagggaataaaccctaagacatcactcaaggaggacttcaattatttaattttgaactgttttgtcctctctggccataaaacttgacagtcatgaaaggtaaggcaaattttaagtgggttaagtttttaaatacgtatctactcattttctttaaaaaaaaaaaaaaaaa

SEQ ID NO: 775 - DNA, 4069 bp, Homo sapiens
gcaggccgaatggtggatttaattggccggagtttagggcgcgcttggcccgcgtgggtcagctgatcgcgcactgagggtgcgatcccgggctccccattccttcctggggcgcctccccggcccagggccaactgggtcccggtgtcggcaggcctggggtcggcgacggctgctcttttcgttctgtcgcctgcccgatggacgagcctcccgggaagcccctcagctgtgaggagaaggaaaagttaaaggagaaattagcattcttgaaaagggaatacagcaagacactagcccgccttcagcgtgcccaaagagctgaaaagattaagcattctattaagaaaacagtagaagaacaagattgtttgtctcagcaggatctctcaccgcagctaaaacactcagaacctaaaaataaaatatgtgtttatgacaagttacacatcaaaacccatcttgatgaagaaactggagaaaagacatctatcacacttgatgttgggcctgagtcctttaaccctggagatggcccaggaggattacctatacaaagaacagatgacacccaagaacattttccccacagggtcagtgaccctagtggtgagcaaaagcagaagctgccaagcagaagaaagaagcagcagaagaggacatttatttcacaggagagagactgtgtctttggcactgattcactcagattgtctgggaaaagactaaaggaacaggaagaaatcagtagcaaaaatcctgctagatcaccagtaactgaaataagaactcaccttttaagtcttaaatctgaacttccagattctccagaaccagttacagaaattaatgaagacagtgtattaattccaccaactgcccaaccagaaaaaggtgttgatacattcctaagaagacctaatttcaccagggcgactacagttcctttacagactctatcagatagcggtagtagtcagcaccttgaacacattcctcctaaaggtagcagtgaacttactactcacgacctaaaaaacattagatttacttcacctgtaagtttggaggcacaaggcaaaaaaatgactgtctctacagataacctccttgtaaataaagctataagtaaaagtggccaactgcccacaagttctaatttagaggcaaatatttcatgttctctaaatgaactcacctacaataacttaccagcaaatgaaaaccaaaacttaaaagaacaaaatcaaacagagaaatctttaaaatctcccagtgacactcttgatggcaggaatgaaaatcttcaggaaagtgagattctaagtcaacctaagagtcttagcctggaagcaacctctcctctttctgcagaaaaacattcttgcacagtgcctgaaggccttctgtttcctgcagaatattatgttagaacaacacgaagcatgtccaattgccagaggaaagtagccgtggaggctgtcattcagagtcatttggatgtcaagaaaaaagggtttaaaaataaaaataaggatgcaagtaaaaatttaaacctttccaatgaggaaactgaccaaagtgaaattaggatgtctggcacatgcacaggacaaccaagttcaagaacctctcagaaacttctctcattaactaaagtcagctctcccgctgggcccactgaagataatgacttgtctaggaaggcagttgcccaagcacctggtagaagatacacaggaaaaagaaaatcagcctgcaccccagcatcagatcattgtgaaccacttttgccaacttctagcctgtcgattgttaacaggtccaaggaagaagtcacctcacacaaatatcagcacgaaaaattatttattcaagtgaaagggaagaaaagtcgtcatcaaaaagaggattccctttcttggagtaatagtgcttatttatccttggatgatgatgctttcacggctccatttcatagggatggaatgctgagtttaaagcaactactgtcttttctcagtatcacagactttcagttacctgatgaagactttggacctcttaagcttgaaaaagtgaagtcctgctcagaaaaaccagtggagccctttgagtcaaaaatgtttggagagagacatcttaaagagggaagctgtatttttccagaggaactgagtcctaaacgcatggatacagaaatggaggacttagaagaggaccttattgttctaccaggaaaatcacatcccaaaaggccaaactcgcaaagccagcatacaaagacgggcctttcttcatccatattactttatactcctttaaatacggttgcgcctgatgataatgacaggcctaccacagacatgtgttcacctgctttccccatcttaggtactactccagcctttggccctcaaggctcctatgaaaaagcatctacagaagttgctggacgaacttgctgcacaccccaacttgctcatttgaaagactcagtctgtcttgccagtgatactaaacaattcgacagttcaggcagcccagcaaaaccacataccaccctgcaagtgtcaggcaggcaaggacaacctacctgtgactgtgactctgtcccgccaggaacacctccacccattgagtcattcacttttaaagaaaatcagctctgtagaaacacatgccaggagctgcataaacattccgtcgaacagactgaaacagcagagcttcctgcttctgatagcataaacccaggcaacctacaattggtttcagagttaaagaatccttcaggttcctgttccgtagatgtgagtgccatgttttgggaaagagccggttgtaaagagccatgtatcataactgcttgcgaagatgtagtttctctttggaaagctctggatgcttggcagtgggaaaaactttatacctggcacttcgcagaggttccagtattacagatagttccagtgcctgatgtgtataatctcgtgtgtgtagctttgggaaatttggaaatcagagagatcagggcattgttttgttcctctgatgatgaaagtgaaaagcaagtactactgaagtctggaaatataaaagctgtgcttggcctgacaaagaggaggctagttagtagcagtgggaccctttctgatcaacaagtagaagtcatgacgtttgcagaagatggaggaggcaaagaaaaccaatttttgatgccccctgaggagactatactaacttttgctgaggtccaagggatgcaagaagctctgcttggtactactattatgaacaacattgttatttggaatttaaaaactggtcaactcctgaaaaagatgcacattgatgattcttaccaagcttcagtctgtcacaaagcctattctgaaatggggcttctctttattgtcctgagtcatccctgtgccaaagagagtgagtcgttgcgaagccctgtgtttcagctcattgtgattaaccctaagacgactctcagcgtgggtgtgatgctgtactgtcttcctccagggcaggctggcaggttcctggaaggtgacgtgaaagatcactgtgcagcagcaatcttgacttctggaacaattgccatttgggacttacttctcggtcagtgtactgccctcctcccacctgtctctgaccaacattggtcttttgtgaaatggtcgggtacagactctcatttgctggctggacaaaaagatggaaatatatttgtataccactattcataagttagggtaaagtgaaaacacaattttctggatatattgggcctcttagtattttttggagttttaaatataaaggagaatatctgaatgacacttaaaatgattgcttgtttatgtccagacagacttattttttattctaatgatggtagcaccactgatcttggatgtacatttatgtatactttgagaaaaagggttttaggttgatttttgtaatttcccacatttgtacatgtgcttttaaaggtgtacataaagcttcaaatggcaataaatatttatttttatacattcaaaaaaaaaaa

SEQ ID NO: 776 - DNA, 2279 bp, Homo sapiens
gctgacggggtggcagtgcggcgggttacggcctggtcagaccataatgacttcagcaaataaagcaatcgaattacaactacaagtgaaacaaaatgcagaagaattacaagactttatgcgggatttagaaaactgggaaaaagacattaaacaaaaggatatggaactaagaagacagaatggtgttcctgaagagaatttacctcctattcgaaatgggaattttaggaaaaagaagaaaggcaaagctaaagagtcttccaaaaaaaccagagaggaaaacacaaaaaacaggataaaatcttatgattatgaggcatgggcaaaacttgatgtggaccgtatccttgatgagcttgacaaagacgatagtacccatgagtctctgtctcaagaatcagagtcggaagaagatgggattcatgtagattcacaaaaggctcttgttttaaaagaaaagggcaataaatacttcaaacaaggaaaatatgatgaagcaattgactgctacacaaaaggcatggatgccgatccatataatcccgtgttgccaacgaacagagcgtcagcatattttagactgaaaaaatttgctgttgctgagtctgattgtaatttagcagttgccttgaatagaagttatacaaaggcttattccagacgaggtgctgctcgatttgctttgcaaaaattagaagaggccaaaaaagattatgaaagagtattagaactagaaccaaataactttgaagcaacaaatgaactcaggaaaatcagtcaggctttagcatccaaagaaaactcatatccaaaggaagctgacatagtgattaagtcaacagaaggagagcgaaagcaaattgaagcacaacagaataagcagcaggccatttcagagaaagatcgggggaatggatttttcaaagaggggaaatatgaaagagcaattgaatgctatactcgagggatagcagcagatggtgctaatgcccttcttccagctaacagagctatggcctatctgaagattcagaaatatgaagaagctgaaaaagactgcacacaagccattttattagatggctcatattctaaagcttttgccagaagaggaactgcaagaacatttttgggaaagctaaatgaggcaaaacaagattttgaaactgttttacttctggaacctggaaataagcaagcagtaactgaactctccaaaattaaaaaggaattaattgagaaaggacactgggatgatgtctttcttgattccacacaaagacaaaatgtggtaaaacccattgataatccaccgcatcctggatcaactaaaccactcaagaaggttattattgaagaaactggtaatttgatacagactattgatgtgccagatagcactactgctgctgctccagagaataatcctattaatctagcaaatgtaatagcagccacaggcaccacaagtaagaagaattcaagccaagatgtcctttttcccacaagtgatactccaagagcaaaagtattgaaaatagaagaagtcagtgatacttcatccctgcaacctcaagccagtttgaagcaggatgtatgtcagtcttacagcgagaaaatgcccatagagatagaacaaaaacctgctcagtttgccacaactgttcttcctccaattcctgcaaactcgttccagctcgaatctgatttcagacaattgaaaagttctccagatatgttgtatcagtatttaaagcaaattgaaccatctttgtatcctaagttgtttcagaaaaatctggatccagatgtattcaaccagatcgttaaaattctgcatgacttttacattgagaaagaaaagccattactcatctttgaaatcttacaaagactttctgaactaaaaaggtttgatatggcagtgatgtttatgtcagaaacagagaaaaagattgcacgtgcattatttaatcacatagacaagtcaggattgaaggatagttctgtcgaagaactcaagaaaagatacggtggttgatttccatttttgctgaaataattgtttttgactttcatatgtaaattttttctactgaaagtgttttgctttttaagaaaatgaaattatatagcaggaaaggactatctttgaacataagttaattaactataaggtgaattgtgatttaactagtgagaattgtattcaagtgaactctgtttttctgaaaataaaaatataaacaatgagaaaaaaaaaaaaaaaaaaaaaa

SEQ ID NO: 777 - DNA, 5052 bp, Homo sapiens
agtcccagctacttgggaggctgaggcaggaggattgcttgagcccaggagttggaggctacaataagctatgatccagctgctgcactctagcttgggtgacagagaccctgtcttcttaagacaaatccagaatttgggacatcttataatttagttgccctggattcttcaaaagtttaagctatgaagaaggacatccctcacactctgaaacagatctccttcagagacagagttttgcagcctctcatcagcttcctggatatgctcccacacctcagcctactggtctttctggaatatttgatactagtgtgaacagtgccagcagtaacactaaagagtcttcagtgatgaattttctgtctactgctgaatcccgaactgctcaggctgctgcttcaggaactactctcttaccacaattcagggctccatcctggcagacaggcatgcattcctcagcagcaactgagctgtttgctactggacctttgccaagcactggaacacttccaccatctctctctgcttatcagcatcccaccaccttcagcaatagaaactttgctaccacttcacctttggtgcttcaggattcaacttttaacactacatcaaatggaattttaagtcatcatgaccctttgctacaaatcaagacttcccagggaactgttccaactgctttggcatttgagcgcctgggcagttctgtattaagtaacagcataccacctcagtcttcaacataccgctcagctcaagagtctgcaccccatcttttacaacctcaatttagtttgttgccttcagcacttgggggatcccagcagactcctcaagcctacagttcaactctctttactagttctactgcttccattgaaagagctcttcttcgagaatgtagtgttattaaacaccatcagcggccttcaggtacccagtcaattcaggcacaactgactggttcacagcactccttacatagttatctatcaaattcaagtgtagttaattttcaggaaacaaccaggcagtcatctttatcctgtagcccaattggagattccactcagaatttgccagactctagcccgacccagaattatatttctatgcattcttcccaaaatgttcagactcaagagtcatcatctccccagtcccagaagtttttgcctgctgtccagtcatcatcttttgcatcctctactcattgtcagacattacaaaataacataacttcccctgacccaaagtcttatgctgaaagaaagcttgactcagatgtgtatccatcttcaaagcaagaagatggttttccaatgcaagagttacaggtgttgcagccacaagcatctcttgagtcatcaacccaaaggctatctgatggagaaattaatgctcaagaatcaacttataaggtgtcaaaggcagatgacagatattctcagagtgtaatcagaagtaattcccgtcttgaagatcaagttattggggttgctctgcaagcatcaaaaaaagaagaaagtgttgttggttcagtgacacaacttaaccaacaaattggccaagtcaataatgcagctacccttgatcttaagaactcaactaatttaatacagactccacaaataaggttgaatactaaagacttaaagcagcaacatcctctcatacttaaggtgcatgagtccaaggtccaggaacagcacgatcaaataattaatgcttcatctcagattcaaattccaaatcatgctttagggcatggccatcaggcatctcttcctaatacacaggtccttttagattctgcctgtgatttacaaattcttcagcagtcaatactgcaggcaggtttaggtcaagtaaaggcatctttacaagcacagcgtgttcaaagccctcaacaaatagtacatcccttccttcagatggaaggtcatgttattcaaagcaatggtgatcattctcagcagcaactccatcctcaaaattctgaagttatgaaaatggacctctctgagtcttcaaaaccattacaacaacatctaacaacaaagggccattttagtgaaacaaatcaacatgattcaaagaatcagtttgtttctcttggatcgatgtgtttcccagaggcagtgcttcttagtgatgaaagaaatattttatcaaatgtagatgatatcttagcagctacagcagcagcttgtggagttacacctactgatttttccaagtcaacttcaaatgaaaccatgcaggctgttgaagatggtgattctaaatctcattttcagcagtcattagatgtcaggcatgtgacttcagattttaactctatgacagctacagtaggaaagccacagaatataaatgatacttccttaaatggaaatcaggttactgtgaacctttcaccagtacctgcccttcagtcaaaaatgactcttgatcaacagcacattgaaacacctggtcaaaatataccaactaaagtaacttcagcagtggttggaccaagtcatgaagtccaggagcaaagttctggcccattcaagaaacagtctgctaccaatcttgaatctgaagaagacagtgaagctcctgttgatagtacattaaataataacagaaaccaagagtttgtttctagtagtagaagtataagtggagagagtgctacatcagagagtgaatttaccttagggggtgacgacagtggtgtgtcaatgaacccagctaggagtgcacttgcactgttggccatggcccaatctggggatgcagtcagtgtcaagattgaagaagaaaaccaagatttaatgcattttaaccttcaaaagaaaagagctaaaggaaaagggcaagttaaagaggaagacaacagtaatcagaaacagctgaaaagacctgcccaaggcaaacgccagaatccaaggggaacagatatttacttaccgtatactcctccttcctcagaaagctgccatgatggttatcagcatcaagaaaaaatgagacagaagatcaaagaggtggaggaaaaacaaccggaagtcaaaacaggatttattgcttctttcttagattttctgaaatccgggcccaagcagcagttttccactcttgctgtacgaatgcctaacaggactagacggccagggacccagatggttcgtacattttgtcccccaccacttcccaagccttcatctacaacacccacacctttagtgtctgaaactggcggtaacagtccatcagataaagttgataatgaacttaaaaacttggaacatttatcttcattttcttctgatgaagatgatcctggatatagtcaagatgcttataaaagcgtctctactcccttaactactttggatgctacttctgataaaaagaagaaaacagaagccctacaggtggcaactactagcccaactgccaatactactggtactgctactacttcctcaaccactgtgggtgcagttaagcaagaacctctccactctacttcatatgcagtaaatattctggaaaatataagctcttcagaatcctcaaagcccattgaacttgatggtcttccttcagaccagtttgcaaaaggacaggacactgttgccatagaaggttttacagatgaggaggacacagaaagcggaggagaaggccaatacagagagcgtgatgaatttgtggtaaagatagaagacatagagacttttaaggaggctttaaaaacaggaaaagaacctccagctatttggaaagtacaaaaagctttattacagaaatttgttcctgaaattcgagatggtcaaagagaatttgctgctacaaatagttatcttggatattttggagatgcaaagagtaaatacaaaagaatatatgtgaagttcattgaaaatgcaaacaagaaggaatatgtcagagtgtgttctaaaaagccaagaaataaaccttcacaaactatcagaactgttcaagctaagccaagtagtagcagtaaaacttctgatcctctagcatcaaaaactacaactacaaaagccccttccgtgaaacccaaagttaaacagccaaaagtaaaggctgagccaccaccaaagaaacggaaaaaatggaaagaagaattttcatcatcccaatctgactcatctcctgagatccatactagtagtagtgacgatgaggaatttgaacctcccgctccctttgtcactcgctttttgaacacaagagcaatgaaggaaacctttaagagctacatggaatagcttgttagcattgccttggaccctgacacaatgcaagccttagagaagagcaatgatgagctacttttacctcatatgaaaaaaatagatggcatgctaaatgataaccgaaagagacttcttttgaatcttcatttggatcaatcattcaagaatgctttggaaagttttcctgaactaacaataattactcgagattctaaagcaaagagtggaggaactgctatttctaaaatcaaaatgaatggcaaagcctataataagaaaactctaaggacttctaaaacaaccaccaaatctgcacaagagtttgctgtcgatccagagaaaatacagttgtattctttgtatcattcactccatcattataagtaccatgtttatctgatatgtaaggatgagatttcttcggtgcagaaaaaaaatgaagatttaggacaggaggaaattgttcaactttgtatgaaaaatgtaaaatgggtggaggacctctttgaaaaatttggagaacttctaaatcataccggaatgttgggagaaatgcaaagcgtctcagttagcagcaccagaagatcagagcagcagaatattctagaggctgggaagtccaagatcaaggtacctgtatctggtgactgttgagagccttcttgctgtgccttagaatgaaagaaggtggagggcaaggtgatatgaacaatgtgcctttacatggcaaaagaatgaaagaaagtaaacctattcccac

SEQ ID NO: 778 - DNA, 2693 bp, Homo sapiens
cctcgtgccgggaaagctcttttaacgagctgaggcttcgaagacctcagaggacttctctcagcactcacagaaacctcctacaccctcggatggcacaaagggactgttttcttactcttagtctgagtgactgccaaggaaggcaaaggtagagcaactggatctctggctctccacatagcttctgatctcagaccttactaaaatgctttctgggcccaaggacaaagctcacatgaacaaatgattttgagtcatgaatgaaaaatcttgctctttccatagtaaagaagaattaagagatggacagggtgaaagattgtctgctggatattctccatcatatgacaaggacaagagtgttctggctttcagaggaatccctatctcagagttgaagaaccatggcattctccaggctctgaccacagaagcttatgaatgggagccacgtgttgtgagtacagaggtggtcagagcccaagaagaatgggaagctgtggacaccatccagccagagacagggagccaagctagctcagagcagcctgggcagctaatctccttcagtgaggccctgcagcacttccagactgtggacctttcccccttcaagaaaagaatccagccaactattcgaaggactgggctcgccgccctccgacactacctcttcgggcctccaaagctccaccagcgccttcgggaagaaagggacttggtcctgaccattgctcagtgtggcctggatagccaagacccagtgcatggccgagtcctccagaccatctataagaagctgaccggctccaagtttgactgtgcccttcatggaaaccactgggaggacctgggctttcagggagcgaatccagccacagacctgagaggcgcaggcttccttgccctcctgcatctgctctacctggtgatggactcaaagaccttgccgatggcgcaggagattttccgcctgtctcgtcaccacatccagcaattccctttctgtttgatgtccgtgaacatcacccacattgccatccaggccttgagagaggagtgtctctccagagagtgtaatcggcagcagaaggtcatccccgtggtgaacagcttctatgccgccacattcctccatctcgcacatgtctggaggacacagcggaagaccatctcagactcgggctttgtcctcaaaggtgtgctctttcttctggggaggcctaggctgaatgcacagtgtcccaggtccagagagcccaaggtggttgctagactggttttggctgcagttcttccccatccacactttctcaaattccagcttaccaaaatctccatcacccaccccctggagtctgctagttctcctttctctgccctgactgttgcccttttctggtcttatacttatgacaagcatatattctgatcaaaaattgggagccagggtccaatagttggactattcaaagttgcaattgtgcagacaaggtagagtgtgtggtccctgtggctgtagctggctccctagcctacctctctggtgatctctccatctgaggctccttcactttctctccatgggataggggttgggggtactccctagagctgctaggcttgaggccttgactgttgtgtcacccagagccccctcaagccttctgctccccaattctctctgttgcagagttggaagtattggccaagaagagcccactgcggctgctcaagaccctggagctgtacttggccagggtgtcaaagggacaggcctccttgttgggagcacagaagtgctatgggccagaagcccctcccttcaaggatctcaccttcacaggtgagagtgacctgcagtctcactcatccgaaggcgtatggctgatctgacctccgagatgaatggaggcttaaaggctgagctgcaggggctttcagggggtcatgtcaggagcctggccaggccacaccccttgctgtctcagcagatgggatataggaagctcctgggcttagctgtgggaagccaagtaccctcaccggcatgggacatgaggggcagctagacttcacccccttcccgcagacctgcctccagagcaaggagaattctgccttaatctgttgggctccagtctccgggttgaattccagtgtatcccactgggagtgaatggatcatgaggtgggatggccccatctggatgttctgcagatccccacatgggaggagattcccaagtagaggcagccagaattctgactccctggcagcagcagggctttcaggcaccagtgtctgtgttgttagaactcagaggaagaggcaggggcagcagccgacagggggcagcatgacccaagcaaggggcctgaggcctcagtgggggtagggcaaggaggtacctcacaggtgggtgtgaggccccctctggagtttctggccattcacttacccactctcttctccccctgacccccgctccattgtttatgatggaaaaacggacatttggctaggtgtctctcacggctgctccatcctagcccccacaagctggggcttcctcctgtagatgctgtgcatgccccatgatgagtttctggcctaattgagggaaggaggaaattcataccagcagttttcaaataaaagaattgttctaaaaaaaaaaaaaaaaaaa

SEQ ID NO: 779 - DNA, 9390 bp, Homo sapiens
gaggcggtggcggcggaggcggcaccgattgctgtgtcggccccagtgcggccgaagtcgcggtagagcgtagccccacgcccctcccccgtccgcgccctccctctttccctggggatggagaaggcgacggttccggtggcggcggcgacggctgcagaaggagaagggagccccccggcggtggcggctgtggcgggcccccccgcggcggcggaggtcggcggcggcgttggcggcagcagcagagctcgctcggcctcgtctcctcgtgggatggtgcgagtctgcgacctgctcctgaagaagaagccgccgcagcagcagcaccacaaggccaagcgtaaccggacttgccgaccccccagcagcagcgaaagcagcagcgacagcgacaacagcggcggcggtggaggcggcggtggaggcggaggtggcggcggcggcaccagcagtaacaacagcgaggaagaagaggacgacgacgacgaggaagaggaggtttctgaggtggagtctttcattttggatcaggatgatttggaaaatccaatgctggaaacagcttccaagttgctcttatcaggtactgctgatggtgcagacctcaggacagtagatccagaaacacaggctagactggaagctttactagaagctgcaggaataggaaaattgtccacggctgatggtaaagcctttgcagatcctgaagtacttcggaggttgacatcgtctgttagttgtgcgttggatgaagctgctgctgcacttacccgtatgagagctgaaagcacagcaaatgcagggcagtcggacaaccgcagtttggcagaagcctgttcagaaggagatgtaaatgctgtgcgaaagttactcattgaagggcgaagtgtaaatgaacacacagaggaaggggagagcctcctttgtttagcttgttctgctggatactatgagcttgcacaggttttgttggcaatgcatgcaaatgtggaagataggggaatcaaaggtgacattacacctttaatggctgctgctaatggaggacatgtcaaaattgtgaagttgctgctagctcataaagcagatgttaatgcacagtcttcaacaggcaatacagcacttacatatgcttgtgctggaggctatgtagatgttgtaaaggtgctcttggaatccggtgctagtattgaggaccataatgaaaatggtcatacccctcttatggaagctggaagtgctggacatgtggaagtagccagattgctgctagaaaatggggctggcattaatacgcattctaatgaatttaaagagagtgcccttaccttagcttgttacaaaggacacttagagatggtgcgatttcttttggaagcaggcgcggatcaagagcataaaacagatgaaatgcacactgctctgatggaggcttgcatggatggccatgttgaagtagctaggttacttcttgacagcggtgcccaagtgaacatgcctgctgattcatttgagtcaccattaactttggctgcatgtggtgggcatgtggaacttgcggctttacttattgaaagaggagctagcctggaagaggtcaatgatgaaggttatacaccattgatggaagcagctcgagaaggacatgaagaaatggtggcattacttcttggtcaaggagcaaatatcaatgcacagacagaagaaactcaagaaactgccttgactctggcttgctgtggaggctttctggaagtggcagactttctaattaaggcaggagccgatatagaactagggtgttctacccctttaatggaagctgctcaagagggtcatttggagttagttaaatacttattagctgcaggagctaacgttcatgcaacaacagcaacaggggatacagcactaacatatgcctgtgaaaatggtcatactgatgtagcagatgtcttacttcaggcaggcgcagatctggaacatgaatctgaaggtggaagaactcctttaatgaaagctgcaagagctggtcatgtttgtactgttcagttcttaattagtaaaggagcgaatgtgaatagaaccacagctaataatgaccatactgtactgtccctggcttgtgcagggggtcatctggcagtggtggaactacttttggctcatggggcagatcctactcaccgtttgaaagatggctcaactatgttgatagaagcagcaaaaggtggccatacaagtgttgtttgctatctcttggattatcctaataacttgctttcagcccctccaccagatgtcactcagttaactcccccatcccacgatttaaatagggctcctcgtgtaccagttcaagcactgcccatggttgttccacctcaggagcctgacaaaccacctgccaatgttgccaccactcttcccatcaggaataaagctgcttctaaacaaaagtccagcagccatttgccagcaaacagccaggatgtacagggttacatcaccaatcagtctccagagagcattgtagaagaggctcagggaaagttaacagaactggaacagaggataaaagaagccatagaaaagaatgcacagctgcagtccttggaactggctcatgctgaccaacttaccaaggagaagatcgaggagctcaacaaaacaagggaggaacaaattcagaagaaacaaaagattttggaggaactacagaaagtagaacgagagttacaactgaaaactcagcagcagctaaaaaagcagtatctagaggttaaagctcaaagaattcaacttcagcaacagcagcaacagtcttgccaacacctgggattactaactcctgttggagttggagagcagctttctgagggagactatgcacggttacagcaagtggatcctgttttacttaaagatgaaccccagcagactgctgctcagatgggttttgcgccaatccagcctctggcgatgcctcaagctttgcctctggcggcaggtcccttgcctccagggtccatcgcaaatcttacagaactgcaaggagtgatagttggacagccagtactgggccaagcacagttggcagggctggggcaaggaattctgacagaaacacaacaagggttaatggtagccagccctgctcagaccctcaatgacacgctggatgacatcatggcagcagtcagtggaagagcatctgcaatgtcaaacactcctacccacagtattgctgcatccatttcccaacctcagactccaactccaagtcctatcatctctccttcagccatgcttcctatctaccctgccattgatattgatgcacagactgagagtaatcatgacacggcgctaacacttgcctgtgctggtggccacgaggaactggtacaaacactgctagagagaggagctagtatagagcaccgagacaagaaaggttttactccactcatcttggctgccacagctggtcatgttggtgttgtggaaatattgctggacaatggtgcagacattgaagcccagtctgaaagaaccaaggacacaccactctccttggcttgttctgggggaagacaggaggtggtggagctattgttagctcgaggggcaaataaagagcacaggaatgtttctgattacacacctctaagtctggctgcttctggtggctatgtgaacatcatcaaaatattactaaatgcaggagctgagattaactctagaactggtagcaaattgggcatctctcctctgatgttagcagctatgaatgggcatacagctgctgttaagctcctgttagacatgggctctgacataaatgctcagatagaaaccaatcggaacactgcccttactttagcctgcttccaaggaagaactgaagtggttagtcttctgcttgatagaaaagcaaatgttgaacacagagctaagactggtctcacaccactaatggaagctgcctctggtggatatgcggaggtgggccgagttcttttggataaaggtgctgatgttaatgcccctccagttccctcctcaagagatacagctttaaccatagcagcagataaagggcattacaaattctgtgagcttcttattggcaggggagctcatattgatgtacgtaacaagaaggggaacactccattgtggctagcagcaaatggtggacacctcgatgtggttcagttactggtgcaagcaggtgcagatgtggatgcagcagataaccgcaagataactcctcttatggcagcatttagaaagggtcatgtgaaggtggtgcgctacttagtcaaagaagtcaatcagtttccatcagattctgaatgtatgagatacatagcaaccatcactgataaggagatgctgaagaagtgtcatctttgtatggagtcaatagtacaagccaaagatagacaggctgctgaagcaaacaaaaacgccagcattttgttagaggagttagacttggaaaagttaagggaagaaagtcggaggctggctttggctgcgaaaagagaaaaaagaaaagagaagagaaggaagaaaaaggaagaacaaagaaggaaactagaagaaattgaagccaaaaataaagagaactttgaactccaagctgctcaagaaaaagaaaagcttaaagttgaagatgagcctgaagtcttgacagaacctccaagtgccacaaccactactaccataggtatatctgcaacctggacaactttggcaggttctcatggtaaaagaaataataccataactacaaccagttcaaagaggaaaaacaggaaaaataaaattactccagaaaacgttcaaattatatttgatgatccactaccaatttcatacagtcagccagagaaggtgaatggagagtccaagagcagcagtaccagcgagagtggggacagtgataacatgaggatttccagctgcagcgatgaaagtagtaacagcaacagcagtcgtaagagtgacaatcattcaccagctgtggtcactaccactgtgagcagcaaaaagcagccatcagttcttgttacatttccaaaggaagagagaaaatctgtttctggcaaggcttcaataaaattgtcagaaactatcagtgaagggaccagtaattctctatctacttgtacaaaatctggtccatctcccctttcttctccaaatgggaagttaacagtagcaagtcctaagcgtgggcaaaagagggaagaaggatggaaagaagttgtaagaaggtcaaagaaagtatctgttccatcaactgtgatatccagagtgattggaagaggaggctgtaatatcaatgctattcgggagtttactggtgcacacatagatattgataaacagaaagacaagactggagaccggataatcactataaggggtggcactgaatcaacaagacaagcaactcaattgattaatgctttgatcaaggatccagacaaagaaattgatgaacttattccaaagaatcgtttgaaaagctcctcagcaaattccaaaatagggtcatcagcacctaccaccactgctgctaacacttccttaatgggaattaaaatgacaactgtagctctgtcatcaacatctcaaactgccacagcactcactgtgcctgcaatttcttctgcatccactcacaaaaccattaagaacccagtgaataatgtgaggcctggttttccagtttctcttccattagcatatcctcctccacagtttgcacatgctttgcttgctgctcagactttccagcagatccgtccaccaaggttgcccatgacccactttggaggtacttttccaccagctcaatccacttggggtccgtttcctgtcaggcctttgagccctgccagagctactaactcgcctaagcctcacatggtgcctcgccatagcaatcagaatagcagtggttctcaggtgaattcagcaggttctttaacttcaagcccaacaactacaaccagttcatcagcttcaacggtgcctggtacatctacaaatggcagtccaagttcaccttctgtccgaaggcagctttttgtcacagttgtgaagacatccaatgccaccacaacaacagtcacaaccacggcaagcaacaacaacactgcacccacaaatgccacatatcctatgcctactgccaaagaacactatccagtatcatccccatcttccccatcaccaccagcccagccaggaggggtttctagaaacagccctttggattgtggatcagcatctccaaataaagtggcatcttcctccgaacaggaagcaggtagtccaccagtagtagaaacaacaaacactagacctccaaacagcagcagttcttctgggagttcatcagctcattctaatcagcaacaacctccgggatctgtttctcaggaaccaagaccacctcttcagcagtctcaggttcctcccccggaagttagaatgactgttcctcctttagcaacaagttctgctccagtggcggtgccttctactgccccagtgacttaccctatgcctcagacaccaatgggatgcccccagcctactcctaaaatggaaacccctgctattagaccaccccctcatggcacaactgcccctcacaagaattcagcttcagtgcaaaattcatctgttgcagtcctcagtgtcaatcacattaaaagacctcacagtgttccctcttctgtccagctaccttcgaccttaagtacacaaagtgcttgtcagaattcagtacatccagcaaataagcctattgctcccaatttcagtgcccccttaccatttgggccctttagcacattgtttgaaaacagccctacttctgctcatgccttctggggaggatctgttgtttcatctcagtcaacaccagaatctatgctatcaggaaaatcctcatatttgccaaattcagatcctttacatcagtctgatacttccaaagctccaggttttagaccaccattacagagacctgctccaagtccctcaggtattgtcaatatggactcgccatatggttctgtaacaccttcttcaacacatttgggaaactttgcttcaaacatttcaggaggtcagatgtacggacctggggcaccccttggaggagcacccgcagctgctaactttaacagacaacatttttccccgcttagtttgttgactccgtgttcatcagcatcaaatgattcttctgcacagtcagtatcctcgggagttcgtgcaccatctcctgccccatcatcagtaccgttagggtcagaaaagcccagcaatgtgtctcaggacaggaaagttccagtccctattgggactgaacgttctgcacgtatcaggcaaactggaacgtcagctccatctgttattgggagcaatttgtctacatcagtaggacatagtggcatctggtcctttgaagggattggtggcaatcaagacaaagtagactggtgtaaccctgggatgggaaatcctatgatccacagaccgatgtctgacccaggagtattttcacaacatcaagcaatggagcgagatagtacaggaattgtaactccttctggtacattccatcagcatgttcctgcaggctacatggactttcctaaagttgggggtatgcctttttctgtgtatgggaatgcaatgattcctccagtagcacctatccctgatggtgctggaggacccatatttaatggccctcatgctgcagacccttcttggaactcactgataaagatggtttccagctccacggaaaataatggccctcaaacggtgtggactggaccctgggcacctcacatgaacagtgtgcatatgaaccagcttggctgatgaggatcagcttgttagcctgcagattccttttcatttggaggaaatcacaagtggccgaaaaaaaaaattatgctcccaaatcattctactgatgtgcttgactgaagtgtgtaggctttttgcagaagatcttactaactgacctattttctgtgaacatttgtgactgcccattccccatcatcatccgttttaccttagttagcatttttcttatcatttttctttttttctttccctcttcccctttggacataactttctgttgaagctgttctttggctggttggttttagtactgtaaactgcttctgagcaaacacggaaatttagcaaaattatgtaaacttgatcctgaagttttagaatggcaaataaatgtacaattgtttacataacagaaaaggctaagcagaaagtaaatttcaatatgtcagtatagaggctctactttatgtagacttaaattaatgtgagatatgtaccttcatattcagaaatctggatgtttccttcatacattaaactattaataagcataacttttctactggtgtaatttaagtataaagtaaaataatgggcattatcattggatgtttccccacattggcttttaaaatacccatcttgctttctttttggtttatttgtagcaaggcacatatagaagaagaaatttctggcttttccatgttgttttattaccttttctcacttttaaaactaatacagacttatctcctcactcctttttctctccttacctttaccactaataccagtaaaattatctttctgatagtgaaaaggttctgtcaagattttcactgtaatggctgctacagagatggaccatcttcatcatcaccagtggtttcttctaattataaaatgtttaaactttctgagaatttaaaaagccaccactgttcccagtcagcatatacaagctcttaatattctgtttattaaataattcaatgtactattttatattggatgatattgattcttaacattggcttttcagtcatcaacagtcaacataaaaatttcaattttcagtaatttagtggaaaatatcttatttcttttttcaattttaaaggcttcctgcttttttacccttgtatattatcagtgaaaaggatcaacagttaatttgagccaagtaataaaagaaattctgcatttgtcacgaagacaatttatggtagacagataaatacacagattacagtgtaaagtctccatttaacctgtttataaaagatacaaggccacactaaactactcagtgggatttatatattccatccacttgaaacaataaacagtaatgtatccaagaagattatgtgtcctaccctgtctcatggaaaaattaattatatggttgaaatgtaaaagaaagtaagcataaaaatcgagtaatgtataaaaaaaaaaaaaaaa

SEQ ID NO: 780 - DNA, 8637 bp, Homo sapiens
gaggcggtggcggcggaggcggcaccgattgctgtgtcggccccagtgcggccgaagtcgcggtagagcgtagccccacgcccctcccccgtccgcgccctccctctttccctggggatggagaaggcgacggttccggtggcggcggcgacggctgcagaaggagaagggagccccccggcggtggcggctgtggcgggcccccccgcggcggcggaggtcggcggcggcgttggcggcagcagcagagctcgctcggcctcgtctcctcgtgggatggtgcgagtctgcgacctgctcctgaagaagaagccgccgcagcagcagcaccacaaggccaagcgtaaccggacttgccgaccccccagcagcagcgaaagcagcagcgacagcgacaacagcggcggcggtggaggcggcggtggaggcggaggtggcggcggcggcaccagcagtaacaacagcgaggaagaagaggacgacgacgacgaggaagaggaggtttctgaggtggagtctttcattttggatcaggatgatttggaaaatccaatgctggaaacagcttccaagttgctcttatcaggtactgctgatggtgcagacctcaggacagtagatccagaaacacaggctagactggaagctttactagaagctgcaggaataggaaaattgtccacggctgatggtaaagcctttgcagatcctgaagtacttcggaggttgacatcgtctgttagttgtgcgttggatgaagctgctgctgcacttacccgtatgagagctgaaagcacagcaaatgcagggcagtcggacaaccgcagtttggcagaagcctgttcagaaggagatgtaaatgctgtgcgaaagttactcattgaagggcgaagtgtaaatgaacacacagaggaaggggagagcctcctttgtttagcttgttctgctggatactatgagcttgcacaggttttgttggcaatgcatgcaaatgtggaagataggggaatcaaaggtgacattacacctttaatggctgctgctaatggaggacatgtcaaaattgtgaagttgctgctagctcataaagcagatgttaatgcacagtcttcaacaggcaatacagcacttacatatgcttgtgctggaggctatgtagatgttgtaaaggtgctcttggaatccggtgctagtattgaggaccataatgaaaatggtcatacccctcttatggaagctggaagtgctggacatgtggaagtagccagattgctgctagaaaatggggctggcattaatacgcattctaatgaatttaaagagagtgcccttaccttagcttgttacaaaggacacttagagatggtgcgatttcttttggaagcaggcgcggatcaagagcataaaacagatgaaatgcacactgctctgatggaggcttgcatggatggccatgttgaagtagctaggttacttcttgacagcggtgcccaagtgaacatgcctgctgattcatttgagtcaccattaactttggctgcatgtggtgggcatgtggaacttgcggctttacttattgaaagaggagctagcctggaagaggtcaatgatgaaggttatacaccattgatggaagcagctcgagaaggacatgaagaaatggtggcattacttcttggtcaaggagcaaatatcaatgcacagacagaagaaactcaagaaactgccttgactctggcttgctgtggaggctttctggaagtggcagactttctaattaaggcaggagccgatatagaactagggtgttctacccctttaatggaagctgctcaagagggtcatttggagttagttaaatacttattagctgcaggagctaacgttcatgcaacaacagcaacaggggatacagcactaacatatgcctgtgaaaatggtcatactgatgtagcagatgtcttacttcaggcaggcgcagatctggaacatgaatctgaaggtggaagaactcctttaatgaaagctgcaagagctggtcatgtttgtactgttcagttcttaattagtaaaggagcgaatgtgaatagaaccacagctaataatgaccatactgtactgtccctggcttgtgcagggggtcatctggcagtggtggaactacttttggctcatggggcagatcctactcaccgtttgaaagatggctcaactatgttgatagaagcagcaaaaggtggccatacaagtgttgtttgctatctcttggattatcctaataacttgctttcagcccctccaccagatgtcactcagttaactcccccatcccacgatttaaatagggctcctcgtgtaccagttcaagcactgcccatggttgttccacctcaggagcctgacaaaccacctgccaatgttgccaccactcttcccatcaggaataaagcagtcagtggaagagcatctgcaatgtcaaacactcctacccacagtattgctgcatccatttcccaacctcagactccaactccaagtcctatcatctctccttcagccatgcttcctatctaccctgccattgatattgatgcacagactgagagtaatcatgacacggcgctaacacttgcctgtgctggtggccacgaggaactggtacaaacactgctagagagaggagctagtatagagcaccgagacaagaaaggttttactccactcatcttggctgccacagctggtcatgttggtgttgtggaaatattgctggacaatggtgcagacattgaagcccagtctgaaagaaccaaggacacaccactctccttggcttgttctgggggaagacaggaggtggtggagctattgttagctcgaggggcaaataaagagcacaggaatgtttctgattacacacctctaagtctggctgcttctggtggctatgtgaacatcatcaaaatattactaaatgcaggagctgagattaactctagaactggtagcaaattgggcatctctcctctgatgttagcagctatgaatgggcatacagctgctgttaagctcctgttagacatgggctctgacataaatgctcagatagaaaccaatcggaacactgcccttactttagcctgcttccaaggaagaactgaagtggttagtcttctgcttgatagaaaagcaaatgttgaacacagagctaagactggtctcacaccactaatggaagctgcctctggtggatatgcggaggtgggccgagttcttttggataaaggtgctgatgttaatgcccctccagttccctcctcaagagatacagctttaaccatagcagcagataaagggcattacaaattctgtgagcttcttattggcaggggagctcatattgatgtacgtaacaagaaggggaacactccattgtggctagcagcaaatggtggacacctcgatgtggttcagttactggtgcaagcaggtgcagatgtggatgcagcagataaccgcaagataactcctcttatggcagcatttagaaagggtcatgtgaaggtggtgcgctacttagtcaaagaagtcaatcagtttccatcagattctgaatgtatgagatacatagcaaccatcactgataaggagatgctgaagaagtgtcatctttgtatggagtcaatagtacaagccaaagatagacaggctgctgaagcaaacaaaaacgccagcattttgttagaggagttagacttggaaaagttaagggaagaaagtcggaggctggctttggctgcgaaaagagaaaaaagaaaagagaagagaaggaagaaaaaggaagaacaaagaaggaaactagaagaaattgaagccaaaaataaagagaactttgaactccaagctgctcaagaaaaagaaaagcttaaagttgaagatgagcctgaagtcttgacagaacctccaagtgccacaaccactactaccataggtatatctgcaacctggacaactttggcaggttctcatggtaaaagaaataataccataactacaaccagttcaaagaggaaaaacaggaaaaataaaattactccagaaaacgttcaaattatatttgatgatccactaccaatttcatacagtcagccagagaaggtgaatggagagtccaagagcagcagtaccagcgagagtggggacagtgataacatgaggatttccagctgcagcgatgaaagtagtaacagcaacagcagtcgtaagagtgacaatcattcaccagctgtggtcactaccactgtgagcagcaaaaagcagccatcagttcttgttacatttccaaaggaagagagaaaatctgtttctggcaaggcttcaataaaattgtcagaaactatcagtgaagggaccagtaattctctatctacttgtacaaaatctggtccatctcccctttcttctccaaatgggaagttaacagtagcaagtcctaagcgtgggcaaaagagggaagaaggatggaaagaagttgtaagaaggtcaaagaaagtatctgttccatcaactgtgatatccagagtgattggaagaggaggctgtaatatcaatgctattcgggagtttactggtgcacacatagatattgataaacagaaagacaagactggagaccggataatcactataaggggtggcactgaatcaacaagacaagcaactcaattgattaatgctttgatcaaggatccagacaaagaaattgatgaacttattccaaagaatcgtttgaaaagctcctcagcaaattccaaaatagggtcatcagcacctaccaccactgctgctaacacttccttaatgggaattaaaatgacaactgtagctctgtcatcaacatctcaaactgccacagcactcactgtgcctgcaatttcttctgcatccactcacaaaaccattaagaacccagtgaataatgtgaggcctggttttccagtttctcttccattagcatatcctcctccacagtttgcacatgctttgcttgctgctcagactttccagcagatccgtccaccaaggttgcccatgacccactttggaggtacttttccaccagctcaatccacttggggtccgtttcctgtcaggcctttgagccctgccagagctactaactcgcctaagcctcacatggtgcctcgccatagcaatcagaatagcagtggttctcaggtgaattcagcaggttctttaacttcaagcccaacaactacaaccagttcatcagcttcaacggtgcctggtacatctacaaatggcagtccaagttcaccttctgtccgaaggcagctttttgtcacagttgtgaagacatccaatgccaccacaacaacagtcacaaccacggcaagcaacaacaacactgcacccacaaatgccacatatcctatgcctactgccaaagaacactatccagtatcatccccatcttccccatcaccaccagcccagccaggaggggtttctagaaacagccctttggattgtggatcagcatctccaaataaagtggcatcttcctccgaacaggaagcaggtagtccaccagtagtagaaacaacaaacactagacctccaaacagcagcagttcttctgggagttcatcagctcattctaatcagcaacaacctccgggatctgtttctcaggaaccaagaccacctcttcagcagtctcaggttcctcccccggaagttagaatgactgttcctcctttagcaacaagttctgctccagtggcggtgccttctactgccccagtgacttaccctatgcctcagacaccaatgggatgcccccagcctactcctaaaatggaaacccctgctattagaccaccccctcatggcacaactgcccctcacaagaattcagcttcagtgcaaaattcatctgttgcagtcctcagtgtcaatcacattaaaagacctcacagtgttccctcttctgtccagctaccttcgaccttaagtacacaaagtgcttgtcagaattcagtacatccagcaaataagcctattgctcccaatttcagtgcccccttaccatttgggccctttagcacattgtttgaaaacagccctacttctgctcatgccttctggggaggatctgttgtttcatctcagtcaacaccagaatctatgctatcaggaaaatcctcatatttgccaaattcagatcctttacatcagtctgatacttccaaagctccaggttttagaccaccattacagagacctgctccaagtccctcaggtattgtcaatatggactcgccatatggttctgtaacaccttcttcaacacatttgggaaactttgcttcaaacatttcaggaggtcagatgtacggacctggggcaccccttggaggagcacccgcagctgctaactttaacagacaacatttttccccgcttagtttgttgactccgtgttcatcagcatcaaatgattcttctgcacagtcagtatcctcgggagttcgtgcaccatctcctgccccatcatcagtaccgttagggtcagaaaagcccagcaatgtgtctcaggacaggaaagttccagtccctattgggactgaacgttctgcacgtatcaggcaaactggaacgtcagctccatctgttattgggagcaatttgtctacatcagtaggacatagtggcatctggtcctttgaagggattggtggcaatcaagacaaagtagactggtgtaaccctgggatgggaaatcctatgatccacagaccgatgtctgacccaggagtattttcacaacatcaagcaatggagcgagatagtacaggaattgtaactccttctggtacattccatcagcatgttcctgcaggctacatggactttcctaaagttgggggtatgcctttttctgtgtatgggaatgcaatgattcctccagtagcacctatccctgatggtgctggaggacccatatttaatggccctcatgctgcagacccttcttggaactcactgataaagatggtttccagctccacggaaaataatggccctcaaacggtgtggactggaccctgggcacctcacatgaacagtgtgcatatgaaccagcttggctgatgaggatcagcttgttagcctgcagattccttttcatttggaggaaatcacaagtggccgaaaaaaaaaattatgctcccaaatcattctactgatgtgcttgactgaagtgtgtaggctttttgcagaagatcttactaactgacctattttctgtgaacatttgtgactgcccattccccatcatcatccgttttaccttagttagcatttttcttatcatttttctttttttctttccctcttcccctttggacataactttctgttgaagctgttctttggctggttggttttagtactgtaaactgcttctgagcaaacacggaaatttagcaaaattatgtaaacttgatcctgaagttttagaatggcaaataaatgtacaattgtttacataacagaaaaggctaagcagaaagtaaatttcaatatgtcagtatagaggctctactttatgtagacttaaattaatgtgagatatgtaccttcatattcagaaatctggatgtttccttcatacattaaactattaataagcataacttttctactggtgtaatttaagtataaagtaaaataatgggcattatcattggatgtttccccacattggcttttaaaatacccatcttgctttctttttggtttatttgtagcaaggcacatatagaagaagaaatttctggcttttccatgttgttttattaccttttctcacttttaaaactaatacagacttatctcctcactcctttttctctccttacctttaccactaataccagtaaaattatctttctgatagtgaaaaggttctgtcaagattttcactgtaatggctgctacagagatggaccatcttcatcatcaccagtggtttcttctaattataaaatgtttaaactttctgagaatttaaaaagccaccactgttcccagtcagcatatacaagctcttaatattctgtttattaaataattcaatgtactattttatattggatgatattgattcttaacattggcttttcagtcatcaacagtcaacataaaaatttcaattttcagtaatttagtggaaaatatcttatttcttttttcaattttaaaggcttcctgcttttttacccttgtatattatcagtgaaaaggatcaacagttaatttgagccaagtaataaaagaaattctgcatttgtcacgaagacaatttatggtagacagataaatacacagattacagtgtaaagtctccatttaacctgtttataaaagatacaaggccacactaaactactcagtgggatttatatattccatccacttgaaacaataaacagtaatgtatccaagaagattatgtgtcctaccctgtctcatggaaaaattaattatatggttgaaatgtaaaagaaagtaagcataaaaatcgagtaatgtataaaaaaaaaaaaaaaa

SEQ ID NO: 781 - DNA, 2911 bp, Homo sapiens
cgccagcggtggcgcaacggctctcgtccccgccctcctgctacctgtagtcgcctgggccgcccccggcccagccctgccttgcgccaccctgcgctgtccagactgaggggtcaggcggagagccgggccgcgcccttcggtcagcttctctccctttcacccgcgcctcctcgcgagacccggggctgggccgtgcccgtcgccgcgcagcaggaagggagcggctgccacggaaaacgcctggccggacggtgtggctggcggccctgcctgggcgcggagggcggcggtggcgggccccgcggccttctctcagcttcctttctcctcacgacggcctccacagtccggagcccggcggagcccggacctggcggggagagctgcctccacggccgggcacccagaccccaccgtcgcagtcgccaccacctcagtccatccttggtaccggcaatgggcttcgtatcctccagtgcacttgtaactgacttggacacggaatactaagaactcacttctgtcctcatcccagtcgcgccggcggtgaccatctcggctcttttgggcttaactgccgctcctctggactctgtctgactttgggggcaccatggaccaaagtgggatggagattcctgtgaccctcatcattaaagcaccgaatcagaaatacagtgaccagactattagctgcttcttgaactggaccgtggggaaactaaaaacgcatctatctaacgtttaccctagcaaaccattgacgaaggatcagagattggtgtattcgggcagactgcttcccgatcatctgcagctgaaagacattctcagaaaacaagatgagtatcatatggttcatctagtatgtacttctcggactcctcccagttctccaaaatccagcaccaatagagaaagtcatgaagcattgacatccagcagcaattctagttcagatcattcaggatcaacaactccatcatctggtcaagaaaccttgtctttagctgtgggttcttcctcagaaggattgaggcagcgtacccttccacaagcacaaactgaccaagcacagagtcaccagtttccatatgtaatgcaaggaaatgtagacaaccaatttcctgggcaagctgctccacctggattcccagtgtatcccgcgtttagcccactgcagatgctatggtggcaacagatgtatgctcatcagtattatatgcagtatcaagctgcagtttcagctcaggccacatcaaatgtcaacccaacccagcctactacttcacagcctctaaatttggcacatgttcctggagaagaacccccaccagctccaaacctagtggcccaagaaaatcgacccatgaatgagaatgttcaaatgaatgcacagggaggtccagtactaaatgaagaagacttcaatcgagactggctagactggatgtacacgttctcacgagctgcgattctccttagcattgtatacttctattcttcttttagtcggtttatcatggtaatgggagccatgctactggtttatttacaccaagctggatggtttccttttaggcaagaaggaggtcatcagcaggctcccaacaataatgccgaagttaacaatgatgggcaaaatgcaaacaacttggaacttgaagaaatggagcgtcttatggatgatgggcttgaagatgagagtggagaagatggaggtgaagatgccagtgcaattcaaaggcctggattaatggcttcagcttggtctttcatcaccaccttctttacttcactaataccagaggggcctccccaggttgccaattgacctgaaaaactgtgccagctacaaggagggtctgacttcaggaaagtggtttaaataacagtgcaatttcaaaaaaatttataactttcttttgatcatcatgtacagaggtgttttttttctttaggcttctcatgcatatgaatattttaagcacgaatggactactaaatatctgagttttttttttttttttttaaagatcctaacagaacatagcgtaacaatattggtcttccaggtgttactcatttcaattatgtgtagtataccaggacagacctattttcatgtcttatttctttaaagagctgcttcattggccgggcgccatggctcacgtctgtaatcccagcactttgggaggccgaggcgggtgggttacttgaggtcaggagttcgagaccagcctggcaaacatggcgaaaccccatcttaactaaaaatacaaaaaaattagccgggtgtggtgtcacgcgcctgtaatcccagctacttggggggctcaggcaggagaattgcctgaacccaggaggcggaggttgcagtgagctgagattgggccactgcactccaccctgggcgacagagtgagactcggtctcagaaaaaaaaaaaaaagagctgcttcacatataaatgtctatagctagtagcctggccctttaatgtttaatttgaatagatatatctgttttccgtgaattatcttgaaagttttaaacagaatgacctcatagtttttaataaagaatattatttacctaaaatgtgctagtagcatcttgcccagccataaagcaataaacttctcaataatcttaattttgatatttgaataaataatggaaactttctgtattaagggcatgtatcccatcaattggaatcagtaccttaacagaaaaaggcagctcttcaatggaattaacgtgatataaaatgtttgatataggcagtacttttataaaaaaagataagctggaaattgctccgtgtaattttttaaataaaaagtcaattatggtaaaaaaaaaaaaaaaaaaaaaaaaaaaaaaaaaaaaaaaaaaaaaa

SEQ ID NO: 782 - DNA, 1825 bp, Homo sapiens
gaagccggggccggggctgcggggcgagttgtcggccctgggccgggagctggagtcccagactcataggtcccggcccagcccccgaagagccgcctcagccggggggagttgctcggactcaaacgtccagtcctcgtgcgaccgcgctgggtcggaagtgagcaggctgaggccaccatggagcagtgtgcgtgcgtggagagagagctggacaaggtcctgcagaagttcctgacctacgggcagcactgtgagcggagcctggaggagctgctgcactacgtgggccagctgcgggctgagctggccagcgcagccctccaggggacccctctctcagccaccctctctctggtgatgtcacagtgctgccggaagatcaaagatacggtgcagaaactggcttcggaccataaggacattcacagcagtgtatcccgagtgggcaaagccattgacaggaacttcgactctgagatctgtggtgttgtgtcagatgcggtgtgggacgcgcgggaacagcagcagcagatcctgcagatggccatcgtggaacacctgtatcagcagggcatgctcagcgtggccgaggagctgtgccaggaatcaacgctgaatgtggacttggatttcaagcagcctttcctagagttgaatcgaatcctggaagccctgcacgaacaagacctgggtcctgcgttggaatgggccgtctcccacaggcagcgcctgctggaactcaacagctccctggagttcaagctgcaccgactgcacttcatccgcctcttggcaggaggccccgcgaagcagctggaggccctcagctatgctcggcacttccagccctttgctcggctgcaccagcgggagatccaggtgatgatgggcagcctggtgtacctgcggctgggcttggagaagtcaccctactgccacctgctggacagcagccactgggcagagatctgtgagacctttacccgggacgcctgttccctgctggggctttctgtggagtccccccttagcgtcagctttgcctctggctgtgtggcgctgcctgtgttgatgaacatcaaggctgtgattgagcagcggcagtgcactggggtctggaatcacaaggacgagttaccgattgagattgaactaggcatgaagtgctggtaccactccgtgttcgcttgccccatcctccgccagcagacgtcagattccaaccctcccatcaagctcatctgtggccatgttatctcccgagatgcactcaataagctcattaatggaggaaagctgaagtgtccctactgtcccatggagcagaacccggcagatgggaaacgcatcatattctgattcctacctggaaggaattttgttgaaaggggttttcacctgtgagccttggtctgtctcggtagggtggtcaacttcagtggactgtggttggtttcagagcgcctggctgaggagttccactgaggggagcactggagcagccctttggcagaggctgaggagggagatggaccagcccacgcctggcacctggctccatggcataaggaaagggagatgctggcctctgtgctcctgctgtcttttcctgtttctgtttgcgtttgacttagtagcaaccgacagagtggcaagggatttggtcttcagcagtagacatccttccacccctgccctcagccaagtctcttgctgccatgccaatgctatgtccacccttgcccctcggcccaagagtgtccagcggtggcccacctcttcctcccactacagcctcaacagtaaaaaaaaaaaaaaaaaa

SEQ ID NO: 783 - DNA, 2225 bp, Homo sapiens
ggaagtggaagtggaagtagaaggcggtggctgaggcggttccggaggttctagtgtcggagttgggtgcaggcaggtgccatgggcccgcttgaggcacactgaggggacgcggggctgggccatggccggcgctcgggccgccgccgccgctgcctcggcggggtcctcggcctcttcaggcaaccagccgcctcaggagctggggcttggggagctgctggaggagttctcccggactcagtaccgggccaaggatggcagcgggaccggcggctctaaggttgagcgcattgagaagagatgtctggagctgtttggccgagactactgtttcagcgtgattccaaacacgaatggggatatctgtggccactatccccggcacatcgtgttcctggagtatgagagttctgagaaggagaaagacacgtttgagagtaccgtacaggtgagcaagttgcaagacctcatccaccgcagcaagatggcccggtgcagaggacggtttgtctgcccagtaatcctgttcaagggcaagcacatttgcaggtcggccacactggctggatggggagagctgtatggacgctcaggctacaactattttttctcagggggtgcagatgatgcctgggcagatgtggaggacgtcacggaggaggactgtgctcttcgaagtggtgacacgcatctttttgataaggtcagaggctatgacatcaagctgcttcgatacctgtcagtcaaatacatctgtgacctgatggtggagaacaagaaggtgaagtttggcatgaatgtaacctcctctgagaaggtggacaaagcccagcgctatgccgacttcactctcctctccatcccgtatccaggctgtgaatttttcaaggaatataaagatcgggattacatggcagaagggctcatatttaactggaagcaggactacgttgatgccccattgagcatccccgacttcctgactcactctctgaacattgactggagccagtatcagtgttgggatctggtgcaacaaacacaaaactacctgaagctgctgctttccttagttaacagtgatgatgacagcgggctgctggtacactgtatctcaggctgggatcggacccccctcttcatctccctcctgcgcctttccttgtgggctgatgggctcatccacacgtccctgaagcccactgagatcctctacctcactgtggcctatgactggttcctcttcgggcacatgttggtagatcggctcagcaaaggggaggagattttcttcttctgcttcaattttttgaagcatattacctccgaggagttctctgctctgaagacccagaggaggaagagtttgccagcccgggatggaggcttcaccctggaagacatctgcatgctgagacgaaaggaccgtggcagcaccaccagccttggcagcgacttctccctggtcatggagagttccccaggagccactgggagcttcacctatgaggccgtggagctggtcccagcaggagcgccaactcaggcagcttggcttgcagccctgagtgatcgagagactcggctgcaggaggtgcgctcagccttcttggctgcgtacagcagcacagtggggcttcgggcagtagcccccagtccttccggtgccatcgggggcctgctggagcaatttgcccgtggtgttggactccggagcatcagcagcaatgccttgtgaagaagccagcccatgacattttcctgctcctctctcagctgagcccttagcagagaatcaaagccatgcctggccgaaggggtacttccaggtcaggggaaatttcagtcccccatctccatcatgaacatggcagccccaaagctgagcaaggccaaagacagggttttccaacccccagcctcttgactggtgaccaccaccccttcttgtcactgtctcccacccaccccatctttgctgggattcccatcaactctcagaactgtgtggggtttccctggggccttgtggaagccatgacttcacaaagaccctacctgtcagttcttgtttctggggaggagggatcacctgcactgagaatgaggcagtttgacacagatcacaaaataaaatcaaagtctttttgaatagccaaaaaaaaaaaaaaaaaaaaaaaaaaaaaaaaaaaaaaaaaaaaaaaaaaaaaaaaaaaaaaaaa

SEQ ID NO: 784 - DNA, 2634 bp, Homo sapiens
attaggcggcgcggggcggccggcatggagctcccggaggcgcggcagggtcaggagctcggtggcatggcggcggtggctgccccgatttcctccagctgccactccttgcttcgtgtccccggtccctagacgcctcgtctcctcccgtgtccctcttcccatggagtcagtacggatcgaacagatgctgagcttgcccgctgaggtcagcagcgacaacttggagtcggcggagcgaggggcatcagcggcccaagtagacatgggcccccacccaaaggtggctgcagagggccccgcacctctaccgacgcgggagccagagcaagagcagtctccggggacctcaacgccggagagcaaagtcctgctcacgcaggcagacgccttggcgtcccgggggcgaatccgtgaagccctcgaggtgtatagacagctctccgagcggcagcagctggtggctgagcagctggagcagctggtgcgctgcctggcggagaaagtcccgcaaggcgaggcgctggcgccggcgcccccggacgagggtagcactgcaagcggcaccgtggcggcggaagagacgggggccgccgcggctgcggcggccaccgaggtgtgggacggctttaagtgccggaaatgtcatgggtttctatcagaccccgtgtccttgtcgtgtggccacaccttttgtaaactgtgcctggaacgtgggcgggccgccgaccggcgctgtgcgctgtgcggggtcaagctctccgccttgatggtggccactgggcgggcgcgtggagcccggcgggctgggcagcagccgccgccgccgctgcgagtcaacgtggtgctcagcggcctcctcggcaagttgtttccaggcccagcgcgagcgtcgcaactccggcacgagggcaaccgactgtaccgcgagcgccaggtggaggcggcactgctcaagtacaacgaggcagttaagttggctccaaatgaccacttgctttatagcaatcggtctcagatttatttcaccttggagtctcatgagaatgcactgcatgatgcagaaatagcatgtaagctccgcccgatgggttttaaggacaatctggagctcccacattgttctagtcaggaggaagcagcagccaggggagatggcagcagtctgatggacccagctaaagtgaagggggatggtcagcagcaccacatgaaagaccaggaagaagaggaggagaagtgggatgctacctctccaaaagctgcttccagcaagactggaaaatgccaggaaaagaaaaggaaacattgccagattgaatcccaagaagaaacggggatgcctaataaagcctccaagcaagatcctcccactgatcagggggacaaacctgctctcagtttaccacttgcatctttcgacgcatctgaccttgaatgcgctctatgtatgagattattctatgagccagtcacaacaccttgcgggcatactttttgcttaaaatgcctagaaagatgcctagatcacaacgcaaagtgtccattgtgcaaagacggtctttcacagtgcttggcatcaagaaaatacagcaaaaatgtaataatggaggagctcatagctaaattccttccagaagaactgaaggaacgaaggaagctttatgaagaggaaatggaagaactttctaaccttaataagaatgtgcctattttcgtgtgtactatggcctatcccaccgttccttgtcccctgcacatctttgagccttgttaccgcctgatgattcgtagatgcattgagacaggcacgagacagtttggcatgtgccttggagatcctgtcaaagggtttgcagaatatggctgcatcctagagatcagaaatgttcaattctttgctgatggccgctcagtggttgacagcataggcaagaggcgcttcagggtgctccatcagagccagcgggatggctacaacacagccgacattgaatacattgaagaccaaaaggttcagggagaggattgtgctgagctcatgggattacataactgtgtctatcagcaagcatcattgtggtttcattcgctcaaattatccctaaagaatcggatactcaatcactttggtcccatgccggagaaagacgccgatcctcagatgaacccgaatggcccagcctggtgctggtggatgttagcagttcttcccttggaaagccgagctcagctccccttcctagcaatgaggtccttaaaggacagactgaatggtattcgacgagtcctggccttcatatcccgaaaccaaaactagtgagtggattgccgaagaggagctcccaccttccccactgccgtcggggggagtcttcttgtaaatatatctaattgcaataatatcttaacagaagggggtgtcaaacagaggcatcagcctgctgttgatcacagagagaaattgagtagaaagaccaaaagaatgtgacctatttgaaactttctgtcttaagatgcttcttgacatgctgcataactacataaacagcagaggtgtttaagagcccagaaaaacataatttgattttaacattaaaatttccaaaagtttaaaaaaaaaaaaaaaaaaaa

SEQ ID NO: 785 - DNA, 1951 bp, Homo sapiens
gagcccggagcaggccgggctcaagaaagaggaaagttgaggacgccccacctcggagaggcggcgcccctgagtaggccaggagcctctcttgcaacttctgccaccgcgggccaccgcggccgcctgatcccgcagaggaaggtcgcggccgtggagcgatgacccgcggcggtccgggcgggcgcccggggctgccacagccgccgccgcttctgctgctgctgctgctgctgccgctgttgttagtcaccgcggagccgccgaaacctgcaggagtctactatgcaactgcatactggatgcctgctgaaaagacagtacaagtcaaaaatgtaatggacaagaatggggacgcctatggcttttacaataactctgtgaaaaccacaggctggggcatcctggagatcagagctggctatggctctcaaaccctgagcaatgagatcatcatgtttgtggctggctttttggagggttacctcactgccccacacatgaatgaccactacacaaacctctacccacagctgatcacgaaaccttccatcatggataaagtgcaggattttatggagaagcaagataagtggacccggaaaaatatcaaagaatacaagactgattcattttggagacatacaggctatgtgatggcacaaatagatggcctctatgtaggagcaaagaagagggctatattagaagggacaaagccaatgaccctgttccagattcagttcctgaatagtgttggagatctattggatctgattccctcactctctcccacaaaaaacggcagcctaaaggtttttaagagatgggacatgggacattgctccgctcttatcaaggttcttcctggatttgagaacatcctttttgctcactcaagctggtacacgtatgcagccatgctcaggatatataaacactgggacttcaacgtcatagataaagataccagcagtagtcgcctctctttcagcagttacccagggtttttggagtctctggatgatttttacattcttagcagtggattgatattgctgcagaccacaaacagtgtgtttaataaaaccctgctaaagcaggtaatacccgagactctcctgtcctggcaaagagtccgtgtggccaatatgatggcagatagtggcaagaggtgggcagacatcttttcaaaatacaactctggcacctataacaatcaatacatggttctggacctgaagaaagtaaagctgaaccacagtcttgacaaaggcactctgtacattgtggagcaaattcctacatatgtagaatattctgaacaaactgatgttctacggaaaggatattggccctcctacaatgttcctttccatgaaaaaatctacaactggagtggctatccactgttagttcagaagctgggcttggactactcttatgatttagctccacgagccaaaattttccggcgtgaccaagggaaagtgactgatacggcatccatgaaatatatcatgcgatacaacaattataagaaggatccttacagtagaggtgacccctgtaataccatctgctgccgtgaggacctgaactcacctaacccaagtcctggaggttgttatgacacaaaggtggcagatatctacctagcatctcagtacacatcctatgccataagtggtcccacagtacaaggtggcctccctgtttttcgctgggaccgtttcaacaaaactctacatcagggcatgccagaggtctacaactttgattttattaccatgaaaccaattttgaaacttgatataaaatgaaggagggagatgacggactagaagactgtaaataagataccaaaggcactattttagctatgtttttcccatcagaattatgcaataaaatatattaatttgtcactttaaaaaaaaaaaaaaaaaaa

SEQ ID NO: 786 - DNA, 1124 bp, Homo sapiens
aaatgcacaacccggacggaagtgcctctccgacagcagatccaggctcggagctccagacgctgggacaggccgcccgcagaccacccccgccgcgcgcgggacacgacgccccccgcaggacacgcccatcagcccggaaacccctgagctgcttctcccggaggccgatgcccacccgggagcccccaaagactcgcggctcccgggggcacctgcatactcacccgcctgggcctgggcccccgctgcagggactggcgccccgaggcctcaaaaccagcgccccccgccctccgtgccagccccagccgggaccccacaaggcaaagaccaagaagattgtgtttgaggatgagttgctctcccaggccctcctgggcgccaagaagcctattggagccatccctaaggggcataagcctaggccccacccagtgcccgactatgagcttaagtacccgccagtgagcagtgagagggaacggagccgctatgtcgcagtgttccaggaccagtacggagagttcttggagctccagcacgaggtggggtgtgcacaggcaaagctcaggcagctggaggccctgctgagctccctgcccccaccccaaagccagaaggaggcccaagttgcagcccgggtttggagggagtttgagatgaagcgaatggatcctggcttcctggacaagcaggctcgctgccactacctgaagggtaaactgaggcatctcaagactcagatccagaaattcgatgaccaaggagacagcgagggctccgtgtacttctaagtgcccctgcagatgggcagagggatgcatggggatgcaggtcccttgcatttcttggtatctctcagcttttcctcttgcagctccccctaccaggggtcgctttctcctggattgcaaatgcctcttcagtttggactcagctctgacagcccctcctccaggaaggccttccaggacttcctcctctgggtcctctagctctgaccctacagggactccagatctcaacctgttccctggaagtagggcctgctctccatcccagtgaaataaacatgtattagacacctaaaaaaaaaaaaaaaaaaaaaaaaaaaaaaaaaa

SEQ ID NO: 787 - DNA, 2073 bp, Homo sapiens
aagaaaattcgagggaaagaagtttacatgactatggcttacggcaagggagaccccctcctcccacccaggctgcagcacagtatgcattatgggcacgatcctccaatgcactactcacagacagctggcaatgttatgtctaatgaacattttcatcctcagcatccatctccgagacaaggtcggggatatgggatgcccaggaattcatctcggtttataaacaggcacaacatgccgggccctaaagttgatttttacccaggcccaggtaaaaggtgctgccagagctatgataacttctcttatagatctcgttcatttagacgtagtcaccgccagatgagttgtgtgaataaggagtcccagtatggatttaccccagggaatggacagatgcccaggggcttggaagaaactattactttttatgaagttgaagaaggggatgagactgcttatgcaacttttcctaatcatgaaggtccctctacaatggttcctgctacttcaggatactgtgttggaaggcggggacatagctcaggcaaacagactttgaatttagaggagggcaatggccagagtgaaaatgggcgatatcatgaagaatatctttatcgtgcagagccagactatgaaacttcaggtgtttatagcacaactgcatctacagcaaacttgtctcttcaggacagaaagtcatgttctatgtctcctcaggacacagttacctcatacaactacccccagaagatgatgggaaatattgcagcagttgcagcttcctgtgccaataatgttccagctccagtcttatctaacggtgcagcggctaatcaagctattagtaccacttcagtttcctcacagaatgctatacagcctctctttgtatctccacctacacacggcaggccagatacaaaagttttgcagtactatttcaatctaggattgcagtgctattaccacagctactggcactccatggtctatgtgccacagatgcagcagcagcttcatgtagagaattatccagtctatactgagccacctctggtagatcaaaccgttcctcaatgctacagtgaggtgaggagagaagatggcatacaggcggaagcatcagcaaatgatacttttccgaatgctgattcttcatctgtccctcatggagcagtctattatccagtaatgtcagatccctatgggcagccacctttgccaggttttgactcctgccttccggttgtgccagattattcctgtgttcccccctggcatccagttggtacagcatatggtggttcttctcaaattcatggtgctataaatcctgggccaattggctgtattgctccatctcccccagcttctcattatgtacctcagggtatgtaagatccagcagtatgaagtattcttgcactgccattttcttgctgtttttgtttttaaaaagtattttatgttagtggttaaatgatttaggtgattagtgtttactattgtatttgtctttaaaattattttatcttttgatttaaaatagtactttaaaattaaggggtattattttgggctgtgactaaggaaattgagatggatgtacaactagccccatattgagcatacttcattgtattcagctgttttcctgtcagccatttgtcagctttatattagctgatggtaccaattgataaaatgaatataaagtatttcattggttcaaaaatcacacatcatattaaaccatgcagaattggagtaacttccacttttttctagaaagtaaaaccaagagcctttgcttctggataactcacttaatattaaattaaagagctcttcacgtttcttgagaattatctgaagccagttgcattctgtgatatcagttttgaaggcacatggttctctgctttagatttatcccatatgctattgtttaatactggatgtatgtaagtgttttactgcactgtattgaattggtgtcttttgcacagttagcagtaaataaaaattagcatttaaaattgcaaaaaaaaaaaaaaaaaaaaa

SEQ ID NO: 788 - DNA, 2785 bp, Homo sapiens
ggctttcgggacggcggcgggaagatggcggcctccaggaatgggtttgaagccgtggaggcagagggcagcgcagggtgccggggaagctcgggaatggaggtggtgcttcctttggatcctgccgtccccgccccgctgtgccctcacggacccactcttctgtttgtaaaggtgacccaagggaaagaagaaactcggaggttttatgcctgttcagcctgtagagatagaaaagactgtaatttttttcagtgggaagatgaaaagttgtcaggagctagacttgctgcccgagaagctcataaccgaagatgtcagcctcccctgtcccgaacgcagtgtgtggaaaggtacttgaagtttattgagttgcccttgactcagagaaagttttgtcaaacatgtcagcagttgttgttaccagatgactgggggcaacatagtgagcatcaggttctgggtaatgtgtccattacccagttaagaaggcccagtcaactcctttatccactggaaaacaagaagacaaatgcccagtatctgtttgctgatcggagctgtcagttcttggtagacttactttctgccctcggattcagaagagtactgtgtgttggaacaccaaggttgcatgagctgatcaagttgacagcatcaggtgacaagaagtctaacattaaaagccttttattggatattgattttcggtattcacagttttatatggaagatagcttttgccattataatatgtttaaccatcatttctttgatggaaagactgcccttgaagtatgcagagcatttttacaggaagataaaggcgaaggaatcattatggtgacggatcctccgtttggtggcttggttgaacctctggctattacattcaagaagttaattgctatgtggaaagaaggtcaaagccaagatgacagtcacaaagaactacccattttctggattttcccctatttttttgaatcccgaatttgtcagttttttccaagcttccagatgctggattaccaggtagattatgataatcatgcactttataaacacggaaagacaggtcgaaaacagtctcccgtgcgtattttcaccaacattccgcccaacaaaataatccttcctactgaagaagggtacagattttgctctccgtgtcaacggtatgtttctctagagaatcaacactgtgagctctgtaattcttgcacatccaaggatggcaggaaatggaaccattgctttctctgtaaaaagtgtgtaaagccttcctggatccactgtagcatctgcaatcactgtgctgttccagatcattcttgtgagggccccaaacatggctgctttatttgtggtgaactggatcataaacgcagtacttgtcctaacattgctacatctaagagagctaacaaagctgtcagaaagcagaagcaaagaaaaagtaataagatgaaaatggagaccacgaaaggacaatccatgaatcatacatctgctacaaggagaaagaaaaggagggaaagagcccatcaatatcttggctcttaaatgtccagtgactggagaataagaaagatttatggtccaacctttgatgccattttctgaaagtgccacactggacttaaattcagctgcttccagaggtgtgcacctttctgagctagataacaggcaggtggcatttgctggtttacagtcccttatctgcctctctggagacatggggagttgttccatcttcagccagtttactagttctttcagcattcatttttcctcactttaagtctctcccagtcacattgttctatttttatgttttcattttttttgagatggagtcttgctctgtctcccaggctagagtgcaatggcacaacctcagctcactgcaacctctgcctcccgggttcaagcaattctcctgccttagcctcctgagtagctggaattataggcacatgccaccacgactggctaatttttgtatttttagtagagacggggtttcaccatgttggccaggctggtctcgaactcctggcctcaagtgatttgcctgccttggcctcccaaagtgctgggattacaggcatgagccacctcacccagctccggtcacattattctagcctttttatccaaaaaatgggcagaccattcttttgcagaagatgtcagaagaaaatgaaagtgaaaacctatgcagtttgtttaccgtgaacataaaagtatgttaatttaaataggaaaatattttatgttaaatatgaaacaatagtttaaaccccacttgaaaagtatagcgtacaattatttttagactgaatttgaagatgatggaaagggtttttacaaaggcactgtttagatatacagattataattataattacattattattaaatatttattcttcaagtactttttgcagttgtcctctgacggtctagaatcacttaaatgcttgttgaatgagtgagatgtttagaactacgacttgctctgtcattccagtgtcgtttaacctatgcagtaagattctgtctttgtaaaagtagttcgtagcagaagccaggatagtttggtaattaaacgcccaaactaaactcctcattcctacccttaatatttcctggctgtatgatcttggccaggtcactctctaaaagccccggtttcttcattattatcattattataatggggagaataacagctatacctgaggtttgttttgtgattaaattaaatgagacccaa

SEQ ID NO: 789 - DNA, 3826 bp, Homo sapiens
gccatgacgcccggcaaacattccggagcctcggcccgagccgctaacgcaggagcttgggggtacagggacttcagaggcggccaaaaaaaggggtggtggaccactccccagctggtcgccaccatgccagtctctccggcaggcagtcacaagcagcagaacttcgggttgaacaatgccacacaaccaaagaagtctattagcttttttgctacaatgaaagcaacttcagtgaaaggatatactggtgcaaatcaaagcagaatggctgtgtccaaaaccgtgcttattccacctgaactgaaaactgtagaaaaaccaaatcccaatataaagacaacacaggtatttgacataaatggaactgatgttactccccgacctctttaccatccagatccacttactggtacagcaaaaccaagtaaactcttgacatcacaagaaggatcacttggatcagaatttatatcttcctatagcctttatcagaatacaataaatcctagtacgttagggcagtttacaaggtcagttttaggaagcagtacagtttctaagtcaagtgtatcagcaagtgaatcaatagcagaagacctggaagaaccatcctataaacgggaaagattgactagtttcacagatttgcaagttataagggcagcacctgaaaaaattgtaacaaaagaagacctggagaagaatatagagataatactcacagagacagaaacactgagattttttgacttgcccacagtcatggtctctgtagaatctgaagaagctgagaaagtaactcagagaaacaagaattatgaagtcctttgtagaaacagattaggcaatgacctatatgttgaaaggatgatgcagactttcaatggagcaccaaagaataaagatgttcaatgtgataaaatcataatggaagataaaggcataatgtccactgcctgggatttgtatgattcttacaatgctatggaacttgtatctttatcagtaaaacaatctgtggttgagtcaagtagtaaagcaaatgtacttcctaaagatcaggaccaaagattgccagggagcactacagaaaaaaatagtgaaactagttctctaatggacatagaaaatgtaattctggcaaaaatccatgaagatgaggaagaccactcagatgcaatattaaaatctgacaaatttcatcaggacttattttttatggaacgggttctgatggaaaatatatttcagcccaaacttgcagcttatcgtcagcttcctgttttaaaagaacctgaacctgaagagcctgaagatgttttagaaagtgcaaaacatgaagaggtagaggaagaatctaagaaggaggaggaagaagaaatacatgcagaagaatcaacaatacccgccaacttggaacgactttggtctttttcctgtgacttaaccaaaggcctcaatgtgagcagccttgcctggaataaaacaaatccagatcttttggctgttggctatgggcactttggatttaaagagcaaaaaagaggactggcttgctgctggtcaataaagaatcccatggtaacccaaacaagaataagaagcatttttatctggctgttgacaaaattctcataaaatatataattacatgtaataattaaataaagtctagaaaattttatcaatggccagaacgtatttatcagagtccatatggagttactgctgtggatttttcaattggagcacctaaccttttagccgttggctatcacaatggcacaattgcaatttacaatgtacggagcaacagtaatgttccagttctggatagtagtgaatcacctcaaaaacatttgggacctgtatggcaactacagtggatagaacaagatcgaggaacaacaggagatggcaaaagagaaatactagtttctatatcagcagatggaagaatctccaaatgggttatacgaaaaggactagactgttatgatttgatgcgattaaagagaactacagctgccagtaacaaaaaaggaggggaaaaggaaaagaaagatgaagctttgatatctcgacaggctcctggaatgtgttttgcttttcatcccaagggtccagtgtataaagtgacatggaatccattttgtcatgatgtatttttaagctgttctgcagattggggtgttattatatggcaacaggagaatgtcaagccatctttgagtttttatccagctacttctgttgtttacgacgttgcctggtctccaaaatcatcctatatatttgcagctgcaaatgagaacagggtggagatttgggaccttcatatcagcactttggaccctctgattgtgaatactgctaaccctggaatcaagttcacaaccattctctttgccaaacaaacagattgccttctggtaggagacagtgatggacaggtttctgtgtatgaactgagaaatatgcctactgttttggaaactggccggggagatataatggatactttgcttggatccaagtcaaaccaatcagcataattcatcattcctaatatttttcttgtagttgttttaaaaaaggaattaacatccaatattctgtattacatactgtacaccagattttgatttcagaaaacaatatttgatgtataacttccacttaatttaaatttaataaacttttatttcagagatatttgattagtttacaatctaagagttattcttaagagtttcagtggaattttcttaatttttctaaagatattcctactctcttgatcatattctaagtacatatgagtacatgtacattcttatacaatgtctaaatgggttagaaaattattatacctatagaagcgaaacttggaaattaatagaatcacttaaaccaaaatctttataagacacaattctattgattttaaagcttctgctttccaggctctgttttccagagtttataattacgtagtttttagtagatgaaaataatggattcttgtacctaacattttatcctcttagatctaagagccgaagctatagaactttgttagactatttggcaagcaaaatatatgacagtaaatatcagaattttatggtttgaccagcgcttatcacattcccaattcagtgagaaaaattcatctgggacacaacagggtactcttctctgtttgcccagaatcagctctggattttaagcccagacttcagtggacccagatagaaaatataaagtctctgatctataggccacatcaggatgttattttatgaagagttctagagcaaggttgcggaaatcggggtggagatggggagcagtgactcctccaaatattcattgctaacaggccattctatgcagtttgttttaacaaatcctgggttaaactgaggccacaggacatgatgggctgttctataaagcattctaagtggagaggagacgatagggcatatgaaattcactaaactctctggaaaaaaaatatgtatatattaaaaaccaagactggaatcagtgcaacagtgggaactaccttttacaagtatccattgcttcataaactccatttgtttggaccaatcccttaaacaaaagcaaggcaaattttacatggatttagagcctaggtcaggttattaggattataaattttccactggtatgtcattgtgattatctttgtttttgtctttctgaaagattggattttctataacaccttgtgtaagaaaataaaaaacttgatctaactgaaaaaaaaaaaaaaaaaaaaaaaaaaaaa

SEQ ID NO: 790 - DNA, 2280 bp, Homo sapiens
atggcagagggtgaggatatgcagaccttcacttccatcatggacgcactggtccgcatcagtaccagcatgaagaacatggagaaggaactgctgtgcccagtgtgtcaagagatgtacaagcagccactggtgctgccctgtacccacaacgtgtgccaggcctgtgcccgagaggtcttgggccagcagggctacataggacatggtggggaccccagctccgagcccacctctcctgcctccaccccttccacccgcagcccccgcctctcccgcagaactctccccaagccagaccgcctggaccggctgcttaagtcaggctttgggacataccctgggaggaagcgaggtgctttgcacccccaagtgatcatgttcccgtgcccagcctgccaaggtgatgtggagcttggggagcggggtctggcagggcttttccggaacctgaccctggagcgtgtggtggagcggtaccaccagagtgtgagtgtgggaggtgccatcctgtgccagttgtgcaagcccccaccactagaggccaccaagggctgcacagagtgccgcgccaccttctgcaatgagtgcttcaagctcttccacccctggggcacccagaaggcccagcatgagcccaccctgcctaccctctccttccgacccaagggccttatgtgcccagaccacaaggaagaggtgacccactactgcaagacatgccaacgcctggtatgtcaactctgccgggtgcggcgcgcccacagcgggcacaagatcacaccagtgctcagtgcctaccaggccctcaaggacaagctgacaaagagcctgacatacatcctgggaaaccaggacacagtacagacccagatctgtgagctggaggaggccgtgaggcacaccgaggtgagtggtcagcaggccaaggaggaggtgtcgcagctggtgcgggggctgggggctgtgctggaggagaagcgggcatcactgcttcaggccattgaagaatgccagcaggagcggctggcccgtctcagcgcccagatccaggagcaccggagcctgctggatggctcaggtctggtgggctatgcccaggaagtacttaaggaaacagaccagccttgctttgtgcaagccgccaagcagctgcacaacaggattgcccgagccactgaagccctccagacattccggccagctgccagctcctccttccgccattgccagctcgacgtgggacgtgagatgaagctgctgacagagcttaacttcctgcgagtgcctgaggcccccgtcattgacacccagcgcacctttgcctatgatcagatcttcctgtgctggcggctgcccccccattcaccacctgcctggcactataccgttgagttccggcgcacggatgtgcctgctcagccaggccccacccgctggcagcggcgggaggaggtgaggggcaccagtgccctgcttgagaaccccgacacgggctctgtgtatgtgctgcgtgtccgcggctgcaacaaggccggctacggcgaatacagtgaagatgtgcacctgcacacgcccccggcacctgtcctgcacttcttcctcgatagccgctggggcgcaagccgagagcggctggctatcagcaaggaccagcgagcagtacggagtgttccagggctgcccctgctgctggctgctgaccggctgctgaccggctgccacctgagtgtggatgtggtcctgggcgacgtggctgtgacccagggccgcagctactgggcctgcgccgtagacccagcctcctacttggtcaaggtgggcgtcgggctggagagcaagcttcaagaaagtttccagggtgcccccgatgtgatcagccccaggtacgacccggacagcgggcacgacagcggtgccgaggatgccacagtggaggcgtcgccacccttcgctttcctaaccattggcatgggcaagatcctgctggggtcgggggcaagctcaaacgcagggctgacagggagggatggccccacagccggctgcacagtgcccctgccaccccgcctgggcatctgcctggactatgagcggggccgggtttccttcctggatgctgtttccttccgtgggctcttggagtgccccctggactgctcagggcctgtgtgccctgccttttgcttcatcgggggtggcgcagtacagctccaggagccagtgggcactaagcctgagaggaaagtcaccattgggggcttcgccaagctggactga

SEQ ID NO: 791 - DNA, 1612 bp, Homo sapiens
gcgtgctggcccggggtggcaggagccgcagaggcttgggctgcagaaaaaggatcctgtttgctgtgtaatcctgagaatggactgcaagagaggaaaaactgggcgtctgcttgggaatctattgtggaaacccagggtgtttcccgaccagtccctgggcgccaactagagtatggactgaccaggtacctggatggagacctgagctggagaaggagatgcgcttgggaggaaattgcagaggccgtcaacatggaaaagcagccccagaacagcaggagaggcctcgccccccgagaggtgccgccagctgttgggctgctgctgatcatggccctgatgaatactctactctacctctgcctcgaccacttcttcatcgctcctcgacaatccactgtggaccccacacactgtccctatggtcacttcaggataggacagatgaaaaactgctcaccttggctgtcctgcgaggagctgagaacagaagtgagacagctgaagcgtgttggggaaggagctgtaaagagagtctttctgtctgagtggaaggagcacaaagttgcactctcacagctcaccagcctggagatgaaagatgatttcctccatggactgcagatgctgaaatctctccaaggcacacatgttgtcacgctgcttggctattgtgaggatgacaacactatgcttactgaatatcaccctctaggttccttgagtaacctggaagaaacactaaacctttcaaagtaccaaaatgtgaacacgtggcagcacaggctggagctggccatggactatgtcagcatcattaattacctgcaccacagccctgtgggcacacgggtcatgtgcgactccaacgacctgccgaagacactgtcccagtatctgctaacaagcaacttcagcattttggcaaatgacttggacgccttacccctggtgaaccacagctccgggatgctggtgaagtgcggccacagggagctgcatggggatttcgtggctccagagcaactgtggccctatggagaggacgtgcctttccacgatgatctcatgccctcatatgatgagaagattgacatttggaagatcccagacatctccagtttccttctggggcacattgaagggagtgatatggtccgattccatttgtttgatattcacaaagcatgcaagagccagactccctcagaaagacccactgcccaggacgttctggagacctaccagaaggtcttggatacacttagagatgccatgatgtctcaggcaagagagatgctgtgaaaaccagtccagccaatgaaggtgggattgaagggctgaatggaagttacagcattctactctgatggtggagttttttgcctgagtttcgtgttttattgttttttttatggcttagccatgtggttcgttgtccacatccacatgtacgtttgtatgtagtccacattggttgttagattttttttttttttctttgagatgcggtcttgctctgttgctgaggctggagtgcagtgatgtgatcttggctcactgcagcctctgcctcccaggttcaagcaattctcccacctcagcctcc

SEQ ID NO: 792 - DNA, 3625 bp, Homo sapiens
gactcaccctcgcggcccgcccgggaactctgcgggagtcgcggcagctccgctcccagagacccaggagttgggcccagcgtccctcccggaacggcagcatgatcccagtggccgagttcaagcagttcacggaacagcagcctgcgttcaaggtgctcaaaccctggtgggacgtgctggccgagtacctcaccgtggccatgctcatgattggggtctttggctgcaccctccaggtgacacaggacaagatcatctgtctacccaatcatgagctccaggagaacttatcagaggccccgtgccagcaattgctgcctcgggggatccctgagcagattggggccctgcaggaggttaaaggccttaagaacaatttggacctgcagcaatacagctttattaaccagctgtgttatgagacggccctgcactggtatgccaagtacttcccttacctcgtggtcattcacacactcatcttcatggtctgcaccagtttctggttcaagttccctggcaccagctccaagattgaacacttcatctccatcctgggcaagtgtttcgactctccatggaccaccagggccctatccgaggtctccggggagaaccagaagggcccagcagccaccgaacgggctgcggccaccatagtggccatggcagggaccgggccggggaaggcaggggagggtgagaaggagaaagtgctggcggaaccggagaaggtggtgaccgagcctccagttgtcaccctgttggacaagaaggagggtgagcaagccaaagccctgtttgagaaggtgaagaagttccgcatgcacgtggaagagggcgacatcctgtacaccatgtacatccgacagacggtgctgaaagtgtgtaagttcctggccatcctggtctacaacctggtctatgtggagaagatcagtttcctggtggcctgtagggtggagacgtcagaggtcacgggctacgccagcttctgctgcaaccacaccaaggcccacctcttctccaagctggccttctgttacatctcctttgtgtgcatctacggacttacctgcatctacacgctctactggctcttccaccggcccctcaaggagtactccttccgttccgtgcgggaggagactggcatgggggacattcctgacgtcaagaatgacttcgccttcatgctgcacctcatcgatcagtacgactccctctactccaagcgcttcgccgtcttcctgtccgaggtcagcgaaagccgtctaaagcagctcaatctcaaccacgagtggacgcccgagaagcttcgacagaagctgcagcgcaatgccgcgggccggctggagctggccctctgcatgctgccgggtctgcccgacaccgtctttgagctcagtgaggtggagtcactcaggctggaggccatctgcgatatcaccttccccccggggctgtcacagctggtgcacttgcaggagctcagcttgctccactcgcccgccaggctacccttctccttgcaggtcttcctgcgggaccacctgaaggtgatgcgcgtcaaatgcgaggagctccgcgaggtgccgctttgggtgtttgggctgcggggcttggaggagctgcacctggaggggcttttcccccaggagctagctcgggcagccaccctggagagcctccgggagctgaagcagctcaaggtgttgtccctccggagcaacgccgggaaggtgccagccagtgtgaccgacgttgctggccacctgcagaggctcagcctgcacaacgatggggcccgtctggttgccctgaacagcctcaagaagctggcggcattgcgggagctggagctggtggcctgcgggctggagcgcatcccccatgcagtgttcagcctgggtgcgctgcaggaacttgacctcaaggacaaccacctgcgctccatcgaggaaatcctcagcttccagcactgccggaagctggtcacgctcaggctgtggcacaaccagatcgcctacgtccctgagcacgtgcggaagctcaggagcctggagcagctctacctcagctacaacaagctggagaccctgccctcccagctcggcctgtgctcaggcctccgtctgctggatgtgtcccacaatgggctacactccctgccacccgaggtgggcctcctgcagaacctacagcacctggccctctcctacaatgccctggaggccctgcccgaagagctcttcttctgccgcaagctgcggacgttgcttctgggcgacaaccagctgagccagctctcgccccacgtgggtgccctcagagccctcagccgcctggagctcaaaggcaaccgcttagaggcgctgccagaagaacttggcaactgtggggggctcaagaaggcggggctcctggtggaagacacgctttaccagggtctgccggcagaagtgcgggacaagatggaggaggaatgaagctggggtggggccgttttaggtagagccttaaaaatgcttctgccctggaatctcaaccattgtcttccaagataggaagccaagtgggtccaggccaggagatggggggggcgggggcagctgtgtcatctttctggggcccaggaggatctgggctggtttgtctggggagacagacaggatgttgtggagctggggtggaacctggtatggagggattaactcagtcatggcattctccgaccaaaaccacacctgtgtctctggcaggctggctggccttgctcccatccctagaactgctgcctctccctggatattccagctcaattagtgccacatatgggggaaacgacacatcccagtgggatttccaacactccccctccccatgcaacaaagcaacttacttctggagttctctcccaaggagaggacacagacacagttgtttgctgtgttatatgttagctccgaacaatggttctcatttggctaagcatcaaaatcacctagggagtcggtgcaaaacaaaatatcccagtcccctcccctgaaacactgactcaggaggtttggttgggggccaggagtctgttcctaaatattccaggtagttctggtgcaggtaagtggccctgagacagtatgttgggaaatgctgacgtaaaggtatcagggccgggcgctgtggctcatgactataatcccagctgtttgagaggccaatgcaggaggatggttgagctcaggagttcgagatcagcctgggtaacatagcgagaccccacctctgccaaaaaaaaaaaaaatagggtatccaaatatctagattctgatcccttttgaggtcctagaccctttgagaaactgatgaagccaggcacctccttcctcaggaaaatgctggtgtacaaatacacacaaagctcttcaggcagctgatagatttcccccagagagctattcaaggacttcctaaggtgggtggactgcagggttaggacacctgctatagaggtgacatttttccaaggacaagcagggactttggtcttgactgttctctgggtgcttaataaataatactaattatgcaagttctagaaaaaaaaaaaaaaaaaaaaaca

SEQ ID NO: 793 - DNA, 2110 bp, Homo sapiens
gagaggttctgtggggacagagctgggagtcctgaaggagaaagcgcgcagccgaggggctctggagtgccttagagcagagctgcggccgcggaaggggagcagctgagaaaggagggccgctgcaggcggggttcgaaccgtggggtctgggctgctcccgcggagggcctgggcggacgcgggatgctgggggtccgctgcctgctgcggtccgtgcgcttctgttcctccgcccccttccccaagcacaaaccttcagccaaactgagcgtgcgggacgctctcggggctcagaacgcgagtggggagcgcattaagatccagggatggattcgttctgtccgatcccagaaggaagtcttgttcctgcatgtaaatgatgggtcatctttggaaagccttcaggttgttgcagattcaggccttgacagtagagaattaacttttgggagttctgtggaagtacaagggcagctgataaaaagtccatccaaaaggcaaaatgtggaactgaaggcagaaaaaattaaagttattggaaattgtgatgccaaggatttccccatcaaatataaagagaggcatcctctggagtacctgcgacaatatcctcactttaggtgtaggactaacgttctgggttctatattgaggattcgcagtgaagcgacagctgctattcattctttctttaaggacagtggctttgtacatattcatactccaataatcacatccaatgactctgagggagctggagaactttttcaacttgaaccttcaggcaaacttaaggtacctgaggagaatttcttcaatgttcctgctttcttaactgtctcaggacaacttcatctagaagtgatgtcaggagcttttactcaagtgtttacctttggtccgaccttccgagctgaaaattctcagagccggaggcacctggcagagttttatatgatagaagcagagatttcttttgttgacagccttcaagatcttatgcaggttatagaggaactgttcaaggctacaacaatgatggttctctcaaaatgtcctgaagatgttgaactctgtcacaaattcatagcacctggccaaaaggacagattagaacatatgctaaaaaacaactttttaatcatttcttatactgaagcagtggagatcttaaagcaagcatcccagaacttcacctttaccccagagtggggtgctgacctacggactgaacatgaaaagtacctggtgaagcactgtggcaacatacctgtcttcgttattaattatccattaacactcaagcctttctacatgagggataatgaagatggccctcagcacacggttgctgctgttgatcttctggttcctggagttggggaactctttggaggaggcctcagagaagaacgataccatttcttagaggagcgcttagccagatcgggacttacagaagtctaccaatggtatctggaccttcgtcgatttggatctgtgccacatggaggttttgggatgggatttgaacgctacctgcagtgcatcttgggtgttgacaatatcaaagatgttatccctttcccaaggtttcctcattcatgccttttatagctggaagattggttaaggaaaagcaccccccatggcagagacactgcacatgattgtgcatacagcagaatgcatgtttggattttagaaatgcagatttcaatatgtaattgttgtgccataagatatcatagaaaaaatataagtggttgtgattttcttagaaagttgagggtatttcacgtaaggatgagctcccgcaagaagaggtacttatagcaaggggactctcaaatccattacctcaattaagaaatgaagaaattgaattagtctcaaagtttcttttaaactctaaaacagaatgagataatgtattttacgttgtctataatcattaaatcactccctgtgtaatttgtgagaaccatctagtagctcgaaataaaataatgttgcatcttttctcccttgccatatactttgtgataaatccttatctcattttcagtacttcattaaacattgcagaaaaaaaaaaaaaaaaaaa

SEQ ID NO: 794 - DNA, 1248 bp, Homo sapiens
ggccaagccaaagggctctcacactaagtgaagcttctccattctgtaagctttccgggaacatccaaggcaagactggcacccagcacagcagtgactgaccacataccccactctccaggacccatggagtccttcagctcaaagagcctggcactgcaagcagagaagaagctactgagtaagatggcgggtcgctctgtggctcatctcttcatagatgagacaagcagtgaggtgctagatgagctctaccgtgtgtccaaggagtacacgcacagccggccccaggcccagcgcgtgatcaaggacctgatcaaagtggccatcaaggtggctgtgctgcaccgcaatggctcctttggccccagtgagctggccctggctacccgctttcgccagaagctgcggcagggtgccatgacggcacttagctttggtgaggtagacttcaccttcgaggctgctgttctggctggcctgctgaccgagtgccgggatgtgctgctagagttggtggaacaccacctcacgcccaagtcacatggccgcatccgccacgtgtttgatcacttctctgacccaggtctgctcacggccctctatgggcctgacttcactcagcaccttggcaagatctgtgacggactcaggaagctgctagacgaagggaagctctgagagccctgagcctagcacattccaccttgacaaaatggttgactgagaaaacacagataatgggcttcctaaccctgctcacctggcactaacacttttcaatcttcaggcttcattccttcccaagagtgcttttgactctgagaccagcccacccccaaacagctagtggagaaggagcaatgctgaggggtgaggcctctctcccactccagccccaggacaggaaacagaactgcctgaaaaaggtgaagtgaaacttggatctctatttctcccataagggacttctgaaacagggaagccccctcccatgtgaaccaaggaaaggaggcacagcccagagaacccctttggggatactaaagacagaagaggggaaggtggcccttagagacagagcttggacagatgccagaggctctgttccagagtgcaggaagaaggggctagggcaggggagattctcataggggaaataaaactactaaaatatgaaaaaaaaaaaaaaaaaaaaaaaaaaaaaaaaaaaaaaaaaaaaaaaaaaaaaaaaaaaaaaaaaaaaaa

SEQ ID NO: 795 - DNA, 2439 bp, Homo sapiens
attttgtttctgtcaggctgtccctggccggggttctgtaacgcttgtgtgggccgcaggtggaggtgttgggaaagcgcggaggagatgttgtccccagtgtcccgagacgcgtctgatgctctgcagggacggaagtgcctgcgtccccgatcgagacgcctgccgctcccggcagctgtccgcgcccacggtcctatggcggagctaacggactccgcgcggggctgtgtggtctttgaggatgtgtttgtatacttctctcgggaagaatgggagcttcttgatgatgctcagagacttttgtaccatgatgtgatgctggagaactttgcacttttagcctcactgggaattgcattttccagatcacgtgcagtcatgaaactagagcgaggagaagagccctgggtgtatgaccaggtggatatgacttcagccacagaaagagaggcccagaggggacttagacctggttgttggcatggagtggaggatgaagaggtatcttctgagcagagcatttttgtagtaggagtgtcagaggtcaggactctcatggcagagctggagtctcacccatgtgacatatgtggcccaatattgaaagataccttacacctggctaaataccatgggggaaaagccaggcagaaaccatacttgtgtggggcatgtggaaagcaattctggttcagtacagactttgaccagcaccagaaccagcccaatggagggaaacttttcccaaggaaggagggcagagactctgtgaaaagctgcagagtccatgtgccagagaagaccctcacatgtgggaaaggtaggagagacttttcagccacatctggccttcttcagcatcaggcctctctcagcagcatgaagccccacaagagcactaagcttgtgagtggctttctcatgggacagaggtatcacaggtgtggtgaatgtgggaaagccttcacccgcaaagacacacttgctcggcatcagagaatccacactggagaaaggccttatgagtgtaacgaatgtgggaaattcttcagccaaagctatgacctctttaaacaccagacagttcacactggagaaaggccatacgagtgcagcgaatgtgggaaattctttagacaaatctccggcctgattgagcacaggcgagttcacacgggtgaaagactctatcagtgtggcaaatgtgggaaattttttagcagtaagtctaatctcattcgacaccaggaagttcacacaggagccaggccttatgtatgcagcgaatgtgggaaagagttcagtcggaaacacacacttgttctgcaccaacgaactcacactggagaaaggccttatgagtgcagtgaatgtgggaaggcctttagccaaagctcccaccttaatgtacactggagaattcacagcagtgattatgagtgtagcagatgtggtaaagctttcagctgcatctccaaactcattcagcaccagaaagttcactctggagaaaagccttatgagtgcagcaagtgcgggaaagccttcactcaaagacccaacctcatcaggcactggaaagtccacactggggaaaggccttatgtgtgtagtgagtgcgggagagaattcatccggaaacagacacttgttctgcaccagagggttcatgctggagaaaagctttaagagtgtagcaaatgtgggggaaagtcttaggccaatgcccccgacttactatatggtggggaactagcagtagttaatgagtgcagcagatgcaggaaagccttcccctggaggctgaaccttacccgccattgggaatttcacaccggacacaggccttagcagtctaagcaatgtgctgtctctgttcagcccaacagctcaccctagagtggaactctgggagcagccattgggagggaaccatcagtaagaagtgaaacttcatagatatggacattcccactggggagattccctgtgagtgccaagtatgtgagatgctttcagcagctgtgttgcactttttaaatggctattggcctttgctggggcaggagccatctgctcctaccatctggcagaatcatactgcgtttaccatttaccccagcatgcttgtgacgggcagacctctcttctctccccagtccctaaaaggtgttgtgagtggtctcacagcccactaggggtcttaatttcctctcttttgatgtaaatggcatggaaataatcagctttgttcaagaggacacagaaggattctgcaaatagcctgcggagacttacctgtgttgattgatttcatatgatgctcgttatggatatatccaatatccaagtcacccagctctggaactgcctgcttcacattgctcatgataataaaggcctgttcctttaagcaaccaaaaaaaaaaaaaaaaa

SEQ ID NO: 796 - DNA, 4992 bp, Homo sapiens
ggctatcctactgcagctggctgcatcagatgtgccaggcctgccctctagctcccaacaccatctgcctgatctaagctttgccatgttgttgtcactgctgggtgcctgtgctgtggtggggccattccatggccctgagtgggagccagtgcagggcctgctctcccagaatcacagctgcagggaccctcagtgctgtggcaacctgcttgtcctctgcctctttctggtctggcaggtccggcactgttggcaccaggtcaccaggacccgcttcagcacaaggaatgtcatcaaggtgccactgcagaagcgggcagtgccctccatgaggtgcgaaactgtcttcaagctgactcctgaattcttcagtcctggaaagtccaggggcctagattctcaacaatgcgcacaaaggcagagatggggataccggaggagcctccaggaatcatgggcccagaacctgctctctccacagcacccatgtccaggcccaccttcgggtgtccacacccactctgagcccatcttttgtaccacctccatttcaaacacctgtttactgcctcagaacagttcctggaaagcatggcaggtgccttggtgtctccatgatggtcagactcgccctgccttggacatgtgtcaagagatggagcagctgctgcttcactcacaggaaaggttggtgtcactggagcctgtcatcagtgtgaggtctcgccccacctccatgaccttaaccacctctcttccaaacttactttcagctgagaggctgcagttctgcccccagagagctcctgcctgatccttcccaccaaacactgagaatgtgcacttggaagtcttggcactgtcgaccagaggcctgggaaccagggggtaaaaaccagaaagcaggcagagaggatagtagagagacccaggctccaaggtgggtgaaccagacagggagcagacgggaggatgcttcagaaatccaggcatctggggagtagttcccagtagactttggaatggagggtgatgcagagactaacgtgttggagtgtgcaaaccagagactagtaataagtgaaactgatggcgagatcttgacaccagggtgggacacccaggaccggatgggagttgagagtagaaccaacattcaggaactagggaatagaaaccagagggaggctggaggtgagaatctccctgaaacccaggcacatatgggagagaaccaagaacagttaagatgtaaaattgatgcagagacccaaacacctgagtgggagaaccaggataagaatggaagtgaggatgctgtggagacccagacatttgagaagaaggacaagaaagaggctggagaggaggatggggaagagatccaggctcaaggattggggaagcaaggccagactggagatgagaatggtgaggagacccagacaccacagtgggagaaacaagatcagatgaaaggtgatgcggatgtggaaattcagatggaagaggggagaaacaaggatcaggttggaggtcaggatgctgcacaaacccaatcatgtgggagggagaacgtgggagaagtaaaaaaagagaatagtgtagagacccaggccttggattggggaaaacaggaatgtgttggaaatgggaatgttacagagatccagacaccaaggtgggagaagcatgatcaaggtggaagtaagaaagctaagaagacccaagcatctgggggagagaaccagaaacaattaagtcatgaaattcaagtggggtggggaaataagggcctgagaagagatgaagatgctaaggaaacccagatagctaccaagaagaagctcagggagataagagaaggattgggtggtgatccaggcactatggtggggaaaccggagacaagtagcaagtgaaatttatagagaatttgagatactatgttgggagaatcagaactggattggaggtgaacatagagcagaaattcaggcatcagagaagagagaccaaagaaaggatggatgtgaggatggcacaaatatcctggcacccgaggctgagatccaggaacaattaaaaggtgaaactgatgtggagactcagagcaatgagccacttagagaagaggatggtacagacattcagtcactagggaggagagaggttaaaggtgaggatgataaagacacccaggaacttgggaggaaaaatcagggtcagttaggaaatgaatttagtggaaagattcacataccaaaggggaagaatcaggaacatattagaggcgaagatggtgcacatacccagatatctgagtcagggaactggggcaaattaacaagtcaaattgatggagaaatgcattcagcagaatggaagaaagatcagcagattggaggtgagaatggggcagaaattcagatacaagggaagagaaacctgagagaagttggaggtgaggacggtgtaaagacctgggcacctgggaaagaaacccagagtcagtttagaagtgatcttggtagaaagatccttttatcagagtggaagagccagaagcagatgggaagtgagaatggaacagaaattcaggctccagtggagagaaaccagagagaacctggaggtgaggacggtgtaaagactcagagacctaagagagagaacgaggaccagttagatagtgaaattggagggagccattcaccagggaggaggaactgggagctgattggaaaggatgttgcagaaaatcaggcatcagagaagagaaaccagagagaggttggaaacgaggacggtagaatgatctggaggcttaggggaaaaaactggaggcttagagcgaagaaacagactgttaaaaagtaaagataatggaaagacccgtttatcagagtggaagaaccaggaacagggtggaggtgggaatgatgaagaaattcaaatacaggggaagagaaacctgagagggaccacagctgatgatggtacagagacccaggctcctgcaggagatgaccagggacagttaagagttgaaattgctgaagagatccaggtacaagggcaaggaaataagaatgacggtggagttgaggatgttgcagaactccaggatataggaagccagagaaagtgcacagatgaggatgttggagagcctcgagcaccaaggggaggaaacaaggatctggtcagaggagaggatgctgtgagggacagtctccaagtcgactgttctgggagtgagaggcccacaggcaggaagcacagcctaccatggcctccagccttcactggctatggatgtgggacccgggaacaggaacaggcagtggctgtgaatggtttcatctctgccccctgtcctgagatgaatcctgtcccccactggggtgaagtcttcctgctggtgggtggggagggagagcatctggccagccagggcacaacccctgccagggatcatagagtggggatcagtccagcctcccagcaggcccaacctgaatcctggagaagacgacaaagggacaaaggggtggatccagagaaggcccccagcctgactcggcagtcccaaaaccctccgtctctgacagctcccttgggcatgccctctgcctgctcctgtctcccgtgtggcccagccccggaagctgccatcattctagcgggtcctcccaccgccctcactgtcctgcccaaggggacaggcctcaagaagagcaaacgactgctcctggagtccctcatgcggaggaggattgcacacctgaagtggggtcttccccggcggatcctggagtcctatttcctgtttaacttcttaggatcttgctcattgacccttgctggggcgaggctctctggactgaacacaggccaggagctccaagcccagcaggaaaggtattgtgaggcccaaggctccccaccaggccttaagtccccagagaggttccagagggttcagcgcccagacagaaaaagctcgaaacttcctatacaagccagagctctggagaggaacagaccgcacatgtcagagcccattaagcatttccatccagcctgaaaaggccaggagagtcaggccaccagggggcgccagagaaccacaggagatccaggaagcgcttgctaggaccaagctcccagctcccaggacccccaggccggcagcggagtccaggagctggtgtggcccacaaagggtcggagagcctcccagtgagaacagtaggggcaggaaaatgatcaggtcaagggtctcccagctggcagagagggctcccagcagagtgaggacttcattctctagggcagaccacgcccactggaggaaggaatgtacatcctgggaggcctctaagctccccagactcaaatgccagcagctcacatactggagaagaggaagcctggaatctacagggtgcagaggggctgggcagcagccttcctgccattctgcagaacctgtcagcttcaaagggaggctccactctgcggtggcaaagctgggcctgacccttctggccaagatgtcctggtccccacagctcgccaagcgcaagcacttggcccctaacctgagcctgagggaacctgattctactctgcctcccaaagtgggtgatcctcgtgcaggggaggacagcatcggagatcacactgcttcacagagggatcttcagctgcaaggtcactgctgtactggggccacccttcctaagacagagagtccccagggccaggaggcacctgggaacccaaatggggctccacagaatacacgagcctccaaaaagtttagtattatgaagcatctgaattttttttctcttccagaatggctttaaaaagtagactcaggcccagagtcctcaggacatatcagaaaagctttgagagtgtcctgatccctgcaaagcctctaataaattggtcatttgggcaaaaaaaaaaaaaaaa

SEQ ID NO: 797 - DNA, 744 bp, Homo sapiens
atcaggttcaacgcagtgactgctcagtagaagccatggctcgcagacactgcttctcctactggttactggtatgctggttggtggtaactgtggcagaaggacaagaagaggtatttacgcttcctggagattcacaaaataatgcggacgctaccgactgccagatctttacactcacccctccacctgccccgaggagtccggtcacaagggcccagcccatcacaaagacacccaggtgtcccttccatttttttccacgaaggcccagaatccattttaggtttccaaacagacctttcgtcccttcaaggtgtaaccaccgttttccattccagccattttattggccacaccgttaccttacttataggtatttccccagaagaagactccagagaggaagctcatctgaggaaagctgagagggaagagaaacccaaacatactgaagcaaaaaaaagcctatccttcagaaaaaagcaacaaaaagatttctgttttatctttcgaaactaaaactattggatttgaagattaagtatcctaaacatcactgactagaaactgttctctttgtcagcagtgaagatattggatcataggttattgatggttgcaaaattggacaataaccacgttatttttatcctcaacctcttatggtcacaggatatttatgcaaataaaatctttaaatgggaaaaaaaaaaaaaaaaaaaaaaaaaaaaaaaaaaaaaa

SEQ ID NO: 798 - DNA, 2359 bp, Homo sapiens
tgttggcctactggaaaaaaaaaataaattatttttgttaaggcaagcattggtgtgttctttaacttgctacttggagacctagtgtccagtctggacagaatgcacagagaccagcctcacctggaatgcagccagactcgatgtccctcagcacacacagctcctggccacagactgcccatagaactgtctgcacccaaaccccatggccttttcatgcacggagacaggcctctggatgtgcagccttgccaccccctgccccaatcctccctgagagctcctgcgtcagtgccctgggctggtgagggagaagcctgtctgcacctgcctaattccagctcctccaggaagcaagggcttgtttgtcagagctgcagggttggccactcggtggggaggagtcagccaggattagagagcctgcccctaatccggcctgctggggtttacaaggatcagagctgctgataatgaacctcattaagggggagcaggagcctcaatccgatttggtcttctctttgacatcttcactctgctcagatggcctgggtgctatgtggagcaggtgggatgccaaggccactcctgctatggggcagctggggctggggagggatggcagtctccctgcatgtttccctcgacctctttagctgcagcgccttgctgggctcctgggttggactccctctctgtgcccctgctccaggcacccattggctccatcctcctggttgtgctctgcaccccctgctcccttgggctggccctggctgggggcctgagagacagacaggaacccacaatcaggaggcaaccctggcctgcaagaggaagacagaggctcccagggccggtgccctgtgtgcccactgcaccaaggccgctgaataagcctgcccttcaccccctaagggctccttgcccaatgccaagtgctggggatttctgtcagcaagccctgtggctccagtgacggtatttctaaagccaaacttagttacctagaattagcgccatgttggaaacactgtcgcagcagcccgggctgcacagtgtgtagcccagcctccaggtccacggagtggtgtggacctcccacctcacagctgcctctggcagccaagcctcttttcgcccggccccagcccctctggttgataaacgggtgggcctcctcagcagcgtggctgcctttcaccttgatttccccagggctctcggcaacatcgataaaccagcctcgcccaccagctgggccctcccccacccagtctgccaggctgggagctggagcttgctgagtcttgaatgcccttctagatggcttctctagaggctctcctggcaagagagggtcccaaggggagccctgcaaagcaaaggctccttgtctggggcgggatagagaatctcgcctctgtctggtgtgttacctactgggggcacaggaacaatttcctcaaggagacagtggcatggagctttgaaagacgagtaggtgttagcaaggaaataaggaggaacgggggttacgggcagaggagaaagcacatgccaagtcagcaaagaaaagtagaattcgaaaactttttaaaaatattactaaggattttcacaatgctgcactgggctagaaactgaagctaaaacagatacgtggtccctgctgctatggggcttccgttctagaggcaaggacaggttgtgatgagggttctgaaggatagagaccaagcagggagggtgttgaggaggcttctgcgagacctgaaggatgggaagccaggaagtgggaggggtgggggtccaggctggaggggcccaatgtaggtgtagagggactacagccctgaggggctgctccatgcggcattcttggaggtccaagaggggcagcgccaccttgggccaggctcctctccagcagccttggtatggggtgggggtgggaagacccctgatgcagcctgtcctctgggtgtgggggtggaggagagggctccaggggacccagccagccttgaccctggaggaaagtcaggtgggctcggagagagccctcaaatttgggccctgggtcagggtggggtcaagtccagccttgaagagaatggactctggaatctgacgtctgggtttgaatccagcttccaacactcactggctgtgtgactttgggcaagataacttatccccttgtccccatgtgtcattggagataaactacccacctaccagattgttgtactatgctgggcaaacactaagtgcttaataatggtagcccactgctcaaaaaaaaaaaaaaaaaaaaaaaaaaaaaaaaaaaaaaaaaaaaaaaaaaaaa

SEQ ID NO: 799 - DNA, 2168 bp, Homo sapiens
gcagcagttgagtccatgtaagatgattgtgcacgtgtgtgtgtgtgtgtgtgtgtgtgtgtcctcactcacttaaaaaagaccatttctgtgcattctttatgctggaaccctcctctgcctccctctccaggaaatcccataggatcccatacctgctttagaatgtgtgtgagacacttcccagtgcctggcatgtggtaggagctcagtacatgtaaactgttttcctttgaccactcaaagtagtcacttgttggggaggccaatggcggcttccccggtctctgagctgatgggcgtctggtccctgcctccccttccttcactggctgatgacaaatacctgaatgtcatcacatcctccgtgtcctcatctgttattctggaacacaggccagggagggtacagggtagtcccccttcaacagaggctggcctttcttgggatgtgggctggctggtgttggtccaaggatggatgcagagggtgaggcacccatcctgctagtccggccggatgctggcaggagggcggggtgaggaggggcggagcttccagaacaaaggagaatggggagcccaggggccagcctaggcatcaaaaaggctctgcagagtgaacaggccacagcactgcctgcctctgccccagcagtcagccagccgaccgcgcctgctccctcctgcttgcccaaggccgggcaagtcatccccgctctgcttcgagaggccccgttttccagcgtgattgcgccgacactgctctgtgggtttctcttcttggcgtgggttgctgctgaggttccagaggagagcagcaggatggccgggagcggagccaggagtgaggaaggccgccggcagcatgccttcgtcccggaaccttttgatggggccaatgtcgtcccaaacctctggctgcacagctttgaagtcatcaatgacctcaaccattgggaccatatcaccaagctaaggttcctgaaagagtccctcagaggagaggccctgggtgtctacaataggctcagtccccaggaccagggagactatgggactgtgaaagaggccctcctgaaggcctttggggtccctggggctgcccccagccacctgcccaaagagatcgtctttgccaacagcatgggtaagggctactatctcaaggggaagattggcaaagtgcccgtgaggttcctggtggactctggggcccaggtctctgtggtccacccaaacttgtgggaggaggtcactgatggcgatctggacaccctgcagccctttgagaatgtggtaaaggtggccaatggtgctgaaatgaagatcctgggtgtctgggatacagcggtgtccctaggcaagctgaagctgaaggcacagttcctagtggccaatgcgagtgccgaggaagccatcattggcactgatgtgctccaggaccacaatgctatcctggactttgagcaccgcacatgcaccctgaaagggaagaagtttcgccttctgcctgtgggagggtccctggaagatgagtttgacctggagctcatagaggaggacccctcctcagaagaagggcggcaggagctatcccactgagaagccaccttttctttaacctcctaaatattggtgggaagacccaccgctgtggggggggttgcatatcctcatgggggtcactgggcttggccagtctgcttatcaactcttgctcttctctcccctttgcctccctctgcaggggccttaatctgcccctggtaggggaggcttccactgaacaggcacaggtgagggagagcaggctggcttagagggacagggtccccatggtcatcaagctgctgttgatgacaaagactcaaaggctggaagagctcccaaggaagctagaaatgcttgtctttgaaagaactgtgggaccccttcagattccctgaggtatggcttggtcactctcaggtcctcaaagcctgtcttagttgggctgggtcctagctgcagggtctttgtgagggtcacagttgctctgggacacctccctgaagagcctttccacctgtacaatcgtattttctttctgtcatttgctttgaagcccattgtgccttatgccaataattcaattgctgcaaacaccaataaagattgattcatgg

SEQ ID NO: 800 - DNA, 1297 bp, Homo sapiens
agcgcccaccagtccctcagccaaagagcacactggaggcggagaggcagcatccaccagcccgctccccgcctccaggacagagcctcggtctgcatgggggtgacaggtgcccatggatttccatgctgcggcaaagggtcagtggaggttgcagagatgcgagatgacttaagtcaacaccagatacaagaggaacaggagctggaggcagacatgctagagcagaagccccaactccaagtggacctggacctggacccagacccagacccagacccagaactggagatcggacaggtgccggctttactggagtcagagctatacccagccctcaagcttgaagctgagctggacacggaagccaactcgaacgaggagtctgactttgaagaacccatgcagctggtatgcaagatagagtccgtccactccaacatggggctgcccacgccacagaccttcagaccgtggagtctgaattcaaactgccggagtttcacggaggagaaccacgtgtctgcctgccatcactccatcagtgcgcagacctccaagcacctcttctgggcaaacaagctcatccaggcctcagagcacagcctgcagcgggccatcaacatgcagctcaacaatggcagcgcaggccagcccatcagatccccgctccgggaggccatccccaccaacgccctgtgctccgaggagcagctccagatccctgatgcccactcagctcctccaaccacaagctcccaggcaccaagccccctcctgtcctcagatctcccgccacccattgacctgacagagctaatcacctttgcatcttccctggccatggcctcctccagcaggatggacctgcccagtttggaacacatgatgaaagctccaccccaggaggctctggagccttccacagagcccctcctgaccactgtggaggagcgagagccagaaaatcacgcagagaccctgccagagaaaccacgcgaagccagagcaccactgaaatcttggagtcaggaagacaagaacttcgctcaatcttactttgacttcagcaagccggggatcaagagggccaccatcaaagggcaaatccagcttctccagccaccagccacgtcccctctgctgcagggaagcaaggaagactcagtgccgccaggaaaagagaaagagaatccattattggtgaaaatccattttaagctgtcagcccccacaatcccagagaaatgactagacagaaccaataaagcctccagtgctggcaaaaaaaaaaaaa

SEQ ID NO: 801 - DNA, 1162 bp, Homo sapiens
agaggccaggggaaggggataaagggagggcaaagaaaggtaattccaaaggaacatgagcaccaataatgctttaagagtgttttggaaatcaagagaatggaatatgaaaacatcaacatttgattcagatgaggatattctacttttacccaaaagaaaacgttttagaaagaaaaagtcaagaccagtgagacacaccaaacgccatgaagaggagcaggtctatgagcaagggaccacattaccctgttccatatgcaagcacgaaattgacctaactggtatttttctccataagaagcaacatgtagctctggccacgctgggtttccaatggatgggtagaaagaaaccacagccctcagtgattgctgttcagagacagttcatgatttctaaactattgtcatcttttatgttcactgaaaaaaccctacagagcattaataatgcttttgagctgctttggaaaaaacaaataccagcatactataagatttttgataacattgacaggagtgtcatatattctcaaaaaatatgtcatctgttaattaaaggagtgggcatttgtgaagacaggaattctacatggaaagctgacatgaatgataaattcactgtagtgagtaattttggtaacaaacctaatgtgtgtttttttggtttgtttgatggacatcacggtgcctcagcggcagagttgacatcaatggaactcccagttttacttctccatcagctttccaaatttgatccttcttaccaaatgacaactgatgagcaacaaataatcaattccttttacactgtgtttagagaagaatacgcagcaatagaagacctcttttctgccataaacaaaacagaagcagtgaggtgtgagtatgaggacacacacaaagcctttgcaaaagcattttggagaatggataggcttttaggtcttggaagaaaagaagtgtccagggttcaatggagtggctgctctgcagttacttgtatattggaaggcaaacctaaaagtccttatgctcataagaattggaaaagaaaaaatacccatgatgggttggcagagagctccccttcccaggagatgccaaaaataatttctggaatattacatgttgcaaacactggtaccaggagaaatgaa

SEQ ID NO: 802 - DNA, 1179 bp, Homo sapiens
aatgttcggggtggcaccagcccactgccacagccccagtccaccatgccacccatgctgtggctgctgctccactttgctgccccggcactggggttctacttttccatcagctgccccagtggtaagcagtgccaacaggccctactctcaggcaatgatattctcctgtattgcaactcctcgggggcgcactggtactatttattcacacaaggcaagaagggcaggctcaccagcctcaccaatatttccaatatggaaataatgcccgagggcagccttctcattaaagatccattgccctcccagacgggcctctaccactgctggaacaagaatggccgccaagtggtgcagtatgaaattgactttcaggatgtcaccaccctgcatataacacacaaggacctgggtcagaggcccctgcagaacgagaccctgcatttgggcagcaaacagctcatttttacctggtgggagccctggcaggactgcaaccgctgtgaggagccgggcgagtgtaaacgcctggggtaccgctacattgaggagcctctggaggaagccatgccctgctggctctatctgggagaggtgctggtgtggtctagccgcttgcggcctgagctgcaggtggaagcctgccacgtccagtgcaccaataacacacagttaagggtggattacgtcatttttgacaacttcaggctcgatgagaagacagaatttgtgtggctcgactgtcccttaggatccatgtacaggcccgtcaactggcgtgccaacgacacccccctgacgtgggagagccagctctccggccaggacttcaccacctttctggacccctccaccggcggcaggcagctgcaggttttccagccggccgtctacaagtgcttcgtgcagcaggagctcgtggcccagttcaaacccgccgccagtctggagacgctggaggctcagtggagagagaacgatgcccagtggcgggaggcaaggaaggccctgcggggcagggcggactccgtgctcaaggggctgaagctggtgctgctcgtggtcaccgtcctggccctgctgggggcgctgctcaagtgcatccacccttccccgggcaggagaagcacacaggtgctggtggtgaaataaagcgagcccccggtgcacaagcgg

SEQ ID NO: 803 - DNA, 8672 bp, Homo sapiens
agcgcgaggtcagccgcgccgagccgcccatgtcgctgcagcgggagcccccgcggcccgagccgccgccgccgttcccgccgctgcccttgcagccgcccccgccgcgggagtcggcttcccgggctgagcagccgccgcggccgccgagggagacggtgcgcctggagctggtgcttaaggaccccaccgacgagagctgcgtggagttcagttacccggagctgctgctgtgcggagaacaacggaagaagctcattcacacagaagacccatttaatgatgaacatcaggagaggcaagaggtggaaatgttggctaagaagtttgaaatgaaatatggtgggaaaccccgtaaacaccggaaggatcggctacaagatttaattgatataggctttggctatgatgagacagatccatttattgataactcagaggcttatgatgaattagttcccgcttctctaacaacaaaatatggaggcttttatatcaacactggcactctacagtttcgccaagcttcagatactgaagaagatgatattacagacaaccaaaagcacaagccacccaaggtccccaaaataaaagaagatgatattgagatgaagaagcggaagcggaaagaggaaggggaaaaggagaagaagccaaggaaaaaagttcccaaacaactgggagttgtggctctaaattcacacaagtctgaaaaaaagaagaaacgttataaagattctctttctctagctgccatgattagaaaattccagaaagagaaggatgcattaaagaaggagtctaaccccaaagtcccagtgaccttgtcaaccccttctctgaataaacccccatgtgctgctgcagcactggggaatgacgtcccggacttaaatctgagcagcggtgatccagaccttcccatttttgttagcacaaatgaacatgagctgtttcaggaagctgaaaatgccctagagatgctagatgattttgacttcgacagattactggatgctgcttctgatggtagccccctatctgagtcggggggtgaaaatggaaccaccacccagccaacctacacttctcaggttatgcccaaagtggtacctacactcccagagggtctacctgtacttcttgaaaaacgtatcgaagaccttcgtgtagctgccaaactttttgatgaagaaggaaggaaaaaattctttacacaggatatgaataatattcttctggacattgagttacagctacaagaactaggccctgtcattcgcagtggtgtctactcccaccttgaagcttttgtgccatgcaataaagaaacactagtaaaacgtctgaagaagttacatctcaatgtccaggatgatcgtttaagagaacctctgcaaaaactgaaactggctgttagcaatgtcatgcctgaacagctatttaaataccaggaggactgccaggctcgtagtcaagctaagtgtgccaaattgcagacagatgaagaacgagaaaaaaatggatctgaagaggatgatgatgagaaaccaggaaaacgtgtcataggaccaagaaagaaattccactgggatgacactatcagaactttgttatgtaaccttgttgagatcaaattgggatgctatgagttagaaccaaataaaagccagtctgctgaagattatcttaagtcttttatggagacagaagtgaagcccctgtggcctaagggctggatgcaggcaagaatgctttttaaggaaagccggagtgttcataatcatcttacttctgctccggcaaagaaaaaggtgattcctgcacctaaacccaaagtaaaggaggtgatggtaaagacccttcctctccattctttccccactatgcttaaggagtgtagtccaaaaaaggaccagaaaactccaacatccctggtggcttcggttagcggtcctccaacgagctccagcacagctgccattgctgcagctagctctagctctgcaccagcccaagaaaccatctgcctcgacgactcactagatgaagacctttctttccattcaccttcactggatcttgtttctgaagctttagcggttatcaacaatgggaacaagggccctccagttggctcaaggataagcatgccaaccacaaagcctcgtccaggactgagagaagaaaaattagcaagtatcatgagtaagctgccactagctactcccaaaaaactagattctactcagactacacattcttcaagtcttattgctggtcacacagggccagtaccaaagaaaccccaggatttagctcatactggcatctcttcaggccttattgctggttcttccattcagaaccctaaagtttctttagaacctttgccagccaggctacttcaacaaggacttcagaggtcaagccagattcacacttcttcctcttcacagacccatgtctcctcttcttcccaagcccaaattgctgcctcttctcatgctctgggaacatccgaggcccaagatgcttcttcgttaacacaagtaacaaaggtgcaccagcattcagctgtccagcagaactatgtgtctccattacaggccaccatcagtaaatcccagaccaaccccgtcgtgaagttaagtaataatccccaactctcctgttcctcctcacttattaagacttcagataagccacttatgtaccgccttcccttatctaccccctcacctggaaatggttctcaagggtcccaccccctggtttctaggacagtacctagcaccactacctccagtaactatttagccaaggctatggtgtcacagatctccacgcagggtttcaaatctcccttctcgatggctgcctccccaaaacttgccgcatctcccaagcctgccacatctcctaaacccctgccctcgcctaagccttctgcctcacccaagccctctctgtcagctaagccttcagtatcaactaaacttatttctaaatccaacccaactcccaagcctactgtatccccaagtagttccagtccaaatgcactagttgcccagggtagccactccagcactaacagcccagtccataaacagcccagtggaatgaacatcagcagacagtctcccaccttgaatttattgccctctagtcgcacttcaggccttccacctacaaaaaatcttcaggccccctcaaagctaacaaactcatcatccactggaactgttgggaagaacagcttgagtggaattgcaatgaatgtacctgccagcagaggtagcaaccttaactcaagcggagctaataggactagtctgtctgggggaacaggaagtggaacacagggtgctaccaaaccattgtctactccacatagaccatccactgcctcagggtcttcagtggtaacagccagtgtgcagtccacagcaggagcatcattattggctaatgcctcacctctgactctcatgacatcacctttgtctgtaacaaatcaaaatgtgactccttttgggatgctgggtggccttgttccagtgaccatgcccttccagtttcccttggagatatttggctttggaacggacacagctggagtgacaaccacctcgggatctacctcagccgctttccaccatagcctaactcagaatttactaaagggtttacagccaggaggagctcagcatgcagcaacgctttcccactcacctctgcctgcacacttacagcaagcatttcacgatggaggccaaagtaaaggggacactaaattaccacggaaatctcagtgactgcccagcaagcaaaggagacgaaatgtttagttgactgatggaatctacctgatgggaaagtacttatgtggtcatagggctgctgtttctgtcgatgtttacattctctcgtcccaagcactgtggtgaggaggaaaaagaaaagaaaacattacttgagcaaagccaggtgcaggaggaagaaatgcttttgtgcaaagttagtgacctttggtctcttctaaagaatgacagagttaccgtattaacagacttgaaagagactcagttgtcaaacccacagaaatacaaatttgatttttcccgggggaggaagaaggaagtgaagagaatttgggtaaactccatccatcctgggggttggatctgaacacttacagacataattggtaataaaaggcattaaaaactggaattaggccagtttgtcaggaataatgatcatgtctatttgaatggactgtgtagcagatttgccacaaaaagaaataataatgattctatctccgatagacagtagctgcatagcacaccctcgaaaatcctgaacaaacttgaatctcctccagtgtgtagcaacttccctcaatcagtggactaaagatccttcaggaaagttattttagcacagtgatatatattattaaatcatctagatttttaaaaatcaggaagttgagcctgttgctcttaagagatgaaacctagatgtcccctttttgtaaaagggtcaatttcatcttccgttcagaagcaggtacttaactcttttcttcaggtgatttgtgcatctagtattgactggttaattcttatttccattcttgatgttaaaatgtgactgtgttcacatttttctcctgagaaatggggatctttacagggttattgctttgctgcttttagcccttgcagcaacataaactctaagtttccccagttcatctaacttcacaacttctccttctgttcttttagctagtggtccttcaggtgattattagctattggtataaacaggtagaagtgtacactatgtttcttcattggtcattcaaatggcatgaatatagtttttgaatttttaagatggtattttaaagggaggaatcacattaggatcacaatcacgacatatttttactccctgtatccagtgtagtgaaattgtttggagcatttgagatcctaaagcttcactatttactcagtgtattggtatgtgagtaaatctgcagaaaataagactccttagttattatagcttccttatgcaaatagcatattcaacaaaggatgttaagggaaaaatttatggttctccttggatacatttgatttgatgggtttttttgccgcattattctagttttttaagcttctgaatattttcatactatatcagagaatggtgtaaactctaaatggtataagcttcatccatttataatgacactaacctaaaaaaaatagactggtagtgacaagatttattgcatatgtgtttattatacattaccctataccattagatttactcaattaagagtattaaccaggcccttttttcttttatacacaaaagtcccagataccctacaggactgtgaataaataaccacagatcggttcagatctgtatgcctatattttgacttcaaagtcacattggcttgcttcatagcgaaaaagttaataaataactgaaaactttagttccaagaacttgttacagtaaagggaaaggattatttcaaaggaatcactgatataatttcttgactctaagaatttagtttatcaataaaacaaatatggatgtagtatgaaccccagtagatattttggaaggatactgggaggatgttgcagagaggtttgacttgaattcagtatgtttgatgaagatttgcttggtttcaattaaggaagcttgcccaatttttttaattttttcaaatgtagtggacctcttgcttttacgaaatatgaataaaaaggtctttgcttcatactaggggaagtgatgggattttcctttgggaaggtagcctttgttttacttctcataccacaagagaagtcgaagtgcgtattaatttctcttcctgaatacttgtatatatgtttgtctgtatgtatatatacatacacacatacattcatataaatgactagtttgagtcaaaaaatcatttgaatttcttaaaaccatcaattctgaatcatgccatatgaagatccctggtgactgtcatcattagaaaagaacaagataatcagttcttttccctgtaacattttatactaaccagtaaaaatatctgaaggcccttggctccaagaatacaatgtggagattcttctgtgttctctttagtcttgattccttgaggactactgtcagatccctaccttaaacccccacctgcactgacgacttacattcatttcagtcaggaccccccttttatgttgtatgaatcagtcaaacatcgttgtatttctgtatagataaagtatgatcagagagtttctacatgtaaatagtaatctatttctttcctagatcataacattgaaaaaggtgcccatactttatggtcacctgtctttaccgtttttattactaaaaacaaacatataaattggttattttttagcacagagacttgtgactcatactgtatttttgcacttaaaaatcaaattatgttattttttaaaatggtgagtcattggaaaggatatctatagagcaacgtgtatttctgaagagcattagcaacatccaaatgcaaaaataatcagcacacatgattatatcccactccttgggattcttgattcaggaagattaagctgtttgttttcaactgttttatattttaaattgccttcactgatatataagctgttactgtacatacaagttaatcctcagtattcacaagcaataacagtcagcagggttgtcctcggagatagctgtgctgagcctcagttggagactgggagcaaagtgtcaagctcattcagagcatccagaataaatgcaagcaataatttccattataattcaattataattcttgtatgcttttgaggtcagagggtaaatgaaatcgtgattttaaaacagcctgaagaaaaaggttttgggaaaggaaatgaggctaatctgtagtcataaaattctgatactttgcggaaattagaagatggtgatagtgcattcttttgtgcccaccccccctctgatggatgttgttagcccaaattacatttttcatatcatggacattgaatagggtttattgaatcaggaaggtaaggggaagaaccgggcacatatgtgttggaatactgtgggtttgacacctggttgaaaacaacttattggacatgatttttaacccaggatatttttttcccaaagcagatctaaattgtttactacccagggttggaaagggcaggcacctctaatctagtctttgtcctctggttgccctctcccacacccctttccacctatacttggttcaagacattttctgaaacgaaaattctgctgttgttcaaactgccattggttatgagaactctgcgtcctttgggatcatctcttagaactccagtgatctatcatatttgctgctacatttgtaaaatgaactttgcctgtattggttgactttaatttacagttctttatttctaggatgttttgtcctctagtttgactcatgtatagaattaggatactttattttaggagtgtaccgtaaaagcacactggtccctttgttgtttttattatttaggtttggaatttgtttgctttttttttgtttgttttttgttttgtttctgtttttgtttttttttaaagttggaaatagaagaatgagaaaaatctataatcaggccaaacttgagaactttcctgtgcttcagcactgtaattctgctgacctaatgttctcaaaagaggcacttttactttctattgtgcatgtatgattgttgttttttgcttttgagggggcttttgtgtttgtaataatgaagcagaagaaaagtgcagtagtagataaatgatcacaacatgttatgcaattttattttataaaattttaaggggaaaagtttaactctttgtaaatcatttcttagctctggtaaaatgcttatattactcctctaaaacatgctcaattcaggcctttgtctttgttaagtgccttttttctttcttttttcctctcttttgaaactgttgtcacattatcttaaagtacagactgataagtcaggggattcaggaggaagaatctcacacttgtcaacatcatgtcatgctgtgtaaccctcttcctttgctttctatgtatatggatatatgtgtaagatacatacattacatatatataaaactaggagctgctgtaccattgcatcctttccaaacactcccctttccatgtttgcaaaacttctgccttgtttattccattgcttttagttgattaaagtgggtggattagaaaagtatcttttcggccgggtgcggtggctcacgcctgtaatcccagctctttgggaggctgaggcaggtggatcacgaggtcaggagatcgagaccatcctggctaatatggtgaaaccccgtctctactaaaaatacaaaaaattagccaggcgtggtggcaggcgcctgtagtcccagctacttgggaggctgaggcaggagaatgacataaacccgggaggcggaagttgcagtgagctgagatcgcgccactgcactccagcctgggcgacagagcaagactccgtctc

SEQ ID NO: 804 - DNA, 2360 bp, Homo sapiens
cgcggccccaagcggttcccgagcccaggcccgcgccgagcccaggtcctagagcagctccagcaggatggcggctccagcgtctctaaggcctgcagggggtccagccccatggggggcgccctaggcctccgacagctccccatctgtgctcctgcctgccggccatcctcaggccactcgccatgggcggctgcttctccaaacccaaaccagtggagctcaagatcgaggtggtgctgcctgagaaggagcgaggcaaggaggagctgtcggccagtgggaagggcagcccccgggcctaccagggcaatggcacggcccgccacttccacacggaggagcgcctgtccacccctcacccctaccccagccctcaggattgcgtggaggctgctgtctgccacgtcaaggacctcgagaatggccagatgcgggaagtggagctgggctgggggaaggtgttgctggtgaaggacaatggggagttccacgccctgggccataagtgtccgcactacggcgcacccctggtgaaaggcgttctgtcccgtggtcgggtgcgctgcccctggcacggcgcctgcttcaacatcagcactggggacctggaggacttccctggcctggacagtctacacaagttccaggtgaagattgagaaggagaaggtgtacgtccgggccagcaagcaggccctacagctgcagcgaaggaccaaggtgatggccaagtgtatctctccaagtgctgggtacagcagtagcaccaatgtgctcattgtgggtgcaggtgcagctggcctggtgtgtgcagagacactgcggcaggagggcttctccgaccggatcgtcctgtgcacgctagaccggcaccttccctacgaccgtcccaagctcagcaagtccctggacacacagcctgagcagctggccctgaggcccaaggagtttttccgagcctatggcatcgaggtgctcaccgaggctcaggtggtcacagtggacgtgagaactaagaaggtcgtgttcaaggatggcttcaagctggagtacagcaagctgctgctggcaccagggagcagccccaagactctgagctgcaaaggcaaagaagtggagaacgtgttcactatccggacgccagaggatgccaatcgcgtggtgaggctggcccgaggccgcaacgtggtcgtcgtgggagccggcttcctggggatggaggtggccgcttacctgacggagaaggcccactctgtgtctgtggtggagctggaggagacgcccttcaggaggttcctgggggagcgcgtgggtcgtgccctcatgaagatgtttgagaacaaccgggtgaagttctacatgcagacggaggtgtctgagctgcggggccaggagggaaagctgaaggaggttgtgctgaagagcagcaaggtcgtgcgggctgacgtctgcgtggtgggcattggtgcagtgcccgccacaggcttcctgaggcaaagcggcatcggtttggattcccgaggcttcatccctgtcaacaagatgatgcagaccaatgtcccaggcgtgtttgcagctggcgatgctgtcaccttcccccttgcctggaggaacaaccgcaaagtgaacattccacattggcagatggctcatgctcaggggcgcgtggcagcccagaacatgttggcgcaggaggcggagatgagcactgtgccctacctctggaccgccatgtttggcaagagcctgcgctacgcgggctacggagaaggcttcgacgacgtcatcatccagggggatctggaggagctgaagtttgtggctttttacactaaaggcgacgaggtgatcgccgtggccagcatgaactacgatcccattgtgtccaaggtcgctgaggtgctggcctcaggccgtgccatccggaagcgggaggtggagactggcgacatgtcctggcttacggggaaaggatcctgagctcacatgcagtagacttgggcaggcaaagggggcaccaagggcacaggccaagccttgggggcaggtgccaatctccagtcccaggatcccccagggcagaacctgagccctcccagtgcttgccttcagccacctggctcccctcctgggaggcctctgctggatccagaagatgctcaaccctcaaggcctctgctgccactgacagctggcactggaggcaggacaagccctgcctcttctccctctattgggactggtcccctgaagaaccctgcaacatgttagacattaccgtaaaattaaaacgcacaaatttgcagaaaaaaaaaaaaaaaaaaaaaaaaaaaaaaaaaaaaaaaaaaaaaaaaaaaa

SEQ ID NO: 805 - DNA, 2349 bp, Homo sapiens
ccccgcccccccgcgcccgcggccccaagcggttcccgagcccaggcccgcgccgagcccaggtcctagagcagctccagcaggatggcggctccagcgtctctaaggcctgcagggggtccagccccatggggggcgccctaggcctccgacagctccccatctgtgctcctgcctgccggccatcctcaggccactcgccatgggcggctgcttctccaaacccaaaccagtggagctcaagatcgaggtggtgctgcctgagaaggagcgaggcaaggaggagctgtcggccagtgggaagggcagcccccgggcctaccagggcaatggcacggcccgccacttccacacggaggagcgcctgtccacccctcacccctaccccagccctcaggattgcgtggaggctgctgtctgccacgtcaaggacctcgagaatggccagatgcgggaagtggagctgggctgggggaaggtgttgctggtgaaggacaatggggagttccacgccctgggccataagtgtccgcactacggcgcacccctggtgaaaggcgttctgtcccgtggtcgggtgcgctgcccctggcacggcgcctgcttcaacatcagcactggggacctggaggacttccctggcctggacagtctacacaagttccaggtgaagattgagaaggagaaggtgtacgtccgggccagcaagcaggccctacagctgcagcgaaggaccaaggtgatggccaagtgtatctctccaagtgctgggtacagcagtagcaccaatgtgctcattgtgggtgcaggtgcagctggcctggtgtgtgcagagacactgcggcaggagggcttctccgaccggatcgtcctgtgcacgctagaccggcaccttccctacgaccgtcccaagctcagcaagtccctggacacacagcctgagcagctggccctgaggcccaaggagtttttccgagcctatggcatcgaggtgctcaccgaggctcaggtggtcacagtggacgtgagaactaagaaggtcgtgttcaaggatggcttcaagctggagtacagcaagctgctgctggcaccagggagcagccccaagactctgagctgcaaaggcaaagaagtggagaacgtgttcactatccggacgccagaggatgccaatcgcgtggtgaggctggcccgaggccgcaacgtggtcgtcgtgggagccggcttcctggggatggaggtggccgcttacctgacggagaaggcccactctgtgtctgtggtggagctggaggagacgcccttcaggaggttcctgggggagcgcgtgggtcgtgccctcatgaagatgtttgagaacaaccgggtgaagttctacatgcagacggaggtgtctgagctgcggggccaggagggaaagctgaaggaggttgtgctgaagagcagcaaggtcgtgcgggctgacgtctgcgtggtgggcattggtgcagtgcccgccacaggcttcctgaggcaaagcggcatcggtttggattcccgaggcttcatccctgtcaacaagatgatgcagaccaatgtcccaggcgtgtttgcagctggcgatgctgtcaccttcccccttgcctggaggaacaaccgcaaagtgaacattccacattggcagatggctcatgctcaggggcgcgtggcagcccagaacatgttggcgcaggaggcggagatgagcactgtgccctacctctggaccgccatgtttggcaagagcctgcgctacgcgggctacggagaaggcttcgacgacgtcatcatccagggggatctggaggagctgaagtttgtggctttctacactaaaggcgacgaggtgatcgccgtggccagcatgaactacgatcccattgtgtccaaggtcgctgaggtgctggcctcaggccgtgccatccggaagcgggaggtggagctgtttgtgctgcacagcaagactggcgacatgtcctggcttacggggaaaggatcctgagctcacatgcagtagacttgggcaggcaaagggggcaccaagggcacaggccaagccttgggggcaggtgccaatctccagtcccaggatcccccagggcagaacctgagccctcccagtgcttgccttcagccacctggctcccctcctgggaggcctctgctggatccagaagatgctcaaccctcaaggcctctgctgccactgacagctggcactggaggcaggacaagccctgcctcttctccctctattgggactggtcccctgaagaaccctgcaacatgttagacattaccgtaaaattaaaacgcacaaatttgcagatc

SEQ ID NO: 806 - DNA, 2002 bp, Homo sapiens
gcttgagttgtttgccggctcccgggccgccagacgctcggagggagcccggccggctcggactgggcggccgggagggagggcgccccgggtcacgacggcgcccgcaagccgagcgcggccgggacgtgcaccatggacccaaaggcgggcggcggcggcgaggaggacgactgcgtggactcgggcgccgagaccggagggtccgactacagccacctgtcctccacgagcagtgagctttccgttgaagaggcgcaggaccctttcctggtcagcatccacataatcgcagacccaggggagtcccagcccctgcaggaggccatcgacaacgtcctggcgtggatccaccccgacctcccgctgttccgggtgtccgagaggcgggcgtcccggcggcggcggaagccccccaagggcgctcagccagcgctggctgtggtgctgttcctgcaggaggagtacggcgaagagcagatcctgcagctgcaccgcacactgcagcagccgccctggcgccaccaccacaccgagcaggtgcacggccggttcctgccctacctgccctgcagccaggacttcttcacgctggcccctgggacgccgctttgggccatccggcccgtgcactacggcaaggaaatcgtgcgcttcaccgtctactgtcgctacgacaactatgctgacagcctcaggttctaccagctgattctccggaggagccccagccagaagaaagcggacttctgcatcttccctattttttccaacctggatgtggacatccagttctccctgaaaagactgccctgtgaccagtgcccggtgcccaccgactcctccgtgctggagttccgagtgagggacataggcgagctcgtgcctctcctgcccaacccttgcagccccatcagcgaggggcgctggcagacggaggaccatgataggaacaagatcctcctacaggcacaaagggtgcataagaagtttcctaaacctggcagagtacatcatgcctccgagaagaaacgtcattccactcctttgccgagcactgctgtaccaagccatacacctggcagcagccagcagtccccgctcaacagtcctcacccggggcccatccggacaggcctgcctcctgggcaccagcaggaatttgccggacgagccaacagcacccccaaccctccctggtctttccagagaagcaagtccttgttttgtttgcccacgggaggcccctccctggcctcctcagctgaaccacagtggttttcaaacacaggtgccccagggcacagggcatcagagtggaggcatggccacctcctctccatcgatgacctagagggggcccaggagacagacgtggacacaggcctgcggctgtcctcatcggacctgtctgtggtctctgcatattctgcacccagtaggttctgcagcacagtggagacacccctcccctccgaaagatgcagcagccactgggcagctcacaaggattccagggagggaccactgcccactgtcagcagggtgaccacagaggcctcctgggcttccctccctttcttcaccaaaaggtcttccagctcctcagcgacagctcgtgctgctcccccagctcccagcacctccaccctcacagactcctccccacagctcccatgcgatacccccaaagtcaagcagactgatggagacatgccaccacccccagggtcggctggccccggggataacgacatggaggaattctacatctgaatgccctctgctcttgttctcgaaacacacaaactcagagacacagactcaggccccactgcccctctggccactgagcacaccacattcttcatgatccatttcccaggagcccgtagcacatttgcctaccacccactcttagctggggggtggtatatctctagagacacagcagaaaaatactggcatttttatgcaaataaattctcaacaaacttgtcat

SEQ ID NO: 807 - DNA, 3047 bp, Homo sapiens
gagtgtgtgtgagtgtgagcgtgtgtctgtgtgtgcgtgcgcggccgccctgcctctgcccgctccccgggcgcggagccgcgggtttcatggggcgattgcagcgattcccccacccagagcgacctgcgggcagcggcggcagtggcaggagccgcctttccgattccctacgatgcgggtgctgagctatggcaaagggcagcgaagtgacgagcgagacccgcgtacgactgtgaaagccacctggagccaccttgccgggattgtacctgcaggcagaaagtcttcctacgaccgtcttttcccttagaggcaccagaatccctgtaaccattcatccaggtgttgagaagatatgtagcagccgagcacccatcttttgacaccgtcctctgaaatcagctttggagatgctttcactctgtccgtcttctgcagcagccaggcagagtgccgactccttcacagccgtgaggaactcttcaggctccagaagctcttaaacctgatctacaatggaaaaaattcttttttatctgtttctcattggcatagcagtgaaagctcagatctgtccaaagcgttgtgtctgtcagattttgtctcctaatcttgcaaccctttgtgccaagaaagggcttttatttgttccaccaaacattgacagaagaactgtggaactgcggttggcagacaattttgttacaaatattaaaaggaaagattttgccaatatgaccagcttggtggacctgactctatccaggaatacaataagttttattacacctcatgctttcgctgacctacgaaatttgagggctttgcatttgaatagcaacagattgactaaaattacaaatgatatgttcagtggtctttccaatcttcatcatttgatactgaacaacaatcagctgactttaatttcctctacagcgtttgatgatgtcttcgcccttgaggagctggatctgtcctataataatctagaaaccattccttgggatgctgttgagaagatggttagcttgcatacccttagtttggatcacaatatgattgataacattcctaaggggaccttctcccatttgcacaagatgactcggttagatgtgacatcaaataaattgcagaagctaccacctgaccctctctttcagcgagctcaggtactagcaacctcaggaatcataagcccatctacttttgcattaagttttggtggaaaccccttgcattgcaattgtgaattgttgtggttgaggcgtctgtccagagaagatgacctagagacctgtgcttctcctccacttttaactggccgctacttttggtcaattcctgaagaagagtttttgtgtgagcctcctctcattactcgtcatacacatgagatgagagtcctggagggacaaagggcaacactgaggtgcaaagccaggggagaccctgagcctgcaattcactggatttctcctgaagggaagcttatttcaaatgcaacaagatctctggtgtatgataacggaacacttgacattcttatcacaactgtaaaggatacaggtgcttttacctgcattgcttccaatcctgctggggaagcaacacaaatagtggatcttcatataattaagctccctcacttactaaatagtacaaaccatatccatgagcctgatcctggttcttcagatatctcaacttctaccaagtcaggttctaatacaagcagtagtaatggtgatactaaattgagtcaagataaaattgtggtggcggaagctacatcatcaacggcactactcaaatttaattttcaaagaaatatccctggaatacgtatgtttcaaatccagtacaatggtacttatgatgacacccttgtttacagaatgatacctcctacgagcaaaacttttctggtcaataatctggctgctggaactatgtatgacttgtgtgtcttggccatatatgatgatggcatcacttccctcactgccacaagagtcgtgggttgcatccagtttactacggaacaggattatgtgcgttgccatttcatgcagtcccagtttttgggaggcaccatgattattattattggtggaatcattgtagcatctgtgctggtattcatcattattctgatgatccggtataaggtttgcaacaataatgggcaacacaaggtcaccaaggttagcaatgtttattcccaaactaacggggctcaaatacaaggctgtagtgtaacgctgccccagtccgtgtccaaacaagctgtgggacacgaagagaatgcccagtgttgtaaagctaccagtgacaatgtgattcaatcttcagaaacttgttcgagtcaggactcctctaccactacctctgctttgcctccttcctggacttcaagcacttctgtgtcccaaaagcagaaaagaaagactggcacaaagccaagtacagaaccacagaatgaagccgtcacaaatgttgaatcccaaaacactaacaggaacaactcaactgccttgcagttagttagccgtcctcccgattctgtcacagaggggcccacgtctaaaagagcacatataaagccaaatgctttgctgactaatgttgaccagattgtccaggaaacacagaggctggagttaatctgaagagcaccacttctcctctctctcctgaaaaaatttgccactgatatttttactggataaaattcaaaaatgtttcaattcacaaaggctaattgttgaactggtgtcgtagaagaaattgtctacaggagccaaggtgaaagtctctgatgacggcggaactggctccattagaccatggttcatcctcttttaaaaccaaatttttttttcttctggcctacaagtatttttttttaaaaaagaaaaaaagcctacattggcatcaagttctgtatcaatccatcttacattgccatccatgatttaacagactgtagaatcttgaataatctatatcactttaacaaataaatgttttactatgac

SEQ ID NO: 808 - DNA, 2270 bp, Homo sapiens
aaaatgtagacagtgatgatctggtaactggcacacttcccaagctcaagagctcaaaagaatggttggagcccaagcccctttgttttatggaggttttagctaaagaagatactgaggcagctattcaatcaatattatacaaagaaaattctgtaattaagggaaatgcatttatagaacattatgatccaaaagagtatgatcccttttatatgagcaagaaggaccccaattttctgaaggttaccatcccaccatttcatgaccctttgaaaaaagcacaatatgacaaggataatgaaaaaagaactcttcttcagtgtgagactggcaaaatatattcaataaaggaattcaaagaagttgagaaggttcagctgcattccagattcccacaaatttctaattcaaggcactttataactccaaacgagtggctgaaactgcctacaagatacatagaaagtgaattttgtagaaggagaagaaacaaagggtcatcctttctagaaagagaaccgctgtgctatcaggagggaaataatccaagtgccaaagaggccatctctgaagggtatttttcttccttgagcctcagccaggaacgggaggaagaccaggatgggtcttgttctgtctcccagctggagtggatacaagcatggcttgcttcagcctcaacctcccggactcaagcgatcctcccgcctcagcttcctgagtggctgggactgcgggtgcctgccaccatgcccggctgatttttaaacgttttgtagagacgcggtcccattgtgttgcccaggctggtcttgaacacctggcctcaggtgatcctcctacctcggcctcccaaagtgctgggattacatgcatgagccaccatgactggcctagactttttgatttaaagagactttttggatagaaatgcttttctctattacagttataaatgactaaaaatactagctatgccaaaatggcaaccagaggccgactgcaaagcttcaaaaggcttgatgctctcctggtagacaagtcttcagtctcttaaatgtttttttcatatgttgacattgaaatttcattttgtgtagatgttgggattatgtctcattcatttatttattcatcattcacttagtaagtatttaagtgcctgtttttcccaggtgctctgccaggttctggggatataaggatgagccaacataggctctctgccctaaagttagtgggagaaacagtaacaaaagattttaatactatgagattaactgacttagttgtggtatgtagaaagagacacagagcctgcagcaagagcctaggtgaagactcagtgaagcactacctattgaaaggagaatctttcaaatccttaacagttattttcaccatgtaaaaaaggcgacattgccagggaacatcaagtaaagggacaaatgctcagtcagagttttcgcattttcctgattggcccaaatgttttgaagtcggtttcttcacatcagaatccaaaccaggtccacctgtggcaccttcacccttcggagccggacgcgtcacttaaaaccattcctcttacgttgtcgccctcaatcttacagggattctcctgtccatggctgccaccaaaactgcgagttatgatgaacatttcaggccagaaaagttaagagaatggccggagcccgagtccgtttctttaatggaggattgtgacagtgcctgctttaaagcaggcgttgaaggggaatgttcgggctcagatttggccgagagtgtggccaagagtgtttccagtcgccagcctgggggctggcgcaccgacgggggcgggcagccgggcgggtgaaggcagccaccccagctccccggcagaagccaggtctgggcttgccagtcaattctgcatacttcagcgtctggtattagctagagaagacattgatgaagcagtatgtgcaatattatttaaagaaaattccattgtgaaggttacagtcccaccatttgttgatcctctgtttcaaagacagcaagaggtggatgaagagaggagaactggtcttcagtgtgagacaggaaaacgacattccataaaagaacttgaagaaatagagaaggccaggctgcatgccagctcgccctacttcactttcacttcacactgtgtgattccaaaagagtggcataaagcctctgcaagagccaggagtaaaacttacaaatacagtcctgaaaagctcatctgtgcagac

SEQ ID NO: 809 - DNA, 4581 bp, Homo sapiens
aaaagacagcttttcttcctggagaacagactttttcagcaggattttcctttcagtgaaacataatttgacttgaaaggaacccagggaaaagtgtccaggtgtgagcatgagcgggtagaggtgtgcccttgtttgcttcaggctgtctgcttttcgcccctgactgttttttctgtttctggccatggaggaagagaaagatgacagcccacagctgacggggattgcagttggagccctcctggccctggccttggttggtgtcctcatccttttcatgttcagaaggcttagacaatttcgacaagcacagcccactcctcagtaccggttccggaagagagacaaagtgatgttttacggccggaagatcatgaggaaggtgaccacactccccaacacccttgtggagaacactgccctgccccggcagcgggccaggaagaggaccaaggtgctgtctttggccaagaggattctgcgtttcaagaaggaatacccggccctgcagcccaaggagcccccgccctccctgctggaggccgacctcacggagtttgacgtgaagaattctcacctgccatcggaagttctgtacatgctgaaaaacgttcgggtcctgggccactttgagaagccgctgttcctggagctttgcaaacacatcgtctttgtgcagctgcaggaaggggagcacgtcttccagcccagggagccggaccccagcatctgtgtggtgcaggacgggcggctggaggtctgcatccaggacactgacggcaccgaggtggtggtgaaagaggttctggcgggagacagcgtccacagcctgctcagcatcctggacatcatcaccggccatgctgcaccttacaaaacggtctccgtccgcgcggccatcccgtccaccatcctccggcttccagctgcggcttttcatggagtttttgagaaatatccggaaactctggtgagggtggtgcagatcatcatggtgcggctgcagagggtgacctttctggctctgcacaactacctcggcctgaccacagagctcttcaacgctgagagccaggccatccctctcgtgtctgtagccagtgtggctgccgggaaggccaagaagcaggtgttctatggcgaagaagagcggcttaaaatgccaccgcggctccaggagtcctgtgactcagatcacgggggcggccgcccggcagctgctgggcccctgctgaagaggagccactccgtccccgcgccttccattcgcaaacagatcttggaggagctggagaagcccggggcaggtgaccctgacccttcggccccacaagggggcccaggcagtgccacttctgatctggggatggcatgtgaccgtgccagggtcttcctgcactcggacgaggaccccgggagctccgtggccagcaagtccaggaaaagcgtgatggttgcagagataccctccacggtctcccagcactcagagagtcacacggatgagaccctggccagcaggaagtcggatgccatcttcagagctgccaagaaggacctgctcaccctgatgaagctggaagactcatctctgttggatggccgggtggcgcttctgcacgttcctgcaggcacggtggtgtcaaggcagggagaccaggacgccagcatcctgttcgtggtctcggggctgctgcacgtgtaccagcggaagatcggcagccaggaggacacctgcttgttcctcacgcgccccggggagatggtgggccagctggccgtgctcaccggggagcctctcatcttcaccgtcaaggccaacagggactgcagcttcctgtccatctccaaggcccacttctatgaaatcatgcggaagcagccgaccgtcgtcctgggtgtggcgcacactgtggtgaagaggatgtcgtccttcgtgcggcaaatcgactttgccctggactgggtggaggtggaggccgggcgagcaatatacaggcagggggacaagtccgactgcacgtacatcatgctcagcggccggctgcgctctgtgatccggaaggatgatgggaagaagcgcctggccggggagtacggccgaggagacctcgtcggcgtggtggagacactgacccaccaggcccgggcgaccacggtgcatgccgttcgggactcagaattggccaagctgccggcaggagccctcacgtccatcaagcgcaggtacccacaggtggtgactcggctgattcatctcttgggtgagaagatcctgggcagcctccagcagggacctgtgacaggccaccagcttgggctccccacggagggcagcaagtgggacttggggaacccggctgtcaacctgtccacggtggcagtgatgcccgtgtcagaggaagtgcccctcaccgccttcgccctggagctggagcatgccctcagcgccatcggcccgaccctgctgctgactagtgacaacataaaacggcgccttggctccgctgccctggacagtgttcacgagtaccggctgtccagctggctggggcagcaggaggacacccacaggatcgtgctctaccaggcagatggcacgctcacaccctggacccagcgctgcgtgcgccaggccgactgcatcctcatcgtgggcctgggtgaccaggagcccacagtgggcgagctggagcggatgctggagagcacagctgtgcgtgcccagaagcagctgatcctgctgcacagggaggagggcccggcgccagcgcgcaccgtggagtggctcaacatgcggagctggtgctccggccacctgcacctctgctgcccgcgccgcgtcttctccaggaggagcctgcccaagctggtggagatgtacaagcatgtcttccagcggcccccggaccgacactcagacttctcccgcctggcgagggtgctgacgggcaacgccattgccctggtgcttgggggagggggagcaagaggctgtgcccaggtgggcgttctcaaggccttggcggagtgcggcatccctgtggacatggtgggaggcacgtccatcggggccttcgtgggtgccctgtactctgaggagcggaactacagccagatgcggatccgggccaagcagtgggccgagggcatgacgtccttgatgaaggccgcgctggacctcacctaccccatcacgtccatgttctccggagccggcttcaacagcagcatcttcagcgtcttcaaggaccagcagatcgaggacctgtggattccttatttcgccatcaccaccgacatcacagcctcggccatgcgggtccacaccaacggctccctgtggcggtacgtgcgtgccagcatgtccctgtccggttacatgccccctctctgtgacccgaaggacggacacctgctgatggacgggggctacatcaacaacctcccagcggatgtggcccggtccatgggggcaaaagtggtgatcgccattgacgtgggcagccgagatgagacggacctcaccaactatggggatgcgctgtctgggtggtggctgctgtggaaacgctggaaccccttggccacgaaagtcaaggtgttgaacatggcagagattcagacgcgcctggcctacgtgtgttgcgtgcggcagctggaggtggtgaagagcagtgactactgcgagtacctgcgcccccccatcgacagctacagcaccctggacttcggcaagttcaacgagatctgcgaagtgggctaccagcacgggcgcacggtgtttgacatctggggccgcagcggcgtgctggagaagatgctccgcgaccagcaggggccgagcaagaagcccgcgagtgcggtcctcacctgtcccaacgcctccttcacggaccttgccgaaattgtgtctcgcattgagcccgccaagcccgccatggtggatgacgaatctgactaccagacggagtacgaggaggagctgctggacgtccccagggatgcatacgcagacttccagagcacctcagcccagcagggctcagacttggaggacgagtcctcactgcggcatcgacaccccagtctggctttcccaaaactgtctgagggctcctctgaccaggacgggtagaggcctctgctaaagagcccggatgcagcgtcttccgtgggactgtccccaaggctgaggctcctgccaagtcctaggggcctctgtacctgccctgctggaagccctgacttccccggggccccaggctgtgttagggttctctgggcctcttctttgtaccagcagccctgcatacagggccctgtgagcccccctgcagtcctgtgaggcccctgaagctctgtgaggcccctgaagctctgtgaaccccctgcagccctgtgaggccccccgaagccctgtgaggccccccgaagccctgtgaaccacctgctgccctgtgaggcccccaaagctctgtgaactgcctgctgtcctgtgaactgcctgctgccctgtgaggtgtgggagccctgatgctgccgtgtgatgtttcaataaaggtggatctcactgtt

SEQ ID NO: 810 - DNA, 2399 bp, Homo sapiens
agtctaaagcctggctcccttccggcctggcgcgctacggttcccgcaggcgctccgcttcagcaccgcgggcgtggacagctccggggcgcgaggctctgggactcatctgcaggaagtgaacctggcaggaggcttgcttcaggtttttaggaaccatttttgcaattggagatgtttgtgaggaaaaaaatctctgttgaggggggtactgtgtgtctctgaagtggcctctgtgttgcgtctcaggcgtcctggtcctgtcctggtacccacctggcatggctgatgataacggggagccctcagatgacctggtgcccgccattctggacaccgcccatcagtacagcatccaggtatggctcccatggtgcattttaccgctataagaacagcatgggcaagagcctcccactcttttatatctacgactcatacctgacgtcccctgaggcctgggcccacctcctgacaccaaacgggccccattcgatccgcaacacgccctacgatggggtcttcatagcgctgctggtggaggagggccacacccacgatatcctggccgccggatttgacggcatgtacacctactttgcctccaatggtttctcctttggttcttcccatcagaactggaaagctgtgaagaacttttgtgatgccaacaacctcatgttcatccccagtgtggggcctggctacatagacaccagcattcggccctggaacaaccacaatacgcgcaacagggtcaatggcaagtactatgagacggccctgcaggcggccctgacagtgaggcccgagatcgtttccattacctccttcaatgagtggcacgagggcacccagattgagaaggccattcccaagaagacacccacccgcctgtatttggactacctgcctcaccagcccagcctgtacctggagctgacacgccgctgggcggagcacttcatcaaagagaaggagcagtggctcatgtgaggggcctgtaaatgggcgtgaggtgctgatgtccttgccttgctggaagatgtcaccatgtggggttcagctgaggttgtagccactcactcgttcccaggtcagaggtcagcagatgggtgtttctgggtgggccgtcaggcatgggcctgtgcaacacagagcccgttcctcaggcgagtggtgctgaggtgctctgtggtgatgggaacggcagaggctggcaggtgactgaacttagcccagggcagctccacatcctgggaacactttcatgtaaccccttctagttttgaactctgcagcaggctggtgctgtgtagtggccacccagtcaccacccttggaagggtgtcagggtctgggctcgcatgcaccctgctcccttctgccagcctgcatcctctcctcaggcctccttcccacatcatctgtcttctctaagttagggaaccatatttgagactttcaaaaagggaacttctaggtttaagctcctcccagtagattcctgaacccaattatcaggaaatcatcctgagcactcacaggttcatttaacactcactcatcaagcaccttcctatgtgctaggtgctggggaaaacttgaccaaggaagagttcctgtcctgaagcttccaggacccagctttccttttctggtgtggccttgtagctagtgcctgggcacaggtgtttttctttttgcagttttacctagtgctgggagttcagttctttttcctctagaaaaatacctctgtgctccagagcctaatttttcccagatgcatatttagctctagggagaggactaggaggaaatccccctccctttagctgcctgaactgactgaggcccactcactagagccatgttcagtgctactgtgattagtagtaattaaatatgaactggtattctcaagtaagcattccttttgctctctttaagacctcacagattctgaccttagattctgtgacaaactgatacaggagctgggctggctatggctttaccacaacaagtaggtttgcttaagaaattactaaacaatggctgggcgtggtggctcactcctgtaatcccagcactttgggaggccgagatgggcggatcacgaggtcaggagatcgagaccatcctggctaacagggtgaaaccacgtctctactaaaaatacaaaaaaattagccaggcgtagtggtgggcgcctgtagtcccagctacttgggaggctgaggcaggagaatggcgtgaacccgggaggcggagcttgcagtgagccgagatcacgccactgcactccagcctgggcgacagagcgagactccgtctcaaaaaaaaaaaagttactaaacaaggctgggcgtggtggctcacacctgtaatcccag

SEQ ID NO: 811 - DNA, 2446 bp, Homo sapiens
cgcgactgcacctccaagcggcccggaacccgcggcttccctggctcccgtgagcatctcaccgggcggcactggccagcgccagccctcgggccggcccggatgaccagactcctgtagacacccgccgccctctcccggctcggcgcagccgccgcccgcgcgcgactcgccccgggaccccgcacaggttgaagaaatatggagatcaacacaaaactgctcatcagtgttacctgtatcagctttttcacctttcagcttcttttctactttgtaagttactggttttcagcaaaagtttccccaggtttcaatagtctcagcttcaaaaagaagattgaatggaactcaagggtagtatccacatgccattctttggtggttggtatttttggcctgtacattttcttattcgatgaggctactaaagctgatccactttggggtggtccatcacttgcaaacgtgaatattgctattgcctcaggctacctcatttctgatttgtccattataattttgtattggaaagtgattggtgacaaattttttataatgcatcattgtgcgtccctgtatgcatactaccttgtactgaaaaatggagtgctggcatacattgggaattttcgcctgcttgcagagctttccagcccgtttgtgaatcagcggtggttctttgaagctctgaagtatcccaagttttctaaagctatcgttatcaatggaatactcatgacagtagtattcttcatcgtgcggattgcctcaatgcttcctcattatggcttcatgtattccgtgtatggaacagaaccctacataaggcttggagttttaatccagttatcctgggtcattagttgtgttgttttggatgtgatgaatgtcatgtggatgatcaaaatttcaaaaggttgcatcaaagtcatctctcacatcagacaagagaaagccaaaaatagtcttcagaatggaaaacttgattaaaagagtgctaccgataagcaaacttcattactacccagcatatctgctgataggatgaattcttggcatgtttttgtgtacctttcttaattataattgttattcaggatttcagtgtcattttttttaaaccttagaaaagagaaggccgggcacggtggctcatgcctgtaatcccagcactttgggaggccaaggtgggtcgatcactgaggtcaggagttcgagactagcttggccaacatggtgaaacctcatctctactaaaaatacaaaaaaaagtagctgggcgtggtggttggcgcctgtaatcccagctactcgggaggctgaggcaggagaatcgcttgaacccgagagacggaggttgcagtgagctgatattgtgccactgcactccagcctgggcgacagagcaagactctgtctcaaaaaaaaaaaaaaaaaagagagaaactaaaattaaaatttagttttcatcccaagatgtcttttctgcctttcttttgccttatttacaagcatggataaaaatcttaaaggtttaaataaaaatgatcaatataatggtgaatcttttgagaaatctcttaactgcattggtattttttctctgtgaaagatgactatgataatctggtacaaatggttttatgtcaccaattttgctgcaagaatgggaactgcttttaaatctgtaaatagctcttaacatttgttgtatgcactcttttcttactatggctgtcaacacttgtgtagggtttaatttctaaattgttggcatgttctttttctcaggctattcagaagtaacaacatttttcatttcagacatgcaatcacctattaatgatgaaatattttaccactttgggaatatttaattagtttagtcatggagaatacttcccacattttaagatttttcaaatatcactgtcatttctattttagcattttatcaaattattgcttttttattttataataaggcttaagacagattatagacctccttaagagatgagtttcttcttctaaaaatgcatgttgatagaggactatttaggctaatcggaggaatcattaagaaagaaagttttaacactgtttatccctatctgctttccttgcactttttctgtgaaaaatattttctgtttgcaaaatcttccctgagttctgaacccagcaccatcagtaccaaagtcttatgcaatatgtatttattatgctcctgaaataggcctcttcttgatgagacccaaactattacaaaaatatcagtattcatattttactcacaattcatacccgtgcttacttagttggcattttagtgctttgaatttctatcttaaagcacagaaaaaaaaaggtaatttaatccaagtattctatcatcaaaattattgtctgattatatgaagataaatgactggcgactctg

SEQ ID NO: 812 - DNA, 3012 bp, Homo sapiens
aaccgctacggcgtttgaaagtgtccgggttgcttaggatccctacaggtagcgcctctggatacatgcgtggtctgctgacccagagagaaacgaaagcagaactgtttggcgggagatcatgtcagccgtggtagctcagacgctgcatgtttttggtcttcgatcccacgtggccaacaatatcttctacttcgatgaacagatcattatatttccttcaggaaatcactgtgtgaagtacaatgtggatcagaaatggcaaaaattcattccaggctcagagaagagtcagggcatgttggccttgtccatcagtcccaatcggcggtacctcgctatctctgagactgtgcaagaaaaacctgccatcaccatttatgaattgtcatccatcccttgccggaagcgcaaagttcttaataattttgacttccaagttcagaaatttattagcatggctttttctccagactccaaatacctattggctcagacgtcacctccagagtcaaatcttgtctactggctgtgggaaaaacagaaagtaatggccattgttagaatcgacactcagaacaaccctgtctaccaggtgagcttcagtccacaggataacactcaggtgtgtgtcactggaaatgggatgtttaagcttctccgttttgctgagggaaccctgaagcaaaccagctttcagaggggagaaccccaaaactatctagctcacacctgggtggctgatgacaagattgtcgttggcactgacacaggcaaactcttcctctttgaatctggagatcagcgttgggagaccagcataatggtcaaggaacctaccaatggctcaaagagcctggatgtcattcaggaatcagagagcctgattgaatttccaccagtcagttctccactcccttcctatgaacagatggtggcggccagtagccatagccagatgtccatgccccaggtgtttgccattgcagcctattcaaagggatttgcctgttctgctgggccagggagagttctgctgtttgagaagatggaagaaaaggatttttaccgtgagagcagagaaatcaggattcctgtggacccgcagagcaatgatccaagtcagtctgacaaacaggacgttctctgcctgtgcttcagcccctcagaggaaactctggttgccagcaccagtaagaaccaactctacagcatcaccatgtccctgacagagatcagcaagggggagcctgctcactttgagtatttgatgtatccattgcactcagcacccatcaccggtctagctacctgcatccgcaaaccccttatagccacctgttctctggatcgatccatccgcctttggaattatgaaacaaacaccctggaactatttaaggaataccaagaagaggcatattccatcagccttcatccatctggacacttcattgtagtagggtttgctgacaaactacgcctcatgaatctactcattgatgatatacgttctttcaaagaatactctgttagaggatgcggagagtgttcctttagcaatggaggtcacctgtttgctgcagtcaatggaaatgtgattcacgtttacaccaccacgagcctagagaacatctcaagcctgaaaggacacacagggaagattcgctcaattgtgtggaatgcagatgatagcaaactgatttctggtggcacagatggtgctgtgtatgaatggaatctgtccacaggaaagagagagacagaatgcgtgctcaagtcttgcagctacaactgtgttactgtctcccccgatgccaaaattatctttgctgttggatcagaccacaccctcaaggagattgcagattccttgatccttcgagagatatcggcgtttgatgtcacctacaccgccattgtcatctcacattctggacgcatgatgtttgtgggcacctcggtgggaaccattcgtgccatgaagtaccctctgcctctgcagaaggaattcaatgagtaccaggcccatgccggtcctatcaccaaggtgagcaggaccctctccccaggaacccagtcccacacctgcctgctacgtgccttgttcatcccttcaacctcccaatgtcttttctctctccttcttctctcttatttattcatccatcattcattgaatcaccatctattgactatgaatatactctttgtttaaactacttccaggaatttagcctaggaaatcatcagagatacacctaaaaatgtatgtacaacgttttcaccataatattatgcataataaggggccgtttggtggatgccgtagctgccgtgagtgtgggctgcacttgaccacagctgcctcctcctccagagaatgccccagactgaaaggagccatagccctgaagattggcccctacctctccctgagggtacaaaaggccaccccaggggcaataccatgagtacacatttgtaaattgtccttccattcacccttctcataaagtagtatctatgttcaacagtcaaaatgtggaagcaaccaagcatccatcgacagacgaatgcataagcaaaagatggtatatctatacaatggaacaataccctgcctaaaaaggaagggaattctgcaatgtgctaccacatggatgaaccttgaggatgttatgctaaattaaataaggccaaccacaaaaagataagtacagtgtgattccacttttaggagatacttagagcagtcagaatcacaaagacagagtggtggttggcaggggctgcaggaagggggaatgaggaatgattgtttcataggtatagagttttggttttacaagacaaaaggattatgggggtagttggtggcaatggctgcacaacattacaaatgtatttaataacatgaactgtacacttgaaaatggttaagatagcaaattttacagaatatgtattttacgacaattttaaaaatgaaataaaaaagaattatcttgc

SEQ ID NO: 813 - DNA, 2831 bp, Homo sapiens
gaggcacaacaagggactgggggttcgtctgctgggtttgcggagcagctagctactcggcgggatctcccggcaggatgggtaaaaagataaagaaggaagtagagcctcctcctaaggatgtgtttgacccattaatgattgaaagcaaaaaagcagcaactgtggtgttaatgcttaattctccagaagaggaaattttggctaaagcatgtgaagccatttataaatttgctttaaaaggtgaggaaaataaaacaaccctccttgaacttggagctgtggaacctttaactaagctactcacccatgaagacaaaattgtaagaagaaatgctactatgatatttggaatcctggcttctaataatgatgttaaaaaattgttaagggagttagatgtcatgaattctgtcattgcccagctcgctccagaagaagaagtagttatccatgagtttgctagtctttgtctagcaaacatgtctgcagagtacaccagtaaagtgcaaatatttgaacatgggggattagagccactcatcagactactgagtagccctgacccggatgtaaagaagaactctatggaatgcatttacaacttggtgcaggattttcagtgtcgagctaaacttcaagaactaaatgcaatacctcctatcttagatctcttgaagtcagaatatccagtgattcagttgttggctctcaaaaccttaggtgttattgcaaatgataaggagtctcgaacaatgctaagagacaatcaaggattggaccatcttattaagatcctagaaactaaggaattgaatgaccttcatatagaagcacttgcagtgatagccaattgccttgaagacatggatactatggtgcagattcagcagacagggggtcttaaaaagctcctgtcatttgcagaaaactctacaattcctgatattcagaagaatgcagcaaaagccattactaaagcagcttatgatcctgaaaatagaaaactttttcatgaacaagaggttgaaaagtgccttgtagcccttttgggttctgaaaatgatggaactaaaattgctgcttcccaagctatttcagcaatgtgtgagaattcaggcagcaaagattttttcaataatcaggggattccacagttaattcagttgctaaaaagtgacaatgaagaggtacgggaagcagcagctctagccctggcaaacctaaccacttgcaaccctgctaatgcaaacgctgctgctgaagctgatggtattgatccattaataaacctcctgtctagtaaacgagatggagccattgccaacgctgctacagtattaacaaacatggccatgcaggagcccctgcgcctgaacatacagaatcacgacatcatgcatgccatcatcagcccactgcgttctgcaaacacagtcgtgcagagcaaagctgctctcgctgtcaccgcaactgcgtgtgacgttgaagcccggactgagttaagaaattctggtggattggagcccctggtagagctgctacgctccaagaatgatgaagtgaggaagcacgccagttgggcagtgatggtctgtgctggtgacgagctgacggccaatgaattatgcaggctcggggctttagatatccttgaagaagttaacgtatcaggaactcggaaaaataaattcagtgaggcagcttataataagttgctcaataacaatctttccctgaaatacagccagactggctatttgtcatcaagtaacataattaacgatggattctatgattatggtcggataaatcccggcaccaaactgttgcctttgaaggagctctgcttacaagaaccaagtgacctacgggctgtactcttaatcaacagtaaatcttacgtttctccaccttcatctatggaagataaatcagatgttggttatggacaaagtatttcttcttcatcttccttaagaagatcaagtaaagaaaagaacaaaaaaaatagttatcattttagtgctggatttggatctcccatagaagacaaatcagagccagcttctggacgaaatactgttctcagcaaaagcgccaccaaagaaaaaggatggaggaaaagcaaaggaaaaaaagaagaggaaaaagtgaaagaggaggaagaggttatggtggtaccaaaatttgttggtgaaggaagctctgacaaagaatggtgtcctccctctgaccctgatttctctatgtatgtgtatgaggtgaccaaatcaatactgccaataaccaatattaaggaacagattgaggatctggcaaagtatgtagcagaaaaaatgggtggtaagattccaaaagagaaactacctgatttcagctgggaacttcacataagtgaactgaaatttcaacttaaatccaatgttataccgattggacatgtcaaaaaaggaatcttctaccatcgagctttgcttttcaaggctctggctgatagaattggcattggttgctccctagttcgcggagagtacggtagagcgtggaatgaagtcatgctgcagaatgactctcggaagggagtgattgggggcctccccgctcctgagatgtacgtgattgacctcatgttccatccaggtggactgatgaagttgagaagtcgagaggctgatctttacagattcatttaagccatcagacgaacacaagagaggctcaaacaagaaattcactgtgtacactctctaagacattctccaaattgattttatctctttaaataaaaactttaaataagaaaaaaaaaaaaaaaaaaaaaaaaaaaa

SEQ ID NO: 814 - DNA, 1152 bp, Homo sapiens
ggtcccggcgggcgcgaacccaccatgcagctgcagttccggagctggatgctggccgcgctcacgctgctcgtggtcttcctcatcttcgcagacatctcagagatcgaagaagaaatcgggaattcgggaggcagaggtacaatcagatcagctgtgaacagcttacatagcaaatctaatagagctgaagttgtaataaacggctcctcatcaccagctgttgttgacagaagtaatgaaagcatcaagcacaacatccagccagcctcgtccaaatggagacataaccagacgctctctctgaggatcaggaagcagattttaaagttcttggatgctgaaaaggacatttctgtcctaaagggaaccctgaagcctggagatattattcattacatcttcgatcgagacagcaccatgaatgtgtcccagaacctctacgagctcctccccaggacttcgccactgaagaataagcactttgggacttgtgccatcgtgggcaactcgggggtcttgctgaacagcggctgtgggcaggagattgacgcccacagcttcgtcatcaggtgcaacctggccccagtacaggagtatgcccgggatgtggggctcaagacagacctggtaaccatgaacccctcggtcatccagcgggcctttgaggacttggtcaatgccacgtggcgggagaagctgctgcaacggctgcacagcctcaatggcagcatcctgtggatccctgccttcatggcccggggcggcaaggagcgtgttgagtgggtcaacgagcttatcctgaagcaccacgtcaacgtgcgcactgcatacccctcgctgcgcctgctgcacgccgttcgcggatactggctgaccaacaaagtccacatcaaaagacccaccaccggcctcttgatgtataccctggccacacgtttctgcaaacaaatctacctctacggcttctggccctttccgctggatcagaaccagaacccagtcaagtaccactattatgacagcctcaagtatggctacacctcccaggccagcccgcataccatgcccttggagtttaaggccctcaagagcctacatgagcagggggctttgaaactgactgtcggccagtgcgatggggccacgtag

SEQ ID NO: 815 - DNA, 988 bp, Homo sapiens
gacacacacatctgcacctcaaccacagactacacttgctgaactggctcctggggccatgaggctgtcactgccactgctgctgctgctgctgggagcctgggccatcccagggggcctcggggacagggcgccactcacagccacagccccacaactggatgatgaggagatgtactcagcccacatgcccgctcacctgcgctgtgatgcctgcagagctgtggcttaccagagactctgctcctatcctccccaccttccccctaactgagcagcagtcctgagggccctgcctcccagtccctccttgttccagatgtggcaaaatctggcaaaggcagagaccaaacttcatacctcaaactctggggggcggcgggagctgagcgagttgtctacacgatgtcctggaccggagctgctcccggaactggcaggactacggagttcgagaagtggaccaagtgaaacgtctcacaggcccaggacttagcgaggggccagagccaagcatcagcgtgatggtcacagggggcccctggcctaccaggctctccaggacatgtttgcactacttggggagtttggagaagaccagatctatgaagcccaccaacaaggccgaggggctctggaggcattgctatgtgggggaccccagggggcctgctcagagaaggtgtcagccacaagagaagagctctagtcctggactctaccctcctctgaaagaagctggggcttgctctgacggtctccactcccgtctgcaggcagccaggagggcaggaagcccttgctctgtgctgccatcctgcctccctcctccagcctcagggcactcgggcctgggtgggagtcaacgccttcccctctggactcaaataaaacccagtgacctcacttcttttctctgcaaaaggtgcttgtggggctgggagtgcagacattggtgtttctgctgatgtcccttgtgaaaaaaaaa

SEQ ID NO: 816 - DNA, 2929 bp, Homo sapiens
cgcggtggcagctgcgggtcgcgggtcgcgggtcgcgagtcgccggtcgccggtcgcggcggagcctgggcgctgagaagggacttggagggaagcgggcctggagctgctgccgccgcccctgagctcggacgcgaaggctggccccgtccccgggctgccgccgtggtcctgcagtgaagaaaatgaggcacgaggaattgttaaccaagaccttccaaggcccagctgttgtgtgtgggactccgaccagccacgtatacatgtttaagaatggcagtggggactcgggggactcttctgaagaagagtctcaccgtgtggttttgcggccccggggcaaggagcgccacaagagcggtgtccaccagcctccccaggcgggagcaggtgacgtggtgctgctgcagcgggagctggcccaggaggacagcctcaacaagctggcgctgcagtatggctgcaaacacattttattttagacctaatggggctggagataccaggcagaatttaattccggatttctatgcattcagagtgattaacaatggcaaagttgcagatatcaagaaagtcaacaacttcatcagagaacaagacttatatgctttgaaatctgttaagattccagtgagaaaccatgggatcctgatggagacccacaaagaactgaaaccccttctgagcccgtcttccgagaccacagtgaccgtggaactgccagaggcagacagagcaggcgcgggcaccggtgcccaggccggccaactgatgggcttctttaaggggattgaccaggatattgagcgtgcagtgcagtcagaaatctttctacatgaaagttactgcatggacacctcccatcagccactgctcccggcacctccgaagacgcctatggatggtgcagattgtggcattcagtggtggaatgctgttttcatcatgctgctgattggtattgtcttgcctgtcttttatttggtctactttaaaatacaagctagtggtgagacccctaatagcttgaacacaactgtcatccccaatggctcgatggcaatgggtacagttccagggcaagcccccagactagcagttgcagtgccagccgtcacttctgcagacagccagttcagtcagaccacccaagcggggagctaagctttgtttttaaagactcggcccagctttagcaattggctgttgatgtgcctcagctgtcactggcgatgtcctaggggtgctgcattttgcttccggggaaggatggacacttttcagaagtcactgcagtattcccaattgcactggccctgggcatggccttacccagtctaagctggcaggatctaaaacagcagcgacctcggcccctatccagagaggtgcagcaagagagccatttccctgtgacatttagtggactggccagttcatagcagcactgtgaggacccccaagttggacgtgctcggagggaaagatttatggcctctgtcgagggacctgcagcgtgagagccagtggcatctgcgcggcttgcctggctcttgctgtatcctcacttcctgtggagcggggattggctctgagaaggagtgttctctgtctgcctggcaaaggtgctgtggaataggcttggcatgccaccctgttttagagagtgacagttacagttgtaacaagcctacttcatattggccccctcagttagcctttttgaggcaatgccatttctagagttgaaaaagccctggacccaaactgcggcactgttgaataaagggcagtcctactcctgtccttttagagtggcttagtgtgacacacaggcatctcccaggccaagcacacacaggctgcgcccagttccgcaggagccgtcccacagcgtggctctctggattctcccacttgtcctccttggaaggagctcttgctggccagtgtttggaggggaggatgagtgcctgtcactgaggcctcactatggttggcgtctgaagctgggcggtcgtcaggcctgtgctgagagccgcagcccctgtgcacacctaacacagggcgctccccctgctgcttccctggctcagttcttcggagctccagagtgagaaggccgcttcgtcctttttctctgggtgatgcccttagaataacactatatgcaatgtaactcacaatgttccaggaccaaagacttgatggaggggctagaggcgacccttgttgtaaaaggcgatcagaacacctgagggaggaaggggcttgcagttttcccagcccttctcgctgccaaggcagcagtggtgctgtggatgggctggggactgcgggacagagcctgctactacttgggagttggtgctgccctgtggcatggaggggtgggaggggctgagatggctgctggcccggcctccaagagttctggacaggaggcagacactgcccagatgctcggtggagggacagtgatggcctttgactcatgaggcctggagaaaagtatcaaaggtctcaccatgtaagagtgatttccgatttctctcctttcagttgtgtgaaaaaacagctggcctgggttccattagcaaattaaatcatcttcaatcttaaattagagaccagaatgatcttcaggataaaaagaacttctgaatctctgcaataggaaatgtttcgatcatgcaagtgctttcccagccaaatgtctgtgctctctgtgtcactgagggccacaggttcctctaacatctgtcactgtcacttcaccaggcaggccttggagttccatgacaaaatcacttttgtcagacaaagaatgtatcctttacttttctcaaatggaataaaattatttcttctgtggaggaaaaaaaaaaaaaaaaaaaaaaaaaaaaaaaaaaaaaaaaaaaaaaaa

SEQ ID NO: 817 - DNA, 2078 bp, Homo sapiens
gagtccgcgggcttccgctcccagcgcgggattctggagggaaattgagggagacttggaaaccgcgccaggcccaccgaggtatcccagaggtgacagaacttgatctgggcctggaaggggaagaattcgggaaaagcaacgtggggcattccagtagtaattgatagaaatattacgtgggataggatttattctctccacacttctgaaccaatgaatagaaaatgggaagcaaaactgaagcaaattgaagaacgagcatctcattatgagaggaaaccgttgtcctcagtgtatagaccaagattgtccaagccagaagaaccaccctccatctggagactatttcatcgacaagctcaagcttttaattttgttaaaagctgtaaagaagacgttcatgtatttgctttggaatgcaaagtaggagatggacaacgtatttaccttgtgacaacctatgctgaattttggttttactataaatccagaaaaaatctcttacactgctatgaagttattcctgaaaatgctgtgtgcaagctttattttgatttggaatttaacaaacctgccaacccaggagctgatgggaaaaagatggttgcattactcattgagtatgtgtgtaaagcacttcaagagttatacggtgttaattgctcagctgaagatgttttgaacttggattctagcactgatgaaaaattcagccggcatttaatatttcagctccatgatgtggcatttaaagataatattcatgttggtaattttttgagaaaaattttgcagcctgctcttgacttgcttggcagtgaagatgatgatagcgctccagagacaacaggccatggatttccccatttttcagaagcacctgcaagacaaggattttctttcaataaaatgttcacagaaaaggctacagaggaaagctggacatcgaattcaaagaaactggagaggctggggtcagctgagcaaagcagtcctgacctttcatttctagttgtgaagaataacatgggagagaagcatctttttgtagatctcggagtttatacaagaaatagaaactttcggctatataaatcatcaaaaattggaaagcgtgtggctttggaggttactgaagataacaaattttttcctatacagtcaaaagatgtttctgacgaatatcaatattttctctcttctttggtcagcaatgtcaggttctcagatactttacgaattcttacatgtgagccatctcagaataaacaaaaaggagttggatattttaacagtatcggcacttcagtagaaaccattgaaggttttcagtgttctccctatcctgaagttgatcattttgttctttctttggtgaataaagatggcattaaaggaggaattcggcgttggaactactttttcccagaagaattactggtttatgatatttgtaaatatcggtggtgtgaaaacattggaagagcccataagagtaataatataatgattctggttgatctgaaaaatgaagtttggtatcaaaaatgtcatgaccctgtatgtaaagcagaaaacttcaaatctgactgtttcccattacctgctgaagtatgtctcctgtttcttttcaaagaggaagaagagtttacaacagatgaagcagatgaaactaggagcaatgaaacccagaatcctcataaaccatcacctagcaggctgtcaacaggtgcatctgctgatgctgtctgggataatggcattgatgatgcttattttttagaagctactgaagatgctgaattagctgaagctgcagagaacagtcttctcagttataacagtgaagtggatgaaattcctgatgaactaattatagaagtattacaagagtaactaattcactatgaacacttttgtcaccaggctataatttgcctgatgtctgtgagatttgataaatatatcattcaacctgtttatataaactaagttttattactttgctttccaatttttgttttttacttctgtaaaccaatttcattaaaaattagctttggtgtaaattcagg

SEQ ID NO: 818 - DNA, 2694 bp, Homo sapiens
caaatgactatatcgatcagtggtgtaaccctgggaatcaagccttccattatgtctgccagagacttggagtcagtcacattatcactgagcccaaagaagaggctataaccacgaatgaggttataaaccaattattgcaccacgttggtgcgatgtgcatacaccaactcaatcttcttgccaccaaccccaatcttccaatcacaagtgtcttgggcaagcagcatccaattgaagcacatcatcttagcagtatttgtgacattatggagaaggccatggttaatggagatacctgtattatacgctgcattctcgttgtctttcaggtggtatttaaatttttcttcagcccacaaactgaaaggaatcgagacatcattcgacggtcgggattgcttctttggcagttgttgatggctccaaaagatcaaatttgccctgaaattcagaaggaagtctgccttgccatcagctctggtttaaatatcttgtacccaggtgaaactgaaatcaataacttacttaaactggtcttaacagaaggagagagaaacagtggactctcccagctacgggatgtgatcctaaccaacctggcggaacagctccaaaacaaccgatttggcagtgatgaggatgatcattacagactaaatgatgaacttttacactacattctgaagattgttgtacgagaatcctgtatcttaatcaccaagtgccaaactgtctctaaagatgattttcaaaagctcctttcaactgtgcctgctgcatcctcctgcctgcgctatctgatggcagttcagaatcaccttctcagtaacactattttgattaaacctgatgagaatgatgacagtgacagctccttgcagggagagacattgaaggtacaggagctaaaagtcagtattttggctcttgccacccaaatcctgactggatgtgatgaagtgttggaaatgctacagcaggtcacaactgccctcataaatagtgacatagcagaccgtgagcagaggttaaaaggcttggaacaagttactaaggctactatgcttggtcaccttcttccagtgttactgacctccttgatgcatccaaatttacagactctgatcatggcggatgccctgatgcctcagctagtgcagctggtactctataccagccagacggcgttgctgcttaaaacccagtgtccggtttttgctgaggtgggctgttccccgtgtggtgcaccagaccagaagtgcaggctgttccctgatgagagaatgttagaagagaaggaagagccaggatttctcactggtttaaagattcctgccccatgggctgctggaaagactgtggaaacagtccaccccgtcagagacaactataaatttaaagaaacggtccatatcccaggagctcgctgcctgtaccttagatttgatagcagatgctcttcgcaatatgactatgacaaattggtgatatgtgcggggcctaacacaaacagtaggaaggttgctgaatatggaggcaacacactgggatatggcagccgtagtgtcttaggaactggttggccgaaagacttggtgaaggtggaaggagatacagtcaccttctcctttgaaatgagaagtggccgtgaacacaacactcctgataaagccatgtggggctttgcttgcacagttcgcgctcaggagtcttcggaggatgtctcaggaggcttgccctttctggtagacctggctttaggtctgtctgtgttagcttgttccatgttaagaatcctgtacaatggaccagaaattaccaaagaagaagaagcctgtcaggagctattgcggtccaaacttttacaaaggtgccagtggcaggtggaggccaatggcgtgatctcccctgcccttactccgagcccctctccactgcctctgaccatagaggaagacagagaattcacctacccctctgatgtcctcgtgcctcctgttggaaactactttgatctgcctcggatcagactgcctccaggaatcatgataaagctcagggaaatttctgggcgtgctagacctcaatttagaccaagtataaagtatgttgctgtgtagtgttttacttttcccaatgggaaaaaaaagtttaaacaattgaaatgggtatatttcttctgtggtctagtaaatgaaactttaattttatgtttactccatgaatgttaaaattaactgagtctagagggcccaccaggcagtattccagactaggggctctcaaaatttggcccaccagtcagcagcattggcatcacttgggaacttgttggttcttggaccccattttgcacctattgaatcagaaggtctgaggatggggcgcagcttaacaagtttcccatttgactgatgcatgctaaagtgtgacaagtgctaggtttatctctagtattttgaccttctactagcagtcagcctctactttactttccagagtctagagacatgtgtttatttttgatgcctagagaaatggtgaggagttctctaatgtagaatgtacatacagttacaaatgtctgtggtattcttgcttaaagtcaagtctgttttgcaggcctctgctctgcctcctgaggcaggttttcagagagaaaactttagagaatatatgaaatttaaaatg

SEQ ID NO: 819 - DNA, 1891 bp, Homo sapiens
gtctagctgcgcttccgcaaagatggcggcggctgcgggtagctgcgcgcgggtggcggcctggggcggaaaactgcgacgggggctcgctgtcagccgacaggctgtgcggagtcccggccccttggcagcggcagtggccggcgcggccctggcaggagcaggagcggcctggcaccacagccgcgtcagtgttgcggcgcgggatggcagttttacagtctccgcacagaaaaatgttgaacatggaataatatatattgggaaaccgtctcttcgtaagcagcgcttcatgcagttttcttcactcgaacatgaaggagaatattatatgacaccacgagacttcctcttctcagtgatgtttgagcaaatggaacgtaaaacttcagtcaagaagctgacaaaaaaggacatcgaggatacactgtcagggatccaaacagctggctgtggatcaacttttttcagagaccttggcgataaagggctaatttcatataccgagtatcttttcttgcttacaatcctcactaaaccccattctggatttcatgttgcttttaaaatgctggatacagatggtaatgagatgattgaaaaaagggaattttttaagctgcagaagatcataagtaaacaagatgacttgatgacagtgaaaactaatgaaactggatatcaggaagcaatagtgaaagaacctgaaattaacacaactcttcagatgcgtttctttggaaaaagaggacaaagaaaacttcattataaagaatttcgaagatttatggaaaatttacaaacagagattcaagaaatggaattccttcagttttctaaaggtttgagtttcatgagaaaagaagactttgcagagtggctactttttttcactaacactgaaaataaagatatttattggaaaaatgtgagagagaagttgtcagcaggagagagcattagtttggatgaattcaagtcattttgccattttacaacccacttggaagactttgctattgccatgcagatgttcagtttagctcatcgtcctgtcagactagcggagtttaagagagctgtgaaagtagcaacaggacaagaactctcaaacaatattttggacactgtctttaagatctttgatttggatggtgatgaatgtcttagtcatgaagagtttcttggggtgttaaaaaacagaatgcatcgaggtttatgggtaccacaacatcagagtatacaagaatactggaagtgtgtgaagaaagaaagcattaaaggagtaaaagaagtctggaaacaagctggaaaaggtcttttttaataaaagatataatagtatggcaattatattgttccaaatgtcaaaatttgtgattttttagaagtacttgctatttatcttcttaagtcttcattgatattctgtgtgaaataagcatgtcttgtacttgctttctgattcataattttatgaaagaacttagtagaaagaaaagtaagtataaaaatagatattggattctgtcagaaggcctagatttgaaataatgttttgtacttcggtaagatggaaaacttagtgattcactgatttcttagacactctaatatgatatgctttctggaaggataaaacaaatacatatgggaaaaagtacttgagaccaaggccagcatcaattccagacatcttcatgttcctaataggctaaatgaagttaaaaacttatttcagatttttctcatctgtaccttatatctcataaatttattgcatattttatgtcagtagcttagctgtttattgtctttaaaataacatgtaaacttcaatgttctatctggaagcagaataaaatatttacatagaaaaaaaaaaaaaaaa

SEQ ID NO: 820 - DNA, 3090 bp, Homo sapiens
gaaaccggaggacgcccggtagccgcccccaccgcctccgccccaggcaaggccggccggcgccgcggaaagcagcctcggggaaggaggaggaagaggggcaggtgtagggagtgaagaagcaaaaagaggaggaggaagaggagctcagggccgtccccgcgcaattaatgggcggctcctgcgccctggaccggcccgcccgcccagcccctcgacccctgtagccccggcaggggaggaagggcagacccacaggtcagggattaggaatcatgttgcatgacgcaagggacaggcagaagttcttcagcgatgttcagtatctgcgggacatgcagcataaggtggactctgagtatcaggcttgtctgagacgacaggaatatagaagagacccaaatgagaagaaacgcgatcagttttgggggcaagagacaagttttgagagatcccggttttctagcaggtcatcttccaaacagagttctagtgaggaggatgctctaactgaaccaaggtcatctatcaagatatctgcatttaagtgtgactccaaacttccagcaattgaccaaacatcagtcaagcagaaacataaaagtaccatgactgtaaggaaagcagagaaagtggaccccagcgaaccctctccagcagaccaagcaccaatggttttattaagaaagaggaagccaaacctgaggagatttacagtcagcccagaatcgcacagcccgagagcatctggggacagaagcagacagaaacagcagtggcctgcaaaggtgccggttcccaggggagcagatcaagtagttcaacaagaaggcctgatgtgtaacactaagctgaagaggccaaatcaagagagaagaaacttggtcccatcgtcacagccaatgactgagaacgcccctgatagagccaaaaaaggagacccgagtgctccttcccagagtgagctgcatccagccctgtcccaggccttccaaggaaaaaatagtcctcaagtattgagtgagttctcggggccaccactcacacccaccactgtaggagggccaagaaaggcatcatttaggttccgagatgaagacttttattccattttgtcattgaacagcagaagagaaagcgatgacactgaagaggaaacccagtctgaagaatgtctgtgggttggtgtgcgctcaccctgttctccttcccatcacaaaagaagtagatctggggggacatcgacccctcaggccaaaaataaaaattttgaagaaaatgctgaaaattgcagaggtcattcttcaagaagaagtgagcccagtcatggctcattgagaataagcaatgcaatggagccagcaacagagcggccttctgctgggcaaaggttgtcccaagaccccgggctgcctgatagggaatctgctacagagaaggacagaggtggcagtgaaaatgcgaaaaagagccctctttcgtgggacaccaaatccgagcccagacaagaggttggtgtcaatgctgaaaatgtatggagtgattgtatttctgtggaacataggcctggcacccatgattctgaaggatactggaaagactatttaaacagttctcaaaattctcttgactactttatttctggcagaccaatatctccaagatcatcagtgaattcatcctataaccctcctgcatcattcatgcattctgctctgagagatgatattccagtagacttgtcaatgtcatcgacttcagttcacagctcagactcagagggaaactcagggtttcatgtttgccaaccactgtctcccattagaaataggactccatttgccagtgccgaaaaccataattatttcccagtaaatagtgcacacgaatttgctgtcagggaagcagaagatactactttaacaagccagcctcagggggctccactatatacagatctcttactaaatccacagggcaatttgtccttagtggattcttccagctcctctccatcaagaatgaactcagaaggccatttgcatgtgtctgggtctctgcaagaaaatacaccatttactttctttgcagtgtctcatttcccaaatcaaaatgataatgggagcaggatggcagcctctggtttcacagatgaaaaggaaaccagtaagataaaggcagaccctgagaaactcaagaaattgcaagaaagtctcctggaggaggactccgaggaggagggagacttgtgtcgcatctgtcagatagccgggggttccccaagcaaccccctcctggagccttgcggctgtgtgggaagcctgcagtttgttcatcaagagtgcctgaaaaagtggctgaaagtgaaaataacatcaggagcagatcttggtgccgtgaagacctgtgagatgtgtaagcaaggcctgctggttgacctgggtgactttaacatgattgagttctaccagaagcaccagcaatctcaggcacaaaacgagctgatgaattcaggcttgtacctggtgctgctgcttcacctctatgagcagaggtttgcagaactcatgaggctcaaccacaaccaggtggaaagagagaggttgtcaagaaattacccacaacccagaacagaggaaaatgaaaattcggagttgggagatggaaatgaaggcagcatttctcaaagccaggtcgtctagcaaggaagccaactgtggagctcggcggagacctctcccgccagcccttctttctacgtccccaagtgcctccctccctcctcctctttactgaaactgaaaccaaagcgttcacagttagattttcaccttgtgccactctcttttggggtctggcttgagcatctatgggcagccacagcgaccagtctagtcccagacagcacaggtcaagcagcgtgggactgtggagcccctggcaggctggcctggtgctgctcccttagcccagaagccctgccaggtccagtggcctggggtcccactgctgagggcacctgccaggcctcactccaccctgaatggactcgagccatgtattcattcagtaaactgacattattctccc

SEQ ID NO: 821 - DNA, 2402 bp, Homo sapiens
cagtgcatacttggaggaccacagctacaacgtggagcagatatggagggatattgaggacgtcatcatcaagaccctcatctcggcccaccccatcatcaggcataactaccacacctgcttccccaaccacacactcaacagcgcctgctttgagatcctgggctttgacattttgttggaccacaaactcaaaccctggctgctggaggtcaaccactctccaagcttctccaccgactctcggttggataaagaggtgaaagatggtctgctgtatgacaccttagtcctgatcaacctggaaagctgtgacaagaagaaagtcttggaggaggagagacaacgggggcagttcctgcagcagtgttgttctcgggagatgaggattgaggaagccaagggtttccgggccgtgcagttaaagaaaactgaaacgtatgagaaggaaaactgtggagggttccgactgatttatcccagtctgaattcggagaagtatgagaagtttttccaggacaacaactccctcttccagaatactgttgcttccagggctcgggaggagtatgcccggcaactgatccaggagctgagactaaaacgggagaaaaagcccttccaaatgaagaagaaggtagagatgcagggggaatcggcaggcgagcaagtgagaaagaagggcatgaggggctggcaacagaaacaacagcagaaagacaaggccgccacccaagcctccaaacagtacatccagccattgacattagtatcctacacacctgacttgctcttgagtgtcagaggtgaaaggaaaaatgaaacagacagcagcctcaaccaggaggctcccacggaggaggccagctctgttttccccaagctgacgtctgcgaagcccttcagttctctacccgatctgaggaatatcaatctcagcagctcgaagttggagcccagtaaacccaacttcagcatcaaggaggccaagtctgcctctgcagtgaacgtattcactggcactgtgcacttaacctccgtagaaaccaccccagaatccaccacccaactctcaatctccccaaagtctccgccaaccctggctgtgaccgccagctctgagtacagtggcccagagacggacagggtggtatcctttaaatgcaagaagcagcagacccctccacacttaacccagaagaaaatgttaaaatcttttctgcccacaaaatccaagagcttctgggagagtccgaacacaaactggactttgctaaagagtgacatgaacaagccacatttgatatccgagctactcaccaagcttcaactgagtgggaagctctccttcttcccagctcactacaaccccaagctggggatgaataacctgtcacaaaacccctccctgcctggggagtgccactcccgcagtgacagctctggcgagaagaggcagctggatgtgtcctccctcctcttgcagagtcctcagagctataatgttactctgagggacctgctggtgattgccactccagcccaactggatccaaggccttgtagaagccacgcaagtgctatgagggacccatgtatgcaggatcaagaagcatacagccattgcctgatctctggccaaaaaggatgtgagaggagctagaatcagactggatctctgccacttttcccttcctacctcttaacttgcaggaaacaatgtgtctcttccgacagtgtctccagtgttcacagaatcaactgaagttttgtttgctcatctagatatactggtcttccattagttcctagtagcagcaatggggccaacagccctgcctctgttccctcccagttagcttacagtgctacaggaccatgatttctggggttggattggtgctgccccaggacacactccagttgccgtaccagtggcacttctctgggttcttcacatggcaccatcatccagaatactcccccagataaagcaacttcgggagtagtgtttcagagaaggactcatgatttccaggagtcaaaagccctcagtccaccaacagaactatgccagttggtcttcatctccaagataaaagatgaggtcagggatgggcatggtgcataactctgagccctgagtgagagaactgaggcagctgcaacttcacaaggtcaaggcccgacctccgcccatccccaccagcccaaagacttgccacctcagtgcccgagcatcctctggtgacctccctcaccagcccaacttaatctcaccagtgaaaacagaggtgaggcgagagtacccagcctgaagatgcttcttctatcagcctgcagaaatgttacactttcccttcaggcatccattaataaaagaaattgccatgcttactgcc

SEQ ID NO: 822 - DNA, 4677 bp, Homo sapiens
acaccaagtcgcccgcctctcctcgtccggctagcagagggcgctgtgagccgccttcgcccccggaccgctcaccgcaaccatggtctccaaatccgaccaattgctcatcgtcgtgtccatcctagaaggtcggcatttccccaaacgtccaaagcatatgcttgtagtggaagcaaagtttgatggagaacagttggctactgatcctgtggaccacactgaccagccagaatttgctactgagttagcttgggaaattgacaggaaagcgcttcatcagcacaggctacagcgtactcctatcaaactccaatgttttgccttggatcctgtaacttcagccaaggaaaccataggttacatcgttctggatttaagaaccgctcaagaaacaaagcaggcaccaaaatggtaccagttgctgagtaataaatacaccaaattcaagtctgagatacagataagtattgctttggaaaccgatacaaagccaccagtggatagctttaaagcaaagggggctccccctcgagatggaaaagtacctgccatcctggctggacttgaccccagggacattgtggctgtgctgaatgaagagggaggctaccatcagattggaccagcagaatactgtactgactcctttattatgtcagtgaccatagcatttgctacccagttggaacagttaattccatgtaccatgaaacttccagaaagacagcctgagtttttcttttactactctttactgggaaatgatgttacaaatgaacccttcaatgatttaatcaacccaaactttgagccagagagagcatcagttcgcatccgtagcagtgtagaaattcttcgtgtttacctggctcttcagtctaaactgcagattcacctctgctgtggagaccagtcacttggaagtacagaaatacctttaactggattacttaaaaagggcagtacagaaatcaaccagcacccagtcacagtcgaaggtgcttttacccttgaccctccaaacagagccaaacagaagcttgcacctattcctgtggagctagccccaactgtgggagtgtctgtggctctgcagagagaaggcatagactcccagtctttaattgaattaaagacccagaatgaacatgagccagagcattcaaagaagaaagttttaacccccataaaggagaagacacttactgggccaaaatcaccaacagtgtcccctgttccatctcacaaccagtcacctccaacaaaagatgatgcaacagaaagtgaagtggaaagtttacagtatgataaggacaccaaaccaaatccaaaagccagttcttctgtacctgcttcactggcccagctagtgactacatccaatgcttcagaagtagcttcaggacagaagattgctgtaccagcaacatcacatcatttttgcttttcaatagacttaaggagtatacatgccttggagattggttttccaatcaactgtatattaaggtactcatatccattctttggaagtgcagctcctattatgactaatcctcctgtagaagttcggaaaaacatggaagtttttcttccccagtcttactgtgcatttgattttgcaactatgcctcatcagctgcaagacaccttcttaaggattccattactggttgaactatggcacaaggataaaatgagtaaagatttacttctgggaattgcgagaatccagctttctaacatcttgtcttcagaaaaaactcgttttttaggttctaatggtgaacagtgttggcgtcaaacttacagtgaaagtgtgcctgttatagcagcacaaggatcaaataacaggatagcagatctttcttacacagtgactctagaagattatggactagtaaaaatgcgtgagatttttatctctgattcatctcagggtgtatctgccgtacagcaaaagccgtcttctcttcctccagcaccttgtccttcagagatccagacagagcctcgtgaaacgttagaatacaaagcagcacttgagctagaaatgtggaaggagatgcaagaagatatatttgaaaatcagctgaagcagaaagaactggctcatatgcaggctcttgcagaggaatggaagaaaagggaccgagaaagagaatcactagtaaagaaaaaggtggctgaatatactattctagaaggaaaacttcaaaaaactctaattgacttggagaagcgagagcagcagcttgctagtgtggaatcagagcttcaaagagaaaaaaaggaactgcaatcagaacgtcagcggaacctgcaagaactgcaggactctatccgtagggccaaagaggactgtattcaccaagtagaactagaaaggttaaaaatcaaacagctcgaagaggataaacaccgccttcagcaacagcttaatgatgctgaaaataagtataagattttggaaaaagagttccaacagttcaaggaccagcaaaacaacaaaccagaaatccgtctacagtctgaaataaatcttctcaccttggaaaaggttgaacttgaaagaaagttggaatctgcaactaagtctaaactgcattacaagcagcagtggggacgagctttgaaagaacttgccagacttaaacagagggagcaagaaagtcaaatggctcgtcttaaaaaacagcaggaagaattggaacagatgagactacgttaccttgccgctgaggaaaaagatacagtaaaaaccgagcgacaagaattgttggatataagaaatgaattgaacaggttaaggcaacaagagcaaaaacaataccaggattccacagagattgcaagtggaaaaaaggatggcccccatggcagtgtattggaagaaggtttggatgattatttgactcgcctgatagaagaaagggatactttgatgagaacgggtgtgtataatcacgaggatcgaataataagtgaactcgaccgacagatcagagagattttggcaaaaagcaatgccagtaattaataacatttggaaaagctttatagagactctaagtctaaattttaatttctttgtaaaaacctcaaaagtgaggaaaatggatgttttaaaatggtattttcaattttttataagcaaaattttgtatgttattgtatagtatttatttgatcttatttactttatgctacctctcccacactggttttatttgtaatttgcatttatatactcattttaaatgacttttcagtgtttttcatagtttataatctgatggctaactaactttcaaaacagcttttaactaagtttgttgtaggagaaatgactgcggtaatttccagttctataatgtttcatgttgagccaaaagagtatatcttgcactttaaaaacgctgcgtcctattccatttgaatgtaaattcttaaaagttgagaccaattgtaaccagtttaactcattttagatgacctttttttcttataatatttgcaagtgacaagtttgaaaacaaagcaagatcagtgcagagaagccacatgacatgttgggtgacagattggtcatttatttaaataaagttaatacagattaaatttgtttcaagagctattgaattttcaaattttcagtgtatttataacttttaagaacatgaagtattagcttaatatagttttctctgttggtttcttcctcaagtttgcattgttttcttttgttaaaattagagatttctttttattttccagttatagtaatactagctgtcagcttaaaccctctgtaatagaacatggaaacagacacataaagacattagctgaaaaaatagagtgaaaatcaactattttttactcccgctaatttcaatcaatcgttttcaaaagcgcacgagattcactcattggatttatgcagtgccctgtctgtataaaaactcttaagagttcctttatatcatattcttcagagccaacatttgtcctcaaagcaacgtttcccacctccttttactgagtactgaaaaagttttagcaaagtcacagattaggttgaatttcaaaatatatgtactttaaaaagttctgatttccaaatataataaagttaaaattaagtatatactttaggaagttaccaataacttccatcaaagcagagtaggatatatggtaacattaattttcggtcatttcaaatgaggtatatttcttattagggaaattaaagtccctatatttattatatattttttccttattaacagagtattaatctagtaaaaaataacccagcagtaaataataaagaaattactgaatgagaggataatgaatctgaatcatagcaggaatttgcaatattaattatggttagctatttttctctcattgatttttgtgccacttgaatggaacagaagcaagccttatgttttggaaggtctgcggtaaaatgctgtgactgtttactttcaattgcattgtgtgttgcctgtgactgctttcaaacgctagagggggcctctgatttaaagaaataaaaaggacttttctaaaatggatgtgtagtttattttgccttttgtaaagctcttttggctattgtaacttaacaaataaaatcataattgtgtgcatctctga

SEQ ID NO: 823 - DNA, 1959 bp, Homo sapiens
aaaagccaagcgtcgtcgtcacccaaggtcaaggggtggaagttacacctggtgcagccctcggctctgatgcaaaagcagcttttgcccctggctgcgggacagcgctgtgactactcgcaacgggagagctgctgccagtcgccacaccgtgcggaaagcgccggcgaccggagcactgacaatggtctgcataggggagcggagagaagcttctgttgcgccctagatccgctgcctcggcgcccgcccgcagggaggagggggcgcgacaggtcgtctagcgcgtgccccggagcccgcgcccgggtctggccgcctggggcctgtgcttccttcagagactcacacaagaggtttatcatgagaaggaccgcactatttcatttcactcctacaagttttcatttacgttacacattgagaaagttatgagaagcaactgtcactctctggaggtggagactgccgtgattcacaaagacaagaggatggatcatgaagccgcccagctggagaagcagcatgtgcacaatgtgtacgagagcacagccccttacttcagcgacctgcagagcaaagcctggcctcgtgtccgccagttcctgcaagagcagaagccaggcagcctcatcgctgacataggtaaccaggcggcctcatcgctgacataggtaaccaggcagcctcatcgctgacataggtaaccaggcagcctcatcgctgacataggtaaccaggcagcctcattgctgtcataggtaacccagcactgggccgtgtagcatgaaataccttccattgagcctttgcttttcacattgatttttcatttttgttctaataggaatcctgaaattgcacccttggcatgccagtacctagaatattcattttacagcagaaactcgagacagtcaagtcagcagcaagtaaaaaactttctcaaacttttattttatttttattcttttgagatggagtttcactcttgtcaaccagattggagtgcagtggtgcaatctcggcttgctgcggactccgcctcccgggttcaactgattctcctgcctcagactcccaaatggctgtgattacaggcacccgccaccacgcccagctaatttttgtatttttagtagagacggggttttgccatgttggccagactggtctcgaactcctgacctcaggtgatccatctgtctcggcttcccaaagtgctgggattgcaggcttgagccaccgtgcctggcctcaaactttacctttagacagtggctcttcagggcctttgtgtacatcctccaccaaaacggacctgacattgattgactaaatcaggatggaaatgatggcttgtgaaactaaccgttgtaaatttaaagatattcacatttgccaaatgtgttctcctctggtggctcactttgagtggctcacatgccttctatagaattgtgggaatatggaagaggtccagtaatatcttatgaatctcatgggtcctttcctttaattattctataggtgtttcattataggagcgcatctttaattagacagtattttaataataacttatttgtctggaggacgttggttcagtatcttcgtaaaccaagaactggtaaaccacagcttagtagatctaggactaagacttaaaatgtggttggaatctcactcaaggcctacccacctaaaactgcgtcctagcaattgcatgctgactgcacctatgagtcgtaagtctgtagttgcaacgtgtgtctagtttgatattctttctaaatactggtaagagaaacagacataccagaacttgtggcttgctgaagatggtatgagtaatgtggaatctggggaaggggtgcatgtcacatggaaattgggagtctttgaaaaatatctctatcctgtaaattaaaaaataataaatctagtttcggagtgtgc

SEQ ID NO: 824 - DNA, 4182 bp, Homo sapiens
agtgctgcgccgacagcggtcaggatctcggctttcttgcttcgagagggactaggtgcctccaccagagcttctgtcgctctgtaacctgcactgtgacctacactagtcgcgggagccacgcagaggacgccggaacaccctggaagccgagaaatggacccagtggcttttaaggatgtggctgtgaacttcacccaggaggagtgggctttgctggatatttcccagaggaaactctacagggaagtgatgctggaaactttcaggaacatgacctctttaggaaaaaggtggaaagaccagaacattgaatatgagcaccaaaaccccaggagaaacttcaggagtctcatagaagaaaaagtcaatgaaattaaagatgacagtcattgtggagaaacttttaccccagttccagatgacagactgaacttccaggagaagaaagcttctcctgaagtaaaatcatgtgaaagctttgtgtgtggagaagttggcctaggtaactcatcttttaatatgaacatcagaggtgacattggacacaaggcatatgagtatcaggaatatggaccaaagccatgtaagtgtcaacaacctaaaaaagccttcagataccgcccctcctttagaacacaagaaagggatcacactggagagaaacccaatgcttgtaaagtatgtggaaaaacctttatttcccattcaagtgttcgaagacacatggtaatgcacagtggggatggaccttataaatgtaagttttgtgggaaagcattccattgtctcagattatatcttatccatgaaagaattcacactggagagaaaccatgtgaatgtaaacagtgtggtaaatcctttagttattctgctacccatcgaatacataaaagaactcacactggagaaaagccttatgaatatcaggagtgtgggaaagcatttcatagtcccagatcctatcgtagacatgaaaggattcacatgggagaaaaggcttatcaatgtaaggaatgtggaaaagcattcacgtgtccccgttatgttcgtatacatgaaaggacccactctaggaaaaatctctatgaatgtaagcagtgtgggaaagcattatcctctcttacaagttttcaaacacacgtaagattgcactctggagaaagaccttatgaatgtaagatatgtggaaaagacttttgttctgtgaattcatttcaaagacatgaaaaaattcacagtggagagaaaccctataaatgtaagcagtgtggtaaagccttccctcattccagttcccttcgatatcatgaaaggactcacactggagagaaaccctatgagtgtaagcaatgtgggaaagccttcagatctgcctcacaccttcgagtgcatggtaggactcacactggagagaaaccgtatgaatgtaaggaatgtgggaaagccttcagatatgtgaataaccttcaaagtcatgaaaggacacaaacacacataagaatacactctggagaaagacgttataaatgtaagatatgtgggaaaggcttttattgtcccaaatcatttcaaagacatgaaaaaactcacactggagagaaactctatgaatgcaagcaacgttcagtagttccttcagtagttccagttccttttgatatcatgaaaggactcacactggagagaagccctataaatgcgagcaatgtgggaaagccttcagagctgtgtcaatcctttgaatgcatggtaggactcaccctgaagagaaaccctatgagtgtgagcaatgacggaaagccttcagatctgccccacacctttgaatacgtggtaggacacacaatggagagaaaccctatgcatgtaaggaatgtgggaaacccttcggatctgcccagaaccttcgaattcatgaaaggacacaaacacacataatgcactctgtagagagaccttataaatgtaagatatgtgggaggggcttttattctgccaagtcatttcaaatacatgaaaaatcttacactggagagaaaccctatgagtgtaagcaatgtgggaaagcccttgtttccttcacttcctttcgatatcatgaaaggactcacactggagagaacccctatgagtgtaagcaatttgggaaagccttcagatctgtcaaaaatcttcgatttcataaaaggacacacactggagagaaaccctgtgaatgtaagaaatgtagaaaagcattccataatttctcttctttgcaaatacatgaaaggatgcacagaggagagaagctctgtgaatgtaagcattgtgggaaagcattcatatctgccaagatcctttgaatacatgcaagaacacacaatggagagaaaccctatgaatgtaaagaatgcagaaaagcattcagcttgcctacttcctttcatagacatgaaaagacttacactggaaggaaacactatgaatgcaagcaatgtggcaaagctttctcttcttccagttcttttcaatatcatgaaagaacacactagggagaaaccctatcaatgtaagcaatgtgcaaaagcctttatttcttccacttcttttcaatatcatgaaaggactcacatgggagagaaaccctatgagtgtatgccaagtgggaaagccttcatttcttctagttcccttcaatatcatgaaaggactcacactggagagaagccctatgaatataagcaatgtgggaaagccttcagatcagcctcgcaccttcaaatgcatggaaggactcacactggagaaaaaccctatgaatgtaagcagtatgggaaagcgttcagacctgacaagattctttgaatacagataatgaatgtaaacaattaactgtttataataactgtatactaacaaatgatattctttttaaataagaagctataatatcccattggtgtcatgtattagatcagccttatactgttaaattgttattatttggacattgtgagtcagtataaccatgtggataaaatgccagacatctttttattcgaaaattttacttttcatgcttctgtacttacatttttatctcaaccttaatttttctttcttttttttttttcccccagaaagaatctcgctctgtcacccaggctggagtgcagtggcgtgatctcgggtcactgcaacctctacctccagggttcaagcaattctcctgcctcagtctcctgagtagctgggactgcaggcatgcgccaccatgccaggctgattttttgtgttttttagtagagacggggtttcaccgtgttggctaggctggtctcaaactccagacctcatgatttacccacctcggcctcccaaaatgctgggattgcagacatggaccatcatgcccagctgcaaccctaatttttcattcagtcataataccaatagttatctcatgcacctctgagtgccttcttccccaaaaccagcagtgccatacctgctgtcagcaagggtgtaatataccatagtgataaatatgaccaaaagccataaatgactgtgagatgtatgagaattacaagtcacattagtaagaagagaaaaattttggtcatgtttatgatttgaaatacgttttcctctatcacatttaaaaatatagttacaaaatgcccttgtttttgtcctgattcatcatggtcactgaggagcatcgtctcatatgcctggtatgtgacacgtgtctctccaacaataaaagacttggccttggctgggcatggtggctcacgcctgtagtcccagcactttgggaggccgaggtcaggagttggagaccattctgaccaatgtggtcaaaccccgtctctactaaaaatacaaaagttagcagggcgtggtggcatgctcctgtggtcctagctattcaggaggctgacataggagaattgcttgaatataggaggcagaggttgcagtgagccgaggttgcaccattgtactccagcctgggcaacaagagtgaaactctgtcttaaaaaacacaaaaaaagacttggccttagggccgagtgcggtggctcacgcctgtgatcccagcactttgggaggccgaggcgggcggatcactaggtcaggaaatggagaccatcctggccaacacagtgaggcccagtctctact

SEQ ID NO: 825 - DNA, 5442 bp, Homo sapiens
taatagtcacatgacacgtttcccgtcaagatggcggatactctcccttcggagtttgatgtgatcgtaatagggacgggtttgcctgaatccatcattgcagctgcatgttcaagaagtggccggagagttctgcatgttgattcaagaagctactatggaggaaactgggccagttttagcttttcaggactattgtcctggctaaaggaataccaggaaaacagtgacattgtaagtgacagtccagtgtggcaagaccagatccttgaaaatgaagaagccattgctcttagcaggaaggacaaaactattcaacatgtggaagtattttgttatgccagtcaggatttgcatgaagatgtcgaagaagctggtgcactgcagaaaaatcatgctcttgtgacatctgcaaactccacagaagctgcagattctgccttcctgcctacggaggatgagtcattaagcactatgagctgtgaaatgctcacagaacaaactccaagcagcgatccagagaatgcgctagaagtaaatggtgctgaagtgacaggggaaaaagaaaaccattgtgatgataaaacttgtgtgccatcaacttcagcagaagacatgagtgaaaatgtgcctatagcagaagataccacagagcaaccaaagaaaaacagaattacttactcacaaattattaaagaaggcaggagatttaatattgatttagtatcaaagctgctgtattctcgaggattactaattgatcttctaatcaaatctaatgttagtcgatatgcagagtttaaaaatattaccaggattcttgcatttcgagaaggacgagtggaacaggttccgtgttccagagcagatgtctttaatagcaaacaacttactatggtagaaaagcgaatgctaatgaaatttcttacattttgtatggaatatgagaaatatcctgatgaatataaaggatatgaagagatcacattttatgaatatttaaagactcaaaaattaacccccaacctccaatatattgtcatgcattcaattgcaatgacatcagagacagccagcagcaccatagatggtctcaaagctaccaaaaactttcttcactgtcttgggcggtatggcaacactccatttttgtttcctttatatggccaaggagaactcccccagtgtttctgcaggatgtgtgctgtgtttggtggaatttattgtcttcgccattcagtacagtgccttgtagtggacaaagaatccagaaaatgtaaagcaattatagatcagtttggtcagagaataatctctgagcatttcctcgtggaggacagttactttcctgagaacatgtgctcacgtgtgcaatacaggcagatctccagggcagtgctgattacagatagatctgtcctaaaaacagattcagatcaacagatttccattttgacagtgccagcagaggaaccaggaacttttgctgttcgggtcattgagttatgttcttcaacgatgacatgcatgaaaggcacctatttggttcatttgacttgcacatcttctaaaacagcaagagaagatttagaatcagttgtgcagaaattgtttgttccatatactgaaatggagatagaaaatgaacaagtagaaaagccaagaattctgtgggctctttacttcaatatgagagattcgtcagacatcagcaggagctgttataatgatttaccatccaacgtttatgtctgctctggcccagattgtggtttaggaaatgataatgcagtcaaacaggctgaaacacttttccaggaaatctgccccaatgaagatttctgtccccctccaccaaatcctgaagacattatccttgatggagacagtttacagccagaggcttcagaatccagtgccataccagaggctaactcggagactttcaaggaaagcacaaaccttggaaacctagaggagtcctctgaataatggatatacaccaaactggatacccaactttggaaattctgactggtctcagagtctacttgatagaaggactgtttgagaaatgttagaaagcagcagcaattataaggcaaaataggtaatagaaatccaaaaggggattttccttatagaggacattccaagaacacacaacacttataaagcacattgacttgctcattttaaataccaaacttgtgtgactagcagatgaaaattataaatcaattgattctcaggaatgtaactgtggatatgaaagtgatcctatgcattgttaataattccatggtcttaggacaattttgcttaccactttggatctttgtttgaaagccacattttcagaaccagctcatgtattttctttggttatttgaattttattttctttatggacaagagcatcataacataatgataaaaacatatagaaaaactaaagtatcatgatctagatagaagcctgtatttggaatacaggtttgttttgctttctatgttgagaagcattgaaaatgctaatataaaggtgtttagacatttttacgaataagtcagtagtgttttttagtatcagtagtgatatttgtttgtaaattatttacatattgggaaaggtcaataatgaagaaatgaaagaatggaaggaaaggtgtggataggctcattggtatttgaatattctgtctgtcaagtaactagagtattaggctaattgtctacagacctaatttaatcctggctgtcctactgatgatatttggtaaattgtttaacttctgagcctacgtttctccatatataaagtggaaatagtattactatgcctactatatgagaatggttatgaagacaatgcaatgccatgtttagaatcggtttgccagaagaaaattgttttagaattttcccattgacttgatgaatctcaaaagtctcacgcaggaaataattgcttgctgtcagtcaacttccaaacaaaatagatcacagtgtttttattgcattaagctttttaaatgaaaatttcttttttaaagtagtattttatagtcttacagaccagtaaaaatagtaacaagtagaattgtggttttgaaatattactaaggaaaacactctataaattgttttattccttttctggtaggtaaacctgcaaccaccaaggactccaaattgtgtatgacagttggtaagccctaatatacactacataaaaacgttagggctgcctgtaatcccagcactttgggaagctgaggtgggtagatcacttgaggtcaggagttcgagaccagcctggccaacatggcgaaaccctgtctctactaaaaatacaaaattttagctgggtgttatggtgggcacctgtaatcccagctactttgaagatgaggtagcagactcacttgaaccagggaggcggaggttgcagtgagccaagattttgccactgcactccagcctgggtgacagagcaagactctgtctcacaaaaaaaaaaaaagggggctgtacataggcagcaaactaagctgcagtgatgttgcctatatttaaattttctcaaatggccaagctctgatggtctactttatttgagcaatagttgagacttataattgcctataaataaacaaacaaatgaactatttgtttttttttctcacaacatctggcctatattgtctgtcaggaagccatggctccaatgtaaagtacatagttcttacatacttcaactgcagctggtccctgacctcaccaggtttcagagatgttcttaaaggaagccagctgtggcaggtcacagattcatgggaaatggaaagaaccaaggaatatagctcttgcctcacctttctacccactgcagatatagttcaagccagagtaatggaagaacttaacttactagcctctcaggctgctcctatccctacctcccagtgtacagcccctccccatctctttagtcccctttccctcacttccccttttataatgtcacacaaatcagggacagtaggatcacattataacctactttgtcatagggattcgatttttcttatatcaaatcatgtttcctgaaacccagctggggcatatgcactcaatgtctaatacatacttattaatgtaccggatattggccttgcccctggatatcagcaatatattataaaaggttccagtagatgagacgattgagtctgaatacaattgcagtaaattgtgccaataaagatattgtactgttacggtcttagagttaaagccgcttgaatgcagcatgcacattcatgtaaacagacaatcagggtaggcctagaataaccacaaaaattctattggccttactgcagccacctatatgtagaacaatggaggagatagtttgtggtccattattgtaccctgtttcatccattagcatcagaatctctctttcaggtcatttattaaatatgattgaaatgtttaaaagttcctgaacatgattcatgatgattaaaatatcatacaactgataaaagactttaagaactttatatatttcctgttgcctcaaaatgtaacagaaattattcttagagctttgattttagctatcctaattactgcaaataaatatttgttcttatagttttaaatcaaaaagaaaagtcttgttataaaaccttaagcttgaaatcatattaataaaatatattgtacatagtggaaaattttcagtagctaatttaaaatttcagaaaatgctattaaagaattttgattcaagtatttaaactgtttagttatgcatgcttcttattaaccgaaaatgataataccatttagtttagtgatcagtatgagaagcaatacctaatcctatgttgctattgtattttttcctagttggtgtgcctgctcagaaaaacatatactgtatgtgtatacatacctgtgtatatataaaaggtcaatttatatatttttctataggaaaatggagtaacaagttccctatctcccatatttatttgtccatagtaaaatggccacattgatgataatttctagaactagtttctgagattgtcagccctttgtctaaaataatggcagtattaatgattgacttctgtcactgccatagttacctggattgtcagccttggtagcctttgtctaaagtcctaaagagttccaaaaaaaatgtgttgaaatttaattgctaaatagtggttggtgattctttacagtaggaattgtaataattttcttgcaaataagttatttactgctattgatattgaataatttgtcttttattcagatatatttcaaaaagcatgaatatatgattattcataaattgtatactttaccagtaagttttcagaggaaataaagacttttaaatccttttca

SEQ ID NO: 826 - DNA, 1526 bp, Homo sapiens
gctgcatttgtccagtcctgctactggatgccatcattggcccccgactgcccactgcttgccatgcctgaggagacccaagaagactccgtggcgccaatgatgcccagccagaggagcagggggccattggcccccaaccacgtgcatgaggtatgcctgcaccaggtggagtccatcagcgacctacatagtggagcaggcacactgcgcccctatctaactgaagaggcacgaccgtgggatgagctgctgggcgttttgccgccgtcactgtgtgcccaggctggctgcagccctgtgtacagacgaggagggttcctgctgctgctcgcgctgctggtgctcacttgcctagtgctcgcactcctggctgtctacctgagcgtgctgcagagtgaatccctgcgcatcctggcacacacgctccgcacgcaggaggagacactactcaaactccgcttggccagcctcagccagcttcggaggctcaactccagtgaggcccaagcacccagctgagatgccatttggatctggggcctgggggtgtgtgttggggggggaataaagtggctatgggcaggtctctccttccctactgctggctgccacatctacactatttccttggtgagatttttgtacaagaacctgttgttaacttaatggctgcctccctctcctgatctcttcaagccaggcctagccaagcctctggtgccaaagcctcgctttgggtggcccaaggtcaggggaaggggcaccagcctcctggctcctcctgtggcctgtcaacactctctggccaccccagatggcaggttctgaagtctagaaatagctgcccccatagcaatcacccaaactctgccagggctcccagtgagggtccagcctcagctcttaaagacaggctgggctctgagtagggggagaggcaccacctggggaagactgccttggagggcaaaggtgacatcgtggaagaccagttgggcccaagcctgggatagtagatggggagggagaacagaaaaatacccaggggttaagaccacagaaggctgaccgttctgtttaattatctgtaataatccttaaaaatcagcacacaaatccattccaggtagctttgccaccccacctgctgtggtggcatttgtccagatgccaccacccccctaagagtgggtcatcctgggggagcaaggcctgagaaaggaaaggaagggaaaggccccctagtgcctgccccacagccctgaggaaggcacatatttagcctggcctgagacaggacaggaaggggccacagggctgagtgcagggacaaaggggtcagggtcccaagtgtccgggcccccagctacccaccccatgtctgtttttggttttgtcattaaaaaaaataaagtgacaaatactggtggaaaaaaaaaaaaaaaaaaaaaaaaaaaaaaaaaaaaaaaaaaaaaaaaaaaaaaaaaaaaaaaaaaaaaaaaaaaaaaaaaaaaaaaaaaaaa

SEQ ID NO: 827 - DNA, 2071 bp, Homo sapiens
cacacgccgaagggctccgagggggtcaggccaatcggcagccgtcaccccacaccccagcccatcaccacactcaaggggccgctaagacagtgtctcctaagtctcgtctcctgtccccagcggcctacagctccctgcaggctggtggccgcttacctggccgccgctcccgctgccgatgtcagggtcatgcaagcggcctctcgcgaccgttacccgagggagcgcgcgcgcccggcgtctctccagtgattggctgcccggaaggaggcggagacagcctcgcatggcgcgcgcgtccacctcgccgttccccctcgcgcagctccaaccaaagagagacatccaaccccgggggagtgacaagggggcgggattgctgtgaaactctcttctctgattggctctctgggagccagccgctgccacgagggaaagaagcttcagtttctcgcatgcgcagtgagtaaacatgagcctctggtagataagagaaaccgcgatcggagtacggcgcgtgcgcagatcagggatcgcgattgcgaatcctccgctgaggtgatttggatatccctagaacgttgagggcacgagtcgggtcctgagaccaggtcctcagccagcagagccacgttccttatgagcaccgtgggtttatttcattttcctacaccactgacccgaatatgcccggcgccatggggactccggctttgggagaagctgacgttgttatccccaggaatagctgtcactccggtccagatggcaggcaagaaggactaccctgcactgctttccttggatgagaatgaactcgaagagcagtttgtgaaaggacacggtccagggggccaggcaaccaacaaaaccagcaactgcgtggtgctgaagcacatcccctcaggcatcgttgtaaagtgccatcagacaagatcagttgatcagaacagaaagctagctcggaaaatcctacaagagaaagtagatgttttctacaatggtgaaaacagtcctgttcacaaagaaaaacgagaagcggcgaagaaaaaacaagaaaggaaaaaaagagcaaaggaaaccctggaaaaaaagaagctacttaaagaactgtgggagtcaagtaaaaaggtccactgagaaaagaattagagattccaactgacagaatctgccagaagctcccagggaataatggtggcgagttccatcaccagcattattatagtgcttcaaaagaaatatttttgatgaacttaaaagacaacaaatttatttaaatggtgcactaaactgtagtgaacagagacatgcacgattcaagaataaaactcggccgggcacggtggacggtgcctcacatctgtaatcccagcactttgggaggccgaggcgggcggatcacttgaggtcaggagtttgagaccagcctggccaacatggtgaaaccccgtctctactaaaaatacaaaaaattagccaggcatggtggcgggcacctgtaatcccagctactcgggaggccgaggcaggagaattgcgtgaacctgggaggcggaggttgcagtgagctgagatcgcgccactgcactcaagcctgggcaacacctgggtgacagagcaagaccccatctcaaaaaaaaaataaaactaggtcaagtgcaatgacacacgcctataatcccagcaccttgggaggctaagacaggaagatcacctgagcccaggagctcaagattgcagtgagctatgaacaccactgcactccacctgtccacttgtccttgtgtgacagaacaagaccctgtctctaaaaaataagataaaaccataaagaaacacagtcagtactatacaagaataatggctacttctagagggaaggagttgtcattgtgatgaggcacttggaggggttctggggtgcctgacaaagttctgtttcttcacctgggtggtagttagaagggtgtccccgtatttcaaattgtacctttgtgagattgtatgttttgtaataataaaattttttttgtaattagtaaagtcaatttttatggagaactgg

SEQ ID NO: 828 - DNA, 1566 bp, Homo sapiens
agccgcgagcggcggccgcggggccgaggagcctgggccgggccgggcggggactactccggagtcaggaggcagcagcggcggaggacgaggatctctggcagtcagcgccgctcggacgccgccggcaccatgggctgctgcaccggacgctgctcgctcatctgcctctgcgcgctgcagttggtctcagcattagagaggcagatctttgacttccttggtttccagtgggcgcctattcttggaaattttctacacataatagttgtcatattgggtttgtttgggaccattcagtacagacctcgatacataatggtgtatacagtgtggactgccctctgggtcacctggaatgtgttcattatctgcttttatttggaagtaggtggactctcaaaggacaccgatctaatgacattcaatatctctgtacatcggtcatggtggagagaacatgggcctggttgtgtcagaagagtgctgcctccctcagcccatggcatgatggacgattacacgtacgtctctgtcacaggctgcatcgttgacttccagtacctggaggtcatccacagtgctgtccaaatactactctctttggtgggttttgtgtatgcctgttatgtgatcagtatttccatggaagaagaagacacatattcatgtgatctgcaagtatgcaaacatctttttatccagatgctgcaaattattgaataagcaagaattagtaagatattatcaccaaattgtcacatcagtcaagcctcatgtgcttcctaagaactgaggtgatgcattattttagagtgtcattctaaaccccagattcaacatcttcctaatctttctagtgcagtctaatatataaattttatgaaaagcataggtttttttttaaccagcagtgctctttgagaatttacattgattcctaaagattgccattgctttgtataaaatgttataaattatcttagcatcttacctggaatttccactaaattcaccaatttatgatttgtgaaatctgattttactttttgaaaattttcatgtgaatttcccattttcagtgttgtagcacctctctcttcctctaagatcctccaagctcatcaaaagccatgatcttattataccagcagttttatttattcaatctttcaacaagtagttattgaacttctataatgtgccaggctctggagctcgccttacaccaaacagacacaatcgatccattcgaagtgtcgtaattacacattgagggaccaactagaccttttctcattgtaaacttggagcaaaagtaaattcattaaaataaatttacattatagtgccacaaaaaaatgaacagaaccagaaagcattttttacaaaaattaacagaacagtgtgatagaggggaaaaggatgtgagatcatggtgccctaccttcaatagggtggccagaaaacacctctctgaagaagcagcatttgagctgagacctgaagaacgaggagtcagtgatgcagagaacctcaggagatgccttccaatctgagaaaaga

SEQ ID NO: 829 - DNA, 8443 bp, Homo sapiens
atgggggagctacccaaagcctggggaaggggagtcagtgctggaggtgactggagccgcggcgacggcggcagcagctgcggtggcggcgctctcagccgtggcagccgaggctgcagcccggcccagggcggctcagcggacaataaccgggctaggaacctgaccgggctggaccccactgtgatgcttcctgactgataatgttataacagtgcctggaagcctgaggctgcatttccagctggacgtacctcagttgtccccatcatcatggagacccaaaaggatgaagctgctcaggccaagggagctgcagcctctgggagtacccgtgaacaaacagcagaaaaaggagccaagaacaaggcagctgaggcgacagaaggaccaacctcagagccatcctcatccggcccaggtaggctgaagaaaactgccatgaaactctttggtggcaagaagggtatctgtactctgcctagtttctttggagggggacggagcaaaggttctgggaaaggcagctccaagaaaggtctcagcaagagcaagacccacgatggcctgagtgaagcagcccatggccctgaagatgttgtcagtgaaggaactggcttctccctgcctttgcctgagttaccctgccaatttcccagctctcagagtgcccatggggctttggagacaggctccagatgtaagacatctgtggctggagccacagagaaagctgtggctgagaagtttccctctatgcccaagccaaagaaaggcctaaaaggcttttttagcagtatccgccgtcaccggaagagcaaggtcactggggctgagcaaagtgagccaggggccaaggggcctgagagggtcagagccaggcctcatgagcacgtgagctcagcccctcaggtgccctgctttgaggagaccttccaagcccctagaaaggaaaatgctaacccccaagatgcccctgggccaaaagtttctccaacaccagaaccttctccaccagctactgagaaaatggcctgtaaagatccagaaaaacccatggaggcctgtgcctcagcacatgtgcaacccaagcctgcccctgaagccagtagcctagaggagccccatagcccagaaacaggggagaaggtagtagcaggagaggtaaacccacccaatggccctgtgggggacccactgagcctcttgtttggggatgtgacatccctgaaaagctttgattcattgacaggttgtggtgacataatagcagaacaggacatggacagtatgacagacagcatggcctctgggggccagagagcaaaccgagatgggaccaagcgaagttcctgcctggtgacctaccaaggaggtggggaggagatggccttgccagatgatgatgacgaggaggaagaagaggaagaagaggtggaattagaggaggaagaagaggaggttaaggaggaggaagaagatgatgacttagaatatctgtgggaaactgcccaaatgtatccacggcccaatatgaacctgggctaccatcccaccacatccccaggccaccacggctacatgctccttgacccagttaggtcttatcctggcctagcccctggggaacttttgactcctcagagtgaccagcaagaatccgcccccaatagtgatgaaggttattatgactccaccacacctggatttgaggatgattcaggtgaggccctggggcttgtccgcagggattgtctaccccgagacagctacagtggagatgccctatatgagttctatgagccagatgacagccttgagaactctccacctggagatgactgcctttatgacctccatggtcgaagctctgagatgtttgaccccttcttaaactttgagccctttttgtcctcccggccacctggggcaatggagacagaggaagaacggctagtgaccatccagaaacagttgttgtattgggagcttcggcgggagcagcttgaggcccaggaggcacgtgcccgagaagctcatgccagggaggcccacgccagggaggcctatactcgagaggcttatggcagggaagcctatgccagggaggcccacacttgggaagctcatggcagggaggccagaacccgagaagcccaggcccgagaggttcgttgtagagagactcaagtccgagagacccaggcccggcaggagaagcccgtcttagagtatcagatgaggcccttaggcccatcagtgatgggcctggcagcaggggtatcagggacctctcagatttcccaccggggaattacctcagctttccccaccactgcaagcagcgagccagactggagggacttccgtcctctggagaagcgttatgaaggaacctgctccaagaaagatcaaagtacctgcctgatgcagctcttccagagtgatgccatgtttgagccagacatgcaagaagcaaattttggaggatctcccaggagggcctaccctacttattcaccccctgaagatccagaggaagaggaggttgagaaggaagggaatgccactgtgagtttctcacaggccctggtagagttcaccagcaatgggaacctcttttccagcatgtcctgcagctctgactctgactcatctttcactcaaaacctccctgagctgcctcccatggtgacctttgacatcgctgatgtggaacgggatggggaaggcaagtgtgaagagaatcctgagttccacaatgatgaagatcttgcagcctccttggaagcctttgagctgggctactatcacaaacatgccttcaacaactaccatagtcgattctaccaaggcctgccctggggtgtgagcagcctccctcgatacttgggactgcctggcctgcaccctcgacctccacctgctgctatggccctcaacaggagaagccgctctctcgacactgcagagaccctggagatggagctctccaattcccacttggtccagggctacctcgagtctgatgagctgcaggcccagcaggaagattcagatgaggaggacgaagaggaggaagaaggagaatggagccgagacagtcccctttccctctatactgaacccccaggggcctatgattggcctgcttgggctccctgtcctcttccagtggggccaggtcctgcctggataagccccaaccagttggacaggccttccagccagtctccatataggcaggcaacctgttgcatacctcctatgaccatgtcaatatcactatcagtgccagagtcaagggcacctggggaatctgggcctcaactagctcgtccctcacacctacacctgcccatgggcccttgctataacctccagccacaggcctcccagagcatgagggccaggcctcgagatgtgctgctgcctgttgatgagcccagttgctcttccagttctggaggcttcagccccagccctctaccacaggccaagcctgtgggcatcacccatggcattcctcagctgcccagggtccggcctgagcacccccagcctcagcccactcactatgggccttccagccttgacctgtcaaaggagagggctgagcaaggtgcctctcttgccaccagctactcctccactgccatgaatggaaacctagccaagtagttattatcaattctggagtagggacacggggcctgagcatgtgaatggggatcaggggttgggcagaagggtgggggggtgggggttgttgtttaacttgaaaaccctttgggccaaggaaaactcctgtgagttttcaccttggttttcccacttgcctcttctgccatctatggccacgttcaactcaagtgcatctgcccagggaggctgctgctgctactgcactccagtttttgctttcgaggtttcttcttgtgacccacgctgggtttgggatgctgtaattttgtgcctattccagttgccaagttagtgattatatatatatatatatatatatatatatatatatatatatatacacacacacacacacacacacacacacacatacatacacacacacacacaaacacacatgcacacacatatatagcatgcatccttgacacaggctaaacctttagtgccccctgcccctttcccccaatgaatgatgaaccactgattagcagccaagtctgcattgcctcccgcttggggaagtggggcttatttgctattagcaatgtgaaattatggtacagatcctccccacccctattccttttggcctggcatagctgccatcattatatcagatgactataagctattcatcccagctagctgtccttagagaggatcaagtagcgtgtgtctcacagcctatcgctgtggactttggcatcatgaccagatgggggccttttaactgtcctgccatagcttgggttaaagacaaaaatgctaatccccttgatggagtgataaaattcatccatttgcaaacagaagacaaaacaaggttctgttgtggacactgccatagagtgttgagctccggaatgataggattttttttccttcttttaagcttgtgactacctgagttgcagatgcttttgaatttttgttcttttttcctctaaaggaaattttcataatctcatcacaaggaacacggtcttttaattgagataagggaagagaagcaacctaaattaggcttgactataggggctggggtttttgtggagtgtaggggaaagatagaaaatgagggtccatttatcacagccagcaagaaaggggatttcagaccatgcagagcttaaggtatctcagtttcttaaaagggaaaactcccttctcaagcctcccaacacaaaatgttccttaagccttgcccatcccatcatttggactctgtaataaggccccaggtttgcactcccaagacaggataccaaaggcatctcagctgctgttctgggccctttaaagagcttttatcttccaattagccgagtccttagcatcatcaaatgacagggcttcttggcagttgcagccctttatggaatgaatggcaccctcccttctcctgcatccatgcagttttcatgttaaactaggttggaaatactggtggggaagagcttgctgtcaggaagacattggaacaggctaatcttgccaagctcaacctctcattaatcacctgtaggagagggttccttttacatgtctttattggaaatggcatatggaacattttttgcttggctgtgttcactcaaattatgattattgcaccctcgccctcacatcccaccatctccatgcctgttgagagaagaagtcaacagggttcttgccattcctgagatatggcaatttagcttgggaacagatgctgtttgccccctaagtcaaggtgactttgtgggcaaactgtttcttggccaggggatgtgtccatgctggtctttgtcaccatttctcagattggggttggcccagtgcccttactcacaaatagcagacctggctggtagaagctgcacccctggaagcaccacatgaatttgcatggcactaacaccaccactcaagggacccagaccagctcttcaggctgactttggctacagatacattgtgaagaaatgtatctgttgtggagctggagaatgaaagagggtgaggaaggccctccttaccccaagcacagcattccaagagagaagtgcccaaattccaactttctggcctcttaccaaagctgctctgggatggtggggctgaaattggcctggctatttggcaggaagtaaacactcaccaaatgcctttacaacagggaagaacccacctcttgcctcttctttcagggcagcttgagctcctgtctacatgtggactgtgccagccacagcaggcggtagagccatcaccagcctccagaccctgctggagaagggccaccagcctatctgggaagagaaaaaggaggtggccaacctttggctaagggctgagagctgccctcaggatcaggaaggcagcatgaggcattgtctctgaggggcactggcatagccctgacacactttgttgggctttggaaggtcacacaccacagagtagggcctggggctgagtgagagttcatggtttggacagccttgctgcctgcaagtcccttcactgccctagccagcccaggaataggatccttaccacctgaagtggggcagccaggatatgtggctgcagaagcaggttcctttgaatttctagagctaagcagtttgtggctgaaacccaatggcagcctaggggaggaaggaagacctgtctggggacccatggtgttgacagcacagggtgacattgggagagccagccaagcttcaggcctgtttccaaacacagactagtgctggcttgggtggcagcaaatacaccccagaccactaaaactgttgatatcatgtccacacctccaagagtactactagatgaacaacatgtctccattgcaaggtcctggaataatgcttttggatgtgattttaagggaaaatgggacttagtggaagtagctgccttcatcttattacccaataggcctagtgccagacagctgtgatcctgagaattcccagatgagactggtccttggaggaccagtgaatgtggatagagaaggccacctagtaggcctctcccagggccaggatgccagtttcttggtgctttagagtctccaaggaagcactgccttggggcccagttcaagccagccctacctatctggcctcagcttgggtaccaggccacaagactgcccggataatgggttcagtaaacaccagtctctctccctccttagtcctatgccaagaagggaagtagcttcacacactcaggaggctgggtgtgtacccttcatcctgctgccagcagctttccttacctgtgccagtgccaccaccccacctgccctcagcccccaggcccagttgctagagggaggcatggggtttagcagggagacttcaagtttacccatgtgtatgttgcattcaagttgtttttaatatatatatatatatatatcaaaagtcaattatctatttttatattgtttgcattttatattcatggaaaacaatgtttatcaattgttcttttctgatttatttttaagcggtgctgtttacagttttaaacaaaacaaagatgacacaaaaattgctgctgcttgtgcagagggctggcatctcaactgcctagggccctccctctttcccctctccctaccttagctgtaccacactgtccgttccctccccccatgatagggacagcagaagatgcccaggtactgaagacaaacgccaagtgactcaggcgtgtgggacctggtagacagcttgtcattttctggctttattttatgtttttctttcttttgaacccttcttccccatgtctagaccctctgagagtactcatgtgtcttattttttttcctcgttatgttttgtgctttagttttgaaatcagagtgcccatgttgtgctatttgtcttgttgagtttctccaaaggagcattttgggaacattctccacccaatggggaaggaagggggtttcaaccatgtcccctttccccaagaagctgtgggagacagatgacaatgatgcttgcactatcaggaatttaccatctcgttgaggaaacccttgcataggacttcctaggagctcagttgattgtgacattttcccagaagagaggctttggggaactccttcacccctcttgctgctttgggggaatctcctcccctaccaccattccccctcccctgccctgctccagctcacacgtggatggtactttggggaacagtgactttcagggtgatggcttgctggcctgatccctgactttccaatcctatagtcactccaaagaagaaaatccacatggtatgtatatgtgtgagggttgggtctattgagaggtgggactttaattattgttattattattggtgcttatttttcctgctgtatatgggggtgggggtgggggggaataaaacaggaatgtatatttaggtcatgttaaataaaatggctggaggaaggagggaagaaattaggaactgcagtacatcatcaccccaggtgtaagagttatttctctcccagtgcagaaaggggagtgtggcccctggctgtacctgagcttcctcttctccatccctgagacatcacagaatcacccgggttctgacctctccacttctagctctcactgacatctggatatcttgatgcactgcctgtttgtaacaacatatacttctttgctgaatgctaataaacttctgggttcaagagggaacccctcagtca

SEQ ID NO: 830 - DNA, 2785 bp, Homo sapiens
ttactttcttactcttgggtcagttcctgctacagctatcccaccatggacttcttgatgagtggcctggcagcctgcggggcctgtgtattcaccaatcccctggaggtggtgaagaccaggatgcagttgcaaggagaactgcaggcccctggcacataccagcggcactaccgaaatgtcttccatgccttcatcaccatcggcaaggtggatggccttgctgccctgcagaaaggcctggcccccgccctcttgtaccagttcctgatgaatggcatccgactgggcacctatgggctggctgaggctgggggctacctgcacacagccgaaggcacccacagtcctgcccgcagcgcagcagctggggccatggctggggtcatgggagcctacttggggagccccatctacatggtgaagacacacctgcaggcacaggcagcctcagaaattgctgtagggcaccagtataagcatcagggcatgtttcaggcgctaaccgagattggccagaaacatggtctggtggggttatggcgtggggctctgggcggcctgccccgagttatcgtcggttcctccacccagctgtgcaccttctcatccaccaaggacctcctgagccagtgggagatctttcctccccagagctggaagttggcgctggtggctgccatgatgagtggcattgcagttgtcttggccatggcaccctttgatgtggcctgcacaaggctctacaaccagcccacagatgcacagggcaagaaccgagtccccaagttctcagcaacatcatgcagtgcttcagcgcctttactggggaccaaagatgttaggatcgtgaagggtcagactggtcaccagctgttcaaagtcacccaggctccagggtgcagcccgattctcctgggaacccagtcatgagatacccgcccgttccttcctccttacgggggctgattgaaggtaagcaagagatcagtctggtactggggcagcctcagcaaggcctgatgaagtgtcacgtcctttgctacctaaggggatcagagtcaggatgcttacctggatctctgcgtccccgctaccgcccttccaggacattacacactctcgggccctcacctgctggttttccttagctatctgctgcttgccagagaggacccaggcttcttgacagcggcccctcagggccaggttctccaaactgagaggctgaacagactccacatggacagccctagccccctgcacgccaccaacatcctcaaagtggtacctggagtagggaagcggggtcaggaagggacatctctggtcgcctccccgggagcatctttaagttgcaggcctggctcccggcccgtgcgtggtctcaccgcccggattaaccgtcggccgcgggccccgcccactggtccgaccccgcccctgccattggccagccgggggccattccctcaccgcgcagccgcttcgccccgtacgtgggcctgcagctcgagaagttccactatcaggctctggtccgtcacgggatggcagaaaacttcttgattgtccgggaccggtcggaggtcgctggagtgaggcgaggcagaccctggttgaccccggtctcttcccacaacccacccagtcagccgcccctgggcgccccggccttctcaccttacgtcaatggcccccatggggaggatggcggaaaaggcgcccccgaacagcgggcagtctctcgtgggctccatgggtctgaggctgggttatgggcattagaaaggtttaaaagaagtccacattgggtcacgtggcatcggctccctgggtttcgcagctgccaccgccacccgggtctggcttagctcccggatcctttaagatttggctccgccctgcgctctcgttggccaatcggcgccaagaccctgggggcgggggtcagcggctttgctccggaagccgcgctcttaggagtgcgcctggcgggacggtggggtctgccttggggttggacttagggttagggtctatgtcgcccccggtggtcacgagcatgctcccgccagcctcctcttgattgattgattgattgattgattgacaggtctcgctgtgtcgcccaggctgtaatgcagtggcgcgatcaccgctcactgcagtctccacctccaggactcaagtgatactcctgcctcagcctcttgagtggctcctgctcccgccaccacgcccggctaaatttttaattacttgtagaaatggggcggggtggggagtgtctcccaatcttgcccaggctggcctcaaactcctggactcaagcgatcctcccgcctcggctccctaagtgctggaattacaggcgagagccacagcgcctggcctcctcgtccttttcaagtggtcacaccttccaagaaggtcgcctgagaccctcctgaggggcaggtgctcgtcaaaggggcccacgtctaggtagggtctcttgagtcaggaaagcatagtttcacggtgttctgggcctctgaaagaagaatgggctgccacccagaccgctaattcatagatctgctgctgggaattaggggaacaatgcgtccaggttaggattcaggtctcacatcttcctgaaagtgagagccaacctgggtattagaaatctaattcctctcaaatatttgccttgggaatgctcccgggcaggtgcaaccccacccccagctccacacacctggacagaagcacagattaaaccctcttttgtttgtctttt

SEQ ID NO: 831 - DNA, 3534 bp, Homo sapiens
tttagaagaccaggtggaactctgtgctaagaagcttgaaagagcctcacaattaattggaggactgggtggagaaaaatcaagatgggcccaagctgcagatgaccttcagataacatatgaaaatttaactggcgatgtcttagtatcagcaggagtaatagcttaccttggtgctttcacttctggctttcgacaaacatgtacaaaagattggagcatgttgtgcaagaagaaaaaaatcccgtgttcagaggagttcttgttgagtaaaaccctgggtgatccagtaaaaattagagcttggaatattgctggtttaccaacagatacattttccatagataacggagtgatcgttaacaactgtaggcgttggcctttaatgattgacccccagggtcaagccaataagtggatcaaaaactctgaaagagaaaatcagcttagtgttattaagctatcagattcagactatatgagaacattggaaaactgtattcagtttggaactccacttctattagaaaatgttggtgaagaactggatccatctttggagcctttactactcagacaaacttttaaacaaggtggcattgattgcatcagacttggtgaggtcattattgagtattcctttgatttcaaattttatatcaccacaaaactgagaaacccgcactatatgccagaactggctacaaaagtgtctttgctcaatttcatgataactccagaaggacttgaagatcaattactaggtattgttgttgcaaaggagagaccagaattagaagaggaacgaaatgccctgattcttcagtctgcagctaacaagaaacagctgaaagacatagagaaaaaaattttagaaacattatcatcatcagaaggaaacattttagaagatgaaagtgcaattaaagtcttagactctgccaaaatgatgtccaatgaaataacaaagaaacagcagattgcagaaaaaacagaactcaaaatagcagagtctcgagaaggctatagacccatcgccaaacactcgtcagtgttattctttagcattgcagacctggctaatattgatcccatgtatcagtactctctcacgtggtttgtgaacctttatatcaactctattcatgacagtaacaaatccaagattttggaaaagcgcctacgatatttaaatgaccacttcacatacaacttatattgtaatatatgccgatcactatttgagaaggacaagctgttattttcctttttattatgtgccaatcttcttctggcaaggaaagagattgaataccaggaactgatgtttcttttaactggaggagtaagtcttaaaagtgctgagaaaaatcctgatccaacttggctacaggacaaaagctgggaggaaatctgtcgggcaagtgaatttcctgccttcagaggactcaggcaacatttttgtgaacatatatatgaatggcgagaaatctatgacagtaaagagccacataatgctaaatttccagcaccaatggataagaacctaaatgaactacagaaaataataattcttcggtgtttaagacctgataagataaccccagctataacaaactatgtaactgacaaactagggaaaaagtttgtagagcctccaccatttgatttgacaaagagttacttggattcaaattgcaccattcccttaatttttgttctatctccaggagcagatcctatggccagcctgctgaaatttgcaaatgataaatctatgtctggaaataagtttcaagctatttcactgggacagggacaaggaccgattgcagcaaaaatgattaaagcagcaattgaagaaggaacttgggtgtgcctacagaattgccatcttgcagtgtcctggatgcccatgttggaaaaaatatgtgaagattttacctctgaaacctgtaactcatcctttaggctttggctgacaagctatccatcttcaaaattcccagtaacaattctacagaatggagtaaaaatgactaatgaacctcccacgggtcttcggctgaatctccttcaatcatatctcactgatccagtttctgatcctgagtttttcaagggatgccgtggaaaggaactggcctgggagaagttactgtttggagtttgtttttttcatgcccttgtgcaagagagaaagaaatttggtcctcttggttggaatattccatatggatttaatgaatctgacttgcgcatcagtatccgacaactgcagttatttatcaatgaatatgatacaattccatttgaagctatatcttacctgactggggagtgtaattatggaggaagagtgacagacgattgggacagacgtcttctattaaccatgctggctgacttttataatctgtacatagttgaaaaccctcattataagttttctcccagtggaaactattttgcacctcctaaaggcacttatgaggactacattgaattcattaagaaacttccatttactcaacaccctgagatatttggattacatgaaaacgttgacatctccaaggatcttcaacaaacaaaaaccctctttgagtccttgctcctcacccagggaggctccaaacagacaggagcctcaggaagtactgatcagattctgttagaaattaccaaagatatcctcaacaagctccctagtgatttcgacattgaaatggcactacggaagtatcctgtgagatatgaagaaagcatgaatactgtgttagtacaagaaatggaaagatttaacaatttaattataactatacgtaacactctacgggaccttgaaaaagctattaagggtgtggttgtgatggattctgcattggaggcactctccggtagcttacttgttggaaaggttccagaaatatgggccaaacgttcatacccaagccttaagcccctgggaagttacatcacagatttcctagcccggttgaactttttacaggactggtataattcaggaaaaccttgtgtgttttggctgtcaggtttctttttcactcaggcctttttaactggagctatgcagaattatgccagaaaatataccacccctattgatttgctaggatatgaatttgaggttatcccatctgatacatctgacacatcaccagaagatggtgtttatatccacggactgtatctcgatggcgcacgctgggaccgagaaagtggattgcttgctgaacaatatcccaaacttctgtttgacctgatgcccatcatatggataaaaccaactcaaaaatctcggattataaagtcggatgcctatgtctgtcccctctacaagacaagtgaacgtaaaggaactctttccactacgggacattctactaactttgtcattgcaatgttgttaaaaacagaccaacctactcggcactggatcaagcgcggggttgctttgctttgtcagttggatgactaaattggacaaatttataaaacatccaaaagttt

SEQ ID NO: 832 - DNA, 2028 bp, Homo sapiens
gctctaagaaaagaaagttttgggcctagagtcaggaaaaagccttttcaagtcaagctgagaactttaaggtggtcttggctacctcattttatgcaaagtaggcagaaaatttaaaagaaaagaaacatatttaagtacaattaagaaaattacagtgtttcagttaaagcagttcagtgctttttagaaaaggagctgaaattaaataagttgaacttcctctctttttagaagaatggatttctcggagtctgaaaaatttatggttcttctctggaagaattttattttaaagaggcggcgatgtattgctttagttgtggaaatggtcctcacatttctgtttagtgctgcgcttttggcaacacgctctgttattactataaataagaacggacctttcgattttgctgctcagcctgtcgatgaagtgcctttctacatcacagcttccttaatttctccttctcctttggaattggcttacgtgccttccagaagtactgtggttcagggtattattgaaagagtgaaaatggatttaaaccctcaaatgaaaggttagaaattaacattttctgaaaaaacatacagaattactaaatcgatttagtgaagacatacttacaaccttattaactggttcttaacctcccaagtaaaacatcgttggaatcctcatactaagtataaatattatggactttgttaaacttgaaagttaaatttatataaaatattttgttcatagagcccagaacaaatagtaatatttcaaaatgagatgaccaattattattattattctaagttgttatccagttttgtgatactgttttttctatctggttgtgcttcttgaacctgggtaagtatacctccaggggtgtgtgattttgtgccacaggtcagtggtcagttatttaaaataatgttttatattaaaatgtggtgtgagtaatataggaaggctttagaaaacacttaagctatgtagaattattttaaaagccctcagtctctcacttaccttcatattcccggatcagtttcttacctctttctcttagaggtaaatactgtgagaagtttaggtcggccgggcccagtggctcacgcctgtaatcccagcattttgggaggctgaggtgggcagatcacctgaggtcaggagttcaagaccagcctggccaacatggcaaaaccccatctctactaaaaatataagaattagccagacatggtggtatgcacctatagtcccagctacttgggaggctgaggcatgcgaattgcttgaacccaggaggaggaggaggttgcagtgaggtgaaattgcaccactgcactccagcctgggtgacagaccaagactctgtctcaaaaaaaaaaaaaaaaaagtttgtgggcatctccctagcacacctctctctacacatgtgcgtgcatgtgcacacacacacacacacacacacacacacacagtcaggcaacttttccatctttttttgtctttcaagagatatgagagtccttgagagtagatgccatctcaaagcattcttttttgttgtttgcttttttttatcaaagcattctttaaaataaagactgaaacaggagaatatgaagttcccagtaatttttaaattctacaacaaaaatatctcaacaaatttaaagtctattatgggttactccaatagtcgctttgggttactcaaaatattttctgatttccactctgatgtcttctttgatgcatggaatttcaaaatttttagaaatgtgttgctgaacttccaaacactgggggcttcttatctttctgttgttgatttctgttttaatttcctttcatcagagagtatactcaattccagttctttgacattttgagaactgtttatgactagtacatggtatattttgataaatgttttctgtgaatttgtaaaaactatgtgtgctataggttttgcttctggtgttctataaatgccacctgggcaaagttggctaagt

SEQ ID NO: 833 - DNA, 1791 bp, Homo sapiens
atggcctacaactctgcatggccgtcttctttccccaaactcactgtggggagatgggtgaagacaagtcaggccttgttaaaagaaagaaacagaccctgccagaagattccactaggcagtatagcccagtatcatatccccacaaagcagctaaaggcagaggtgattttagaacctcatgaagtctcagttactgaaaattattttcagacccaatggcttatttggtctttttctgcaagtttcaggaaaatatacatgcaagaaggcaaaccaaacttattggacatgggctctttgatgatcaaaccaattcaacgtgtgatgaaataccccctattactgtgcgaacttcggaattccacccctccctctcacccagattacagagcactggacgatgcctttgctgctgtgaaggacattaatgttaacatcaatgaacttaaaagaaggaaagatttagttctaaaatacaagaagaatgacgaggatgaatcacttaaagacaaattgtctaaactaaatattcattcaattagcaagaaatcaaaaagagtgacaaatcatctgaagattctgaccagaggagaatcacaggttaaagacaatacctttaacagagaagaaaagctgtttagagctttagaaaagactgtgaggctttgtgtgaagaacatttcactctgtcttcaacacatacaggatgccatgcccctggctctgcagagtgtgatggaccttcaggagatttcatacaacaaagacgatgagatggactattctgagaccctaagtaatgccttaaattcgtgtcatgactttgcatctcacttacagagactcatcctgacccccttgtcagccctgctgtccttattcccagggcctcacaagctcatccagaaacgctatgacaaactgctggattgcaacagctacctgcagcgatcaacgggagaggagtcagacttggccaaaaaggagtatgaggccctcaacgcccagcttgtggaggagctccaggcattcaaccaggctgctcggaagattctgttgaactgtctatgcagcttcattaccctccttagggacctgatgctcgtggcacagcaggcttactccacacttgtgccgatgccactgttggtttcaagcatttctgagattcagaatcaagtactagaagagatccaaaatttgaattgtgtgaaagaaaacagtgccacctttattgagaggaaactcagttttgaaaagaagaaacctgtgcagattctgccagaaatgccacatcaaactgacattcatcgctccaaacttctatccacatatagtgcagaggaactctatcaagctaagcgcaagtgcaatgctacacaagaatatgacatcaatcttctggaaggagacttggtggctgtgatagaacagaaagatccactggggagtacaagcaggtggcttgtggacacaggaaatgtgaaaggatatgtttattcctccttcctaaaaccctacaatccagcaaaaatgcagaaagtggatgctgagaacaggttctgtgatgatgttgacagttttcaagaagtagacgaacagattttctatgcagttcatgcttttcaagcacggagtgaccatgaactcagccttcaggaataccagagagttcatatactcaggttttgtgacctaagtggcaataaagagtggtggttagctgaagctcaagggcagaaaggatacgtgccagctaactaccttggaaagatgacttatgcttaa

SEQ ID NO: 834 - DNA, 2384 bp, Homo sapiens
actgacgggagaacattggcgtgaaggctgctggcgactgggccagcattcattgtgaagaccggagggacacaccctgctgctcatgtctgcagggctctgagaggaggaagcctggggcaggacctgcgccagtggccgctgggcacagcatggagcaccccagcaagatggaattcttccagaagctgggctatgaccgggaggatgtgctccgggtgttgggcaagctgggcgagggcgccctggtcaacgacgtgctgcaggagcttatccgcacgggcagccgcccgggtgccctggagcacctggctgcacccaggctagtgcctcggggctcctgtggggtcccggactctgcccagcgtggcccggggacagccctggaagaggacttcagaaccctggccagttctctgcgacccatagtgattgatggcagcaacgtggcgatgagccatggaaataaagaaaccttctcttgccggggaatcaagctggctgttgactggttcagggacagaggacacacctacatcaaagtttttgttccatcctggaggaaggactcaccaagagctgacacccctatcagagagcagcacgtgctggcggagctggagcggcaggcggtgctggtgtacacgccgtcccgcaaggtgcacggcaagcgcctggtctgctacgacgaccgctacatcgtgaaggtggcctacgagcaggacggcgtcatcgtctccaacgacaactaccgggacctgcagagcgagaaccccgagtggaagtggttcatcgagcagaggctgctcatgttctccttcgtcaacgaccggttcatgccgcctgatgaccccctgggccgccatggaccctccctgagcaacttcctgagcaggaagccgaagcccccagagccatcctggcagcattgtccttatggcaagaaatgcacctatggcatcaagtgcaagttctaccacccggagaggccgcaccacgcgcaactggcggtggccgacgagctccgcgccaagacaggggcccggcctgttctccccgggcgacctcccgcctccgcccggcctgcagctccagccgcggggcgaacaccgccctagggacctgcacggcgacttgctttccccgcgcaggccacccgacgacccgtgggcccgtccaccccgctccgaccgcttccctgggcgctccgtctgggcggagccggcctggggcgacggcgccactgggggactttcagtgtacgcgaccgaggacgacgagggggacgcgcgcgcccgggctcgcatcgcgctctacagcgtcttcccgcgtgaccaggtggaccgcgtgatggccgcgttcccggagctctcagacctcgccaggctcatcctcctggtacagagatgccagagcgcgggggcgcccctgggcaagccctaagggaccaacacgcacttgcagggaatggcccagcctcgccttgcgtcttggacgggtggacctgtggttgccagcctggacctgagtgggcccatcatggtgcccccttttctttaaagatggtcagggaagcctgcttcctcctcctgagcggggttgtgggggcctggtggcacttggtgatcctcactgaggccggggcctgctgcggggaggtccacccacttccgtggagggaatgattttccatgtgcacggagactgcgggtccaagctgcagtagaacccacaagtgggtcacaaaatcaatttagtgggtcaccaccacaaacacagtggactgggacagggcaaagcgcaccctgtgccatcaggctgagtctgaactcttgttacctatcctgtgtccccacccccttggcagccatgtaactaacctcaatgtgggtcgtagtcagaagtttaaaaaagactatgaatgctcttgaatttcattgcttcaggtaatgtttgaaatatgtagtcaggtggccaggggaggtttgctatctggaagttttcatgttagctattgctaaccccacccgcaagggcagcccagcctccaggtgtgggctctcctgtgctctgaattgtgtggctgtcctatgctggggacaagtggtaggagcgctttgtcccagggccaccttctggggccttcacacacatacccccaccacacaaacacacacacacacacacacacacacacacagtctatcatacatgtacatactcacacacaccacacagacacatactgtttggctaagggttaagtatctccaatattttattagccatccatcatggcagtttccagaataggctttctactgtaccagctgagctgccttcttttacttcttcttcttcttctttttttaaacagacagagt

SEQ ID NO: 835 - DNA, 2463 bp, Homo sapiens
atccttatcttctcgtctagttctccgaggttgaaggctcggcctgctcagagaaggaaactgaggtccaccgagttggagaaacctactcaacaccaggactaacttcttcagtgcttagagtgtgagaaaaatggcaaatatgaatagtgattctaggcatcttggcacctctgaggtagatcatgaaagagatcctggacctatgaatatccagtttgagccatcggatctaagatccaaaaggcctttctgtatagagcccacaaacatcgtgaatgtgaatcatgtcattcagagggttagtgaccatgcctctgccatgaacaagagaattcattactacagccggctcaccactcctgcagacaaggcactgattgccccagaccatgtagttccagctccagaagagtgctatgtgtatagtccattgggctctgcttataaacttcaaagttacactgaaggatacggtaaaaacaccagtttagtaaccatttttatgatttggaataccatgatgggaacatctatactaagcattccttggggcataaaacaggctggatttactactggaatgtgtgtcatcatactgatgggccttttaacactttattgctgctacagagtagtgaaatcacggactatgatgttttcattggataccactacctgggaatatccagatgtctgcagacattatttcggctcctttgggcagtggtcgagtctcctcttctccttggtgtctctcattggagcaatgatagtttattgggtgcttatgtcaaattttctttttaatactggaaagtttatttttaattttattcatcacattaatgacacagacactatactgagtaccaataatagcaaccctgtgatttgtccaagtgccgggagtggaggccatcctgacaacagctctatgattttctatgccaatgacacaggagcccaacagtttgaaaagtggtgggataagtccaggacagtccccttttatcttgtagggctcctcctcccactgctcaatttcaagtctccttcatttttttcaaaatttaatatcctaggcacagtgtctgtcctttatttgattttccttgtcacctttaaggctgttcgcttgggatttcatttggaatttcattggtttataccaacagaattttttgtaccagagataagatttcagtttccacagctgactggagtgcttacccttgctttttttattcataattgtatcatcacactcttgaagaacaacaagaaacaagaaaacaatgtgagggacttgtgcattgcttatatgctggtgacattaacttatctctatattggagtcctggtttttgcttcatttccttcaccaccattatccaaagattgtattgagcagaattttttagacaacttccctagcagtgacaccctgtccttcattgcaaggatattcctgctgttccagatgatgactgtatacccactcttaggctacctggctcgtgtccagcttttgggccatatcttcggtgacatttatcctagcattttccatgtgctgattcttaatctaattattgtgggagctggagtgatcatggcctgtttctacccaaacataggagggatcataagatattcaggagcagcatgtggactggcctttgtattcatatacccatctctcatctatataatttccctccaccaagaagagcgtctgacatggcctaaattaatcttccacgttttcatcatcattttgggcgtggctaacctgattgttcagttttttatgtgaaatacctcaactgtttttttcaagagctctcatgatattttgagccttgacaacagttctatataaattcacttgtaaatgctgctgttgtgtaattctaaatattttctaagataatttgaaagcaagggaaatagtggccccttaatgagtatttttttattggggtggggaaaggggcaaaaagaatgatcttagtgtctttacctttctcatattaactcacctctttattctgtggtcttttctgaatagaaatgtatgccctaggaagaaatcatgctgggttttgcttttagagataaaaggtggtggatttattttgcctgcagtaaagattctcagggtgtcagagcagcatattgtcaaatcctgcttctgttttatgtttcagtgtattcactttcattttcttacttactagaccatttctgcagtttgcccaaacctctactgtttgggacagtaagccaaatacctcatttttaaaaagaagttttcatggcatcagtgttaataaagtacatttttaactgagtcttaatctctatttgaagaaaaagtagagacaaaagtaatgtcaatgtaatccccaggatcatgaaatgtatacaaaataaataaagtaggagagtttgttgctg

SEQ ID NO: 836 - DNA, 3977 bp, Homo sapiens
gaggtgggctgtgtgcagtaaactggaatgctctccctcgctcactcctcagtgtaggagtgatctgaagcaggacaagctcagcctgcagctgccgtgggctttgtgtggactggacgcagagcttgggagacgggggagggctattactccaattcactgtcaatggaattacagctatagcggcagtgtatataggattgctttttctcgtcttcctggagatgctcagtcccagtatattttaaggaagagaaatataaaggaaatttagtatgcctccttttctttaaatgaagaatttagtttcctttacttcttaaaagagaatacctgttcttgtataacgtgactgcaccagacattctgaaaaatcagcaagaagcaaaagctggaaatagctatttcacagcagggttctgaagtaacggaagctaccttgtataaagacctcaacactgctgaccatgatcagcgcagcctggagcatcttcctcatcgggactaaaattgggctgttccttcaagtagcacctctatcagttatggctaaatcctgtccatctgtgtgtcgctgcgatgcgggtttcatttactgtaatgatcgctttctgacatccattccaacaggaataccagaggatgctacaactctctaccttcagaacaaccaaataaataatgctgggattccttcagatttgaaaaacttgctgaaagtagaaagaatatacctataccacaacagtttagatgaatttcctaccaacctcccaaagtatgtaaaagagttacatttgcaagaaaataacataaggactatcacttatgattcactttcaaaaattccctatctggaagaattacatttagatgacaactctgtctctgcagttagcatagaagagggagcattccgagacagcaactatctccgactgcttttcctgtcccgtaatcaccttagcacaattccctggggtttgcccaggactatagaagaactacgcttggatgataatcgcatatccactatttcatcaccatctcttcaaggtctcactagtctaaaacgcctggttctagatggaaacctgttgaacaatcatggtttaggtgacaaagttttcttcaacctagttaatttgacagagctgtccctggtgcggaattccctgactgctgcaccagtaaaccttccaggcacaaacctgaggaagctttatcttcaagataaccacatcaatcgggtgcccccaaatgctttttcttatctaaggcagctctatcgactggatatgtccaataataacctaagtaatttacctcagggtatctttgatgatttggacaatataacacaactgattcttcgcaacaatccctggtattgcgggtgcaagatgaaatgggtacgtgactggttacaatcactacctgtgaaggtcaacgtgcgtgggctcatgtgccaagccccagaaaaggttcgtgggatggctattaaggatctcaatgcagaactgtttgattgtaaggacagtgggattgtaagcaccattcagataaccactgcaatacccaacacagtgtatcctgcccaaggacagtggccagctccagtgaccaaacagccagatattaagaaccccaagctcactaaggatcaccaaaccacagggagtccctcaagaaaaacaattacaattactgtgaagtctgtcacctctgataccattcatatctcttggaaacttgctctacctatgactgctttgagactcagctggcttaaactgggccatagcccggcatttggatctataacagaaacaattgtaacaggggaacgcagtgagtacttggtcacagccctggagcctgattcaccctataaagtatgcatggttcccatggaaaccagcaacctctacctatttgatgaaactcctgtttgtattgagactgaaactgcaccccttcgaatgtacaaccctacaaccaccctcaatcgagagcaagagaaagaaccttacaaaaaccccaatttacctttggctgccatcattggtggggctgtggccctggttaccattgcccttcttgctttagtgtgttggtatgttcataggaatggatcgctcttctcaaggaactgtgcatatagcaaagggaggagaagaaaggatgactatgcagaagctggcactaagaaggacaactctatcctggaaatcagggaaacttcttttcagatgttaccaataagcaatgaacccatctcgaaggaggagtttgtaatacacaccatatttcctcctaatggaatgaatctgtacaaaaacaatcacagtgaaagcagtagtaaccgaagctacagagacagtggtattccagactcagatcactcacactcatgatgctgaaggactcacagcagacttgtgttttgggttttttaaacctaagggaggtgatggtaggaaccctgttctactgcaaaacactggaaaaagagactgaaaaaaagcaatgtactgtacatttgccatataatttatatttaagaactttttattaaaagtttcaaatttcaggttactgctgcgattgatgtagtggagatgcctgaacacaattctatattttagtattttttagtaatttgtactgtattttccttgcaaatattggagttataaaccatttactttgtgttctactgagtaagatgacttgttgactgtgaaagtgaattttcttgctgtgtcgaacaatcaggactgcattcatatgagatccttgtagtataagcacaggccatttttcactttggtattaataaaatgtaaaaaaaaaaaactggctgaatggctgaatgagataaaatttaattttaaaaaatggttatgaaataatgttccaattattaaatttgtattatcccagtggtattcaataaatcaaaatgtgtgaagtaatgggcaatatcaaacttcctgcatatctccatttttgctctaggcaaattaattatccttaaaaaagttaagcatatcttctgaactgaatacatcagctggcataaaaggagcatgaagtctgttaaagccattgtcagcaaagctttgaaaataaaggacttcacaaaaacggtaatgtaaatgtgcttccaagttggggggaaaatgtgtacttaggaaaacatggaaacttagacttgtatagtgtaatgaacacaaataccaaaactgcattttggttttgcctataccatcctgatttttgaaaagtgaattataaacacaaaattgttagtgtttatgatgtttttatcataaaggatgtcagagaaactttatgcatattaaaaatgtaatgtaattataagcgattcccctcaacaatccagagaaagtagttctttaaataagagataatttaaagaaaaataaatactagacatcaaatttagatctggtttatgtcaaaggttttaacactgtacataaatgttcaatttacttttacaaagatcaagaatactgcccattactgtcacaattttccagatattatataatgaactcgtaatgtaacatttccttctagcttcctactgaattgtgagctgttacttgttgaaaaaccatatcacttttctgttgccatgattttttttttttcaacaaaaaaccaaagtgcattgtacgccctttggccagtcttgtatgtgccttgatccaacgctacatgtattcagcttttaaaactccacaaatttttcatactccttaaatatgaaaaattatggtcttattgctgaataaaacttttaaaaagtacagaataattgtgcttgctttttcaggattgtgttactatcactaagtagcaaattgcccagcacattagtcctaaacgtcccatgtatttttctaggcataaaaataaaagttggctaaaaattttaaaaaatc

SEQ ID NO: 837 - DNA, 5833 bp, Homo sapiens
actttcagccccgagccgcggccgctcgggtcggacccacgcgcagcggccggagatgcagcggggcgccgcgctgtgcctgcgactgtggctctgcctgggactcctggacggcctggtgagtggctactccatgacccccccgaccttgaacatcacggaggagtcacacgtcatcgacaccggtgacagcctgtccatctcctgcaggggacagcaccccctcgagtgggcttggccaggagctcaggaggcgccagccaccggagacaaggacagcgaggacacgggggtggtgcgagactgcgagggcacagacgccaggccctactgcaaggtgttgctgctgcacgaggtacatgccaacgacacaggcagctacgtctgctactacaagtacatcaaggcacgcatcgagggcaccacggccgccagctcctacgtgttcgtgagagactttgagcagccattcatcaacaagcctgacacgctcttggtcaacaggaaggacgccatgtgggtgccctgtctggtgtccatccccggcctcaatgtcacgctgcgctcgcaaagctcggtgctgtggccagacgggcaggaggtggtgtgggatgaccggcggggcatgctcgtgtccacgccactgctgcacgatgccctgtacctgcagtgcgagaccacctggggagaccaggacttcctttccaaccccttcctggtgcacatcacaggcaacgagctctatgacatccagctgttgcccaggaagtcgctggagctgctggtaggggagaagctggtcctgaactgcaccgtgtgggctgagtttaactcaggtgtcacctttgactgggactacccagggaagcaggcagagcggggtaagtgggtgcccgagcgacgctcccagcagacccacacagaactctccagcatcctgaccatccacaacgtcagccagcacgacctgggctcgtatgtgtgcaaggccaacaacggcatccagcgatttcgggagagcaccgaggtcattgtgcatgaaaatcccttcatcagcgtcgagtggctcaaaggacccatcctggaggccacggcaggagacgagctggtgaagctgcccgtgaagctggcagcgtaccccccgcccgagttccagtggtacaaggatggaaaggcactgtccgggcgccacagtccacatgccctggtgctcaaggaggtgacagaggccagcacaggcacctacaccctcgccctgtggaactccgctgctggcctgaggcgcaacatcagcctggagctggtggtgaatgtgcccccccagatacatgagaaggaggcctcctcccccagcatctactcgcgtcacagccgccaggccctcacctgcacggcctacggggtgcccctgcctctcagcatccagtggcactggcggccctggacaccctgcaagatgtttgcccagcgtagtctccggcggcggcagcagcaagacctcatgccacagtgccgtgactggagggcggtgaccacgcaggatgccgtgaaccccatcgagagcctggacacctggaccgagtttgtggagggaaagaataagactgtgagcaagctggtgatccagaatgccaacgtgtctgccatgtacaagtgtgtggtctccaacaaggtgggccaggatgagcggctcatctacttctatgtgaccaccatccccgacggcttcaccatcgaatccaagccatccgaggagctactagagggccagccggtgctcctgagctgccaagccgacagctacaagtacgagcatctgcgctggtaccgcctcaacctgtccacgctgcacgatgcgcacgggaacccgcttctgctcgactgcaagaacgtgcatctgttcgccacccctctggccgccagcctggaggaggtggcacctggggcgcgccacgccacgctcagcctgagtatcccccgcgtcgcgcccgagcacgagggccactatgtgtgcgaagtgcaagaccggcgcagccatgacaagcactgccacaagaagtacctgtcggtgcaggccctggaagcccctcggctcacgcagaacttgaccgacctcctggtgaacgtgagcgactcgctggagatgcagtgcttggtggccggagcgcacgcgcccagcatcgtgtggtacaaagacgagaggctgctggaggaaaagtctggagtcgacttggcggactccaaccagaagctgagcatccagcgcgtgcgcgaggaggatgcgggacgctatctgtgcagcgtgtgcaacgccaagggctgcgtcaactcctccgccagcgtggccgtggaaggctccgaggataagggcagcatggagatcgtgatccttgtcggtaccggcgtcatcgctgtcttcttctgggtcctcctcctcctcatcttctgtaacatgaggaggccggcccacgcagacatcaagacgggctacctgtccatcatcatggaccccggggaggtgcctctggaggagcaatgcgaatacctgtcctacgatgccagccagtgggaattcccccgagagcggctgcacctggggagagtgctcggctacggcgccttcgggaaggtggtggaagcctccgctttcggcatccacaagggcagcagctgtgacaccgtggccgtgaaaatgctgaaagagggcgccacggccagcgagcaccgcgcgctgatgtcggagctcaagatcctcattcacatcggcaaccacctcaacgtggtcaacctcctcggggcgtgcaccaagccgcagggccccctcatggtgatcgtggagttctgcaagtacggcaacctctccaacttcctgcgcgccaagcgggacgccttcagcccctgcgcggagaagtctcccgagcagcgcggacgcttccgcgccatggtggagctcgccaggctggatcggaggcggccggggagcagcgacagggtcctcttcgcgcggttctcgaagaccgagggcggagcgaggcgggcttctccagaccaagaagctgaggacctgtggctgagcccgctgaccatggaagatcttgtctgctacagcttccaggtggccagagggatggagttcctggcttcccgaaagtgcatccacagagacctggctgctcggaacattctgctgtcggaaagcgacgtggtgaagatctgtgactttggccttgcccgggacatctacaaagaccccgactacgtccgcaagggcagtgcccggctgcccctgaagtggatggcccctgaaagcatcttcgacaaggtgtacaccacgcagagtgacgtgtggtcctttggggtgcttctctgggagatcttctctctgggggcctccccgtaccctggggtgcagatcaatgaggagttctgccagcggctgagagacggcacaaggatgagggccccggagctggccactcccgccatacgccgcatcatgctgaactgctggtccggagaccccaaggcgagacctgcattctcggagctggtggagatcctgggggacctgctccagggcaggggcctgcaagaggaagaggaggtctgcatggccccgcgcagctctcagagctcagaagagggcagcttctcgcaggtgtccaccatggccctacacatcgcccaggctgacgctgaggacagcccgccaagcctgcagcgccacagcctggccgccaggtattacaactgggtgtcctttcccgggtgcctggccagaggggctgagacccgtggttcctccaggatgaagacatttgaggaattccccatgaccccaacgacctacaaaggctctgtggacaaccagacagacagtgggatggtgctggcctcggaggagtttgagcagatagagagcaggcatagacaagaaagcggcttcagctgtaaaggacctggccagaatgtggctgtgaccagggcacaccctgactcccaagggaggcggcggcggcctgagcggggggcccgaggaggccaggtgttttacaacagcgagtatggggagctgtcggagccaagcgaggaggaccactgctccccgtctgcccgcgtgactttcttcacagacaacagctactaagcagcatcggacaagacccccagcacttgggggttcaggcccggcagggcgggcagagggctggaggcccaggctgggaactcatctggttgaactctggtggcacaggagtgtcctcttccctctctgcagacttcccagctaggaagagcaggactccaggcccaaggctcccggaattccgtcaccacgactggccagggccacgctccagctgccccggcccctccccctgagattcagatgtcatttagttcagcatccgcaggtgctggtcccggggccagcacttccatgggaatgtctctttggcgacctcctttcatcacactgggtggtggcctggtccctgttttcccacgaggaatctgtgggtctgggagtcacacagtgttggaggttaaggcatacgagagcagaggtctcccaaacgccctttcctcctcaggcacacagctactctccccacgagggctggctggcctcacccacccctgcacagttgaagggaggggctgtgtttccatctcaaagaaggcatttgcagggtcctcttctgggcctgaccaaacagccaactagcccctggggtggccaccagtatgacagtattatacgctggcaacacagaggcagcccgcacacctgcgcctgggtgttgagagccatcctgcaagtctttttcaacagaacttcacagactgttagagctgctgagaagaatttgctttccgaattcagcctggaaggcgcccagggacagctgtactgagtctagatgactctgacccccgccccaggtcaaggccagcagagcagtcagtgcctctggagaaggcccttgctctcccacctggcccagactccgaggagcctgggtctggagctgccggtctggttcttccctttagagcccggatctgccacctgcggcccctcccaagccgtgaaccagctcatgagagatgaacactgtgggatccactcaggaaggctcggggctggcacaaaggaccacccagcattgccctgtgccacccagcactcagtggacattctggggacctgccttcagccttttcctgccctgtgcctgacatcagcaccctggctggtcagaatgccgccctcccagaggagcagccgagagatcccctgaaggctggaggcattctgctcaggacccctatcccagctcacagtgcccaaccatctcaccaggagaaagagccacatccccacgttaggaccacggagactgaccaccaccctgaccccccaaacccacgcaccagacgcttgcaggacaggcgccgcgcagcgggcaggggcttgcccggccgaccctcccctccccacctcccccactgcgcgttactccaggatatgccgagtgcacgtataaggtcatcttcgtcgtccccgtggacctcccccttcctctgcacgtcgtccaacgtgggactggcgtgtcaggcttccctgggaggatctggaggttgttctctgcagagaaccagcctggctcctggcgcgcacctctgctcccttctcctcactacccacccacgcatgtaccgggaaaaaaactactatgcccttctagaccatgttctgagaaaagatcgaaaatatttaacaagagataataataaatctgatgccggtctttgtgtgtgttgcgga

SEQ ID NO: 838 - DNA, 4510 bp, Homo sapiens
actttcagccccgagccgcggccgctcgggtcggacccacgcgcagcggccggagatgcagcggggcgccgcgctgtgcctgcgactgtggctctgcctgggactcctggacggcctggtgagtggctactccatgacccccccgaccttgaacatcacggaggagtcacacgtcatcgacaccggtgacagcctgtccatctcctgcaggggacagcaccccctcgagtgggcttggccaggagctcaggaggcgccagccaccggagacaaggacagcgaggacacgggggtggtgcgagactgcgagggcacagacgccaggccctactgcaaggtgttgctgctgcacgaggtacatgccaacgacacaggcagctacgtctgctactacaagtacatcaaggcacgcatcgagggcaccacggccgccagctcctacgtgttcgtgagagactttgagcagccattcatcaacaagcctgacacgctcttggtcaacaggaaggacgccatgtgggtgccctgtctggtgtccatccccggcctcaatgtcacgctgcgctcgcaaagctcggtgctgtggccagacgggcaggaggtggtgtgggatgaccggcggggcatgctcgtgtccacgccactgctgcacgatgccctgtacctgcagtgcgagaccacctggggagaccaggacttcctttccaaccccttcctggtgcacatcacaggcaacgagctctatgacatccagctgttgcccaggaagtcgctggagctgctggtaggggagaagctggtcctgaactgcaccgtgtgggctgagtttaactcaggtgtcacctttgactgggactacccagggaagcaggcagagcggggtaagtgggtgcccgagcgacgctcccagcagacccacacagaactctccagcatcctgaccatccacaacgtcagccagcacgacctgggctcgtatgtgtgcaaggccaacaacggcatccagcgatttcgggagagcaccgaggtcattgtgcatgaaaatcccttcatcagcgtcgagtggctcaaaggacccatcctggaggccacggcaggagacgagctggtgaagctgcccgtgaagctggcagcgtaccccccgcccgagttccagtggtacaaggatggaaaggcactgtccgggcgccacagtccacatgccctggtgctcaaggaggtgacagaggccagcacaggcacctacaccctcgccctgtggaactccgctgctggcctgaggcgcaacatcagcctggagctggtggtgaatgtgcccccccagatacatgagaaggaggcctcctcccccagcatctactcgcgtcacagccgccaggccctcacctgcacggcctacggggtgcccctgcctctcagcatccagtggcactggcggccctggacaccctgcaagatgtttgcccagcgtagtctccggcggcggcagcagcaagacctcatgccacagtgccgtgactggagggcggtgaccacgcaggatgccgtgaaccccatcgagagcctggacacctggaccgagtttgtggagggaaagaataagactgtgagcaagctggtgatccagaatgccaacgtgtctgccatgtacaagtgtgtggtctccaacaaggtgggccaggatgagcggctcatctacttctatgtgaccaccatccccgacggcttcaccatcgaatccaagccatccgaggagctactagagggccagccggtgctcctgagctgccaagccgacagctacaagtacgagcatctgcgctggtaccgcctcaacctgtccacgctgcacgatgcgcacgggaacccgcttctgctcgactgcaagaacgtgcatctgttcgccacccctctggccgccagcctggaggaggtggcacctggggcgcgccacgccacgctcagcctgagtatcccccgcgtcgcgcccgagcacgagggccactatgtgtgcgaagtgcaagaccggcgcagccatgacaagcactgccacaagaagtacctgtcggtgcaggccctggaagcccctcggctcacgcagaacttgaccgacctcctggtgaacgtgagcgactcgctggagatgcagtgcttggtggccggagcgcacgcgcccagcatcgtgtggtacaaagacgagaggctgctggaggaaaagtctggagtcgacttggcggactccaaccagaagctgagcatccagcgcgtgcgcgaggaggatgcgggacgctatctgtgcagcgtgtgcaacgccaagggctgcgtcaactcctccgccagcgtggccgtggaaggctccgaggataagggcagcatggagatcgtgatccttgtcggtaccggcgtcatcgctgtcttcttctgggtcctcctcctcctcatcttctgtaacatgaggaggccggcccacgcagacatcaagacgggctacctgtccatcatcatggaccccggggaggtgcctctggaggagcaatgcgaatacctgtcctacgatgccagccagtgggaattcccccgagagcggctgcacctggggagagtgctcggctacggcgccttcgggaaggtggtggaagcctccgctttcggcatccacaagggcagcagctgtgacaccgtggccgtgaaaatgctgaaagagggcgccacggccagcgagcaccgcgcgctgatgtcggagctcaagatcctcattcacatcggcaaccacctcaacgtggtcaacctcctcggggcgtgcaccaagccgcagggccccctcatggtgatcgtggagttctgcaagtacggcaacctctccaacttcctgcgcgccaagcgggacgccttcagcccctgcgcggagaagtctcccgagcagcgcggacgcttccgcgccatggtggagctcgccaggctggatcggaggcggccggggagcagcgacagggtcctcttcgcgcggttctcgaagaccgagggcggagcgaggcgggcttctccagaccaagaagctgaggacctgtggctgagcccgctgaccatggaagatcttgtctgctacagcttccaggtggccagagggatggagttcctggcttcccgaaagtgcatccacagagacctggctgctcggaacattctgctgtcggaaagcgacgtggtgaagatctgtgactttggccttgcccgggacatctacaaagaccccgactacgtccgcaagggcagtgcccggctgcccctgaagtggatggcccctgaaagcatcttcgacaaggtgtacaccacgcagagtgacgtgtggtcctttggggtgcttctctgggagatcttctctctgggggcctccccgtaccctggggtgcagatcaatgaggagttctgccagcggctgagagacggcacaaggatgagggccccggagctggccactcccgccatacgccgcatcatgctgaactgctggtccggagaccccaaggcgagacctgcattctcggagctggtggagatcctgggggacctgctccagggcaggggcctgcaagaggaagaggaggtctgcatggccccgcgcagctctcagagctcagaagagggcagcttctcgcaggtgtccaccatggccctacacatcgcccaggctgacgctgaggacagcccgccaagcctgcagcgccacagcctggccgccaggtattacaactgggtgtcctttcccgggtgcctggccagaggggctgagacccgtggttcctccaggatgaagacatttgaggaattccccatgaccccaacgacctacaaaggctctgtggacaaccagacagacagtgggatggtgctggcctcggaggagtttgagcagatagagagcaggcatagacaagaaagcggcttcaggtagctgaagcagagagagagaaggcagcatacgtcagcattttcttctctgcacttataagaaagatcaaagactttaagactttcgctatttcttctactgctatctactacaaacttcaaagaggaaccaggaggacaagaggagcatgaaagtggacaaggagtgtgaccactgaagcaccacagggaggggttaggcctccggatgactgcgggcaggcctggataatatccagcctcccacaagaagctggtggagcagagtgttccctgactcctccaaggaaagggagacgccctttcatggtctgctgagtaacaggtgccttcccagacactggcgttactgcttgaccaaagagccctcaagcggcccttatgccagcgtgacagagggctcacctcttgccttctaggtcacttctcacaatgtcccttcagcacctgaccctgtgcccaccagttattccttggtaatatgagtaatacatcaaagagtagtattaaaagctaattaatcatgtttataaaaaaaaaaaaaaaaaaaaaaaaaaaaaaa

SEQ ID NO: 839 - DNA, 4369 bp, Homo sapiens
acggcgagcgcgggcggcggcggtgacggaggcgccgctgccagggggcgtgcggcagcgcggcggcggcggcggcggcggcggcggcggaggcggcggcggcggcggcggcggcggcggctgggcctcgagcgcccgcagcccacctctcgggggcgggctcccggcgctagcagggctgaagagaagatggaggagctggtggtggaagtgcggggctccaatggcgctttctacaaggcatttgtaaaggatgttcatgaagattcaataacagttgcatttgaaaacaactggcagcctgataggcagattccatttcatgatgtcagattcccacctcctgtaggttataataaagatataaatgaaagtgatgaagttgaggtgtattccagagcaaatgaaaaagagccttgctgttggtggttagctaaagtgaggatgataaagggtgagttttatgtgatagaatatgcagcatgtgatgcaacttacaatgaaattgtcacaattgaacgtctaagatctgttaatcccaacaaacctgccacaaaagatactttccataagatcaagctggatgtgccagaagacttacggcaaatgtgtgccaaagaggcggcacataaggattttaaaaaggcagttggtgccttttctgtaacttatgatccagaaaattatcagcttgtcattttgtccatcaatgaagtcacctcaaagcgagcacatatgctgattgacatgcactttcggagtctgcgcactaagttgtctctgataatgagaaatgaagaagctagtaagcagctggagagttcaaggcagcttgcctcgagatttcatgaacagtttatcgtaagagaagatctgatgggtctagctattggtactcatggtgctaatattcagcaagctagaaaagtacctggggtcactgctattgatctagatgaagatacctgcacatttcatatttatggagaggatcaggatgcagtgaaaaaagctagaagctttctcgaatttgctgaagatgtaatacaagttccaaggaacttagtaggcaaagtaataggaaaaaatggaaagctgattcaggagattgtggacaagtcaggagttgtgagggtgaggattgaggctgaaaatgagaaaaatgttccacaagaagaggaaattatgccaccaaattcccttccttccaataattcaagggttggacctaatgccccagaagaaaaaaaacatttagatataaaggaaaacagcacccatttttctcaacctaacagtacaaaagtccagagggtgttagtggcttcatcagttgtagcaggggaatcccagaaacctgaactcaaggcttggcagggtatggtaccatttgtttttgtgggaacaaaggacagcatcgctaatgccactgttcttttggattatcacctgaactatttaaaggaagtagaccagttgcgtttggagagattacaaattgatgagcagttgcgacagattggagctagttctagaccaccaccaaatcgtacagataaggaaaaaagctatgtgactgatgatggtcaaggaatgggtcgaggtagtagaccttacagaaatagggggcacggcagacgcggtcctggatatacttcaggaactaattctgaagcatcaaatgcttctgaaacagaatctgaccacagagacgaactcagtgattggtcattagctccaacagaggaagagagggagagcttcctgcgcagaggagacggacggcggcgtggagggggaggaagaggacaaggaggaagaggacgtggaggaggcttcaaaggaaacgacgatcactcccgaacagataatcgtccacgtaatccaagagaggctaaaggaagaacaacagatggatcccttcagatcagagttgactgcaataatgaaaggagtgtccacactaaaacattacagaatacctccagtgaaggtagtcggctgcgcacgggtaaagatcgtaaccagaagaaagagaagccagacagcgtggatggtcagcaaccactcgtgaatggagtaccctaaactgcataattctgaagttatatttcctataccatttccgtaattcttattccatattagaaaactttgttaggccaaagacaaatagtaggcaagatggcacagggcatgaaatgaacacaaattatgctaagaattttttattttttggtattggccataagcaacaattttcagatttgcacaaaaagataccttaaaatttgaaacattgcttttaaaactacttagcacttcagggcagattttagttttattttctaaagtactgagcagtgatattctttgttaatttggaccattttcctgcattgggtgatcattcaccagtacattctcagtttttcttaatatatagcatttatggtaatcatattagacttctgttttcaatctcgtatagaagtcttcatgaaatgctatgtcatttcatgtcctgtgtcagtttatgttttggtccacttttccagtattttagtggaccctgaaatgtgtgtgatgtgacatttgtcattttcattagcaaaaaaagttgtatgatctgtgccttttttatatcttggcaggtaggaatattatatttggatgcagagttcagggaagataagttggaaacactaaatgttaaagatgtagcaaaccctgtcaaacattagtactttatagaagaatgcatgctttccatatttttttccttacataaacatcaggttaggcagtataaagaataggacttgtttttgtttttgttttgttgcactgaagtttgataaatagtgttattgagagagatgtgtaatttttctgtatagacaggagaagaaagaactatcttcatctgagagaggctaaaatgttttcagctaggaacaaatcttcctggtcgaaagttagtaggatatgcctgctctttggcctgatgaccaattttaacttagagctttttttttttaattttgtctgccccaagttttgtgaaatttttcatattttaatttcaagcttattttggagagataggaaggtcatttccatgtatgcataataatcctgcaaagtacaggtactttgtctaagaaacattggaagcaggttaaatgttttgtaaactttgaaatatatggtctaatgtttaagcagaattggaaaagactaagatcggttaacaaataacaacttttttttctttttttcttttgttttttgaagtgttggggtttggttttgttttttgagtcttttttttttaagtgaaatttattgaggaaaaatatgtgaaggaccttcactctaagatgttatatttttcttaaaaagtaactcctagtaggggtaccactgaatctgtacagagccgtaaaaactgaagttctgcctctgatgtattttgtgagtttgtttctttgaattttcattttacagttacttttccttgcatacaaacaagcatataaaatggcaacaaactgcacatgatttcacaaatattaaaaagtcttttaaaaagtattgccaaacattaatgttgatttctagttatttattctgggaatgtatagtatttgaaaacagaaattggtaccttgcacacatcatctgtaagctgtttggttttaaaatactgtagataattaaccaaggtagaatgaccttgtaatgtaactgctcttgggcaatattctctgtacatattagcgacaacagattggattttatgttgacatttgtttggttatagtgcaatatattttgtatgcaagcagtttcaataaagtttgatcttcctctgctaaattgatgttgatgcaatccttacaaatgattgcttttaaaattttaagctaggaaaagaaatctatagaaagtgttctgttacaaaatgtaactgttaccattggaaatttcacgtcataggaagttagcctttatctaccaactttcaagaacttgtttaataaagcgaaaaactcaaccaaatggtacaaaaccacagtgtaccattaaaatatgcactaagtctcttttttacaaaggctgtattcagcaaggcgctaacttgcttaaatgtgaattactaacttctaaaactgtactttgattcacatgttttcaaatggagttggagttcattcatattacaatatttgtgtgctaaacgtgtatgtttttcagttcaaagtcatgatgtttttaaaatcttattaaagtttcaaaaatctgaagattgtttatctagatgtaaatttttattaaaaagttgcacttatgaaaaagcaaaaaa

SEQ ID NO: 840 - DNA, 6578 bp, Homo sapiens
ctcagtggcggagcgcggctgccggtgtgcggccgggagcgatcgccgcggggcaggggcgcggcgggcaccgcgcagagcgcgcagaacagacggacggcggcggggacccgacggcggcgcctcggcactccccagactccggccagcgcccccctgccagccgcaagcacccagccccggcccaccccgggctctcgatggcccccgaggccggggcgaccctgcgcgcgccgcgccggctgtcctgggcggcgctgctgctcttggccgcgctgctccccgtcgcctcctcggcggcggcctcagttgaccacccactgaagccaaggcatgtgaaactgctgtccactaaaatgggcctgaaagtcacgtgggacccacccaaagatgctaccagtagacctgtggagcattacaacattgcctatgggaagtcactgaaaagtcttaaatacatcaaggtgaatgcggagacatactccttccttattgaggatgtggagccgggggtagtgtactttgtgctgcttactgcagaaaaccacagtggagtgagccgtcctgtttacagagctgaaagcccacctggaggtgaatggatcgagattgatggttttcccattaagggtccaggaccatttaatgaaaccgtcacagaaaaggaagtgcccaacaagcccttgcgtgtgcgtgtccggtcctcagatgacaggctgtccgttgcgtggaaggcaccacgcctgtctggagccaagagtccacgcagatcacggggttttctcctgggctacggggagagtggccggaagatgaattatgttccactgacaagagatgaacggacacacgaaattaaaaagctagcctcggaatccgtgtatgtggtctccctgcagtccatgaactctcagggccggagccaaccagtctacagggctgccctaacaaagcgaaagatttcagaagaggacgaattggatgtacctgacgacatcagcgtccgggttatgtcatctcagtctgtgcttgtgtcctgggtggatcctgttctggaaaaacagaagaaagttgttgcatcaagacagtacaccgtgcgctatcgagagaagggggaattggccaggtgggattataagcagatcgctaacaggcgtgtgctgattgagaacctgattccagacactgtgtatgaatttgcagtccgtatttcacagggtgaaagagatggcaaatggagtacgtcagtcttccaaagaacaccagaatctgcccctaccacagctcctgaaaacttgaacgtctggccagtcaatggcaaacctacagttgtcgctgcatcttgggatgcgctaccagagactgaggggaaagtgaaagaatacattctttcatacgccccggctctcaaaccatttggagcaaagtccctcacctatcctggagacactacttctgccctggtggatggtctgcagcctggggaacgctatcttttcaaaatccgggccacaaacaggagaggcctgggacctcactccaaagccttcattgtcgctatgccaacaaccagtaaggcggatgttgagcagaacacggaggacaatgggaaacccgaaaaacctgagccttcctcaccttctcccagagctccagcttcctcccaacacccctctgtgcctgcttctccccaagggagaaatgccaaggaccttcttcttgacttgaagaacaaaatattggctaatggtggggcgccccgaaaaccccagcttcgcgccaagaaggcagaggagctggatcttcagtcgacagaaatcactggggaggaggagctgggttcccgggaggactcgcccatgtcaccctcagacacccaagaccagaaacggaccctgaggccgccaagtagacacggccactcggtggttgctcccggcaggactgcagtgagggcccggatgccagcgctgccccgaagggaaggcgtagataagcctggcttttccctggccacgcagccccgcccaggggcgcccccctcggcttcggcctctcctgcccaccacgcgtccacccagggcacctctcatcgtccttccctgcctgccagcttgaatgacaacgacttggtggactcagacgaagatgagcgcgctgtgggctccctccaccccaagggcgccttcgcccagccccggccagccctgtcccccagccgccagtccccgtccagcgttctccgcgacagaagctctgtgcaccccggcgcaaagccagcctcgccggcccggaggaccccccattcaggggccgcagaggaagattccagtgcctcagccccaccctcaagactttctccaccccatgggggatcatctcggctgctgcccacccagccacacctgagctctccactttccaagggcgggaaggatggtgaggacgccccagccaccaactccaatgcgccatcacggtccaccatgtcctcctccgtctcttctcatctctcgtccaggacgcaggtctctgagggagcggaggcttctgatggtgaaagccacggtgacggcgatagggaagacggcggaaggcaggcggaggccacggcccagacgctgcgggcccggcctgcctctggacacttccatttgctcagacacaaaccctttgctgccaacgggaggtctccaagcaggttcagcattgggcggggacctcggctgcagccctccagctccccacagtcgactgtgccctcccgagcccaccccagggttccctctcactctgattcccaccctaagcttagctcaggtatccatggagacgaggaggatgagaagccgcttcctgccaccgttgtcaatgaccacgtgccttcctcctccaggcagcccatctcccggggctgggaggacttaaggagaagcccgcagagaggggccagcctgcatcggaaggaacccatcccagagaaccccaaatccacaggggcagatacacatcctcagggcaagtactcctccctggcctccaaggctcaggatgttcaacagagcacagacgcggacacggagggtcattctcccaaagcacagccagggtccacagaccgccacgcgtcccctgctcgtccgcccgcagcacggtcacagcagcatcccagtgttcccagaaggatgacacccggccgggccccacaacagcagccccctcctcccgtcgccacgtcccagcaccacccgggaccccagagcagagacgcgggtcggtcaccttcccagcccaggctctcactgacccaggccgggcggccccgccccacgtcgcagggccgctcccactcctcctcggacccttacacggcgagctccagagggatgctccccacggccctccagaaccaggacgaggatgcccagggcagctacgacgacgacagcacagaagtcgaggcccaggatgtgcgggcccccgcgcacgccgcgcgcgccaaggaggcagctgcgtcccttcccaagcaccagcaggtggagtctcccacaggcgcaggggcaggtggcgaccacaggtcccagcgcggacatgcggcctcccccgccaggcccagccgacccggcggcccccagtcccgcgcccgggtacccagcagggcagcgccggggaagtcggagcctccttccaagcggcccctgtcctccaagtcccagcagtcggtctcagccgaggacgacgaggaggaggacgcgggattttttaaaggcgggaaagaagaccttctgtcttcctctgtgccaaagtggccctcttcctccactcccaggggcggcaaagacgccgatgggagcctcgccaaggaagagagggagcctgccatcgcgcttgcccctcgcggagggagcctggctcctgtgaagcgacctctccccccacctccaggcagctcccccagggcctcccacgtcccttcccgactgccgcctcgcagcgctgccaccgtgagccccgtcgcgggcacccacccctggccgcagtacaccacgcgcgccccacctggccacttctccaccaccccgatgctgtccttgcgccagaggatgatgcatgccagattccgtaaccctctctcccgacagcctgccagaccctcttacagacaaggttataatggcagaccaaatgtagaagggaaagtccttcctggtagtaatggaaaaccgaatggacagagaattatcaatggccctcaaggaacaaagtgggttgtggaccttgatcgtgggttagtattgaatgcagaaggaaggtacctccaagattcacatggaaatcctcttcggattaaactaggaggagatggtcgaaccattgtagatctggaagggacccccgtggtgagtcctgacggcctcccactctttgggcaggggcgacatggcacacctctggccaatgcccaagataagccaattttgagtcttggaggaaagccgctggtgggcttggaggtcatcaaaaaaaccacccatccccctaccactaccatgcagcccaccactactacgacgcccctgcctaccactacaaccccgaggcccaccactgccaccacccgccgcacgaccaccacccgccgcacgaccaccaggcgtccaacaaccacagtccgaaccactacgcggacaaccaccaccaccacccccacacccaccactcccatccccacctgtccccctgggaccttggaacggcacgacgatgatggcaacctgataatgagctccaatgggatcccagagtgctacgctgaagaagatgagttctcaggcttggagactgacactgcagtacctacggaagaggcctacgttatatatgatgaagattatgaatttgagacgtcaaggccaccaaccaccactgagccttcgaccactgctaccacaccgagggtgatcccagaggaaggcgccatcagttcctttcctgaagaagaatttgatctggctggaaggaaacgatttgttgctccttacgtgacgtacctaaataaagacccatcagccccgtgctctctgactgatgcactggatcacttccaagtggacagcctggatgaaatcatccccaatgacctgaagaagagtgacctgcctccccagcatgctccccgcaacatcaccgtggtggccgtggaaggttgccactcatttgtcattgtggactgggacaaagccaccccaggagatgtggtcacaggttacttggtttacagtgcatcctatgaagacttcatcaggaacaagtggtccactcaagcttcatcagtaactcacttgcccattgagaacctaaagcccaacacgaggtattattttaaagtgcaagcacaaaatcctcatggctacggacctatcagcccttcggtctcatttgtcaccgaatcagataatcctctgcttgttgtgaggcccccaggcggtgagcctatctggatcccattcgctttcaaacatgatcccagctacacggactgccatggacggcaatatgtgaagcgcacgtggtatcgaaagttcgtgggagttgttctttgtaattcactgaggtataaaatctacctcagtgacaacctgaaagatacattctacagcattggagacagctggggaagaggtgaagaccattgccaatttgtggattcacaccttgatggaagaacagggcctcagtcctatgtagaagccctccctactattcaaggctactatcgccagtatcgtcaggagcctgtcaggtttgggaacatcggcttcggaaccccctactactatgtgggctggtacgagtgtggggtctccatccctggaaagtggtaatcacaggaccgtcatgctgcaagcttgccctgcccagccccaccaactaagtcgcactaggggctgtgagcaaagacagccagcgtgctcagccccgctgccctaggtgccaggaaggtcatagatggacactggccattctggtcatctcagtctggaactcagtcccacttcttggcctggacaatgaacaggattcagttttgctgttaactttgcttctctacttttttttgtttgtttgtaatagcacatcccagagacatcagaaaccagcaactgattcagtgtgatttccagactttttaggcatgaaattcggacacttcagtatttccaggaatagcatatgcacgctgttcttgcttcatggaatgctacatgctttctgtttttctcattttggatttctccaaaactaactgaatttaagcttcaggtccctttgtatgcagtagaaaggaattattaaaaacaccaccaaagaaaataaatatatcctacttgaaatttactctatggacttacccactgctagaataaatgtatcaaatcttatttgtaaattctcaattttgatatatatatgtatatatgcatatacatatccacacttgtctgcaagaatattgattaaaattgctaaatttgtacttgttcaccagaaaaaaaaaaaaaaaaaaaaaaaaaaaa

(The sequence listing continues in the following parts.)
